United States Patent Application Publication US 2024/0327476 A1 - sequence listing, part 40

SEQ ID NO: 72545 - DNA, 1059 bp, synthetic construct
  misc_feature 1..1059: note = Description of Artificial Sequence: Synthetic coding sequence
  source 1..1059: mol_type = other DNA
atgagaagcctgggcgccctgctgctgctgctgagcgcctgcctggccgtgagcgccggccccgtgcccaccccccccgacaacatccaggtgcaggagaacttcaacatcagcagaatctacggcaagtggtacaacctggccatcggcagcacctgcccctggctgaagaagatcatggacagaatgaccgtgagcaccctggtgctgggcgagggcgccaccgaggccgagatcagcatgaccagcaccagatggagaaagggcgtgtgcgaggagaccagcggcgcctacgagaagaccgacaccgacggcaagttcctgtaccacaagagcaagtggaacatcaccatggagagctacgtggtgcacaccaactacgacgagtacgccatcttcctgaccaagaagttcagcagacaccacggccccaccatcaccgccaagctgtacggcagagccccccagctgagagagaccctgctgcaggacttcagagtggtggcccagggcgtgggcatccccgaggacagcatcttcaccatggccgacagaggcgagtgcgtgcccggcgagcaggagcccgagcccatcctgatccccagagtgagaagagccgtgctgccccaggaggaggagggcagcggcggcggccagctggtgaccgaggtgaccaagaaggaggacagctgccagctgggctacagcgccggcccctgcatgggcatgaccagcagatacttctacaacggcaccagcatggcctgcgagaccttccagtacggcggctgcatgggcaacggcaacaacttcgtgaccgagaaggagtgcctgcagacctgcagaaccgtggccgcctgcaacctgcccatcgtgagaggcccctgcagagccttcatccagctgtgggccttcgacgccgtgaagggcaagtgcgtgctgttcccctacggcggctgccagggcaacggcaacaagttctacagcgagaaggagtgcagagagtactgcggcgtgcccggcgacggcgacgaggagctgctgagattcagcaactag

SEQ ID NO: 72546 - DNA, 813 bp, synthetic construct
  misc_feature 1..813: note = Description of Artificial Sequence: Synthetic coding sequence
  source 1..813: mol_type = other DNA
atggacagaatgaccgtgagcaccctggtgctgggcgagggcgccaccgaggccgagatcagcatgaccagcaccagatggagaaagggcgtgtgcgaggagaccagcggcgcctacgagaagaccgacaccgacggcaagttcctgtaccacaagagcaagtggaacatcaccatggagagctacgtggtgcacaccaactacgacgagtacgccatcttcctgaccaagaagttcagcagacaccacggccccaccatcaccgccaagctgtacggcagagccccccagctgagagagaccctgctgcaggacttcagagtggtggcccagggcgtgggcatccccgaggacagcatcttcaccatggccgacagaggcgagtgcgtgcccggcgagcaggagcccgagcccatcctgatccccagagtgagaagagccgtgctgccccaggaggaggagggcagcggcggcggccagctggtgaccgaggtgaccaagaaggaggacagctgccagctgggctacagcgccggcccctgcatgggcatgaccagcagatacttctacaacggcaccagcatggcctgcgagaccttccagtacggcggctgcatgggcaacggcaacaacttcgtgaccgagaaggagtgcctgcagacctgcagaaccgtgggcgagtgcggcagcccccccctgtgcgccctgcacccccaggaccccgtgccccccgtgaaccacctgagaatcgagaaggtggccaacagaggccacagcagcggcagaacccccggcggcttcctgaagagctag

SEQ ID NO: 72547 - DNA, 897 bp, synthetic construct
  misc_feature 1..897: note = Description of Artificial Sequence: Synthetic coding sequence
  source 1..897: mol_type = other DNA
atggtgagaatggtgcccgtgctgctgagcctgctgctgctgctgggccccgccgtgccccaggagaaccaggacggcagatacagcctgacctacatctacaccggcctgagcaagcacgtggaggacgtgcccgccttccaggccctgggcagcctgaacgacctgcagttcttcagatacaacagcaaggacagaaagagccagcccatgggcctgtggagacaggtggagggcatggaggactggaagcaggacagccagctgcagaaggccagagaggacatcttcatggagaccctgaaggacatcgtggagtactacaacgacagcaacggcagccacgtgctgcagggcagattcggctgcgagatcgagaacaacagaagcagcggcgccttctggaagtactactacgacggcaaggactacatcgagttcaacaaggagatccccgcctgggtgcccttcgaccccgccgcccagatcaccaagcagaagtgggaggccgagcccgtgtacgtgcagagagccaaggcctacctggaggaggagtgccccgccaccctgagaaagtacctgaagtacagcaagaacatcctggacagacaggacccccccagcgtggtggtgaccagccaccaggcccccggcgagaagaagaagctgaagtgcctggcctacgacttctaccccggcaagatcgacgtgcactggaccagagccggcgaggtgcaggagcccgagctgagaggcgacgtgctgcacaacggcaacggcacctaccagagctgggtggtggtggccgtgcccccccaggacaccgccccctacagctgccacgtgcagcacagcagcctggcccagcccctggtggtgccctgggaggccagctag

SEQ ID NO: 72548 - DNA, 1104 bp, synthetic construct
  misc_feature 1..1104: note = Description of Artificial Sequence: Synthetic coding sequence
  source 1..1104: mol_type = other DNA
atgaagagcctggtgctgctgctgtgcctggcccagctgtggggctgccacagcgccccccacggccccggcctgatctacagacagcccaactgcgacgaccccgagaccgaggaggccgccctggtggccatcgactacatcaaccagaacctgccctggggctacaagcacaccctgaaccagatcgacgaggtgaaggtgtggccccagcagcccagcggcgagctgttcgagatcgagatcgacaccctggagaccacctgccacgtgctggaccccacccccgtggccagatgcagcgtgagacagctgaaggagcacgccgtggagggcgactgcgacttccagctgctgaagctggacggcaagttcagcgtggtgtacgccaagtgcgacagcagccccgacagcgccgaggacgtgagaaaggtgtgccaggactgccccctgctggcccccctgaacgacaccagagtggtgcacgccgccaaggccgccctggccgccttcaacgcccagaacaacggcagcaacttccagctggaggagatcagcagagcccagctggtgcccctgccccccagcacctacgtggagttcaccgtgagcggcaccgactgcgtggccaaggaggccaccgaggccgccaagtgcaacctgctggccgagaagcagtacggcttctgcaaggccaccctgagcgagaagctgggcggcgccgaggtggccgtgacctgcatggtgttccagacccagcccgtgagcagccagccccagcccgagggcgccaacgaggccgtgcccacccccgtggtggaccccgacgccccccccagcccccccctgggcgcccccggcctgccccccgccggcagcccccccgacagccacgtgctgctggccgccccccccggccaccagctgcacagagcccactacgacctgagacacaccttcatgggcgtggtgagcctgggcagccccagcggcgaggtgagccaccccagaaagaccagaaccgtggtgcagcccagcgtgggcgccgccgccggccccgtggtgcccccctgccccggcagaatcagacacttcaaggtgtag

SEQ ID NO: 72549 - DNA, 1302 bp, synthetic construct
  misc_feature 1..1302: note = Description of Artificial Sequence: Synthetic coding sequence
  source 1..1302: mol_type = other DNA
atgttcgccggctgcttcttcttcctgctgaaccagagcagaaaccaccccgtgagcctgtgcaacagcagcggcagactgcagcagatcaacaaggcccaccaccccccctgggtgtacctgagccagcagagcacctgggtgggccccgaggccagcaaccacctgcacgcctgccagggcctgagcggcgccgccatgaagagcctggtgctgctgctgtgcctggcccagctgtggggctgccacagcgccccccacggccccggcctgatctacagacagcccaactgcgacgaccccgagaccgaggaggccgccctggtggccatcgactacatcaaccagaacctgccctggggctacaagcacaccctgaaccagatcgacgaggtgaaggtgtggccccagcagcccagcggcgagctgttcgagatcgagatcgacaccctggagaccacctgccacgtgctggaccccacccccgtggccagatgcagcgtgagacagctgaaggagcacgccgtggagggcgactgcgacttccagctgctgaagctggacggcaagttcagcgtggtgtacgccaagtgcgacagcagccccgacagcgccgaggacgtgagaaaggtgtgccaggactgccccctgctggcccccctgaacgacaccagagtggtgcacgccgccaaggccgccctggccgccttcaacgcccagaacaacggcagcaacttccagctggaggagatcagcagagcccagctggtgcccctgccccccagcacctacgtggagttcaccgtgagcggcaccgactgcgtggccaaggaggccaccgaggccgccaagtgcaacctgctggccgagaagcagtacggcttctgcaaggccaccctgagcgagaagctgggcggcgccgaggtggccgtgacctgcatggtgttccagacccagcccgtgagcagccagccccagcccgagggcgccaacgaggccgtgcccacccccgtggtggaccccgacgccccccccagcccccccctgggcgcccccggcctgccccccgccggcagcccccccgacagccacgtgctgctggccgccccccccggccaccagctgcacagagcccactacgacctgagacacaccttcatgggcgtggtgagcctgggcagccccagcggcgaggtgagccaccccagaaagaccagaaccgtggtgcagcccagcgtgggcgccgccgccggccccgtggtgcccccctgccccggcagaatcagacacttcaaggtgtag

SEQ ID NO: 72550 - DNA, 4425 bp, synthetic construct
  misc_feature 1..4425: note = Description of Artificial Sequence: Synthetic coding sequence
  source 1..4425: mol_type = other DNA
atgggcaagaacaagctgctgcaccccagcctggtgctgctgctgctggtgctgctgcccaccgacgccagcgtgagcggcaagccccagtacatggtgctggtgcccagcctgctgcacaccgagaccaccgagaagggctgcgtgctgctgagctacctgaacgagaccgtgaccgtgagcgccagcctggagagcgtgagaggcaacagaagcctgttcaccgacctggaggccgagaacgacgtgctgcactgcgtggccttcgccgtgcccaagagcagcagcaacgaggaggtgatgttcctgaccgtgcaggtgaagggccccacccaggagttcaagaagagaaccaccgtgatggtgaagaacgaggacagcctggtgttcgtgcagaccgacaagagcatctacaagcccggccagaccgtgaagttcagagtggtgagcatggacgagaacttccaccccctgaacgagctgatccccctggtgtacatccaggaccccaagggcaacagaatcgcccagtggcagagcttccagctggagggcggcctgaagcagttcagcttccccctgagcagcgagcccttccagggcagctacaaggtggtggtgcagaagaagagcggcggcagaaccgagcaccccttcaccgtggaggagttcgtgctgcccaagttcgaggtgcaggtgaccgtgcccaagatcatcaccatcctggaggaggagatgaacgtgagcgtgtgcggcctgtacacctacggcaagcccgtgcccggccacgtgaccgtgagcatctgcagaaagtacagcgacgccagcgactgccacggcgaggacagccaggccttctgcgagaagttcagcggccagctgaacagccacggctgcttctaccagcaggtgaagaccaaggtgttccagctgaagagaaaggagtacgagatgaagctgcacaccgaggcccagatccaggaggagggcaccgtggtggagctgaccggcagacagagcagcgagatcaccagaaccatcaccaagctgagcttcgtgaaggtggacagccacttcagacagggcatccccttcttcggccaggtgagactggtggacggcaagggcgtgcccatccccaacaaggtgatcttcatcagaggcaacgaggccaactactacagcaacgccaccaccgacgagcacggcctggtgcagttcagcatcaacaccaccaacgtgatgggcaccagcctgaccgtgagagtgaactacaaggacagaagcccctgctacggctaccagtgggtgagcgaggagcacgaggaggcccaccacaccgcctacctggtgttcagccccagcaagagcttcgtgcacctggagcccatgagccacgagctgccctgcggccacacccagaccgtgcaggcccactacatcctgaacggcggcaccctgctgggcctgaagaagctgagcttctactacctgatcatggccaagggcggcatcgtgagaaccggcacccacggcctgctggtgaagcaggaggacatgaagggccacttcagcatcagcatccccgtgaagagcgacatcgcccccgtggccagactgctgatctacgccgtgctgcccaccggcgacgtgatcggcgacagcgccaagtacgacgtggagaactgcctggccaacaaggtggacctgagcttcagccccagccagagcctgcccgccagccacgcccacctgagagtgaccgccgccccccagagcgtgtgcgccctgagagccgtggaccagagcgtgctgctgatgaagcccgacgccgagctgagcgccagcagcgtgtacaacctgctgcccgagaaggacctgaccggcttccccggccccctgaacgaccaggacaacgaggactgcatcaacagacacaacgtgtacatcaacggcatcacctacacccccgtgagcagcaccaacgagaaggacatgtacagcttcctggaggacatgggcctgaaggccttcaccaacagcaagatcagaaagcccaagatgtgcccccagctgcagcagtacgagatgcacggccccgagggcctgagagtgggcttctacgagagcgacgtgatgggcagaggccacgccagactggtgcacgtggaggagccccacaccgagaccgtgagaaagtacttccccgagacctggatctgggacctggtggtggtgaacagcgccggcgtggccgaggtgggcgtgaccgtgcccgacaccatcaccgagtggaaggccggcgccttctgcctgagcgaggacgccggcctgggcatcagcagcaccgccagcctgagagccttccagcccttcttcgtggagctgaccatgccctacagcgtgatcagaggcgaggccttcaccctgaaggccaccgtgctgaactacctgcccaagtgcatcagagtgagcgtgcagctggaggccagccccgccttcctggccgtgcccgtggagaaggagcaggccccccactgcatctgcgccaacggcagacagaccgtgagctgggccgtgacccccaagagcctgggcaacgtgaacttcaccgtgagcgccgaggccctggagagccaggagctgtgcggcaccgaggtgcccagcgtgcccgagcacggcagaaaggacaccgtgatcaagcccctgctggtggagcccgagggcctggagaaggagaccaccttcaacagcctgctgtgccccagcggcggcgaggtgagcgaggagctgagcctgaagctgccccccaacgtggtggaggagagcgccagagccagcgtgagcgtgctgggcgacatcctgggcagcgccatgcagaacacccagaacctgctgcagatgccctacggctgcggcgagcagaacatggtgctgttcgcccccaacatctacgtgctggactacctgaacgagacccagcagctgacccccgagatcaagagcaaggccatcggctacctgaacaccggctaccagagacagctgaactacaagcactacgacggcagctacagcaccttcggcgagagatacggcagaaaccagggcaacacctggctgaccgccttcgtgctgaagaccttcgcccaggccagagcctacatcttcatcgacgaggcccacatcacccaggccctgatctggctgagccagagacagaaggacaacggctgcttcagaagcagcggcagcctgctgaacaacgccatcaagggcggcgtggaggacgaggtgaccctgagcgcctacatcaccatcgccctgctggagatccccctgaccgtgacccaccccgtggtgagaaacgccctgttctgcctggagagcgcctggaagaccgcccaggagggcgaccacggcagccacgtgtacaccaaggccctgctggcctacgccttcgccctggccggcaaccaggacaagagaaaggaggtgctgaagagcctgaacgaggaggccgtgaagaaggacaacagcgtgcactgggagagaccccagaagcccaaggcccccgtgggccacttctacgagccccaggcccccagcgccgaggtggagatgaccagctacgtgctgctggcctacctgaccgcccagcccgcccccaccagcgaggacctgaccagcgccaccaacatcgtgaagtggatcaccaagcagcagaacgcccagggcggcttcagcagcacccaggacaccgtggtggccctgcacgccctgagcaagtacggcgccgccaccttcaccagaaccggcaaggccgcccaggtgaccatccagagcagcggcaccttcagcagcaagttccaggtggacaacaacaacagactgctgctgcagcaggtgagcctgcccgagctgcccggcgagtacagcatgaaggtgaccggcgagggctgcgtgtacctgcagaccagcctgaagtacaacatcctgcccgagaaggaggagttccccttcgccctgggcgtgcagaccctgccccagacctgcgacgagcccaaggcccacaccagcttccagatcagcctgagcgtgagctacaccggcagcagaagcgccagcaacatggccatcgtggacgtgaagatggtgagcggcttcatccccctgaagcccaccgtgaagatgctggagagaagcaaccacgtgagcagaaccgaggtgagcagcaaccacgtgctgatctacctggacaaggtgagcaaccagaccctgagcctgttcttcaccgtgctgcaggacgtgcccgtgagagacctgaagcccgccatcgtgaaggtgtacgactactacgagaccgacgagttcgccatcgccgagtacaacgccccctgcagcaaggacctgggcaacgcctag

SEQ ID NO: 72551 - DNA, 507 bp, synthetic construct
  misc_feature 1..507: note = Description of Artificial Sequence: Synthetic coding sequence
  source 1..507: mol_type = other DNA
atgggcaagaacaagctgctgcaccccagcctggtgctgctgctgctggtgctgctgcccaccgacgccagcgtgagcggcaagccccagtacatggtgctggtgcccagcctgctgcacaccgagaccaccgagaagggctgcgtgctgctgagctacctgaacgagaccgtgaccgtgagcgccagcctggagagcgtgagaggcaacagaagcctgttcaccgacctggaggccgagaacgacgtgctgcactgcgtggccttcgccgtgcccaagagcagcagcaacgaggaggtgatgttcctgaccgtgcaggtgaagggccccacccaggagttcaagaagagaaccaccgtgatggtgaagaacgaggacagcctggtgttcgtgcagaccgacaagagcatctacaagcccggccagaccgtgaagttcagagtggtgagcatggacgagaacttccaccccctgaacgagctgatccccctggtgtacatccagtag

SEQ ID NO: 72552 - DNA, 4470 bp, synthetic construct
  misc_feature 1..4470: note = Description of Artificial Sequence: Synthetic coding sequence
  source 1..4470: mol_type = other DNA
agagtgcagtacgtgtgcagcccccccgcccccagcttctgcaacatgggcaagaacaagctgctgcaccccagcctggtgctgctgctgctggtgctgctgcccaccgacgccagcgtgagcggcaagccccagtacatggtgctggtgcccagcctgctgcacaccgagaccaccgagaagggctgcgtgctgctgagctacctgaacgagaccgtgaccgtgagcgccagcctggagagcgtgagaggcaacagaagcctgttcaccgacctggaggccgagaacgacgtgctgcactgcgtggccttcgccgtgcccaagagcagcagcaacgaggaggtgatgttcctgaccgtgcaggtgaagggccccacccaggagttcaagaagagaaccaccgtgatggtgaagaacgaggacagcctggtgttcgtgcagaccgacaagagcatctacaagcccggccagaccgtgaagttcagagtggtgagcatggacgagaacttccaccccctgaacgagctgatccccctggtgtacatccaggaccccaagggcaacagaatcgcccagtggcagagcttccagctggagggcggcctgaagcagttcagcttccccctgagcagcgagcccttccagggcagctacaaggtggtggtgcagaagaagagcggcggcagaaccgagcaccccttcaccgtggaggagttcgtgctgcccaagttcgaggtgcaggtgaccgtgcccaagatcatcaccatcctggaggaggagatgaacgtgagcgtgtgcggcctgtacacctacggcaagcccgtgcccggccacgtgaccgtgagcatctgcagaaagtacagcgacgccagcgactgccacggcgaggacagccaggccttctgcgagaagttcagcggccagctgaacagccacggctgcttctaccagcaggtgaagaccaaggtgttccagctgaagagaaaggagtacgagatgaagctgcacaccgaggcccagatccaggaggagggcaccgtggtggagctgaccggcagacagagcagcgagatcaccagaaccatcaccaagctgagcttcgtgaaggtggacagccacttcagacagggcatccccttcttcggccaggtgagactggtggacggcaagggcgtgcccatccccaacaaggtgatcttcatcagaggcaacgaggccaactactacagcaacgccaccaccgacgagcacggcctggtgcagttcagcatcaacaccaccaacgtgatgggcaccagcctgaccgtgagagtgaactacaaggacagaagcccctgctacggctaccagtgggtgagcgaggagcacgaggaggcccaccacaccgcctacctggtgttcagccccagcaagagcttcgtgcacctggagcccatgagccacgagctgccctgcggccacacccagaccgtgcaggcccactacatcctgaacggcggcaccctgctgggcctgaagaagctgagcttctactacctgatcatggccaagggcggcatcgtgagaaccggcacccacggcctgctggtgaagcaggaggacatgaagggccacttcagcatcagcatccccgtgaagagcgacatcgcccccgtggccagactgctgatctacgccgtgctgcccaccggcgacgtgatcggcgacagcgccaagtacgacgtggagaactgcctggccaacaaggtggacctgagcttcagccccagccagagcctgcccgccagccacgcccacctgagagtgaccgccgccccccagagcgtgtgcgccctgagagccgtggaccagagcgtgctgctgatgaagcccgacgccgagctgagcgccagcagcgtgtacaacctgctgcccgagaaggacctgaccggcttccccggccccctgaacgaccaggacaacgaggactgcatcaacagacacaacgtgtacatcaacggcatcacctacacccccgtgagcagcaccaacgagaaggacatgtacagcttcctggaggacatgggcctgaaggccttcaccaacagcaagatcagaaagcccaagatgtgcccccagctgcagcagtacgagatgcacggccccgagggcctgagagtgggcttctacgagagcgacgtgatgggcagaggccacgccagactggtgcacgtggaggagccccacaccgagaccgtgagaaagtacttccccgagacctggatctgggacctggtggtggtgaacagcgccggcgtggccgaggtgggcgtgaccgtgcccgacaccatcaccgagtggaaggccggcgccttctgcctgagcgaggacgccggcctgggcatcagcagcaccgccagcctgagagccttccagcccttcttcgtggagctgaccatgccctacagcgtgatcagaggcgaggccttcaccctgaaggccaccgtgctgaactacctgcccaagtgcatcagagtgagcgtgcagctggaggccagccccgccttcctggccgtgcccgtggagaaggagcaggccccccactgcatctgcgccaacggcagacagaccgtgagctgggccgtgacccccaagagcctgggcaacgtgaacttcaccgtgagcgccgaggccctggagagccaggagctgtgcggcaccgaggtgcccagcgtgcccgagcacggcagaaaggacaccgtgatcaagcccctgctggtggagcccgagggcctggagaaggagaccaccttcaacagcctgctgtgccccagcggcggcgaggtgagcgaggagctgagcctgaagctgccccccaacgtggtggaggagagcgccagagccagcgtgagcgtgctgggcgacatcctgggcagcgccatgcagaacacccagaacctgctgcagatgccctacggctgcggcgagcagaacatggtgctgttcgcccccaacatctacgtgctggactacctgaacgagacccagcagctgacccccgagatcaagagcaaggccatcggctacctgaacaccggctaccagagacagctgaactacaagcactacgacggcagctacagcaccttcggcgagagatacggcagaaaccagggcaacacctggctgaccgccttcgtgctgaagaccttcgcccaggccagagcctacatcttcatcgacgaggcccacatcacccaggccctgatctggctgagccagagacagaaggacaacggctgcttcagaagcagcggcagcctgctgaacaacgccatcaagggcggcgtggaggacgaggtgaccctgagcgcctacatcaccatcgccctgctggagatccccctgaccgtgacccaccccgtggtgagaaacgccctgttctgcctggagagcgcctggaagaccgcccaggagggcgaccacggcagccacgtgtacaccaaggccctgctggcctacgccttcgccctggccggcaaccaggacaagagaaaggaggtgctgaagagcctgaacgaggaggccgtgaagaaggacaacagcgtgcactgggagagaccccagaagcccaaggcccccgtgggccacttctacgagccccaggcccccagcgccgaggtggagatgaccagctacgtgctgctggcctacctgaccgcccagcccgcccccaccagcgaggacctgaccagcgccaccaacatcgtgaagtggatcaccaagcagcagaacgcccagggcggcttcagcagcacccaggacaccgtggtggccctgcacgccctgagcaagtacggcgccgccaccttcaccagaaccggcaaggccgcccaggtgaccatccagagcagcggcaccttcagcagcaagttccaggtggacaacaacaacagactgctgctgcagcaggtgagcctgcccgagctgcccggcgagtacagcatgaaggtgaccggcgagggctgcgtgtacctgcagaccagcctgaagtacaacatcctgcccgagaaggaggagttccccttcgccctgggcgtgcagaccctgccccagacctgcgacgagcccaaggcccacaccagcttccagatcagcctgagcgtgagctacaccggcagcagaagcgccagcaacatggccatcgtggacgtgaagatggtgagcggcttcatccccctgaagcccaccgtgaagatgctggagagaagcaaccacgtgagcagaaccgaggtgagcagcaaccacgtgctgatctacctggacaaggtgagcaaccagaccctgagcctgttcttcaccgtgctgcaggacgtgcccgtgagagacctgaagcccgccatcgtgaaggtgtacgactactacgagaccgacgagttcgccatcgccgagtacaacgccccctgcagcaaggacctgggcaacgcctag

SEQ ID NO: 72553 - DNA, 4365 bp, synthetic construct
  misc_feature 1..4365: note = Description of Artificial Sequence: Synthetic coding sequence
  source 1..4365: mol_type = other DNA
atgtgggcccagctgctgctgggcatgctggccctgagccccgccatcgccgaggagctgcccaactacctggtgaccctgcccgccagactgaacttccccagcgtgcagaaggtgtgcctggacctgagccccggctacagcgacgtgaagttcaccgtgaccctggagaccaaggacaagacccagaagctgctggagtacagcggcctgaagaagagacacctgcactgcatcagcttcctggtgcccccccccgccggcggcaccgaggaggtggccaccatcagagtgagcggcgtgggcaacaacatcagcttcgaggagaagaagaaggtgctgatccagagacagggcaacggcaccttcgtgcagaccgacaagcccctgtacacccccggccagcaggtgtacttcagaatcgtgaccatggacagcaacttcgtgcccgtgaacgacaagtacagcatggtggagctgcaggaccccaacagcaacagaatcgcccagtggctggaggtggtgcccgagcagggcatcgtggacctgagcttccagctggcccccgaggccatgctgggcacctacaccgtggccgtggccgagggcaagaccttcggcaccttcagcgtggaggagtacgtgctgcccaagttcaaggtggaggtggtggagcccaaggagctgagcaccgtgcaggagagcttcctggtgaagatctgctgcagatacacctacggcaagcccatgctgggcgccgtgcaggtgagcgtgtgccagaaggccaacacctactggtacagagaggtggagagagagcagctgcccgacaagtgcagaaacctgagcggccagaccgacaagaccggctgcttcagcgcccccgtggacatggccaccttcgacctgatcggctacgcctacagccaccagatcaacatcgtggccaccgtggtggaggagggcaccggcgtggaggccaacgccacccagaacatctacatcagcccccagatgggcagcatgaccttcgaggacaccagcaacttctaccaccccaacttccccttcagcggcaagatcagagtgagaggccacgacgacagcttcctgaagaaccacctggtgttcctggtgatctacggcaccaacggcaccttcaaccagaccctggtgaccgacaacaacggcctggcccccttcaccctggagaccagcggctggaacggcaccgacgtgagcctggagggcaagttccagatggaggacctggtgtacaaccccgagcaggtgcccagatactaccagaacgcctacctgcacctgagacccttctacagcaccaccagaagcttcctgggcatccacagactgaacggccccctgaagtgcggccagccccaggaggtgctggtggactactacatcgaccccgccgacgccagccccgaccaggagatcagcttcagctactacctgatcggcaagggcagcctggtgatggagggccagaagcacctgaacagcaagaagaagggcctgaaggccagcttcagcctgagcctgaccttcaccagcagactggcccccgaccccagcctggtgatctacgccatcttccccagcggcggcgtggtggccgacaagatccagttcagcgtggagatgtgcttcgacaaccaggtgagcctgggcttcagccccagccagcagctgcccggcgccgaggtggagctgcagctgcaggccgcccccggcagcctgtgcgccctgagagccgtggacgagagcgtgctgctgctgagacccgacagagagctgagcaacagaagcgtgtacggcatgttccccttctggtacggccactacccctaccaggtggccgagtacgaccagtgccccgtgagcggcccctgggacttcccccagcccctgatcgaccccatgccccagggccacagcagccagagaagcatcatctggagacccagcttcagcgagggcaccgacctgttcagcttcttcagagacgtgggcctgaagatcctgagcaacgccaagatcaagaagcccgtggactgcagccacagaagccccgagtacagcaccgccatgggcgccggcggcggccaccccgaggccttcgagagcagcacccccctgcaccaggccgaggacagccaggtgagacagtacttccccgagacctggctgtgggacctgttccccatcggcaacagcggcaaggaggccgtgcacgtgaccgtgcccgacgccatcaccgagtggaaggccatgagcttctgcaccagccagagcagaggcttcggcctgagccccaccgtgggcctgaccgccttcaagcccttcttcgtggacctgaccctgccctacagcgtggtgagaggcgagagcttcagactgaccgccaccatcttcaactacctgaaggactgcatcagagtgcagaccgacctggccaagagccacgagtaccagctggagagctgggccgacagccagaccagcagctgcctgtgcgccgacgacgccaagacccaccactggaacatcaccgccgtgaagctgggccacatcaacttcaccatcagcaccaagatcctggacagcaacgagccctgcggcggccagaagggcttcgtgccccagaagggcagaagcgacaccctgatcaagcccgtgctggtgaagcccgagggcgtgctggtggagaagacccacagcagcctgctgtgccccaagggcaaggtggccagcgagagcgtgagcctggagctgcccgtggacatcgtgcccgacagcaccaaggcctacgtgaccgtgctgggcgacatcatgggcaccgccctgcagaacctggacggcctggtgcagatgcccagcggctgcggcgagcagaacatggtgctgttcgcccccatcatctacgtgctgcagtacctggagaaggccggcctgctgaccgaggagatcagaagcagagccgtgggcttcctggagatcggctaccagaaggagctgatgtacaagcacagcaacggcagctacagcgccttcggcgagagagacggcaacggcaacacctggctgaccgccttcgtgaccaagtgcttcggccaggcccagaagttcatcttcatcgaccccaagaacatccaggacgccctgaagtggatggccggcaaccagctgcccagcggctgctacgccaacgtgggcaacctgctgcacaccgccatgaagggcggcgtggacgacgaggtgagcctgaccgcctacgtgaccgccgccctgctggagatgggcaaggacgtggacgaccccatggtgagccagggcctgagatgcctgaagaacagcgccaccagcaccaccaacctgtacacccaggccctgctggcctacatcttcagcctggccggcgagatggacatcagaaacatcctgctgaagcagctggaccagcaggccatcatcagcggcgagagcatctactggagccagaagcccacccccagcagcaacgccagcccctggagcgagcccgccgccgtggacgtggagctgaccgcctacgccctgctggcccagctgaccaagcccagcctgacccagaaggagatcgccaaggccaccagcatcgtggcctggctggccaagcagcacaacgcctacggcggcttcagcagcacccaggacaccgtggtggccctgcaggccctggccaagtacgccaccaccgcctacatgcccagcgaggagatcaacctggtggtgaagagcaccgagaacttccagagaaccttcaacatccagagcgtgaacagactggtgttccagcaggacaccctgcccaacgtgcccggcatgtacaccctggaggccagcggccagggctgcgtgtacgtgcagaccgtgctgagatacaacatcctgccccccaccaacatgaagaccttcagcctgagcgtggagatcggcaaggccagatgcgagcagcccaccagccccagaagcctgaccctgaccatccacaccagctacgtgggcagcagaagcagcagcaacatggccatcgtggaggtgaagatgctgagcggcttcagccccatggagggcaccaaccagctgctgctgcagcagcccctggtgaagaaggtggagttcggcaccgacaccctgaacatctacctggacgagctgatcaagaacacccagacctacaccttcaccatcagccagagcgtgctggtgaccaacctgaagcccgccaccatcaaggtgtacgactactacctgcccgacgagcaggccaccatccagtacagcgacccctgcgagtag

SEQ ID NO: 72554 - DNA, 4365 bp, synthetic construct
  misc_feature 1..4365: note = Description of Artificial Sequence: Synthetic coding sequence
  source 1..4365: mol_type = other DNA
atgtgggcccagctgctgctgggcatgctggccctgagccccgccatcgccgaggagctgcccaactacctggtgaccctgcccgccagactgaacttccccagcgtgcagaaggtgtgcctggacctgagccccggctacagcgacgtgaagttcaccgtgaccctggagaccaaggacaagacccagaagctgctggagtacagcggcctgaagaagagacacctgcactgcatcagcttcctggtgcccccccccgccggcggcaccgaggaggtggccaccatcagagtgagcggcgtgggcaacaacatcagcttcgaggagaagaagaaggtgctgatccagagacagggcaacggcaccttcgtgcagaccgacaagcccctgtacacccccggccagcaggtgtacttcagaatcgtgaccatggacagcaacttcgtgcccgtgaacgacaaggtgagctgggaggagggccaggaccccaacagcaacagaatcgcccagtggctggaggtggtgcccgagcagggcatcgtggacctgagcttccagctggcccccgaggccatgctgggcacctacaccgtggccgtggccgagggcaagaccttcggcaccttcagcgtggaggagtacgtgctgcccaagttcaaggtggaggtggtggagcccaaggagctgagcaccgtgcaggagagcttcctggtgaagatctgctgcagatacacctacggcaagcccatgctgggcgccgtgcaggtgagcgtgtgccagaaggccaacacctactggtacagagaggtggagagagagcagctgcccgacaagtgcagaaacctgagcggccagaccgacaagaccggctgcttcagcgcccccgtggacatggccaccttcgacctgatcggctacgcctacagccaccagatcaacatcgtggccaccgtggtggaggagggcaccggcgtggaggccaacgccacccagaacatctacatcagcccccagatgggcagcatgaccttcgaggacaccagcaacttctaccaccccaacttccccttcagcggcaagatcagagtgagaggccacgacgacagcttcctgaagaaccacctggtgttcctggtgatctacggcaccaacggcaccttcaaccagaccctggtgaccgacaacaacggcctggcccccttcaccctggagaccagcggctggaacggcaccgacgtgagcctggagggcaagttccagatggaggacctggtgtacaaccccgagcaggtgcccagatactaccagaacgcctacctgcacctgagacccttctacagcaccaccagaagcttcctgggcatccacagactgaacggccccctgaagtgcggccagccccaggaggtgctggtggactactacatcgaccccgccgacgccagccccgaccaggagatcagcttcagctactacctgatcggcaagggcagcctggtgatggagggccagaagcacctgaacagcaagaagaagggcctgaaggccagcttcagcctgagcctgaccttcaccagcagactggcccccgaccccagcctggtgatctacgccatcttccccagcggcggcgtggtggccgacaagatccagttcagcgtggagatgtgcttcgacaaccaggtgagcctgggcttcagccccagccagcagctgcccggcgccgaggtggagctgcagctgcaggccgcccccggcagcctgtgcgccctgagagccgtggacgagagcgtgctgctgctgagacccgacagagagctgagcaacagaagcgtgtacggcatgttccccttctggtacggccactacccctaccaggtggccgagtacgaccagtgccccgtgagcggcccctgggacttcccccagcccctgatcgaccccatgccccagggccacagcagccagagaagcatcatctggagacccagcttcagcgagggcaccgacctgttcagcttcttcagagacgtgggcctgaagatcctgagcaacgccaagatcaagaagcccgtggactgcagccacagaagccccgagtacagcaccgccatgggcgccggcggcggccaccccgaggccttcgagagcagcacccccctgcaccaggccgaggacagccaggtgagacagtacttccccgagacctggctgtgggacctgttccccatcggcaacagcggcaaggaggccgtgcacgtgaccgtgcccgacgccatcaccgagtggaaggccatgagcttctgcaccagccagagcagaggcttcggcctgagccccaccgtgggcctgaccgccttcaagcccttcttcgtggacctgaccctgccctacagcgtggtgagaggcgagagcttcagactgaccgccaccatcttcaactacctgaaggactgcatcagagtgcagaccgacctggccaagagccacgagtaccagctggagagctgggccgacagccagaccagcagctgcctgtgcgccgacgacgccaagacccaccactggaacatcaccgccgtgaagctgggccacatcaacttcaccatcagcaccaagatcctggacagcaacgagccctgcggcggccagaagggcttcgtgccccagaagggcagaagcgacaccctgatcaagcccgtgctggtgaagcccgagggcgtgctggtggagaagacccacagcagcctgctgtgccccaagggcaaggtggccagcgagagcgtgagcctggagctgcccgtggacatcgtgcccgacagcaccaaggcctacgtgaccgtgctgggcgacatcatgggcaccgccctgcagaacctggacggcctggtgcagatgcccagcggctgcggcgagcagaacatggtgctgttcgcccccatcatctacgtgctgcagtacctggagaaggccggcctgctgaccgaggagatcagaagcagagccgtgggcttcctggagatcggctaccagaaggagctgatgtacaagcacagcaacggcagctacagcgccttcggcgagagagacggcaacggcaacacctggctgaccgccttcgtgaccaagtgcttcggccaggcccagaagttcatcttcatcgaccccaagaacatccaggacgccctgaagtggatggccggcaaccagctgcccagcggctgctacgccaacgtgggcaacctgctgcacaccgccatgaagggcggcgtggacgacgaggtgagcctgaccgcctacgtgaccgccgccctgctggagatgggcaaggacgtggacgaccccatggtgagccagggcctgagatgcctgaagaacagcgccaccagcaccaccaacctgtacacccaggccctgctggcctacatcttcagcctggccggcgagatggacatcagaaacatcctgctgaagcagctggaccagcaggccatcatcagcggcgagagcatctactggagccagaagcccacccccagcagcaacgccagcccctggagcgagcccgccgccgtggacgtggagctgaccgcctacgccctgctggcccagctgaccaagcccagcctgacccagaaggagatcgccaaggccaccagcatcgtggcctggctggccaagcagcacaacgcctacggcggcttcagcagcacccaggacaccgtggtggccctgcaggccctggccaagtacgccaccaccgcctacatgcccagcgaggagatcaacctggtggtgaagagcaccgagaacttccagagaaccttcaacatccagagcgtgaacagactggtgttccagcaggacaccctgcccaacgtgcccggcatgtacaccctggaggccagcggccagggctgcgtgtacgtgcagaccgtgctgagatacaacatcctgccccccaccaacatgaagaccttcagcctgagcgtggagatcggcaaggccagatgcgagcagcccaccagccccagaagcctgaccctgaccatccacaccagctacgtgggcagcagaagcagcagcaacatggccatcgtggaggtgaagatgctgagcggcttcagccccatggagggcaccaaccagctgctgctgcagcagcccctggtgaagaaggtggagttcggcaccgacaccctgaacatctacctggacgagctgatcaagaacacccagacctacaccttcaccatcagccagagcgtgctggtgaccaacctgaagcccgccaccatcaaggtgtacgactactacctgcccgacgagcaggccaccatccagtacagcgacccctgcgagtag

SEQ ID NO: 72555 - DNA, 3015 bp, synthetic construct
  misc_feature 1..3015: note = Description of Artificial Sequence: Synthetic coding sequence
  source 1..3015: mol_type = other DNA
agcttcctgggcatccacagactgaacggccccctgaagtgcggccagccccaggaggtgctggtggactactacatcgaccccgccgacgccagccccgaccaggagatcagcttcagctactacctgatcggcaagggcagcctggtgatggagggccagaagcacctgaacagcaagaagaagggcctgaaggccagcttcagcctgagcctgaccttcaccagcagactggcccccgaccccagcctggtgatctacgccatcttccccagcggcggcgtggtggccgacaagatccagttcagcgtggagatgtgcttcgacaaccaggtgagcctgggcttcagccccagccagcagctgcccggcgccgaggtggagctgcagctgcaggccgcccccggcagcctgtgcgccctgagagccgtggacgagagcgtgctgctgctgagacccgacagagagctgagcaacagaagcgtgtacggcatgttccccttctggtacggccactacccctaccaggtggccgagtacgaccagtgccccgtgagcggcccctgggacttcccccagcccctgatcgaccccatgccccagggccacagcagccagagaagcatcatctggagacccagcttcagcgagggcaccgacctgttcagcttcttcagagacgtgggcctgaagatcctgagcaacgccaagatcaagaagcccgtggactgcagccacagaagccccgagtacagcaccgccatgggcgccggcggcggccaccccgaggccttcgagagcagcacccccctgcaccaggccgaggacagccaggtgagacagtacttccccgagacctggctgtgggacctgttccccatcggcaacagcggcaaggaggccgtgcacgtgaccgtgcccgacgccatcaccgagtggaaggccatgagcttctgcaccagccagagcagaggcttcggcctgagccccaccgtgggcctgaccgccttcaagcccttcttcgtggacctgaccctgccctacagcgtggtgagaggcgagagcttcagactgaccgccaccatcttcaactacctgaaggactgcatcagagtgcagaccgacctggccaagagccacgagtaccagctggagagctgggccgacagccagaccagcagctgcctgtgcgccgacgacgccaagacccaccactggaacatcaccgccgtgaagctgggccacatcaacttcaccatcagcaccaagatcctggacagcaacgagccctgcggcggccagaagggcttcgtgccccagaagggcagaagcgacaccctgatcaagcccgtgctggtgaagcccgagggcgtgctggtggagaagacccacagcagcctgctgtgccccaagggcaaggtggccagcgagagcgtgagcctggagctgcccgtggacatcgtgcccgacagcaccaaggcctacgtgaccgtgctgggcgacatcatgggcaccgccctgcagaacctggacggcctggtgcagatgcccagcggctgcggcgagcagaacatggtgctgttcgcccccatcatctacgtgctgcagtacctggagaaggccggcctgctgaccgaggagatcagaagcagagccgtgggcttcctggagatcggctaccagaaggagctgatgtacaagcacagcaacggcagctacagcgccttcggcgagagagacggcaacggcaacacctggctgaccgccttcgtgaccaagtgcttcggccaggcccagaagttcatcttcatcgaccccaagaacatccaggacgccctgaagtggatggccggcaaccagctgcccagcggctgctacgccaacgtgggcaacctgctgcacaccgccatgaagggcggcgtggacgacgaggtgagcctgaccgcctacgtgaccgccgccctgctggagatgggcaaggacgtggacgaccccatggtgagccagggcctgagatgcctgaagaacagcgccaccagcaccaccaacctgtacacccaggccctgctggcctacatcttcagcctggccggcgagatggacatcagaaacatcctgctgaagcagctggaccagcaggccatcatcagcggcgagagcatctactggagccagaagcccacccccagcagcaacgccagcccctggagcgagcccgccgccgtggacgtggagctgaccgcctacgccctgctggcccagctgaccaagcccagcctgacccagaaggagatcgccaaggccaccagcatcgtggcctggctggccaagcagcacaacgcctacggcggcttcagcagcacccaggacaccgtggtggccctgcaggccctggccaagtacgccaccaccgcctacatgcccagcgaggagatcaacctggtggtgaagagcaccgagaacttccagagaaccttcaacatccagagcgtgaacagactggtgttccagcaggacaccctgcccaacgtgcccggcatgtacaccctggaggccagcggccagggctgcgtgtacgtgcagaccgtgctgagatacaacatcctgccccccaccaacatgaagaccttcagcctgagcgtggagatcggcaaggccagatgcgagcagcccaccagccccagaagcctgaccctgaccatccacaccagctacgtgggcagcagaagcagcagcaacatggccatcgtggaggtgaagatgctgagcggcttcagccccatggagggcaccaaccagctgctgctgcagcagcccctggtgaagaaggtggagttcggcaccgacaccctgaacatctacctggacgagctgatcaagaacacccagacctacaccttcaccatcagccagagcgtgctggtgaccaacctgaagcccgccaccatcaaggtgtacgactactacctgcccgacgagcaggccaccatccagtacagcgacccctgcgagtag

SEQ ID NO: 72556 - DNA, 1830 bp, synthetic construct
  misc_feature 1..1830: note = Description of Artificial Sequence: Synthetic coding sequence
  source 1..1830: mol_type = other DNA
atgaagtgggtggagagcatcttcctgatcttcctgctgaacttcaccgagagcagaaccctgcacagaaacgagtacggcatcgccagcatcctggacagctaccagtgcaccgccgagatcagcctggccgacctggccaccatcttcttcgcccagttcgtgcaggaggccacctacaaggaggtgagcaagatggtgaaggacgccctgaccgccatcgagaagcccaccggcgacgagcagagcagcggctgcctggagaaccagctgcccgccttcctggaggagctgtgccacgagaaggagatcctggagaagtacggccacagcgactgctgcagccagagcgaggagggcagacacaactgcttcctggcccacaagaagcccacccccgccagcatccccctgttccaggtgcccgagcccgtgaccagctgcgaggcctacgaggaggacagagagaccttcatgaacaagttcatctacgagatcgccagaagacaccccttcctgtacgcccccaccatcctgctgtgggccgccagatacgacaagatcatccccagctgctgcaaggccgagaacgccgtggagtgcttccagaccaaggccgccaccgtgaccaaggagctgagagagagcagcctgctgaaccagcacgcctgcgccgtgatgaagaacttcggcaccagaaccttccaggccatcaccgtgaccaagctgagccagaagttcaccaaggtgaacttcaccgagatccagaagctggtgctggacgtggcccacgtgcacgagcactgctgcagaggcgacgtgctggactgcctgcaggacggcgagaagatcatgagctacatctgcagccagcaggacaccctgagcaacaagatcaccgagtgctgcaagctgaccaccctggagagaggccagtgcatcatccacgccgagaacgacgagaagcccgagggcctgagccccaacctgaacagattcctgggcgacagagacttcaaccagttcagcagcggcgagaagaacatcttcctggccagcttcgtgcacgagtacagcagaagacacccccagctggccgtgagcgtgatcctgagagtggccaagggctaccaggagctgctggagaagtgcttccagaccgagaaccccctggagtgccaggacaagggcgaggaggagctgcagaagtacatccaggagagccaggccctggccaagagaagctgcggcctgttccagaagctgggcgagtactacctgcagaacgccttcctggtggcctacaccaagaaggccccccagctgaccagcagcgagctgatggccatcaccagaaagatggccgccaccgccgccacctgctgccagctgagcgaggacaagctgctggcctgcggcgagggcgccgccgacatcatcatcggccacctgtgcatcagacacgagatgacccccgtgaaccccggcgtgggccagtgctgcaccagcagctacgccaacagaagaccctgcttcagcagcctggtggtggacgagacctacgtgccccccgccttcagcgacgacaagttcatcttccacaaggacctgtgccaggcccagggcgtggccctgcagaccatgaagcaggagttcctgatcaacctggtgaagcagaagccccagatcaccgaggagcagctggaggccgtgatcgccgacttcagcggcctgctggagaagtgctgccagggccaggagcaggaggtgtgcttcgccgaggagggccagaagctgatcagcaagaccagagccgccctgggcgtgtag

SEQ ID NO: 72557 - DNA, 3735 bp, synthetic construct
  misc_feature 1..3735: note = Description of Artificial Sequence: Synthetic coding sequence
  source 1..3735: mol_type = other DNA
atgaacaaccagaaggtggtggccgtgctgctgcaggagtgcaagcaggtgctggaccagctgctgctggaggcccccgacgtgagcgaggaggacaagagcgaggaccagagatgcagagccctgctgcccagcgagctgagaaccctgatccaggaggccaaggagatgaagtggcccttcgtgcccgagaagtggcagtacaagcaggccgtgggccccgaggacaagaccaacctgaaggacgtgatcggcgccggcctgcagcagctgctggccagcctgagagccagcatcctggccagagactgcgccgccgccgccgccatcgtgttcctggtggacagattcctgtacggcctggacgtgagcggcaagctgctgcaggtggccaagggcctgcacaagctgcagcccgccacccccatcgccccccaggtggtgatcagacaggccagaatcagcgtgaacagcggcaagctgctgaaggccgagtacatcctgagcagcctgatcagcaacaacggcgccaccggcacctggctgtacagaaacgagagcgacaaggtgctggtgcagagcgtgtgcatccagatcagaggccagatcctgcagaagctgggcatgtggtacgaggccgccgagctgatctgggccagcatcgtgggctacctggccctgccccagcccgacaagaagggcctgagcaccagcctgggcatcctggccgacatcttcgtgagcatgagcaagaacgactacgagaagttcaagaacaacccccagatcaacctgagcctgctgaaggagttcgaccaccacctgctgagcgccgccgaggcctgcaagctggccgccgccttcagcgcctacacccccctgttcgtgctgaccgccgtgaacatcagaggcacctgcctgctgagctacagcagcagcaacgactgcccccccgagctgaagaacctgcacctgtgcgaggccaaggaggccttcgagatcggcctgctgaccaagagagacgacgagcccgtgaccggcaagcaggagctgcacagcttcgtgaaggccgccttcggcctgaccaccgtgcacagaagactgcacggcgagaccggcaccgtgcacgccgccagccagctgtgcaaggaggccatgggcaagctgtacaacttcagcaccagcagcagaagccaggacagagaggccctgagccaggaggtgatgagcgtgatcgcccaggtgaaggagcacctgcaggtgcagagcttcagcaacgtggacgacagaagctacgtgcccgagagcttcgagtgcagactggacaagctgatcctgcacggccagggcgacttccagaagatcctggacacctacagccagcaccacaccagcgtgtgcgaggtgttcgagagcgactgcggcaacaacaagaacgagcagaaggacgccaagaccggcgtgtgcatcaccgccctgaagaccgagatcaagaacatcgacaccgtgagcaccacccaggagaagccccactgccagagagacaccggcatcagcagcagcctgatgggcaagaacgtgcagagagagctgagaagaggcggcagaagaaactggacccacagcgacgccttcagagtgagcctggaccaggacgtggagaccgagaccgagcccagcgactacagcaacggcgagggcgccgtgttcaacaagagcctgagcggcagccagaccagcagcgcctggagcaacctgagcggcttcagcagcagcgccagctgggaggaggtgaactaccacgtggacgacagaagcgccagaaaggagcccggcaaggagcacctggtggacacccagtgcagcaccgccctgagcgaggagctggagaacgacagagagggcagagccatgcacagcctgcacagccagctgcacgacctgagcctgcaggagcccaacaacgacaacctggagcccagccagaaccagccccagcagcagatgcccctgacccccttcagcccccacaacacccccggcatcttcctggcccccggcgccggcctgctggagggcgcccccgagggcatccaggaggtgagaaacatgggccccagaaacaccagcgcccacagcagacccagctacagaagcgccagctggagcagcgacagcggcagacccaagaacatgggcacccaccccagcgtgcagaaggaggaggccttcgagatcatcgtggagttccccgagaccaactgcgacgtgaaggacagacagggcaaggagcagggcgaggagatcagcgagagaggcgccggccccaccttcaaggccagccccagctgggtggaccccgagggcgagaccgccgagagcaccgaggacgcccccctggacttccacagagtgctgcacaacagcctgggcaacatcagcatgctgccctgcagcagcttcacccccaactggcccgtgcagaaccccgacagcagaaagagcggcggccccgtggccgagcagggcatcgaccccgacgccagcaccgtggacgaggagggccagctgctggacagcatggacgtgccctgcaccaacggccacggcagccacagactgtgcatcctgagacagccccccggccagagagccgagacccccaacagcagcgtgagcggcaacatcctgttccccgtgctgagcgaggactgcaccaccaccgaggagggcaaccagcccggcaacatgctgaactgcagccagaacagcagcagcagcagcgtgtggtggctgaagagccccgccttcagcagcggcagcagcgagggcgacagcccctggagctacctgaacagcagcggcagcagctgggtgagcctgcccggcaagatgagaaaggagatcctggaggccagaaccctgcagcccgacgacttcgagaagctgctggccggcgtgagacacgactggctgttccagagactggagaacaccggcgtgttcaagcccagccagctgcacagagcccacagcgccctgctgctgaagtacagcaagaagagcgagctgtggaccgcccaggagaccatcgtgtacctgggcgactacctgaccgtgaagaagaagggcagacagagaaacgccttctgggtgcaccacctgcaccaggaggagatcctgggcagatacgtgggcaaggactacaaggagcagaagggcctgtggcaccacttcaccgacgtggagagacagatgaccgcccagcactacgtgaccgagttcaacaagagactgtacgagcagaacatccccacccagatcttctacatccccagcaccatcctgctgatcctggaggacaagaccatcaagggctgcatcagcgtggagccctacatcctgggcgagttcgtgaagctgagcaacaacaccaaggtggtgaagaccgagtacaaggccaccgagtacggcctggcctacggccacttcagctacgagttcagcaaccacagagacgtggtggtggacctgcagggctgggtgaccggcaacggcaagggcctgatctacctgaccgacccccagatccacagcgtggaccagaaggtgttcaccaccaacttcggcaagagaggcatcttctacttcttcaacaaccagcacgtggagtgcaacgagatctgccacagactgagcctgaccagacccagcatggagaagccctgcacctag

SEQ ID NO: 72558 - DNA, 429 bp, synthetic construct
  misc_feature 1..429: note = Description of Artificial Sequence: Synthetic coding sequence
  source 1..429: mol_type = other DNA
atgaacaaccagaaggtggtggccgtgctgctgcaggagtgcaaggccctgctgcccagcgagctgagaaccctgatccaggaggccaaggagatgaagtggcccttcgtgcccgagaagtggcagtacaagcaggccgtgggccccgaggacaagaccaacctgaaggacgtgatcggcgccggcctgcagcagctgctggccagcctgagagccagcatcctggccagagactgcgccgccgccgccgccatcgtgttcctggtggacagattcctgtacggcctggacgtgagcggcaagctgctgcaggtggccaagggcctgcacaagctgcagcccgccacccccatcgccccccaggtggtgatcagacaggccagaatcagcgtgaacagcggcagccaccccgccaagcacagcatgtag

SEQ ID NO: 72559 - DNA, 3735 bp, synthetic construct; identical to SEQ ID NO: 72557
  misc_feature 1..3735: note = Description of Artificial Sequence: Synthetic coding sequence
  source 1..3735: mol_type = other DNA

SEQ ID NO: 72560 - DNA, 3501 bp, synthetic construct
  misc_feature 1..3501: note = Description of Artificial Sequence: Synthetic coding sequence
  source 1..3501: mol_type = other DNA
atgtgcagaaagagaaccagagccagaaccagcgccgccgaggccagcctgagagccagcatcctggccagagactgcgccgccgccgccgccatcgtgttcctggtggacagattcctgtacggcctggacgtgagcggcaagctgctgcaggtggccaagggcctgcacaagctgcagcccgccacccccatcgccccccaggtggtgatcagacaggccagaatcagcgtgaacagcggcaagctgctgaaggccgagtacatcctgagcagcctgatcagcaacaacggcgccaccggcacctggctgtacagaaacgagagcgacaaggtgctggtgcagagcgtgtgcatccagatcagaggccagatcctgcagaagctgggcatgtggtacgaggccgccgagctgatctgggccagcatcgtgggctacctggccctgccccagcccgacaagaagggcctgagcaccagcctgggcatcctggccgacatcttcgtgagcatgagcaagaacgactacgagaagttcaagaacaacccccagatcaacctgagcctgctgaaggagttcgaccaccacctgctgagcgccgccgaggcctgcaagctggccgccgccttcagcgcctacacccccctgttcgtgctgaccgccgtgaacatcagaggcacctgcctgctgagctacagcagcagcaacgactgcccccccgagctgaagaacctgcacctgtgcgaggccaaggaggccttcgagatcggcctgctgaccaagagagacgacgagcccgtgaccggcaagcaggagctgcacagcttcgtgaaggccgccttcggcctgaccaccgtgcacagaagactgcacggcgagaccggcaccgtgcacgccgccagccagctgtgcaaggaggccatgggcaagctgtacaacttcagcaccagcagcagaagccaggacagagaggccctgagccaggaggtgatgagcgtgatcgcccaggtgaaggagcacctgcaggtgcagagcttcagcaacgtggacgacagaagctacgtgcccgagagcttcgagtgcagactggacaagctgatcctgcacggccagggcgacttccagaagatcctggacacctacagccagcaccacaccagcgtgtgcgaggtgttcgagagcgactgcggcaacaacaagaacgagcagaaggacgccaagaccggcgtgtgcatcaccgccctgaagaccgagatcaagaacatcgacaccgtgagcaccacccaggagaagccccactgccagagagacaccggcatcagcagcagcctgatgggcaagaacgtgcagagagagctgagaagaggcggcagaagaaactggacccacagcgacgccttcagagtgagcctggaccaggacgtggagaccgagaccgagcccagcgactacagcaacggcgagggcgccgtgttcaacaagagcctgagcggcagccagaccagcagcgcctggagcaacctgagcggcttcagcagcagcgccagctgggaggaggtgaactaccacgtggacgacagaagcgccagaaaggagcccggcaaggagcacctggtggacacccagtgcagcaccgccctgagcgaggagctggagaacgacagagagggcagagccatgcacagcctgcacagccagctgcacgacctgagcctgcaggagcccaacaacgacaacctggagcccagccagaaccagccccagcagcagatgcccctgacccccttcagcccccacaacacccccggcatcttcctggcccccggcgccggcctgctggagggcgcccccgagggcatccaggaggtgagaaacatgggccccagaaacaccagcgcccacagcagacccagctacagaagcgccagctggagcagcgacagcggcagacccaagaacatgggcacccaccccagcgtgcagaaggaggaggccttcgagatcatcgtggagttccccgagaccaactgcgacgtgaaggacagacagggcaaggagcagggcgaggagatcagcgagagaggcgccggccccaccttcaaggccagccccagctgggtggaccccgagggcgagaccgccgagagcaccgaggacgcccccctggacttccacagagtgctgcacaacagcctgggcaacatcagcatgctgccctgcagcagcttcacccccaactggcccgtgcagaaccccgacagcagaaagagcggcggccccgtggccgagcagggcatcgaccccgacgccagcaccgtggacgaggagggccagctgctggacagcatggacgtgccctgcaccaacggccacggcagccacagactgtgcatcctgagacagccccccggccagagagccgagacccccaacagcagcgtgagcggcaacatcctgttccccgtgctgagcgaggactgcaccaccaccgaggagggcaaccagcccggcaacatgctgaactgcagccagaacagcagcagcagcagcgtgtggtggctgaagagccccgccttcagcagcggcagcagcgagggcgacagcccctggagctacctgaacagcagcggcagcagctgggtgagcctgcccggcaagatgagaaaggagatcctggaggccagaaccctgcagcccgacgacttcgagaagctgctggccggcgtgagacacgactggctgttccagagactggagaacaccggcgtgttcaagcccagccagctgcacagagcccacagcgccctgctgctgaagtacagcaagaagagcgagctgtggaccgcccaggagaccatcgtgtacctgggcgactacctgaccgtgaagaagaagggcagacagagaaacgccttctgggtgcaccacctgcaccaggaggagatcctgggcagatacgtgggcaaggactacaaggagcagaagggcctgtggcaccacttcaccgacgtggagagacagatgaccgcccagcactacgtgaccgagttcaacaagagactgtacgagcagaacatccccacccagatcttctacatccccagcaccatcctgctgatcctggaggacaagaccatcaagggctgcatcagcgtggagccctacatcctgggcgagttcgtgaagctgagcaacaacaccaaggtggtgaagaccgagtacaaggccaccgagtacggcctggcctacggccacttcagctacgagttcagcaaccacagagacgtggtggtggacctgcagggctgggtgaccggcaacggcaagggcctgatctacctgaccgacccccagatccacagcgtggaccagaaggtgttcaccaccaacttcggcaagagaggcatcttctacttcttcaacaaccagcacgtggagtgcaacgagatctgccacagactgagcctgaccagacccagcatggagaagccctgcacctag

SEQ ID NO: 72561 - DNA, 1149 bp, synthetic construct
  misc_feature 1..1149: note = Description of Artificial Sequence: Synthetic coding sequence
  source 1..1149: mol_type = other DNA
atggccctgcagggcatcagcgtggtggagctgagcggcctggcccccggccccttctgcgccatggtgctggccgacttcggcgccagagtggtgagagtggacagacccggcagcagatacgacgtgagcagactgggcagaggcaagagaagcctggtgctggacctgaagcagcccagaggcgccgccgtgctgagaagactgtgcaagagaagcgacgtgctgctggagcccttcagaagaggcgtgatggagaagctgcagctgggccccgagatcctgcagagagagaaccccagactgatctacgccagactgagcggcttcggccagagcggcagcttctgcagactggccggccacgacatcaactacctggccctgagcggcgtgctgagcaagatcggcagaagcggcgagaacccctacgcccccctgaacctgctggccgacttcgccggcggcggcctgatgtgcgccctgggcatcatcatggccctgttcgacagaaccagaaccggcaagggccaggtgatcgacgccaacatggtggagggcaccgcctacctgagcagcttcctgtggaagacccagaagctgagcctgtgggaggcccccagaggccagaacatgctggacggcggcgcccccttctacaccacctacagaaccgccgacggcgagttcatggccgtgggcgccatcgagccccagttctacgagctgctgatcaagggcctgggcctgaagagcgacgagctgcccaaccagatgagcatggacgactggcccgagatgaagaagaagttcgccgacgtgttcgccgagaagaccaaggccgagtggtgccagatcttcgacggcaccgacgcctgcgtgacccccgtgctgaccttcgaggaggtggtgcaccacgaccacaacaaggagagaggcagcttcatcaccagcgaggagcaggacgtgagccccagacccgcccccctgctgctgaacacccccgccatccccagcttcaagagagaccccttcatcggcgagcacaccgaggagatcctggaggagttcggcttcagcagagaggagatctaccagctgaacagcgacaagatcatcgagagcaacaaggtgaaggccagcctgtag

SEQ ID NO: 72562 - DNA, 597 bp, synthetic construct
  misc_feature 1..597: note = Description of Artificial Sequence: Synthetic coding sequence
  source 1..597: mol_type = other DNA
atggccctgcagggcatcagcgtggtggagctgagcggcctggcccccggccccttctgcgccatggtgctggccgacttcggcgccagagtggtgagagtggacagacccggcagcagatacgacgtgagcagactgggcagaggcaagagaagcctggtgctggacctgaagcagcccagaggcgccgccgtgctgagaagactgtgcaagagaagcgacgtgctgctggagcccttcagaagaggcgtgatggagaagctgcagctgggccccgagatcctgcagagagagaaccccagactgatctacgccagactgagcggcttcggccagagcggcagcttctgcagactggccggccacgacatcaactacctggccctgagcggcggcagaaacagcatcttcaagttcttcagcgtggagaacagcgagatcgagagcgtgggcagcaccagcagaaccgagcacgtgggctggtggagcaccttcctgtacgacctgcaggacagcagatggggcatccacggctgctggagcaacagaacccccgtgctgagagccgccgaccagagaacctggaccaaggtgtag

SEQ ID NO: 72563 - DNA, 690 bp, synthetic construct
  misc_feature 1..690: note = Description of Artificial Sequence: Synthetic coding sequence
  source 1..690: mol_type = other DNA
atggccctgcagggcatcagcgtggtggagctgagcggcctggcccccggccccttctgcgccatggtgctggccgacttcggcgccagagtggtgagagtggacagacccggcagcagatacgacgtgagcagactgggcagaggcaagagaagcctggtgctggacctgaagcagcccagaggcgccgccgtgctgagaagactgtgcaagagaagcgacgtgctgctggagcccttcagaagaggcgtgatggagaagctgcagctgggccccgagatcctgcagagagagaaccccagactgatctacgccagactgagcggcttcggccagagcggcagcttctgcagactggccggccacgacatcaactacctggccctgagcggcggcagaaacagcatcttcaagttcttcagcgtggagaacagcgagatcgagagcgtgggcagcaccagcagaaccgagcacgtgggctggtggagcaccttcctgtacgacctgcaggacagcagatggggcatccacggctgctggagcaacagaacccccgtgctgagagccgccgaccagagaagcctgatcccctacttcaacctgtacctgcagttcctgaacatcagcatgcagaacctgttcaaggtgcacaccctgctgagaccctgctacttcctgggccagaagtag

SEQ ID NO: 72564 - DNA, 1185 bp, synthetic construct
  misc_feature 1..1185: note = Description of Artificial Sequence: Synthetic coding sequence
  source 1..1185: mol_type = other DNA
atggccctgcagggcatcagcgtggtggagctgagcggcctggcccccggccccttctgcgccatggtgctggccgacttcggcgccagagtggtgagagtggacagacccggcagcagatacgacgtgagcagactgggcagaggcaagagaagcctggtgctggacctgaagcagcccagaggcgccgccgtgctgagaagactgtgcaagagaagcgacgtgctgctggagcccttcagaagaggcgtgatggagaagctgcagctgggccccgagatcctgcagagagagaaccccagactgatctacgccagactgagcggcttcggccagagcggcagcttctgcagactggccggccacgacatcaactacctggccctgagcggcgtgctgagcaagatcggcagaagcggcgagaacccctacgcccccctgaacctgctggccgacttcgccggcggcggcctgatgtgcgccctgggcatcatcatggccctgttcgacagaaccagaaccggcaagggccaggtgatcgacgccaacatggtggagggcaccgcctacctgagcagcttcctgtggaagacccagaagctgagcctgtgggaggcccccagaggccagaacatgctggacggcggcgcccccttctacaccacctacagaaccgccgacggcgagttcatggccgtgggcgccatcgagccccagttctacgagctgctgatcaagggcctgggcctgaagagcgacgagctgcccaaccagatgagcatggacgactggcccgagatgaagaagaagttcgccgacgtgttcgccgagaagaccaaggccgagtggtgccagatcttcgacggcaccgacgcctgcgtgacccccgtgctgaccttcgaggaggtggtgcaccacgaccacaacaaggagagaggcagcttcatcaccagcgaggagcaggacgtgagccccagacccgcccccctgctgctgaacacccccgccatccccagcttcaagagagaccccttcatcggcgagcacaccgaggagatcctggaggagttcggcttcagcagagaggagatctaccagctgaacagcgacaagatcatcgagagcaacaaggccggcagcaagttctggatcctgtaccccacccacagcaacatccagaagtag

SEQ ID NO: 72565 - DNA, 1002 bp, synthetic construct
  misc_feature 1..1002: note = Description of Artificial Sequence: Synthetic coding sequence
  source 1..1002: mol_type = other DNA
atggccgccggctgctgcggcgtgaagaagcagaagctgagcagcagcccccccagcggcagcggcggcggcggcggcgccagcagcagcagccactgcagcggcgagagccagtgcagagccggcgagctgggcctgggcggcgccggcaccagactgaacggcctgggcggcctgaccggcggcggcagcggcagcggctgcaccctgagccccccccagggctgcggcggcggcggcggcggcatcgccctgagccccccccccagctgcggcgtgggcaccctgctgagcacccccgccgccgccaccagcagcagccccagcagcagcagcgccgccagcagcagcagccccggcagcagaaagatggtggtgagcgccgagatgtgctgcttctgcttcgacgtgctgtactgccacctgtacggctaccagcagcccagaacccccagattcaccaacgagccctaccccctgttcgtgacctggaagatcggcagagacaagagactgagaggctgcatcggcaccttcagcgccatgaacctgcacagcggcctgagagagtacaccctgaccagcgccctgaaggacagcagattcccccccatgaccagagacgagctgcccagactgttctgcagcgtgagcctgctgaccaacttcgaggacgtgtgcgactacctggactgggaggtgggcgtgcacggcatcagaatcgagttcatcaacgagaagggcagcaagagaaccgccacctacctgcccgaggtggccaaggagcagggctgggaccacatccagaccatcgacagcctgctgagaaagggcggctacaaggcccccatcaccaacgagttcagaaagaccatcaagctgaccagatacagaagcgagaagatgaccctgagctacgccgagtacctggcccacagacagcaccaccacttccagaacggcatcggccaccccctgcccccctacaaccactacagctag

SEQ ID NO: 72566 - DNA, 633 bp, synthetic construct
  misc_feature 1..633: note = Description of Artificial Sequence: Synthetic coding sequence
  source 1..633: mol_type = other DNA
atggtggtgagcgccgagatgtgctgcttctgcttcgacgtgctgtactgccacctgtacggctaccagcagcccagaacccccagattcaccaacgagccctaccccctgttcgtgacctggaagatcggcagagacaagagactgagaggctgcatcggcaccttcagcgccatgaacctgcacagcggcctgagagagtacaccctgaccagcgccctgaaggacagcagattcccccccatgaccagagacgagctgcccagactgttctgcagcgtgagcctgctgaccaacttcgaggacgtgtgcgactacctggactgggaggtgggcgtgcacggcatcagaatcgagttcatcaacgagaagggcagcaagagaaccgccacctacctgcccgaggtggccaaggagcagggctgggaccacatccagaccatcgacagcctgctgagaaagggcggctacaaggcccccatcaccaacgagttcagaaagaccatcaagctgaccagatacagaagcgagaagatgaccctgagctacgccgagtacctggcccacagacagcaccaccacttccagaacggcatcggccaccccctgcccccctacaaccactacagctag

SEQ ID NO: 72567 - DNA, 891 bp, synthetic construct
  misc_feature 1..891: note = Description of Artificial Sequence: Synthetic coding sequence
  source 1..891: mol_type = other DNA
atggccgccggctgctgcggcgtgaagaagcagaagctgagcagcagcccccccagcggcagcggcggcggcggcggcgccagcagcagcagccactgcagcggcgagagccagtgcagagccggcgagctgggcctgggcggcgccggcaccagactgaacggcctgggcggcctgaccggcggcggcagcggcagcggctgcaccctgagccccccccagggctgcggcggcggcggcggcggcatcgccctgagccccccccccagctgcggcgtgggcaccctgctgagcacccccgccgccgccaccagcagcagccccagcagcagcagcgccgccagcagcagcagccccggcagcagaaagatggtggtgagcgccgagatgtgctgcttctgcttcgacgtgctgtactgccacctgtacggctaccagcagcccagaacccccagattcaccaacgagccctacgccctgaaggacagcagattcccccccatgaccagagacgagctgcccagactgttctgcagcgtgagcctgctgaccaacttcgaggacgtgtgcgactacctggactgggaggtgggcgtgcacggcatcagaatcgagttcatcaacgagaagggcagcaagagaaccgccacctacctgcccgaggtggccaaggagcagggctgggaccacatccagaccatcgacagcctgctgagaaagggcggctacaaggcccccatcaccaacgagttcagaaagaccatcaagctgaccagatacagaagcgagaagatgaccctgagctacgccgagtacctggcccacagacagcaccaccacttccagaacggcatcggccaccccctgcccccctacaaccactacagctag

SEQ ID NO: 72568 - DNA, 2862 bp, synthetic construct
  misc_feature 1..2862: note = Description of Artificial Sequence: Synthetic coding sequence
  source 1..2862: mol_type = other DNA
atgtgcaaccccgaggaggccgccctgctgagactggaggaggtgttcagcgccaccctggcccacgtgaacagcctggtgctgcagcccctgctgcccgccgcccccgaccccagcgacccctggggcagagagtgcctgagactgctgcagcagctgcacaagagcagccagcagctgtgggaggtgaccgaggagagcctgcacagcctgcaggagagactgagataccccgacagcaccggcctggagagcctgctgctgctgagaggcgccgacagagtgctgcaggcccacatcgagtacatcgagagctacaccagctgcatggtggtgcaggccttccagaaggccgccaagagaagaagcgagtactggagaggccagagaaaggccctgagacagctgctgagcggcgtgagcagcgagggcagcgtgggcgccagcctgggccaggccctgcaccagcccctggcccaccacgtgcagcagtacgtgctgctgctgctgagcctgggcgacaccatcggcgagcaccaccccaccagagagctggtggtgaacgccgtgaccctgttcggcaacctgcagagcttcatgaagcaggagctggaccaggccgtggccacccaggccctgtggcacaccctgagaggcagactgagagacgtgctgtgcacccccgcccacagactgctgcaggacagccaggacgtgcccgtgaccgtggcccccctgagagccgagagagtgctgctgttcgacgacgccctggtgctgctgcagggccacaacgtgcacaccttcgacctgaagctggtgtgggtggaccccggccaggacggctgcaccttccacctgctgacccccgaggaggagttcagcttctgcgccaaggacagccagggccaggccgtgtggcagtggaaggtgacctgggccgtgcaccaggccctgcacggcaagaaggacttccccgtgctgggcgccggcctggagcccagccagccccccgactgcagatgcgccgagtacaccttccaggccgagggcagactgtgccaggccacctacgagggcgagtggtgcagaggcagaccccacggcaagggcaccctgaagtggcccgacggcagaaaccacgtgggcaacttctgccagggcctggagcacggcttcggcatcagactgctgccccaggccagcgaggacaagttcgactgctacaagtgccactggagagagggcagcatgtgcggctacggcatctgcgagtacagcaccgacgaggtgtacaagggctacttccaggagggcctgagacacggcttcggcgtgctggagagcggcccccaggccccccagcccttcagatacaccggccactgggagagaggccagagaagcggctacggcatcgaggaggacggcgacagaggcgagagatacatcggcatgtggcaggccggccagagacacggccccggcgtgatggtgacccaggccggcgtgtgctaccagggcaccttccaggccgacaagaccgtgggccccggcatcctgctgagcgaggacgacagcctgtacgagggcaccttcaccagagacctgaccctgatgggcaagggcaaggtgaccttccccaacggcttcaccctggagggcagcttcggcagcggcgccggcagaggcctgcacacccagggcgtgctggacaccgccgccctgccccccgaccccagcagcacctgcaagagacagctgggcgtgggcgccttccccgtggagagcagatggcagggcgtgtacagccccttcagagacttcgtgtgcgccggctgccccagagacctgcaggaggccctgctgggcttcgacgtgcagagcagcagagagctgagaagaagccaggactacctgagctgcgagagaacccaccccgaggacagcgtgggcagcatggaggacatcctggaggagctgctgcagcacagagagcccaaggccctgcagctgtacctgagaaaggccctgagcaacagcctgcaccccctgggcaagctgctgagaaccctgatgctgaccttccaggccacctacgccggcgtgggcgccaacaagcacctgcaggagctggcccaggaggaggtgaagcagcacgcccaggagctgtgggccgcctacagaggcctgctgagagtggccctggagagaaagggccaggccctggaggaggacgaggacaccgagaccagagacctgcaggtgcacggcctggtgctgcccctgatgctgcccagcttctacagcgagctgttcaccctgtacctgctgctgcacgagagagaggacagcttctacagccagggcatcgccaacctgagcctgttccccgacacccagctgctggagttcctggacgtgcagaagcacctgtggcccctgaaggacctgaccctgaccagcaaccagagatacagcctggtgagagacaagtgcttcctgagcgccaccgagtgcctgcagaagatcatgaccaccgtggaccccagagagaagctggaggtgctggagagaacctacggcgagatcgagggcaccgtgagcagagtgctgggcagagagtacaagctgcccatggacgacctgctgcccctgctgatctacgtggtgagcagagccagaatccagcacctgggcgccgagatccacctgatcagagacatgatggaccccaaccacaccggcggcctgtacgacttcctgctgaccgccctggagagctgctacgagcacatccagaaggaggacatgagactgcacagactgcccggccactggcacagcagagagctgtggtag

SEQ ID NO: 72569 - DNA, 903 bp, synthetic construct
  misc_feature 1..903: note = Description of Artificial Sequence: Synthetic coding sequence
  source 1..903: mol_type = other DNA
atggaggacatcctggaggagctgctgcagcacagagagcccaaggccctgcagctgtacctgagaaaggccctgagcaacagcctgcaccccctgggcaagctgctgagaaccctgatgctgaccttccaggccacctacgccggcgtgggcgccaacaagcacctgcaggagctggcccaggaggaggtgaagcagcacgcccaggagctgtgggccgcctacagaggcctgctgagagtggccctggagagaaagggccaggccctggaggaggacgaggacaccgagaccagagacctgcaggtgcacggcctggtgctgcccctgatgctgcccagcttctacagcgagctgttcaccctgtacctgctgctgcacgagagagaggacagcttctacagccagggcatcgccaacctgagcctgttccccgacacccagctgctggagttcctggacgtgcagaagcacctgtggcccctgaaggacctgaccctgaccagcaaccagagatacagcctggtgagagacaagtgcttcctgagcgccaccgagtgcctgcagaagatcatgaccaccgtggaccccagagagaagctggaggtgctggagagaacctacggcgagatcgagggcaccgtgagcagagtgctgggcagagagtacaagctgcccatggacgacctgctgcccctgctgatctacgtggtgagcagagccagaatccagcacctgggcgccgagatccacctgatcagagacatgatggaccccaaccacaccggcggcctgtacgacttcctgctgaccgccctggagagctgctacgagcacatccagaaggaggacatgagactgcacagactgcccggccactggcacagcagagagctgtggtag

SEQ ID NO: 72570 - DNA, 2862 bp, synthetic construct; identical to SEQ ID NO: 72568
  misc_feature 1..2862: note = Description of Artificial Sequence: Synthetic coding sequence
  source 1..2862: mol_type = other DNA

SEQ ID NO: 72571 - DNA, 12504 bp, synthetic construct
  misc_feature 1..12504: note = Description of Artificial Sequence: Synthetic coding sequence
  source 1..12504: mol_type = other DNA
atggagcccgaggacctgccctggcccggcgagctggaggaggaggaggaggaggaggaggaggaggaggaggaggaggaggaggccgccgccgccgccgccgccaacgtggacgacgtggtggtggtggaggaggtggaggaggaggccggcagagagctggacagcgacagccactacggcccccagcacctggagagcatcgacgacgaggaggacgaggaggccaaggcctggctgcaggcccaccccggcagaatcctgccccccctgagccccccccagcacagatacagcgagggcgagagaaccagcctggagaagatcgtgcccctgacctgccacgtgtggcagcagatcgtgtaccagggcaacagcagaacccagatcagcgacaccaacgtggtgtgcctggagaccaccgcccagagaggcagcggcgacgaccagaagaccgagagctggcactgcctgccccaggagatggacagcagccagaccctggacaccagccagaccagattcaacgtgagaaccgaggacaccgaggtgaccgacttccccagcctggaggagggcatcctgacccagagcgagaaccaggtgaaggagcccaacagagacctgttctgcagccccctgctggtgatccaggacagcttcgccagccccgacctgcccctgctgacctgcctgacccaggaccaggagttcgcccccgacagcctgttccaccagagcgagctgagcttcgcccccctgagaggcatccccgacaagagcgaggacaccgagtggagcagcagacccagcgaggtgagcgaggccctgttccaggccaccgccgaggtggccagcgacctggccagcagcagattcagcgtgagccagcaccccctgatcggcagcaccgccgtgggcagccagtgccccttcctgcccagcgagcagggcaacaacgaggagaccatcagcagcgtggacgagctgaagatccccaaggactgcgacagatacgacgacctgtgcagctacatgagctggaagaccagaaaggacacccagtggcccgagaacaacctggccgacaaggaccaggtgagcgtggccaccagcttcgacatcaccgacgagaacatcgccaccaagagaagcgaccacttcgacgccgccagaagctacggccagtactggacccaggaggacagcagcaagcaggccgagacctacctgaccaagggcctgcagggcaaggtggagagcgacgtgatcaccctggacggcctgaacgagaacgccgtggtgtgcagcgagagagtggccgagctgcagagaaagcccaccagagagagcgagtaccacagcagcgacctgagaatgctgagaatgagccccgacaccgtgcccaaggcccccaagcacctgaaggccggcgacaccagcaagggcggcatcgccaaggtgacccagagcaacctgaagagcggcatcaccaccacccccgtggacagcgacatcggcagccacctgagcctgagcctggaggacctgagccagctggccgtgagcagcctggagaccaccaccggccagcacaccgacaccctgaaccagaagaccctggccgacacccacctgaccgaggagaccctgaaggtgaccgccatccccgagcccgccgaccagaagaccgccacccccaccgtgctgagcagcagccacagccacagaggcaagcccagcatcttctaccagcagggcctgcccgacagccacctgaccgaggaggccctgaaggtgagcgccgcccccggcctggccgaccagaccaccggcatgagcaccctgaccagcaccagctacagccacagagagaagcccggcaccttctaccagcaggagctgcccgagagcaacctgaccgaggagcccctggaggtgagcgccgcccccggccccgtggagcagaagaccggcatccccaccgtgagcagcaccagccacagccacgtggaggacctgctgttcttctacagacagaccctgcccgacggccacctgaccgaccaggccctgaaggtgagcgccgtgagcggccccgccgaccagaagaccggcaccgccaccgtgctgagcaccccccacagccacagagagaagcccggcatcttctaccagcaggagttcgccgacagccaccagaccgaggagaccctgaccaaggtgagcgccacccccggccccgccgaccagaagaccgagatccccgccgtgcagagcagcagctacagccagagagagaagcccagcatcctgtacccccaggacctggccgacagccacctgcccgaggagggcctgaaggtgagcgccgtggccggccccgccgaccagaagaccggcctgcccaccgtgcccagcagcgcctacagccacagagagaagctgctggtgttctaccagcaggccctgctggacagccacctgcccgaggaggccctgaaggtgagcgccgtgagcggccccgccgacggcaagaccggcacccccgccgtgaccagcaccagcagcgccagcagcagcctgggcgagaagcccagcgccttctaccagcagaccctgcccaacagccacctgaccgaggaggccctgaaggtgagcatcgtgcccggccccggcgaccagaagaccggcatccccagcgcccccagcagcttctacagccacagagagaagcccatcatcttcagccagcagaccctgcccgacttcctgttccccgaggaggccctgaaggtgagcgccgtgagcgtgctggccgcccagaagaccggcacccccaccgtgagcagcaacagccacagccacagcgagaagagcagcgtgttctaccagcaggagctgcccgacagcgacctgcccagagagagcctgaagatgagcgccatccccggcctgaccgaccagaagaccgtgcccacccccaccgtgcccagcggcagcttcagccacagagagaagcccagcatcttctaccagcaggagtggcccgacagctacgccaccgagaaggccctgaaggtgagcaccggccccggccccgccgaccagaagaccgagatccccgccgtgcagagcagcagctacccccagagagagaagcccagcgtgctgtacccccaggtgctgagcgacagccacctgcccgaggagagcctgaaggtgagcgccttccccggccccgccgaccagatgaccgacacccccgccgtgcccagcaccttctacagccagagagagaagcccggcatcttctaccagcagaccctgcccgagagccacctgcccaaggaggccctgaagatcagcgtggcccccggcctggccgaccagaagaccggcacccccaccgtgaccagcaccagctacagccagcacagagagaagcccagcatcttccaccagcaggccctgcccggcacccacatccccgaggaggcccagaaggtgagcgccgtgaccggccccggcaaccagaagacctggatccccagagtgctgagcaccttctacagccagagagagaagcccggcatcttctaccagcagaccctgcccggcagccacatccccgaggaggcccagaaggtgagccccgtgctgggccccgccgaccagaagaccggcacccccacccccaccagcgccagctacagccacaccgagaagcccggcatcttctaccagcaggtgctgcccgacaaccaccccaccgaggaggccctgaagatcagcgtggccagcgagcccgtggaccagaccaccggcacccccgccgtgaccagcaccagctacagccagtacagagagaagcccagcatcttctaccagcagagcctgcccagcagccacctgaccgaggaggccaagaacgtgagcgccgtgcccggccccgccgaccagaagaccgtgatccccatcctgcccagcaccttctacagccacaccgagaagcccggcgtgttctaccagcaggtgctgccccacagccaccccaccgaggaggccctgaagatcagcgtggccagcgagcccgtggaccagaccaccggcacccccaccgtgaccagcaccagctacagccagcacaccgagaagcccagcatcttctaccagcagagcctgcccggcagccacctgaccgaggaggccaagaacgtgagcgccgtgcccggccccggcgacagaaagaccggcatccccaccctgcccagcaccttctacagccacaccgagaagcccggcagcttctaccagcaggtgctgccccacagccacctgcccgaggaggccctggaggtgagcgtggcccccggccccgtggaccagaccatcggcacccccaccgtgaccagccccagcagcagcttcggcgagaagcccatcgtgatctacaagcaggccttccccgagggccacctgcccgaggagagcctgaaggtgagcgtggcccccggccccgtgggccagaccaccggcgcccccaccatcaccagccccagctacagccagcacagagccaagagcggcagcttctaccagctggccctgctgggcagccagatccccgaggaggccctgagagtgagcagcgcccccggccccgccgaccagaccaccggcatccccaccatcaccagcaccagctacagcttcggcgagaagcccatcgtgaactacaagcaggccttccccgacggccacctgcccgaggaggccctgaaggtgagcatcgtgagcggccccaccgagaagaagaccgacatccccgccggccccctgggcagcagcgccctgggcgagaagcccatcaccttctacagacaggccctgctggacagccccctgaacaaggaggtggtgaaggtgagcgccgcccccggccccgccgaccagaagaccgagaccctgcccgtgcacagcaccagctacagcaacagaggcaagcccgtgatcttctaccagcagaccctgagcgacagccacctgcccgaggaggccctgaaggtgccccccgtgcccggccccgacgcccagaagaccgagacccccagcgtgagcagcagcctgtacagctacagagagaagcccatcgtgttctaccagcaggccctgcccgacagcgagctgacccaggaggccctgaaggtgagcgccgtgccccagcccgccgaccagaagaccggcctgagcaccgtgaccagcagcttctacagccacaccgagaagcccaacatcagctaccagcaggagctgcccgacagccacctgaccgaggaggccctgaaggtgagcaacgtgcccggccccgccgaccagaagaccggcgtgagcaccgtgaccagcaccagctacagccacagagagaagcccatcgtgagctaccagagagagctgccccacttcaccgaggccggcctgaagatcctgagagtgcccggccccgccgaccagaagaccggcatcaacatcctgcccagcaacagctacccccagagagagcacagcgtgatcagctacgagcaggagctgcccgacctgaccgaggtgaccctgaaggccatcggcgtgcccggccccgccgaccagaagaccggcatccagatcgccagcagcagcagctacagcaacagagagaaggccagcatcttccaccagcaggagctgcccgacgtgaccgaggaggccctgaacgtgttcgtggtgcccggccagggcgacagaaagaccgagatccccaccgtgcccctgagctactacagcagaagagagaagcccagcgtgatcagccagcaggagctgcccgacagccacctgaccgaggaggccctgaaggtgagccccgtgagcatccccgccgagcagaagaccggcatccccatcggcctgagcagcagctacagccacagccacaaggagaagctgaagatcagcaccgtgcacatccccgacgaccagaagaccgagttccccgccgccaccctgagcagctacagccagatcgagaagcccaagatcagcaccgtgatcggccccaacgaccagaagacccccagccagaccgccttccacagcagctacagccagaccgtgaagcccaacatcctgttccagcagcagctgcccgacagagaccagagcaagggcatcctgaagatcagcgccgtgcccgagctgaccgacgtgaacaccggcaagcccgtgagcctgagcagcagctacttccacagagagaagagcaacatcttcagcccccaggagctgcccggcagccacgtgaccgaggacgtgctgaaggtgagcaccatccccggccccgccggccagaagaccgtgctgcccaccgccctgcccagcagcttcagccacagagagaagcccgacatcttctaccagaaggacctgcccgacagacacctgaccgaggacgccctgaagatcagcagcgccctgggccaggccgaccagatcaccggcctgcagaccgtgcccagcggcacctacagccacggcgagaaccacaagctggtgagcgagcacgtgcagagactgatcgacaacctgaacagcagcgacagcagcgtgagcagcaacaacgtgctgctgaacagccaggccgacgacagagtggtgatcaacaagcccgagagcgccggcttcagagacgtgggcagcgaggagatccaggacgccgagaacagcgccaagaccctgaaggagatcagaaccctgctgatggaggccgagaacatggccctgaagagatgcaacttccccgcccccctggccagattcagagacatcagcgacatcagcttcatccagagcaagaaggtggtgtgcttcaaggagcccagcagcaccggcgtgagcaacggcgacctgctgcacagacagcccttcaccgaggagagccccagcagcagatgcatccagaaggacatcggcacccagaccaacctgaagtgcagaagaggcatcgagaactgggagttcatcagcagcaccaccgtgagaagccccctgcaggaggccgagagcaaggtgagcatggccctggaggagaccctgagacagtaccaggccgccaagagcgtgatgagaagcgagcccgagggctgcagcggcaccatcggcaacaagatcatcatccccatgatgaccgtgatcaagagcgacagcagcagcgacgccagcgacggcaacggcagctgcagctgggacagcaacctgcccgagagcctggagagcgtgagcgacgtgctgctgaacttcttcccctacgtgagccccaagaccagcatcaccgacagcagagaggaggagggcgtgagcgagagcgaggacggcggcggcagcagcgtggacagcctggccgcccacgtgaagaacctgctgcagtgcgagagcagcctgaaccacgccaaggagatcctgagaaacgccgaggaggaggagagcagagtgagagcccacgcctggaacatgaagttcaacctggcccacgactgcggctacagcatcagcgagctgaacgaggacgacagaagaaaggtggaggagatcaaggccgagctgttcggccacggcagaaccaccgacctgagcaagggcctgcagagccccagaggcatgggctgcaagcccgaggccgtgtgcagccacatcatcatcgagagccacgagaagggctgcttcagaaccctgaccagcgagcacccccagctggacagacacccctgcgccttcagaagcgccggccccagcgagatgaccagaggcagacagaaccccagcagctgcagagccaagcacgtgaacctgagcgccagcctggaccagaacaacagccacttcaaggtgtggaacagcctgcagctgaagagccacagccccttccagaacttcatccccgacgagttcaagatcagcaagggcctgagaatgcccttcgacgagaagatggacccctggctgagcgagctggtggagcccgccttcgtgccccccaaggaggtggacttccacagcagcagccagatgcccagccccgagcccatgaagaagttcaccaccagcatcaccttcagcagccacagacacagcaagtgcatcagcaacagcagcgtggtgaaggtgggcgtgaccgagggcagccagtgcaccggcgccagcgtgggcgtgttcaacagccacttcaccgaggagcagaacccccccagagacctgaagcagaagaccagcagccccagcagcttcaagatgcacagcaacagccaggacaaggaggtgaccatcctggccgagggcagaagacagagccagaagctgcccgtggacttcgagagaagcttccaggaggagaagcccctggagagaagcgacttcaccggcagccacagcgagcccagcaccagagccaactgcagcaacttcaaggagatccagatcagcgacaaccacaccctgatcagcatgggcagacccagcagcaccctgggcgtgaacagaagcagcagcagactgggcgtgaaggagaagaacgtgaccatcacccccgacctgcccagctgcatcttcctggagcagagagagctgttcgagcagagcaaggcccccagagccgacgaccacgtgagaaagcaccacagccccagcccccagcaccaggactacgtggcccccgacctgcccagctgcatcttcctggagcagagagagctgttcgagcagtgcaaggccccctacgtggaccaccagatgagagagaaccacagccccctgccccagggccaggacagcatcgccagcgacctgcccagccccatcagcctggagcagtgccagagcaaggcccccggcgtggacgaccagatgaacaagcaccacttccccctgccccagggccaggactgcgtggtggagaagaacaaccagcacaagcccaagagccacatcagcaacatcaacgtggaggccaagttcaacaccgtggtgagccagagcgcccccaaccactgcaccctggccgccagcgccagcaccccccccagcaacagaaaggccctgagctgcgtgcacatcaccctgtgccccaagaccagcagcaagctggacagcggcaccctggacgagagattccacagcctggacgccgccagcaaggccagaatgaacagcgagttcaacttcgacctgcacaccgtgagcagcagaagcctggagcccaccagcaagctgctgaccagcaagcccgtggcccaggaccaggagagcctgggcttcctgggccccaagagcagcctggacttccaggtggtgcagcccagcctgcccgacagcaacaccatcacccaggacctgaagaccatccccagccagaacagccagatcgtgaccagcagacagatccaggtgaacatcagcgacttcgagggccacagcaaccccgagggcacccccgtgttcgccgacagactgcccgagaagatgaagacccccctgagcgccttcagcgagaagctgagcagcgacgccgtgacccagatcaccaccgagagccccgagaagaccctgttcagcagcgagatcttcatcaacgccgaggacagaggccacgagatcatcgagcccggcaaccagaagctgagaaaggcccccgtgaagttcgccagcagcagcagcgtgcagcaggtgaccttcagcagaggcaccgacggccagcccctgctgctgccctacaagcccagcggcagcaccaagatgtactacgtgccccagctgagacagatcccccccagccccgacagcaagagcgacaccaccgtggagagcagccacagcggcagcaacgacgccatcgcccccgacttccccgcccaggtgctgggcaccagagacgacgacctgagcgccaccgtgaacatcaagcacaaggagggcatctacagcaagagagtggtgaccaaggccagcctgcccgtgggcgagaagcccctgcagaacgagaacgccgacgccagcgtgcaggtgctgatcaccggcgacgagaacctgagcgacaagaagcagcaggagatccacagcaccagagccgtgaccgaggccgcccaggccaaggagaaggagagcctgcagaaggacaccgccgacagcagcgccgccgccgccgccgagcacagcgcccaggtgggcgaccccgagatgaagaacctgcccgacaccaaggccatcacccagaaggaggagatccacagaaagaagaccgtgcccgaggaggcctggcccaacaacaaggagagcctgcagatcaacatcgaggagagcgagtgccacagcgagttcgagaacaccaccagaagcgtgttcagaagcgccaagttctacatccaccaccccgtgcacctgcccagcgaccaggacatctgccacgagagcctgggcaagagcgtgttcatgagacacagctggaaggacttcttccagcaccaccccgacaagcacagagagcacatgtgcctgcccctgccctaccagaacatggacaagaccaagaccgactacaccagaatcaagagcctgagcatcaacgtgaacctgggcaacaaggaggtgatggacaccaccaagagccaggtgagagactaccccaagcacaacggccagatcagcgacccccagagagaccagaaggtgacccccgagcagaccacccagcacaccgtgagcctgaacgagctgtggaacaagtacagagagagacagagacagcagagacagcccgagctgggcgacagaaaggagctgagcctggtggacagactggacagactggccaagatcctgcagaaccccatcacccacagcctgcaggtgagcgagagcacccacgacgacagcagaggcgagagaagcgtgaaggagtggagcggcagacagcagcagagaaacaagctgcagaagaagaagagattcaagagcctggagaagagccacaagaacaccggcgagctgaagaagagcaaggtgctgagccaccacagagccggcagaagcaaccagatcaagatcgagcagatcaagttcgacaagtacatcctgagcaagcagcccggcttcaactacatcagcaacaccagcagcgactgcagacccagcgaggagagcgagctgctgaccgacaccaccaccaacatcctgagcggcaccaccagcaccgtggagagcgacatcctgacccagaccgacagagaggtggccctgcacgagagaagcagcagcgtgagcaccatcgacaccgccagactgatccaggccttcggccacgagagagtgtgcctgagccccagaagaatcaagctgtacagcagcatcaccaaccagcagagaagatacctggagaagagaagcaagcacagcaagaaggtgctgaacaccggccaccccctggtgaccagcgagcacaccagaagaagacacatccaggtggccaaccacgtgatcagcagcgacagcatcagcagcagcgccagcagcttcctgagcagcaacagcaccttctgcaacaagcagaacgtgcacatgctgaacaagggcatccaggccggcaacctggagatcgtgaacggcgccaagaagcacaccagagacgtgggcatcaccttccccacccccagcagcagcgaggccaagctggaggagaacagcgacgtgaccagctggagcgaggagaagagagaggagaagatgctgttcaccggctaccccgaggacagaaagctgaagaagaacaagaagaacagccacgagggcgtgagctggttcgtgcccgtggagaacgtggagagcagaagcaagaaggagaacgtgcccaacacctgcggccccggcatcagctggttcgagcccatcaccaagaccagaccctggagagagcccctgagagagcagaactgccagggccagcacctggacggcagaggctacctggccggccccggcagagaggccggcagagacctgctgagacccttcgtgagagccaccctgcaggagagcctgcagttccacagacccgacttcatcagcagaagcggcgagagaatcaagagactgaagctgatcgtgcaggagagaaagctgcagagcatgctgcagaccgagagagacgccctgttcaacatcgacagagagagacagggccaccagaacagaatgtgccccctgcccaagagagtgttcctggccatccagaagaacaagcccatcagcaagaaggagatgatccagagaagcaagagaatctacgagcagctgcccgaggtgcagaagaagagagaggaggagaagagaaagagcgagtacaagagctacagactgagagcccagctgtacaagaagagagtgaccaaccagctgctgggcagaaaggtgccctgggactag

SEQ ID NO: 72572 - DNA, 7686 bp, synthetic construct
  misc_feature 1..7686: note = Description of Artificial Sequence: Synthetic coding sequence
  source 1..7686: mol_type = other DNA
atggagcccgaggacctgccctggcccggcgagctggaggaggaggaggaggaggaggaggaggaggaggaggaggaggaggaggccgccgccgccgccgccgccaacgtggacgacgtggtggtggtggaggaggtggaggaggaggccggcagagagctggacagcgacagccactacggcccccagcacctggagagcatcgacgacgaggaggacgaggaggccaaggcctggctgcaggcccaccccggcagaatcctgccccccctgagccccccccagcacagatacagcgagggcgagagaaccagcctggagaagatcgtgcccctgacctgccacgtgtggcagcagatcgtgtaccagggcaacagcagaacccagatcagcgacaccaacgtggtgtgcctggagaccaccgcccagagaggcagcggcgacgaccagaagaccgagagctggcactgcctgccccaggagatggacagcagccagaccctggacaccagccagaccagattcaacgtgagaaccgaggacaccgaggtgaccgacttccccagcctggaggagggcatcctgacccagagcgagaaccaggtgaaggagcccaacagagacctgttctgcagccccctgctggtgatccaggacagcttcgccagccccgacctgcccctgctgacctgcctgacccaggaccaggagttcgcccccgacagcctgttccaccagagcgagctgagcttcgcccccctgagaggcatccccgacaagagcgaggacaccgagtggagcagcagacccagcgaggtgagcgaggccctgttccaggccaccgccgaggtggccagcgacctggccagcagcagattcagcgtgagccagcaccccctgatcggcagcaccgccgtgggcagccagtgccccttcctgcccagcgagcagggcaacaacgaggagaccatcagcagcgtggacgagctgaagatccccaaggactgcgacagatacgacgacctgtgcagctacatgagctggaagaccagaaaggacacccagtggcccgagaacaacctggccgacaaggaccaggtgagcgtggccaccagcttcgacatcaccgacgagaacatcgccaccaagagaagcgaccacttcgacgccgccagaagctacggccagtactggacccaggaggacagcagcaagcaggccgagacctacctgaccaagggcctgcagggcaaggtggagagcgacgtgatcaccctggacggcctgaacgagaacgccgtggtgtgcagcgagagagtggccgagctgcagagaaagcccaccagagagagcgagtaccacagcagcgacctgagaatgctgagaatgagccccgacaccgtgcccaaggcccccaagcacctgaaggccggcgacaccagcaagggcggcatcgccaaggtgacccagagcaacctgaagagcggcatcaccaccacccccgtggacagcgacatcggcagccacctgagcctgagcctggaggacctgagccagctggccgtgagcagcctggagaccaccaccggccagcacaccgacaccctgaaccagaagaccctggccgacacccacctgaccgaggagaccctgaaggtgaccgccatccccgagcccgccgaccagaagaccgccacccccaccgtgctgagcagcagccacagccacagaggcaagcccagcatcttctaccagcagggcctgcccgacagccacctgaccgaggaggccctgaaggtgagcgccgcccccggcctggccgaccagaccaccggcatgagcaccctgaccagcaccagctacagccacagagagaagcccggcaccttctaccagcaggagctgcccgagagcaacctgaccgaggagcccctggaggtgagcgccgcccccggccccgtggagcagaagaccggcatccccaccgtgagcagcaccagccacagccacgtggaggacctgctgttcttctacagacagaccctgcccgacggccacctgaccgaccaggccctgaaggtgagcgccgtgagcggccccgccgaccagaagaccggcaccgccaccgtgctgagcaccccccacagccacagagagaagcccggcatcttctaccagcaggagttcgccgacagccaccagaccgaggagaccctgaccaaggtgagcgccacccccggccccgccgaccagaagaccgagatccccgccgtgcagagcagcagctacagccagagagagaagcccagcatcctgtacccccaggacctggccgacagccacctgcccgaggagggcctgaaggtgagcgccgtggccggccccgccgaccagaagaccggcctgcccaccgtgcccagcagcgcctacagccacagagagaagctgctggtgttctaccagcaggccctgctggacagccacctgcccgaggaggccctgaaggtgagcgccgtgagcggccccgccgacggcaagaccggcacccccgccgtgaccagcaccagcagcgccagcagcagcctgggcgagaagcccagcgccttctaccagcagaccctgcccaacagccacctgaccgaggaggccctgaaggtgagcatcgtgcccggccccggcgaccagaagaccggcatccccagcgcccccagcagcttctacagccacagagagaagcccatcatcttcagccagcagaccctgcccgacttcctgttccccgaggaggccctgaaggtgagcgccgtgagcgtgctggccgcccagaagaccggcacccccaccgtgagcagcaacagccacagccacagcgagaagagcagcgtgttctaccagcaggagctgcccgacagcgacctgcccagagagagcctgaagatgagcgccatccccggcctgaccgaccagaagaccgtgcccacccccaccgtgcccagcggcagcttcagccacagagagaagcccagcatcttctaccagcaggagtggcccgacagctacgccaccgagaaggccctgaaggtgagcaccggccccggccccgccgaccagaagaccgagatccccgccgtgcagagcagcagctacccccagagagagaagcccagcgtgctgtacccccaggtgctgagcgacagccacctgcccgaggagagcctgaaggtgagcgccttccccggccccgccgaccagatgaccgacacccccgccgtgcccagcaccttctacagccagagagagaagcccggcatcttctaccagcagaccctgcccgagagccacctgcccaaggaggccctgaagatcagcgtggcccccggcctggccgaccagaagaccggcacccccaccgtgaccagcaccagctacagccagcacagagagaagcccagcatcttccaccagcaggccctgcccggcacccacatccccgaggaggcccagaaggtgagcgccgtgaccggccccggcaaccagaagacctggatccccagagtgctgagcaccttctacagccagagagagaagcccggcatcttctaccagcagaccctgcccggcagccacatccccgaggaggcccagaaggtgagccccgtgctgggccccgccgaccagaagaccggcacccccacccccaccagcgccagctacagccacaccgagaagcccggcatcttctaccagcaggtgctgcccgacaaccaccccaccgaggaggccctgaagatcagcgtggccagcgagcccgtggaccagaccaccggcacccccgccgtgaccagcaccagctacagccagtacagagagaagcccagcatcttctaccagcagagcctgcccagcagccacctgaccgaggaggccaagaacgtgagcgccgtgcccggccccgccgaccagaagaccgtgatccccatcctgcccagcaccttctacagccacaccgagaagcccggcgtgttctaccagcaggtgctgccccacagccaccccaccgaggaggccctgaagatcagcgtggccagcgagcccgtggaccagaccaccggcacccccaccgtgaccagcaccagctacagccagcacaccgagaagcccagcatcttctaccagcagagcctgcccggcagccacctgaccgaggaggccaagaacgtgagcgccgtgcccggccccggcgacagaaagaccggcatccccaccctgcccagcaccttctacagccacaccgagaagcccggcagcttctaccagcaggtgctgccccacagccacctgcccgaggaggccctggaggtgagcgtggcccccggccccgtggaccagaccatcggcacccccaccgtgaccagccccagcagcagcttcggcgagaagcccatcgtgatctacaagcaggccttccccgagggccacctgcccgaggagagcctgaaggtgagcgtggcccccggccccgtgggccagaccaccggcgcccccaccatcaccagccccagctacagccagcacagagccaagagcggcagcttctaccagctggccctgctgggcagccagatccccgaggaggccctgagagtgagcagcgcccccggccccgccgaccagaccaccggcatccccaccatcaccagcaccagctacagcttcggcgagaagcccatcgtgaactacaagcaggccttccccgacggccacctgcccgaggaggccctgaaggtgagcatcgtgagcggccccaccgagaagaagaccgacatccccgccggccccctgggcagcagcgccctgggcgagaagcccatcaccttctacagacaggccctgctggacagccccctgaacaaggaggtggtgaaggtgagcgccgcccccggccccgccgaccagaagaccgagaccctgcccgtgcacagcaccagctacagcaacagaggcaagcccgtgatcttctaccagcagaccctgagcgacagccacctgcccgaggaggccctgaaggtgccccccgtgcccggccccgacgcccagaagaccgagacccccagcgtgagcagcagcctgtacagctacagagagaagcccatcgtgttctaccagcaggccctgcccgacagcgagctgacccaggaggccctgaaggtgagcgccgtgccccagcccgccgaccagaagaccggcctgagcaccgtgaccagcagcttctacagccacaccgagaagcccaacatcagctaccagcaggagctgcccgacagccacctgaccgaggaggccctgaaggtgagcaacgtgcccggccccgccgaccagaagaccggcgtgagcaccgtgaccagcaccagctacagccacagagagaagcccatcgtgagctaccagagagagctgccccacttcaccgaggccggcctgaagatcctgagagtgcccggccccgccgaccagaagaccggcatcaacatcctgcccagcaacagctacccccagagagagcacagcgtgatcagctacgagcaggagctgcccgacctgaccgaggtgaccctgaaggccatcggcgtgcccggccccgccgaccagaagaccggcatccagatcgccagcagcagcagctacagcaacagagagaaggccagcatcttccaccagcaggagctgcccgacgtgaccgaggaggccctgaacgtgttcgtggtgcccggccagggcgacagaaagaccgagatccccaccgtgcccctgagctactacagcagaagagagaagcccagcgtgatcagccagcaggagctgcccgacagccacctgaccgaggaggccctgaaggtgagccccgtgagcatccccgccgagcagaagaccggcatccccatcggcctgagcagcagctacagccacagccacaaggagaagctgaagatcagcaccgtgcacatccccgacgaccagaagaccgagttccccgccgccaccctgagcagctacagccagatcgagaagcccaagatcagcaccgtgatcggccccaacgaccagaagacccccagccagaccgccttccacagcagctacagccagaccgtgaagcccaacatcctgttccagcagcagctgcccgacagagaccagagcaagggcatcctgaagatcagcgccgtgcccgagctgaccgacgtgaacaccggcaagcccgtgagcctgagcagcagctacttccacagagagaagagcaacatcttcagcccccaggagctgcccggcagccacgtgaccgaggacgtgctgaaggtgagcaccatccccggccccgccggccagaagaccgtgctgcccaccgccctgcccagcagcttcagccacagagagaagcccgacatcttctaccagaaggacctgcccgacagacacctgaccgaggacgccctgaagatcagcagcgccctgggccaggccgaccagatcaccggcctgcagaccgtgcccagcggcacctacagccacggcgagaaccacaagctggtgagcgagcacgtgcagagactgatcgacaacctgaacagcagcgacagcagcgtgagcagcaacaacgtgctgctgaacagccaggccgacgacagagtggtgatcaacaagcccgagagcgccggcttcagagacgtgggcagcgaggagatccaggacgccgagaacagcgccaagaccctgaaggagatcagaaccctgctgatggaggccgagaacatggccctgaagagatgcaacttccccgcccccctggccagattcagagacatcagcgacatcagcttcatccagagcaagaaggtggtgtgcttcaaggagcccagcagcaccggcgtgagcaacggcgacctgctgcacagacagcccttcaccgaggagagccccagcagcagatgcatccagaaggacatcggcacccagaccaacctgaagtgcagaagaggcatcgagaactgggagttcatcagcagcaccaccgtgagaagccccctgcaggaggccgagagcaaggtgagcatggccctggaggagaccctgagacagtaccaggccgccaagagcgtgatgagaagcgagcccgagggctgcagcggcaccatcggcaacaagatcatcatccccatgatgaccgtgatcaagagcgacagcagcagcgacgccagcgacggcaacggcagctgcagctgggacagcaacctgcccgagagcctggagagcgtgagcgacgtgctgctgaacttcttcccctacgtgagccccaagaccagcatcaccgacagcagagaggaggagggcgtgagcgagagcgaggacggcggcggcagcagcgtggacagcctggccgcccacgtgaagaacctgctgcagtgcgagagcagcctgaaccacgccaaggagatcctgagaaacgccgaggaggaggagagcagagtgagagcccacgcctggaacatgaagttcaacctggcccacgactgcggctacagcatcagcgagctgaacgaggacgacagaagaaaggtggaggagatcaaggccgagctgttcggccacggcagaaccaccgacctgagcaagggcctgcagagctag

SEQ ID NO: 72573 - DNA, 1944 bp, synthetic construct
  misc_feature 1..1944: note = Description of Artificial Sequence: Synthetic coding sequence
  source 1..1944: mol_type = other DNA
atggccgcccccgccggcggcggcggcagcgccgtgagcgtgctggcccccaacggcagaagacacaccgtgaaggtgacccccagcaccgtgctgctgcaggtgctggaggacacctgcagaagacaggacttcaacccctgcgagtacgacctgaagttccagagaagcgtgctggacctgagcctgcagtggagattcgccaacctgcccaacaacgccaagctggagatggtgcccgccagcagaagcagagagggccccgagaacatggtgagaatcgccctgcagctggacgacggcagcagactgcaggacagcttctgcagcggccagaccctgtgggagctgctgagccacttcccccagatcagagagtgcctgcagcaccccggcggcgccacccccgtgtgcgtgtacaccagagacgaggtgaccggcgaggccgccctgagaggcaccaccctgcagagcctgggcctgaccggcggcagcgccaccatcagattcgtgatgaagtgctacgaccccgtgggcaagacccccggcagcctgggcagcagcgccagcgccggccaggccgccgccagcgcccccctgcccctggagagcggcgagctgagcagaggcgacctgagcagacccgaggacgccgacaccagcggcccctgctgcgagcacacccaggagaagcagagcaccagagcccccgccgccgcccccttcgtgcccttcagcggcggcggccagagactgggcggcccccccggccccaccagacccctgaccagcagcagcgccaagctgcccaagagcctgagcagccccggcggccccagcaagcccaagaagagcaagagcggccaggacccccagcaggagcaggagcaggagagagagagagacccccagcaggagcaggagagagagagacccgtggacagagagcccgtggacagagagcccgtggtgtgccaccccgacctggaggagagactgcaggcctggcccgccgagctgcccgacgagttcttcgagctgaccgtggacgacgtgagaagaagactggcccagctgaagagcgagagaaagagactggaggaggcccccctggtgaccaaggccttcagagaggcccagatcaaggagaagctggagagataccccaaggtggccctgagagtgctgttccccgacagatacgtgctgcagggcttcttcagacccagcgagaccgtgggcgacctgagagacttcgtgagaagccacctgggcaaccccgagctgagcttctacctgttcatcaccccccccaagaccgtgctggacgaccacacccagaccctgttccagccccagctgggcgacagagtggcccccttcaccctgggccccagcctgaagagatgcctgggccccgagcagagaaccagactgcccgtggtgggcgacggcggcgacgtggacagcggcagactgctgttctggggccccagcagaggcagagccagccccagcaccggccagcccccctgccaccccgtgtgcagacccagcagcccccccagccccagacccagcagcggcgaccccagcagagtgaaggccggccacaagcacgtgggcaccggcagagccaacctgttccccgccgccctggtgcacctgggcgccgaggagcccgccggcgtgtacctggagcccggcctgctggagcacgccatcagccccagcgccgccgacgtgctggtggccagatacatgagcagagccgccggcagccccagccccctgcccgcccccgaccccgcccccaagagcgagcccgccgccgaggagggcgccctggtgccccccgagcccatccccggcaccgcccagcccgtgaagagaagcctgggcaaggtgcccaagtggctgaagctgcccgccagcaagagatag

SEQ ID NO: 72574 - DNA, 1662 bp, synthetic construct
  misc_feature 1..1662: note = Description of Artificial Sequence: Synthetic coding sequence
  source 1..1662: mol_type = other DNA
atggccgcccccgccggcggcggcggcagcgccgtgagcgtgctggcccccaacggcagaagacacaccgtgaaggtgacccccagcaccgtgctgctgcaggtgctggaggacacctgcagaagacaggacttcaacccctgcgagtacgacctgaagttccagagaagcgtgctggacctgagcctgcagtggagattcgccaacctgcccaacaacgccaagctggagatggtgcccgccagcagaagcagagagggccccgagaacatggtgagaatcgccctgcagctggacgacggcagcagactgcaggacagcttctgcagcggccagaccctgtgggagctgctgagccacttcccccagatcagagagtgcctgcagcaccccggcggcgccacccccgtgtgcgtgtacaccagagacgaggtgaccggcgaggccgccctgagaggcaccaccctgcagagcctgggcctgaccggcggcagcgccaccatcagattcgtgatgaagtgctacgaccccgtgggcaagacccccggcagcctgggcagcagcgccagcgccggccaggccgccgccagcgcccccctgcccctggagagcggcgagctgagcagaggcgacctgagcagacccgaggacgccgacaccagcggcccctgctgcgagcacacccaggagaagcagagcaccagagcccccgccgccgcccccttcgtgcccttcagcggcggcggccagagactgggcggcccccccggccccaccagacccctgaccagcagcagcgccaagctgcccaagagcctgagcagccccggcggccccagcaagcccaagaagagcaagagcggccaggacccccagcaggagcaggagcaggagagagagagagacccccagcaggagcaggagagagagagacccgtggacagagagcccgtggacagagagcccgtggtgtgccaccccgacctggaggagagactgcaggcctggcccgccgagctgcccgacgagttcttcgagctgaccgtggacgacgtgagaagaagactggcccagctgaagagcgagagaaagagactggaggaggcccccctggtgaccaaggccttcagagaggcccagatcaaggagaagctggagagataccccaaggtggccctgagagtgctgttccccgacagatacgtgctgcagggcttcttcagacccagcgagaccgtgggcgacctgagagacttcgtgagaagccacctgggcaaccccgagctgagcttctacctgttcatcaccccccccaagaccgtgctggacgaccacacccagaccctgttccaggccaacctgttccccgccgccctggtgcacctgggcgccgaggagcccgccggcgtgtacctggagcccggcctgctggagcacgccatcagccccagcgccgccgacgtgctggtggccagatacatgagcagagccgccggcagccccagccccctgcccgcccccgaccccgcccccaagagcgagcccgccgccgaggagggcgccctggtgccccccgagcccatccccggcaccgcccagcccgtgaagagaagcctgggcaaggtgcccaagtggctgaagctgcccgccagcaagagatag

SEQ ID NO: 72575 - DNA, 1050 bp, synthetic construct
  misc_feature 1..1050: note = Description of Artificial Sequence: Synthetic coding sequence
  source 1..1050: mol_type = other DNA
atggtgcccgccagcagaagcagagagggccccgagaacatggtgagaatcgccctgcagctggacgacggcagcagactgcaggacagcttctgcagcggccagaccctgtgggagctgctgagccacttcccccagatcagagagtgcctgcagcaccccggcggcgccacccccgtgtgcgtgtacaccagagacgaggtgaccggcgaggccgccctgagaggcaccaccctgcagagcctgggcctgaccggcggcagcgccaccatcagattcgtgatgaagtgctacgaccccgtgggcaagacccccggcagcctgggcagcagcgccagcgccggccaggccgccgccagcgcccccctgcccctggagagcggcgagctgagcagaggcgacctgagcagacccgaggacgccgacaccagcggcccctgctgcgagcacacccaggagaagcagagcaccagagcccccgccgccgcccccttcgtgcccttcagcggcggcggccagagactgggcggcccccccggccccaccagacccctgaccagcagcagcgccaagctgcccaagagcctgagcagccccggcggccccagcaagcccaagaagagcaagagcggccaggacccccagcaggagcaggagcaggagagagagagagacccccagcaggagcaggagagagagagacccgtggacagagagcccgtggacagagagcccgtggtgtgccaccccgacctggaggagagactgcaggcctggcccgccgagctgcccgacgagttcttcgagctgaccgtggacgacgtgagaagaagactggcccagctgaagagcgagagaaagagactggaggaggcccccctggtgaccaaggccttcagagaggcccagatcaaggagaagctggagagataccccaagagaagaagcctgagcctgagccccagactggagagcgtggtgcccagccagctgaccgccagcagcgccagcagagtgcaggtggtgctgctgccccagccccccaagtag

SEQ ID NO: 72576 - DNA, 981 bp, synthetic construct
  misc_feature 1..981: note = Description of Artificial Sequence: Synthetic coding sequence
  source 1..981: mol_type = other DNA
atggagttcctgagcgagaagttcgccctgaagagcccccccagcaagaacagcgacttctacatgggcgccggcggccccctggagcacgtgatggagaccctggacaacgagagcttctacagcaaggccagcgccggcaagtgcgtgcaggccttcggccccctgcccagagccgagcaccacgtgagactggagagaaccagcccctgccaggacagcagcgtgaactacggcatcaccaaggtggagggccagcccctgcacaccgagctgaacagagccatggacaactgcaacagcctgagaatgagccccgtgaagggcatgcaggagaagggcgagctggacgagctgggcgacaagtgcgacagcaacgtgagcagcagcaagaagagaagacacagaaccaccttcaccagcctgcagctggaggagctggagaaggtgttccagaagacccactaccccgacgtgtacgtgagagagcagctggccctgagaaccgagctgaccgaggccagagtgcaggtgtggttccagaacagaagagccaagtggagaaagagagagagatacggccagatccagcaggccaagagccacttcgccgccacctacgacatcagcgtgctgcccagaaccgacagctacccccagatccagaacaacctgtgggccggcaacgccagcggcggcagcgtggtgaccagctgcatgctgcccagagacaccagcagctgcatgaccccctacagccacagccccagaaccgacagcagctacaccggcttcagcaaccaccagaaccagttcagccacgtgcccctgaacaacttcttcaccgacagcctgctgaccggcgccaccaacggccacgccttcgagaccaagcccgagttcgagagaagaagcagcagcatcgccgtgctgagaatgaaggccaaggagcacaccgccaacatcagctgggccatgtag

SEQ ID NO: 72577 - DNA, 1032 bp, synthetic construct
  misc_feature 1..1032: note = Description of Artificial Sequence: Synthetic coding sequence
  source 1..1032: mol_type = other DNA
atggaccccgagcactgcgcccccttcagagtgggccccgcccccggcccctacgtggccagcggcgacgagccccccggcccccagggcacccccgccgccgccccccacctgcaccccgccccccccagaggccccagactgaccagattccccgcctgcggccccctggagccctacctgcccgagcccgccaagccccccgccaagtacctgcaggacctgggccccggccccgccctgaacggcggccacttctacgagggccccgccgaggccgaggagaagaccagcaaggccgccagcttcccccagctgcccctggactgcagaggcggccccagagacggccccagcaacctgcagggcagccccggcccctgcctggccagcctgcacctgcccctgagccccggcctgcccgacagcatggagctggccaagaacaagagcaagaagagaagaaacagaaccaccttcagcaccttccagctggaggagctggagaaggtgttccagaagacccactaccccgacgtgtacgccagagagcagctggccctgagaaccgacctgaccgaggccagagtgcaggtgtggttccagaacagaagagccaagtggagaaagagagagagatacggcaagatccaggagggcagaaaccccttcaccgccgcctacgacatcagcgtgctgcccagaaccgacagccacccccagctgcagaacagcctgtgggccagccccggcagcggcagccccggcggcccctgcctggtgagccccgagggcatccccagcccctgcatgagcccctacagccacccccacggcagcgtggccggcttcatgggcgtgcccgcccccagcgccgcccaccccggcatctacagcatccacggcttcccccccaccctgggcggccacagcttcgagcccagcagcgacggcgactacaagagccccagcctggtgagcctgagagtgaagcccaaggagccccccggcctgctgaactggaccacctag

SEQ ID NO: 72578 - DNA, 1236 bp, synthetic construct
  misc_feature 1..1236: note = Description of Artificial Sequence: Synthetic coding sequence
  source 1..1236: mol_type = other DNA
atgaacgccgagacctgcgtgagctactgcgagagccccgccgccgccatggacgcctactacagccccgtgagccagagcagagagggcagcagccccttcagagccttccccggcggcgacaagttcggcaccaccttcctgagcgccgccgccaaggcccagggcttcggcgacgccaagagcagagccagatacggcgccggccagcaggacctggccacccccctggagagcggcgccggcgccagaggcagcttcaacaagttccagccccagcccagcaccccccagccccagccccccccccagccccagccccagcagcagcagccccagccccagccccccgcccagccccacctgtacctgcagagaggcgcctgcaagaccccccccgacggcagcctgaagctgcaggagggcagcagcggccacagcgccgccctgcaggtgccctgctacgccaaggagagcagcctgggcgagcccgagctgccccccgacagcgacaccgtgggcatggacagcagctacctgagcgtgaaggaggccggcgtgaagggcccccaggacagagccagcagcgacctgcccagccccctggagaaggccgacagcgagagcaacaagggcaagaagagaagaaacagaaccaccttcaccagctaccagctggaggagctggagaaggtgttccagaagacccactaccccgacgtgtacgccagagagcagctggccatgagaaccgacctgaccgaggccagagtgcaggtgtggttccagaacagaagagccaagtggagaaagagagagagattcggccagatgcagcaggtgagaacccacttcagcaccgcctacgagctgcccctgctgaccagagccgagaactacgcccagatccagaaccccagctggctgggcaacaacggcgccgccagccccgtgcccgcctgcgtggtgccctgcgaccccgtgcccgcctgcatgagcccccacgcccacccccccggcagcggcgccagcagcgtgaccgacttcctgagcgtgagcggcgccggcagccacgtgggccagacccacatgggcagcctgttcggcgccgccagcctgagccccggcctgaacggctacgagctgaacggcgagcccgacagaaagaccagcagcatcgccgccctgagaatgaaggccaaggagcacagcgccgccatcagctgggccacctag

SEQ ID NO: 72579 - DNA, 630 bp, synthetic construct
  misc_feature 1..630: note = Description of Artificial Sequence: Synthetic coding sequence
  source 1..630: mol_type = other DNA
atgagaagcaccatcctgctgttctgcctgctgggcagcaccagaagcctgccccagctgaagcccgccctgggcctgccccccaccaagctggcccccgaccagggcaccctgcccaaccagcagcagagcaaccaggtgttccccagcctgagcctgatccccctgacccagatgctgaccctgggccccgacctgcacctgctgaaccccgccgccggcatgacccccggcacccagacccaccccctgaccctgggcggcctgaacgtgcagcagcagctgcacccccacgtgctgcccatcttcgtgacccagctgggcgcccagggcaccatcctgagcagcgaggagctgccccagatcttcaccagcctgatcatccacagcctgttccccggcggcatcctgcccaccagccaggccggcgccaaccccgacgtgcaggacggcagcctgcccgccggcggcgccggcgtgaaccccgccacccagggcacccccgccggcagactgcccacccccagcggcaccgacgacgacttcgccgtgaccacccccgccggcatccagagaagcacccacgccatcgaggaggccaccaccgagagcgccaacggcatccagtag

SEQ ID NO: 72580 - DNA, 627 bp, synthetic construct
  misc_feature 1..627: note = Description of Artificial Sequence: Synthetic coding sequence
  source 1..627: mol_type = other DNA
atgagaagcaccatcctgctgttctgcctgctgggcagcaccagaagcctgcccctgaagcccgccctgggcctgccccccaccaagctggcccccgaccagggcaccctgcccaaccagcagcagagcaaccaggtgttccccagcctgagcctgatccccctgacccagatgctgaccctgggccccgacctgcacctgctgaaccccgccgccggcatgacccccggcacccagacccaccccctgaccctgggcggcctgaacgtgcagcagcagctgcacccccacgtgctgcccatcttcgtgacccagctgggcgcccagggcaccatcctgagcagcgaggagctgccccagatcttcaccagcctgatcatccacagcctgttccccggcggcatcctgcccaccagccaggccggcgccaaccccgacgtgcaggacggcagcctgcccgccggcggcgccggcgtgaaccccgccacccagggcacccccgccggcagactgcccacccccagcggcaccgacgacgacttcgccgtgaccacccccgccggcatccagagaagcacccacgccatcgaggaggccaccaccgagagcgccaacggcatccagtag

SEQ ID NO: 72581 - DNA, 2256 bp, synthetic construct
  misc_feature 1..2256: note = Description of Artificial Sequence: Synthetic coding sequence
  source 1..2256: mol_type = other DNA
atgcccgccctgggctgggccgtggccgccatcctgatgctgcagaccgccatggccgagcccagccccggcaccctgcccagaaaggccggcgtgttcagcgacctgagcaaccaggagctgaaggccgtgcacagcttcctgtggagcaagaaggagctgagactgcagcccagcagcaccaccaccatggccaagaacaccgtgttcctgatcgagatgctgctgcccaagaagtaccacgtgctgagattcctggacaagggcgagagacaccccgtgagagaggccagagccgtgatcttcttcggcgaccaggagcaccccaacgtgaccgagttcgccgtgggccccctgcccggcccctgctacatgagagccctgagccccagacccggctaccagagcagctgggccagcagacccatcagcaccgccgagtacgccctgctgtaccacaccctgcaggaggccaccaagcccctgcaccagttcttcctgaacaccaccggcttcagcttccaggactgccacgacagatgcctggccttcaccgacgtggcccccagaggcgtggccagcggccagagaagaagctggctgatcatccagagatacgtggagggctacttcctgcaccccaccggcctggagctgctggtggaccacggcagcaccgacgccggccactgggccgtggagcaggtgtggtacaacggcaagttctacggcagccccgaggagctggccagaaagtacgccgacggcgaggtggacgtggtggtgctggaggaccccctgcccggcggcaagggccacgacagcaccgaggagccccccctgttcagcagccacaagcccagaggcgacttccccagccccatccacgtgagcggccccagactggtgcagccccacggccccagattcagactggagggcaacgccgtgctgtacggcggctggagcttcgccttcagactgagaagcagcagcggcctgcaggtgctgaacgtgcacttcggcggcgagagaatcgcctacgaggtgagcgtgcaggaggccgtggccctgtacggcggccacacccccgccggcatgcagaccaagtacctggacgtgggctggggcctgggcagcgtgacccacgagctggcccccggcatcgactgccccgagaccgccaccttcctggacaccttccactactacgacgccgacgaccccgtgcactaccccagagccctgtgcctgttcgagatgcccaccggcgtgcccctgagaagacacttcaacagcaacttcaagggcggcttcaacttctacgccggcctgaagggccaggtgctggtgctgagaaccaccagcaccgtgtacaactacgactacatctgggacttcatcttctaccccaacggcgtgatggaggccaagatgcacgccaccggctacgtgcacgccaccttctacacccccgagggcctgagacacggcaccagactgcacacccacctgatcggcaacatccacacccacctggtgcactacagagtggacctggacgtggccggcaccaagaacagcttccagaccctgcagatgaagctggagaacatcaccaacccctggagccccagacacagagtggtgcagcccaccctggagcagacccagtacagctgggagagacaggccgccttcagattcaagagaaagctgcccaagtacctgctgttcaccagcccccaggagaacccctggggccacaagagaacctacagactgcagatccacagcatggccgaccaggtgctgccccccggctggcaggaggagcaggccatcacctgggccagataccccctggccgtgaccaagtacagagagagcgagctgtgcagcagcagcatctaccaccagaacgacccctggcacccccccgtggtgttcgagcagttcctgcacaacaacgagaacatcgagaacgaggacctggtggcctgggtgaccgtgggcttcctgcacatcccccacagcgaggacatccccaacaccgccacccccggcaacagcgtgggcttcctgctgagacccttcaacttcttccccgaggaccccagcctggccagcagagacaccgtgatcgtgtggcccagagacaacggccccaactacgtgcagagatggatccccgaggacagagactgcagcatgcccccccccttcagctacaacggcacctacagacccgtgtag

SEQ ID NO: 72582 - DNA, 2313 bp, synthetic construct
  misc_feature 1..2313: note = Description of Artificial Sequence: Synthetic coding sequence
  source 1..2313: mol_type = other DNA
atgcccgccctgggctgggccgtggccgccatcctgatgctgcagaccgccatggccgagcccagccccggcaccctgcccagaaaggccggcgtgttcagcgacctgagcaaccaggagctgaaggccgtgcacagcttcctgtggagcaagaaggagctgagactgcagcccagcagcaccaccaccatggccaagaacaccgtgttcctgatcgagatgctgctgcccaagaagtaccacgtgctgagattcctggacaagggcgagagacaccccgtgagagaggccagagccgtgatcttcttcggcgaccaggagcaccccaacgtgaccgagttcgccgtgggccccctgcccggcccctgctacatgagagccctgagccccagacccggctaccagagcagctgggccagcagacccatcagcaccgccgagtacgccctgctgtaccacaccctgcaggaggccaccaagcccctgcaccagttcttcctgaacaccaccggcttcagcttccaggactgccacgacagatgcctggccttcaccgacgtggcccccagaggcgtggccagcggccagagaagaagctggctgatcatccagagatacgtggagggctacttcctgcaccccaccggcctggagctgctggtggaccacggcagcaccgacgccggccactgggccgtggagcaggtgtggtacaacggcaagttctacggcagccccgaggagctggccagaaagtacgccgacggcgaggtggacgtggtggtgctggaggaccccctgcccggcggcaagggccacgacagcaccgaggagccccccctgttcagcagccacaagcccagaggcgacttccccagccccatccacgtgagcggccccagactggtgcagccccacggccccagattcagactggagggcaacgccgtgctgtacggcggctggagcttcgccttcagactgagaagcagcagcggcctgcaggtgctgaacgtgcacttcggcggcgagagaatcgcctacgaggtgagcgtgcaggaggccgtggccctgtacggcggccacacccccgccggcatgcagaccaagtacctggacgtgggctggggcctgggcagcgtgacccacgagctggcccccggcatcgactgccccgagaccgccaccttcctggacaccttccactactacgacgccgacgaccccgtgcactaccccagagccctgtgcctgttcgagatgcccaccggcgtgcccctgagaagacacttcaacagcaacttcaagggcggcttcaacttctacgccggcctgaagggccaggtgctggtgctgagaaccaccagcaccgtgtacaactacgactacatctgggacttcatcttctaccccaacggcgtgatggaggccaagatgcacgccaccggctacgtgcacgccaccttctacacccccgagggcctgagacacggcaccagactgcacacccacctgatcggcaacatccacacccacctggtgcactacagagtggacctggacgtggccggcaccaagaacagcttccagaccctgcagatgaagctggagaacatcaccaacccctggagccccagacacagagtggtgcagcccaccctggagcagacccagtacagctgggagagacaggccgccttcagattcaagagaaagctgcccaagtacctgctgttcaccagcccccaggagaacccctggggccacaagagaacctacagactgcagatccacagcatggccgaccaggtgctgccccccggctggcaggaggagcaggccatcacctgggccagaaccgagggcggccagcccagagccctgagccaggccgccagccccgtgcccggcagataccccctggccgtgaccaagtacagagagagcgagctgtgcagcagcagcatctaccaccagaacgacccctggcacccccccgtggtgttcgagcagttcctgcacaacaacgagaacatcgagaacgaggacctggtggcctgggtgaccgtgggcttcctgcacatcccccacagcgaggacatccccaacaccgccacccccggcaacagcgtgggcttcctgctgagacccttcaacttcttccccgaggaccccagcctggccagcagagacaccgtgatcgtgtggcccagagacaacggccccaactacgtgcagagatggatccccgaggacagagactgcagcatgcccccccccttcagctacaacggcacctacagacccgtgtag

SEQ ID NO: 72583 - DNA, 1884 bp, synthetic construct
  misc_feature 1..1884: note = Description of Artificial Sequence: Synthetic coding sequence
  source 1..1884: mol_type = other DNA
atgagagccctgagccccagacccggctaccagagcagctgggccagcagacccatcagcaccgccgagtacgccctgctgtaccacaccctgcaggaggccaccaagcccctgcaccagttcttcctgaacaccaccggcttcagcttccaggactgccacgacagatgcctggccttcaccgacgtggcccccagaggcgtggccagcggccagagaagaagctggctgatcatccagagatacgtggagggctacttcctgcaccccaccggcctggagctgctggtggaccacggcagcaccgacgccggccactgggccgtggagcaggtgtggtacaacggcaagttctacggcagccccgaggagctggccagaaagtacgccgacggcgaggtggacgtggtggtgctggaggaccccctgcccggcggcaagggccacgacagcaccgaggagccccccctgttcagcagccacaagcccagaggcgacttccccagccccatccacgtgagcggccccagactggtgcagccccacggccccagattcagactggagggcaacgccgtgctgtacggcggctggagcttcgccttcagactgagaagcagcagcggcctgcaggtgctgaacgtgcacttcggcggcgagagaatcgcctacgaggtgagcgtgcaggaggccgtggccctgtacggcggccacacccccgccggcatgcagaccaagtacctggacgtgggctggggcctgggcagcgtgacccacgagctggcccccggcatcgactgccccgagaccgccaccttcctggacaccttccactactacgacgccgacgaccccgtgcactaccccagagccctgtgcctgttcgagatgcccaccggcgtgcccctgagaagacacttcaacagcaacttcaagggcggcttcaacttctacgccggcctgaagggccaggtgctggtgctgagaaccaccagcaccgtgtacaactacgactacatctgggacttcatcttctaccccaacggcgtgatggaggccaagatgcacgccaccggctacgtgcacgccaccttctacacccccgagggcctgagacacggcaccagactgcacacccacctgatcggcaacatccacacccacctggtgcactacagagtggacctggacgtggccggcaccaagaacagcttccagaccctgcagatgaagctggagaacatcaccaacccctggagccccagacacagagtggtgcagcccaccctggagcagacccagtacagctgggagagacaggccgccttcagattcaagagaaagctgcccaagtacctgctgttcaccagcccccaggagaacccctggggccacaagagaacctacagactgcagatccacagcatggccgaccaggtgctgccccccggctggcaggaggagcaggccatcacctgggccagataccccctggccgtgaccaagtacagagagagcgagctgtgcagcagcagcatctaccaccagaacgacccctggcacccccccgtggtgttcgagcagttcctgcacaacaacgagaacatcgagaacgaggacctggtggcctgggtgaccgtgggcttcctgcacatcccccacagcgaggacatccccaacaccgccacccccggcaacagcgtgggcttcctgctgagacccttcaacttcttccccgaggaccccagcctggccagcagagacaccgtgatcgtgtggcccagagacaacggccccaactacgtgcagagatggatccccgaggacagagactgcagcatgcccccccccttcagctacaacggcacctacagacccgtgtag

SEQ ID NO: 72584 - DNA, 750 bp, synthetic construct
  misc_feature 1..750: note = Description of Artificial Sequence: Synthetic coding sequence
  source 1..750: mol_type = other DNA
atgcccgccctgggctgggccgtggccgccatcctgatgctgcagaccgccatggccgagcccagccccggcaccctgcccagaaaggccggcgtgttcagcgacctgagcaaccaggagctgaaggccgtgcacagcttcctgtggagcaagaaggagctgagactgcagcccagcagcaccaccaccatggccaagaacaccgtgttcctgatcgagatgctgctgcccaagaagtaccacgtgctgagattcctggacaagggcgagagacaccccgtgagagaggccagagccgtgatcttcttcggcgaccaggagcaccccaacgtgaccgagttcgccgtgggccccctgcccggcccctgctacatgagagccctgagccccagacccggctaccagagcagctgggccagcagacccatcagcaccgccgagtacgccctgctgtaccacaccctgcaggaggccaccaagcccctgcaccagttcttcctgaacaccaccggcttcagcttccaggactgccacgacagatgcctggccttcaccgacgtggcccccagaggcgtggccagcggccagagaagaagctggctgatcatccagagatacgtggagggctacttcctgcaccccaccggcctggagctgctggtggaccacggcagcaccgacgccggccactgggccgtggagcaggtgtggtacaacggcaagttctacggcagccccgaggagctgtag

SEQ ID NO: 72585 - DNA, 2256 bp, synthetic construct; identical to SEQ ID NO: 72581
  misc_feature 1..2256: note = Description of Artificial Sequence: Synthetic coding sequence
  source 1..2256: mol_type = other DNA

SEQ ID NO: 72586 - DNA, 1014 bp, synthetic construct
  misc_feature 1..1014: note = Description of Artificial Sequence: Synthetic coding sequence
  source 1..1014: mol_type = other DNA
atgcccgccctgggctgggccgtggccgccatcctgatgctgcagaccgccatggccgagcccagccccggcaccctgcccagaaaggccggcgtgttcagcgacctgagcaaccaggagctgaaggccgtgcacagcttcctgtggagcaagaaggagctgagactgcagcccagcagcaccaccaccatggccaagaacaccgtgttcctgatcgagatgctgctgcccaagaagtaccacgtgctgagattcctggacaagggcgagagacaccccgtgagagaggccagagccgtgatcttcttcggcgaccaggagcaccccaacgtgaccgagttcgccgtgggccccctgcccggcccctgctacatgagagccctgagccccagacccggctaccagagcagctgggccagcagacccatcagcaccgccgagtacgccctgctgtaccacaccctgcaggaggccaccaagcccctgcaccagttcttcctgaacaccaccggcttcagcttccaggactgccacgacagatgcctggccttcaccgacgtggcccccagaggcgtggccagcggccagagaagaagctggctgatcatccagagatacgtggagggctacttcctgcaccccaccggcctggagctgctggtggaccacggcagcaccgacgccggccactgggccgtggagcaggtgtggtacaacggcaagttctacggcagccccgaggagctggccagaaagtacgccgacggcgaggtggacgtggtggtgctggaggaccccctgcccggcggcaagggccacgacagcaccgaggagccccccctgttcagcagccacaagcccagaggcgacttccccagccccatccacgtgagcggccccagactggtgcagccccacggccccagattcagactggagggcaacgccgtgctgtacggcggctggagcttcgccttcagactgagaagcagcagcggcctgcaggtgctgtag

SEQ ID NO: 72587 - DNA, 582 bp, synthetic construct
  misc_feature 1..582: note = Description of Artificial Sequence: Synthetic coding sequence
  source 1..582: mol_type = other DNA
atggaggccaagatgcacgccaccggctacgtgcacgccaccttctacacccccgagggcctgagacacggcaccagactgcacacccacctgatcggcaacatccacacccacctggtgcactacagagtggacctggacgtggccggcaccaagaacagcttccagaccctgcagatgaagctggagaacatcaccaacccctggagccccagacacagagtggtgcagcccaccctggagcagacccagtacagctgggagagacaggccgccttcagattcaagagaaagctgcccaagtacctgctgttcaccagcccccaggagaacccctggggccacaagagaacctacagactgcagatccacagcatggccgaccaggtgctgccccccggctggcaggaggagcaggccatcacctgggccagataccccctggccgtgaccaagtacagagagagcgagctgtgcagcagcagcatctaccaccagaacgacccctggcacccctggagcctgagcagcttcttcaccaccaccagaaccctgaagatgagaacctggtggcccggctag

SEQ ID NO: 72588 - DNA, 2256 bp, synthetic construct; identical to SEQ ID NO: 72581
  misc_feature 1..2256: note = Description of Artificial Sequence: Synthetic coding sequence
  source 1..2256: mol_type = other DNA

SEQ ID NO: 72589 - DNA, 1191 bp, synthetic construct
  misc_feature 1..1191: note = Description of Artificial Sequence: Synthetic coding sequence
  source 1..1191: mol_type = other DNA
atgctgcccagcctgcaggagagcatggacggcgacgagaaggagctggagagcagcgaggagggcggcagcgccgaggagagaagactggagccccccagcagcagccactactgcctgtacagctacagaggcagcagactggcccagcagagaggcgacagcgaggacggcagccccagcggcaccaacgccgagacccccagcggcgacgacttcagcctgagcctggccgacaccaacctgcccagcgaggtggagcccgagctgagaagcttcatcgccaagagactgagcagaggcgccgtgttcgagggcctgggcaacgtggccagcgtggagctgaagatccccggctacagagtgggctgctactactgcctgttccagaacgagaagctgctgcccgagaccgtgaccatcgacagcgagagaaaccccagcgagtacgtggtgtgcttcctgggcggcagcgagaagggcctggagaccttcagactggagctggacaagtacatccagggcctgaagaacaacatgaactgcgaggccagaggcctggagagccacatcaagagctacctgagcagctggttcgaggacgtggtgtgccccatccagagagtggtgctgctgttccaggagaagctgaccttcctgctgcacgccgccctgagctacacccccgtggaggtgaaggagagcgacgagaagaccaagagagacatcaacagattcctgagcgtggccagcctgcagggcctgatccacgagggcaccatgaccagcctgtgcatggccatgaccgaggagcagcacaagagcgtggtgatcgactgcagcagcagccagccccagttctgcaacgccggcagcaacagattctgcgaggactggatgcaggccttcctgaacggcgccaagggcggcaaccccttcctgttcagacaggtgctggagaacttcaagctgaaggccatccaggacaccaacaacctgaagagattcatcagacaggccgagatgaaccactacgccctgttcaagtgctacatgttcctgaagaactgcggcagcggcgacatcctgctgaagatcgtgaaggtggagcacgaggagatgcccgaggccaagaacgtgatcgccgtgctggaggagttcatgaaggaggccctggaccagagcttctag

SEQ ID NO: 72590 - DNA, 1539 bp, synthetic construct
  misc_feature 1..1539: note = Description of Artificial Sequence: Synthetic coding sequence
  source 1..1539: mol_type = other DNA
atggacctgaaggagagccccagcgagggcagcctgcagcccagcagcatccagatcttcgccaacaccagcaccctgcacggcatcagacacatcttcgtgtacggccccctgaccatcagaagagtgctgtgggccgtggccttcgtgggcagcctgggcctgctgctggtggagagcagcgagagagtgagctactacttcagctaccagcacgtgaccaaggtggacgaggtggtggcccagagcctggtgttccccgccgtgaccctgtgcaacctgaacggcttcagattcagcagactgaccaccaacgacctgtaccacgccggcgagctgctggccctgctggacgtgaacctgcagatccccgacccccacctggccgaccccagcgtgctggaggccctgagacagaaggccaacttcaagcactacaagcccaagcagttcagcatgctggagttcctgcacagagtgggccacgacctgaaggacatgatgctgtactgcaagttcaagggccaggagtgcggccaccaggacttcaccaccgtgttcaccaagtacggcaagtgctacatgttcaacagcggcgaggacggcaagcccctgctgaccaccgtgaagggcggcaccggcaacggcctggagatcatgctggacatccagcaggacgagtacctgcccatctggggcgagaccgaggagaccaccttcgaggccggcgtgaaggtgcagatccacagccagagcgagccccccttcatccaggagctgggcttcggcgtggcccccggcttccagaccttcgtggccacccaggagcagagactgacctacctgccccccccctggggcgagtgcagaagcagcgagatgggcctggacttcttccccgtgtacagcatcaccgcctgcagaatcgactgcgagaccagatacatcgtggagaactgcaactgcagaatggtgcacatgcccggcgacgcccccttctgcacccccgagcagcacaaggagtgcgccgagcccgccctgggcctgctggccgagaaggacagcaactactgcctgtgcagaaccccctgcaacctgaccagatacaacaaggagctgagcatggtgaagatccccagcaagaccagcgccaagtacctggagaagaagttcaacaagagcgagaagtacatcagcgagaacatcctggtgctggacatcttcttcgaggccctgaactacgagaccatcgagcagaagaaggcctacgaggtggccgccctgctgggcgacatcggcggccagatgggcctgttcatcggcgccagcatcctgaccatcctggagctgttcgactacatctacgagctgatcaaggagaagctgctggacctgctgggcaaggaggaggacgagggcagccacgacgagaacgtgagcacctgcgacaccatgcccaaccacagcgagaccatcagccacaccgtgaacgtgcccctgcagaccaccctgggcaccctggaggagatcgcctgctag

SEQ ID NO: 72591 - DNA, 612 bp, synthetic construct
  misc_feature 1..612: note = Description of Artificial Sequence: Synthetic coding sequence
  source 1..612: mol_type = other DNA
atgttcaacagcggcgaggacggcaagcccctgctgaccaccgtgaagggcggcaccggcaacggcctggagatcatgctggacatccagcaggacgagtacctgcccatctggggcgagaccgaggagaccaccttcgaggccggcgtgaaggtgcagatccacagccagagcgagccccccttcatccaggagctgggcttcggcgtggcccccggcttccagaccttcgtggccacccaggagcagagactgacctacctgccccccccctggggcgagtgcagaagcagcgagatgggcctggacttcttccccgtgtacagcatcaccgcctgcagaatcgactgcgagaccagatacatcgtggagaactgcaactgcagaatggtgcacatgcccggcgacgcccccttctgcacccccgagcagcacaaggagtgcgccgagcccgccctgggcctgctggccgagaaggacagcaactactgcctgtgcagaaccccctgcaacctgaccagatacaacaaggagctgagcatggtgaagatccccagcaagaccagcgccaagtacctggagaagaagttcaacaagagcgagaagtactag

SEQ ID NO: 72592 - DNA, 1287 bp, synthetic construct
  misc_feature 1..1287: note = Description of Artificial Sequence: Synthetic coding sequence
  source 1..1287: mol_type = other DNA
atggccgtgggcgccagcggcctggagggcgacaagatggccggcgccatgcccctgcagctgctgctgctgctgatcctgctgggccccggcaacagcctgcagctgtgggacacctgggccgacgaggccgagaaggccctgggccccctgctggccagagacagaagacaggccaccgagtacgagtacctggactacgacttcctgcccgagaccgagccccccgagatgctgagaaacagcaccgacaccacccccctgaccggccccggcacccccgagagcaccaccgtggagcccgccgccagaagaagcaccggcctggacgccggcggcgccgtgaccgagctgaccaccgagctggccaacatgggcaacctgagcaccgacagcgccgccatggagatccagaccacccagcccgccgccaccgaggcccagaccacccagcccgtgcccaccgaggcccagaccacccccctggccgccaccgaggcccagaccaccagactgaccgccaccgaggcccagaccacccccctggccgccaccgaggcccagaccaccccccccgccgccaccgaggcccagaccacccagcccaccggcctggaggcccagaccaccgcccccgccgccatggaggcccagaccaccgcccccgccgccatggaggcccagaccaccccccccgccgccatggaggcccagaccacccagaccaccgccatggaggcccagaccaccgcccccgaggccaccgaggcccagaccacccagcccaccgccaccgaggcccagaccacccccctggccgccatggaggccctgagcaccgagcccagcgccaccgaggccctgagcatggagcccaccaccaagagaggcctgttcatccccttcagcgtgagcagcgtgacccacaagggcatccccatggccgccagcaacctgagcgtgaactaccccgtgggcgcccccgaccacatcagcgtgaagcagtgcctgctggccatcctgatcctggccctggtggccaccatcttcttcgtgtgcaccgtggtgctggccgtgagactgagcagaaagggccacatgtaccccgtgagaaactacagccccaccgagatggtgtgcatcagcagcctgctgcccgacggcggcgagggccccagcgccaccgccaacggcggcctgagcaaggccaagagccccggcctgacccccgagcccagagaggacagagagggcgacgacctgaccctgcacagcttcctgccctag

SEQ ID NO: 72593 - DNA, 1587 bp, synthetic construct
  misc_feature 1..1587: note = Description of Artificial Sequence: Synthetic coding sequence
  source 1..1587: mol_type = other DNA
atggagctgaaggccgaggaggaggaggtgggcggcgtgcagcccgtgagcatccaggccttcgccagcagcagcaccctgcacggcctggcccacatcttcagctacgagagactgagcctgaagagagccctgtgggccctgtgcttcctgggcagcctggccgtgctgctgtgcgtgtgcaccgagagagtgcagtactacttccactaccaccacgtgaccaagctggacgaggtggccgccagccagctgaccttccccgccgtgaccctgtgcaacctgaacgagttcagattcagccaggtgagcaagaacgacctgtaccacgccggcgagctgctggccctgctgaacaacagatacgagatccccgacacccagatggccgacgagaagcagctggagatcctgcaggacaaggccaacttcagaagcttcaagcccaagcccttcaacatgagagagttctacgacagagccggccacgacatcagagacatgctgctgagctgccacttcagaggcgaggtgtgcagcgccgaggacttcaaggtggtgttcaccagatacggcaagtgctacaccttcaacagcggcagagacggcagacccagactgaagaccatgaagggcggcaccggcaacggcctggagatcatgctggacatccagcaggacgagtacctgcccgtgtggggcgagaccgacgagaccagcttcgaggccggcatcaaggtgcagatccacagccaggacgagccccccttcatcgaccagctgggcttcggcgtggcccccggcttccagaccttcgtggcctgccaggagcagagactgatctacctgccccccccctggggcacctgcaaggccgtgaccatggacagcgacctggacttcttcgacagctacagcatcaccgcctgcagaatcgactgcgagaccagatacctggtggagaactgcaactgcagaatggtgcacatgcccggcgacgccccctactgcacccccgagcagtacaaggagtgcgccgaccccgccctggacttcctggtggagaaggaccaggagtactgcgtgtgcgagatgccctgcaacctgaccagatacggcaaggagctgagcatggtgaagatccccagcaaggccagcgccaagtacctggccaagaagttcaacaagagcgagcagtacatcggcgagaacatcctggtgctggacatcttcttcgaggtgctgaactacgagaccatcgagcagaagaaggcctacgagatcgccggcctgctgggcgacatcggcggccagatgggcctgttcatcggcgccagcatcctgaccgtgctggagctgttcgactacgcctacgaggtgatcaagcacaagctgtgcagaagaggcaagtgccagaaggaggccaagagaagcagcgccgacaagggcgtggccctgagcctggacgacgtgaagagacacaacccctgcgagagcctgagaggccaccccgccggcatgacctacgccgccaacatcctgccccaccaccccgccagaggcaccttcgaggacttcacctgctag

SEQ ID NO: 72594 - DNA, 1689 bp, synthetic construct
  misc_feature 1..1689: note = Description of Artificial Sequence: Synthetic coding sequence
  source 1..1689: mol_type = other DNA
atgcccatccagatcttctgcagcatgagcttcagcagcggcgaggaggcccccggccccctgggcgacatctggggcccccaccaccaccagcagcagcaggacatcagcgagagcgaggaggaggaggaggagaaggagaaggaggccgtgagaaaggaggccagcgagggccacagccccatggacctggtggccttcgccaacagctgcaccctgcacggcaccaaccacatcttcgtggagggcggccccggccccagacaggtgctgtgggccgtggccttcgtgctggccctgggcgccttcctgtgccaggtgggcgacagagtggcctactacctgagctacccccacgtgaccctgctgaacgaggtggccaccaccgagctggccttccccgccgtgaccctgtgcaacaccaacgccgtgagactgagccagctgagctaccccgacctgctgtacctggcccccatgctgggcctggacgagagcgacgaccccggcgtgcccctggccccccccggccccgaggccttcagcggcgagcccttcaacctgcacagattctacaacagaagctgccacagactggaggacatgctgctgtactgcagctaccagggcggcccctgcggcccccacaacttcagcgtggtgttcaccagatacggcaagtgctacaccttcaacagcggcagagacggcagacccagactgaagaccatgaagggcggcaccggcaacggcctggagatcatgctggacatccagcaggacgagtacctgcccgtgtggggcgagaccgacgagaccagcttcgaggccggcatcaaggtgcagatccacagccaggacgagccccccttcatcgaccagctgggcttcggcgtggcccccggcttccagaccttcgtggcctgccaggagcagagactgatctacctgccccccccctggggcacctgcaaggccgtgaccatggacagcgacctggacttcttcgacagctacagcatcaccgcctgcagaatcgactgcgagaccagatacctggtggagaactgcaactgcagaatggtgcacatgcccggcgacgccccctactgcacccccgagcagtacaaggagtgcgccgaccccgccctggacttcctggtggagaaggaccaggagtactgcgtgtgcgagatgccctgcaacctgaccagatacggcaaggagctgagcatggtgaagatccccagcaaggccagcgccaagtacctggccaagaagttcaacaagagcgagcagtacatcggcgagaacatcctggtgctggacatcttcttcgaggtgctgaactacgagaccatcgagcagaagaaggcctacgagatcgccggcctgctgggcgacatcggcggccagatgggcctgttcatcggcgccagcatcctgaccgtgctggagctgttcgactacgcctacgaggtgatcaagcacaagctgtgcagaagaggcaagtgccagaaggaggccaagagaagcagcgccgacaagggcgtggccctgagcctggacgacgtgaagagacacaacccctgcgagagcctgagaggccaccccgccggcatgacctacgccgccaacatcctgccccaccaccccgccagaggcaccttcgaggacttcacctgctag

SEQ ID NO: 72595 - DNA, 1650 bp, synthetic construct
  misc_feature 1..1650: note = Description of Artificial Sequence: Synthetic coding sequence
  source 1..1650: mol_type = other DNA
atgaagcccaccagcggccccgaggaggccagaagacccgccagcgacatcagagtgttcgccagcaactgcagcatgcacggcctgggccacgtgttcggccccggcagcctgagcctgagaagaggcatgtgggccgccgccgtggtgctgagcgtggccaccttcctgtaccaggtggccgagagagtgagatactacagagagttccaccaccagaccgccctggacgagagagagagccacagactgatcttccccgccgtgaccctgtgcaacatcaaccccctgagaagaagcagactgacccccaacgacctgcactgggccggcagcgccctgctgggcctggaccccgccgagcacgccgccttcctgagagccctgggcagaccccccgccccccccggcttcatgcccagccccaccttcgacatggcccagctgtacgccagagccggccacagcctggacgacatgctgctggactgcagattcagaggccagccctgcggccccgagaacttcaccaccatcttcaccagaatgggcaagtgctacaccttcaacagcggcgccgacggcgccgagctgctgaccaccaccagaggcggcatgggcaacggcctggacatcatgctggacgtgcagcaggaggagtacctgcccgtgtggagagacaacgaggagacccccttcgaggtgggcatcagagtgcagatccacagccaggaggagccccccatcatcgaccagctgggcctgggcgtgagccccggctaccagaccttcgtgagctgccagcagcagcagctgagcttcctgccccccccctggggcgactgcagcagcgccagcctgaaccccaactacgagcccgagcccagcgaccccctgggcagccccagccccagccccagccccccctacaccctgatgggctgcagactggcctgcgagaccagatacgtggccagaaagtgcggctgcagaatggtgtacatgcccggcgacgtgcccgtgtgcagcccccagcagtacaagaactgcgcccaccccgccatcgacgccatgctgagaaaggacagctgcgcctgccccaacccctgcgccagcaccagatacgccaaggagctgagcatggtgagaatccccagcagagccgccgccagattcctggccagaaagctgaacagaagcgaggcctacatcgccgagaacgtgctggccctggacatcttcttcgaggccctgaactacgagaccgtggagcagaagaaggcctacgagatgagcgagctgctgggcgacatcggcggccagatgggcctgttcatcggcgccagcctgctgaccatcctggagatcctggactacctgtgcgaggtgttcagagacaaggtgctgggctacttctggaacagacagcacagccagagacacagcagcaccaacctgctgcaggagggcctgggcagccacagaacccaggtgccccacctgagcctgggccccagcaccctgctgtgcagcgaggacctgccccccctgcccgtgcccagccccagactgagccccccccccaccgcccccgccaccctgagccacagcagcagacccgccgtgtgcgtgctgggcgcccccccctag

SEQ ID NO: 72596 - DNA, 1596 bp, synthetic construct
  misc_feature 1..1596: note = Description of Artificial Sequence: Synthetic coding sequence
  source 1..1596: mol_type = other DNA
atgaagcccaccagcggccccgaggaggccagaagacccgccagcgacatcagagtgttcgccagcaactgcagcatgcacggcctgggccacgtgttcggccccggcagcctgagcctgagaagaggcatgtgggccgccgccgtggtgctgagcgtggccaccttcctgtaccaggtggccgagagagtgagatactacagagagttccaccaccagaccgccctggacgagagagagagccacagactgatcttccccgccgtgaccctgtgcaacatcaaccccctgagaagaagcagactgacccccaacgacctgcactgggccggcagcgccctgctgggcctggaccccgccgagcacgccgccttcctgagagccctgggcagaccccccgccccccccggcttcatgcccagccccaccttcgacatggcccagctgtacgccagagccggccacagcctggacgacatgctgctggactgcagattcagaggccagccctgcggccccgagaacttcaccaccatcttcaccagaatgggcaagtgctacaccttcaacagcggcgccgacggcgccgagctgctgaccaccaccagaggcggcatgggcaacggcctggacatcatgctggacgtgcagcaggaggagtacctgcccgtgtggagagacaacgaggagacccccttcgaggtgggcatcagagtgcagatccacagccaggaggagccccccatcatcgaccagctgggcctgggcgtgagccccggctaccagaccttcgtgagctgccagcagcagcagctgagcttcctgccccccccctggggcgactgcagcagcgccagcctgaaccccaactacgagcccgagcccagcgaccccctgggcagccccagccccagccccagccccccctacaccctgatgggctgcagactggcctgcgagaccagatacgtggccagaaagtgcggctgcagaatggtgtacatgcccggcgacgtgcccgtgtgcagcccccagcagtacaagaactgcgcccaccccgccatcgacgccatgctgagaaaggacagctgcgcctgccccaacccctgcgccagcaccagatacgccaaggagctgagcatggtgagaatccccagcagagccgccgccagattcctggccagaaagctgaacagaagcgaggcctacatcgccgagaacgtgctggccctggacatcttcttcgaggccctgaactacgagaccgtggagcagaagaaggcctacgagatgagcgagctgctgggcgacatcggcggccagatgggcctgttcatcggcgccagcctgctgaccatcctggagatcctggactacctgtgcgaggtgttcagagacaaggtgctgggctacttctggaacagacagcacagccagagacacagcagcaccaacctgctgcaggagggcctgggcagccacagaacccaggtgccccacctgagcctgggccccagaccccccacccccccctgcgccgtgaccaagaccctgagcgccagccacagaacctgctacctggtgacccagctgtag

SEQ ID NO: 72597 - DNA, 1632 bp, synthetic construct
  misc_feature 1..1632: note = Description of Artificial Sequence: Synthetic coding sequence
  source 1..1632: mol_type = other DNA
atgaagcccaccagcggccccgaggaggccagaagacccgccagcgacatcagagtgttcgccagcaactgcagcatgcacggcctgggccacgtgttcggccccggcagcctgagcctgagaagaggcatgtgggccgccgccgtggtgctgagcgtggccaccttcctgtaccaggtggccgagagagtgagatactacagagagttccaccaccagaccgccctggacgagagagagagccacagactgatcttccccgccgtgaccctgtgcaacatcaaccccctgagaagaagcagactgacccccaacgacctgcactgggccggcagcgccctgctgggcctggaccccgccgagcacgccgccttcctgagagccctgggcagaccccccgccccccccggcttcatgcccagccccaccttcgacatggcccagctgtacgccagagccggccacagcctggacgacatgctgctggactgcagattcagaggccagccctgcggccccgagaacttcaccaccatcttcaccagaatgggcaagtgctacaccttcaacagcggcgccgacggcgccgagctgctgaccaccaccagaggcggcatgggcaacggcctggacatcatgctggacgtgcagcaggaggagtacctgcccgtgtggagagacaacgaggagacccccttcgaggtgggcatcagagtgcagatccacagccaggaggagccccccatcatcgaccagctgggcctgggcgtgagccccggctaccagaccttcgtgagctgccagcagcagcagctgagcttcctgccccccccctggggcgactgcagcagcgccagcctgaaccccaactacgagcccgagcccagcgaccccctgggcagccccagccccagccccagccccccctacaccctgatgggctgcagactggcctgcgagaccagatacgtggccagaaagtgcggctgcagaatggtgtacatgcccggcgacgtgcccgtgtgcagcccccagcagtacaagaactgcgcccaccccgccatcgacgccatgctgagaaaggacagctgcgcctgccccaacccctgcgccagcaccagatacgccaaggagctgagcatggtgagaatccccagcagagccgccgccagattcctggccagaaagctgaacagaagcgaggcctacatcgccgagaacgtgctggccctggacatcttcttcgaggccctgaactacgagaccgtggagcagaagaaggcctacgagatgagcgagctgctgggcgacatcggcggccagatgggcctgttcatcggcgccagcctgctgaccatcctggagatcctggactacctgtgcgaggtgttcagagacaaggtgctgggctacttctggaacagacagcacagccagagacacagcagcaccaacctgaccagccaccccagcctgtgcagacaccaggacagcctgagactgcccccccacctgctgccctgccacaccgccctggacctgctgagcgtgagcagcgagcccagacccgacatcctggacatgcccagcctgcacgtggccttccccagcagcccccagatcaagagctag

SEQ ID NO: 72598 - DNA, 1944 bp, synthetic construct
  misc_feature 1..1944: note = Description of Artificial Sequence: Synthetic coding sequence
  source 1..1944: mol_type = other DNA
atgctgagcggcgccgccggcgccgccagaagaggcggcgccgccctggcccccagcctgaccagaagcctggccggcacccacgccggcgccgacagctgcgccggcgccgacaagggcagccacaaggagaccatcgaggagagagacaagagacagcagagacagcagagacagagacagcaccagggctgcggcgccgccggcagcggcagcgacagccccaccagcggcccccaccccgtgcccgtgctgttccccctggccctgagcctggaggagcagcccctgccccccctgcccctgggcagagcccccggcctgctggccagagagggccagggcagagaggccctggccagccccagcagcagaggccagatgcccatcgagatcgtgtgcaagatcaagttcgccgaggaggacgccaagcccaaggagaaggaggccggcgacgagcagagcctgctgggcgccgtggcccccggcgccgcccccagagacctggccaccttcgccagcaccagcaccctgcacggcctgggcagagcctgcggccccggcccccacggcctgagaagaaccctgtgggccctggccctgctgaccagcctggccgccttcctgtaccaggccgccggcctggccagaggctacctgaccagaccccacctggtggccatggaccccgccgcccccgcccccgtggccggcttccccgccgtgaccctgtgcaacatcaacagattcagacacagcgccctgagcgacgccgacatcttccacctggccaacctgaccggcctgccccccaaggacagagacggccacagagccgccggcctgagataccccgagcccgacatggtggacatcctgaacagaaccggccaccagctggccgacatgctgaagagctgcaacttcagcggccaccactgcagcgccagcaacttcagcgtggtgtacaccagatacggcaagtgctacaccttcaacgccgaccccagaagcagcctgcccagcagagccggcggcatgggcagcggcctggagatcatgctggacatccagcaggaggagtacctgcccatctggagagagaccaacgagaccagcttcgaggccggcatcagagtgcagatccacagccaggaggagcccccctacatccaccagctgggcttcggcgtgagccccggcttccagaccttcgtgagctgccaggagcagagactgacctacctgccccagccctggggcaactgcagagccgagagcgagctgagagagcccgagctgcagggctacagcgcctacagcgtgagcgcctgcagactgagatgcgagaaggaggccgtgctgcagagatgccactgcagaatggtgcacatgcccgacagcctgggcggcggccccgagggcccctgcttctgccccaccccctgcaacctgaccagatacggcaaggagatcagcatggtgagaatccccaacagaggcagcgccagatacctggccagaaagtacaacagaaacgagacctacatcagagagaacttcctggtgctggacgtgttcttcgaggccctgaccagcgaggccatggagcagagagccgcctacggcctgagcgccctgctgggcgacctgggcggccagatgggcctgttcatcggcgccagcatcctgaccctgctggagatcctggactacatctacgaggtgagctgggacagactgaagagagtgtggagaagacccaagacccccctgagaaccagcaccggcggcatcagcaccctgggcctgcaggagctgaaggagcagagcccctgccccagcagaggcagagtggagggcggcggcgtgagcagcctgctgcccaaccaccaccacccccacggcccccccggcggcctgttcgaggacttcgcctgctag

SEQ ID NO: 72599 - DNA, 2001 bp, synthetic construct
  misc_feature 1..2001: note = Description of Artificial Sequence: Synthetic coding sequence
  source 1..2001: mol_type = other DNA
atgctgagcggcgccgccggcgccgccagaagaggcggcgccgccctggcccccagcctgaccagaagcctggccggcacccacgccggcgccgacagctgcgccggcgccgacaagggcagccacaaggagaccatcgaggagagagacaagagacagcagagacagcagagacagagacagcaccagggctgcggcgccgccggcagcggcagcgacagccccaccagcggcccccaccccgtgcccgtgctgttccccctggccctgagcctggaggagcagcccctgccccccctgcccctgggcagagcccccggcctgctggccagagagggccagggcagagaggccctggccagccccagcagcagaggccagatgcccatcgagatcgtgtgcaagatcaagttcgccgaggaggacgccaagcccaaggagaaggaggccggcgacgagcagagcctgctgggcgccgtggcccccggcgccgcccccagagacctggccaccttcgccagcaccagcaccctgcacggcctgggcagagcctgcggccccggcccccacggcctgagaagaaccctgtgggccctggccctgctgaccagcctggccgccttcctgtaccaggccgccggcctggccagaggctacctgaccagaccccacctggtggccatggaccccgccgcccccgcccccgtggccggcttccccgccgtgaccctgtgcaacatcaacagattcagacacagcgccctgagcgacgccgacatcttccacctggccaacctgaccggcctgccccccaaggacagagacggccacagagccgccggcctgagataccccgagcccgacatggtggacatcctgaacagaaccggccaccagctggccgacatgctgaagagctgcaacttcagcggccaccactgcagcgccagcaacttcagcgtggtgtacaccagatacggcaagtgctacaccttcaacgccgaccccagaagcagcctgcccagcagagccggcggcatgggcagcggcctggagatcatgctggacatccagcaggaggagtacctgcccatctggagagagaccaacgagaccagcttcgaggccggcatcagagtgcagatccacagccaggaggagcccccctacatccaccagctgggcttcggcgtgagccccggcttccagaccttcgtgagctgccaggagcagagactgacctacctgccccagccctggggcaactgcagagccgagagcgagctgagagagcccgagctgcagggctacagcgcctacagcgtgagcgcctgcagactgagatgcgagaaggaggccgtgctgcagagatgccactgcagaatggtgcacatgcccggcaacgagaccatctgcccccccaacatctacatcgagtgcgccgaccacaccctggacagcctgggcggcggccccgagggcccctgcttctgccccaccccctgcaacctgaccagatacggcaaggagatcagcatggtgagaatccccaacagaggcagcgccagatacctggccagaaagtacaacagaaacgagacctacatcagagagaacttcctggtgctggacgtgttcttcgaggccctgaccagcgaggccatggagcagagagccgcctacggcctgagcgccctgctgggcgacctgggcggccagatgggcctgttcatcggcgccagcatcctgaccctgctggagatcctggactacatctacgaggtgagctgggacagactgaagagagtgtggagaagacccaagacccccctgagaaccagcaccggcggcatcagcaccctgggcctgcaggagctgaaggagcagagcccctgccccagcagaggcagagtggagggcggcggcgtgagcagcctgctgcccaaccaccaccacccccacggcccccccggcggcctgttcgaggacttcgcctgctag

SEQ ID NO: 72600 - DNA, 2271 bp, synthetic construct
  misc_feature 1..2271: note = Description of Artificial Sequence: Synthetic coding sequence
  source 1..2271: mol_type = other DNA
atgcacctgaagatcgtgctggccttcctggccctgagcctgatcaccatcttcgccctggcctacgtgctgctgaccagccccggcggcagcagccagcccccccactgccccagcgtgagccacagagcccagccctggccccaccccggccagagccagctgttcgccgacctgagcagagaggagctgaccgccgtgatgagattcctgacccagagactgggccccggcctggtggacgccgcccaggcccagcccagcgacaactgcatcttcagcgtggagctgcagctgccccccaaggccgccgccctggcccacctggacagaggcagccccccccccgccagagaggccctggccatcgtgctgttcggcggccagccccagcccaacgtgagcgagctggtggtgggccccctgccccaccccagctacatgagagacgtgaccgtggagagacacggcggccccctgccctaccacagaagacccgtgctgagagccgagttcacccagatgtggagacacctgaaggaggtggagctgcccaaggcccccatcttcctgagcagcaccttcaactacaacggcagcaccctggccgccgtgcacgccacccccagaggcctgagaagcggcgacagagccacctggatggccctgtaccacaacatcagcggcgtgggcctgttcctgcaccccgtgggcctggagctgctgctggaccacagagccctggaccccgcccactggaccgtgcagcaggtgttctacctgggccactactacgccgacctgggccagctggagagagagttcaagagcggcagactggaggtggtgagagtgcccctgcccccccccaacggcgccagcagcctgagaagcagaaacagccccggccccctgccccccctgcagttcagcccccagggcagccagtacagcgtgcagggcaacctggtggtgagcagcctgtggagcttcaccttcggccacggcgtgttcagcggcctgagaatcttcgacgtgagattccagggcgagagaatcgcctacgaggtgagcgtgcaggagtgcgtgagcatctacggcgccgacagccccaagaccatgctgaccagatacctggacagcagcttcggcctgggcagaaacagcagaggcctggtgagaggcgtggactgcccctaccaggccaccatggtggacatccacatcctggtgggcaagggcgccgtgcagctgctgcccggcgccgtgtgcgtgttcgaggaggcccagggcctgcccctgagaagacaccacaactacctgcagaaccacttctacggcggcctggccagcagcgccctggtggtgagaagcgtgagcagcgtgggcaactacgactacatctgggacttcgtgctgtaccccaacggcgccctggagggcagagtgcacgccaccggctacatcaacaccgccttcctgaagggcggcgaggagggcctgctgttcggcaacagagtgggcgagagagtgctgggcaccgtgcacacccacgccttccacttcaagctggacctggacgtggccggcctgaagaactgggtggtggccgaggacgtggtgttcaagcccgtggccgccccctggaaccccgagcactggctgcagagaccccagctgaccagacaggtgctgggcaaggaggacctgaccgccttcagcctgggcagccccctgcccagatacctgtacctggccagcaaccagaccaacgcctggggccaccagagaggctacagaatccagatccacagccccctgggcatccacatccccctggagagcgacatggagagagccctgagctggggcagataccagctggtggtgacccagagaaaggaggaggagagccagagcagcagcatctaccaccagaacgacatctggacccccaccgtgaccttcgccgacttcatcaacaacgagaccctgctgggcgaggacctggtggcctgggtgaccgccagcttcctgcacatcccccacgccgaggacatccccaacaccgtgaccctgggcaacagagtgggcttcctgctgagaccctacaacttcttcgacgaggaccccagcatcttcagccccggcagcgtgtacttcgagaagggccaggacgccggcctgtgcagcatcaaccccgtggcctgcctgcccgacctggccgcctgcgtgcccgacctgccccccttcagctaccacggcttctag

SEQ ID NO: 72601 - DNA, 2190 bp, synthetic construct
  misc_feature 1..2190: note = Description of Artificial Sequence: Synthetic coding sequence
  source 1..2190: mol_type = other DNA
atgcacctgaagatcgtgctggccttcctggccctgagcctgatcaccatcttcgccctggcctacgtgctgctgaccagccccggcggcagcagccagcccccccactgccccagcgtgagccacagagcccagccctggccccaccccggccagagccagctgttcgccgacctgagcagagaggagctgaccgccgtgatgagattcctgacccagagactgggccccggcctggtggacgccgcccaggcccagcccagcgacaactgcatcttcagcgtggagctgcagctgccccccaaggccgccgccctggcccacctggacagaggcagccccccccccgccagagaggccctggccatcgtgctgttcggcggccagccccagcccaacgtgagcgagctggtggtgggccccctgccccaccccagctacatgagagacgtgaccgtggagagacacggcggccccctgccctaccacagaagacccgtgctgagagccgagttcacccagatgtggagacacctgaaggaggtggagctgcccaaggcccccatcttcctgagcagcaccttcaactacaacggcagcaccctggccgccgtgcacgccacccccagaggcctgagaagcggcgacagagccacctggatggccctgtaccacaacatcagcggcgtgggcctgttcctgcaccccgtgggcctggagctgctgctggaccacagagccctggaccccgcccactggaccgtgcagcaggtgttctacctgggccactactacgccgacctgggccagctggagagagagttcaagagcggcagactggaggtggtgagagtgcccctgcccccccccaacggcgccagcagcctgagaagcagaaacagccccggccccctgccccccctgcagttcagcccccagggcagccagtacagcgtgcagggcaacctggtggtgagcagcctgtggagcttcaccttcggccacggcgtgttcagcggcctgagaatcttcgacgtgagattccagggcgagagaatcgcctacgaggtgagcgtgcaggagtgcgtgagcatctacggcgccgacagccccaagaccatgctgaccagatacctggacagcagcttcggcctgggcagaaacagcagaggcctggtgagaggcgtggactgcccctaccaggccaccatggtggacatccacatcctggtgggcaagggcgccgtgcagctgctgcccggcgccgtgtgcgtgttcgaggaggcccagggcctgcccctgagaagacaccacaactacctgcagaaccacttctacggcggcctggccagcagcgccctggtggtgagaagcgtgagcagcgtgggcaactacgactacatctgggacttcgtgctgtaccccaacggcgccctggagggcagagtgcacgccaccggctacatcaacaccgccttcctgaagggcggcgaggagggcctgctgttcggcaacagagtgggcgagagagtgctgggcaccgtgcacacccacgccttccacttcaagctggacctggacgtggccggcctgaagaactgggtggtggccgaggacgtggtgttcaagcccgtggccgccccctggaaccccgagcactggctgcagagaccccagctgaccagacaggtgctgggcaaggaggacctgaccgccttcagcctgggcagccccctgcccagatacctgtacctggccagcaaccagaccaacgcctggggccaccagagaggctaccagctggtggtgacccagagaaaggaggaggagagccagagcagcagcatctaccaccagaacgacatctggacccccaccgtgaccttcgccgacttcatcaacaacgagaccctgctgggcgaggacctggtggcctgggtgaccgccagcttcctgcacatcccccacgccgaggacatccccaacaccgtgaccctgggcaacagagtgggcttcctgctgagaccctacaacttcttcgacgaggaccccagcatcttcagccccggcagcgtgtacttcgagaagggccaggacgccggcctgtgcagcatcaaccccgtggcctgcctgcccgacctggccgcctgcgtgcccgacctgccccccttcagctaccacggcttctag

SEQ ID NO: 72602 - DNA, 2292 bp, synthetic construct
  misc_feature 1..2292: note = Description of Artificial Sequence: Synthetic coding sequence
  source 1..2292: mol_type = other DNA
atgaaccagaagaccatcctggtgctgctgatcctggccgtgatcaccatcttcgccctggtgtgcgtgctgctggtgggcagaggcggcgacggcggcgagcccagccagctgccccactgccccagcgtgagccccagcgcccagccctggacccaccccggccagagccagctgttcgccgacctgagcagagaggagctgaccgccgtgatgagattcctgacccagagactgggccccggcctggtggacgccgcccaggccagacccagcgacaactgcgtgttcagcgtggagctgcagctgccccccaaggccgccgccctggcccacctggacagaggcagccccccccccgccagagaggccctggccatcgtgttcttcggcagacagccccagcccaacgtgagcgagctggtggtgggccccctgccccaccccagctacatgagagacgtgaccgtggagagacacggcggccccctgccctaccacagaagacccgtgctgttccaggagtacctggacatcgaccagatgatcttcaacagagagctgccccaggccagcggcctgctgcaccactgctgcttctacaagcacagaggcagaaacctggtgaccatgaccaccgcccccagaggcctgcagagcggcgacagagccacctggttcggcctgtactacaacatcagcggcgccggcttcttcctgcaccacgtgggcctggagctgctggtgaaccacaaggccctggaccccgccagatggaccatccagaaggtgttctaccagggcagatactacgacagcctggcccagctggaggcccagttcgaggccggcctggtgaacgtggtgctgatccccgacaacggcaccggcggcagctggagcctgaagagccccgtgccccccggccccgccccccccctgcagttctacccccagggccccagattcagcgtgcagggcagcagagtggccagcagcctgtggaccttcagcttcggcctgggcgccttcagcggccccagaatcttcgacgtgagattccagggcgagagactggtgtacgagatcagcctgcaggaggccctggccatctacggcggcaacagccccgccgccatgaccaccagatacgtggacggcggcttcggcatgggcaagtacaccacccccctgaccagaggcgtggactgcccctacctggccacctacgtggactggcacttcctgctggagagccaggcccccaagaccatcagagacgccttctgcgtgttcgagcagaaccagggcctgcccctgagaagacaccacagcgacctgtacagccactacttcggcggcctggccgagaccgtgctggtggtgagaagcatgagcaccctgctgaactacgactacgtgtgggacaccgtgttccaccccagcggcgccatcgagatcagattctacgccaccggctacatcagcagcgccttcctgttcggcgccaccggcaagtacggcaaccaggtgagcgagcacaccctgggcaccgtgcacacccacagcgcccacttcaaggtggacctggacgtggccggcctggagaactgggtgtgggccgaggacatggtgttcgtgcccatggccgtgccctggagccccgagcaccagctgcagagactgcaggtgaccagaaagctgctggagatggaggagcaggccgccttcctggtgggcagcgccacccccagatacctgtacctggccagcaaccacagcaacaagtggggccaccccagaggctacagaatccagatgctgagcttcgccggcgagcccctgccccagaacagcagcatggccagaggcttcagctgggagagataccagctggccgtgacccagagaaaggaggaggagcccagcagcagcagcgtgttcaaccagaacgacccctgggcccccaccgtggacttcagcgacttcatcaacaacgagaccatcgccggcaaggacctggtggcctgggtgaccgccggcttcctgcacatcccccacgccgaggacatccccaacaccgtgaccgtgggcaacggcgtgggcttcttcctgagaccctacaacttcttcgacgaggaccccagcttctacagcgccgacagcatctacttcagaggcgaccaggacgccggcgcctgcgaggtgaaccccctggcctgcctgccccaggccgccgcctgcgcccccgacctgcccgccttcagccacggcggcttcagccacaactag

SEQ ID NO: 72603 - DNA, 939 bp, synthetic construct
  misc_feature 1..939: note = Description of Artificial Sequence: Synthetic coding sequence
  source 1..939: mol_type = other DNA
atggccaacaacgacgccgtgctgaagagactggagcagaagggcgccgaggccgaccagatcatcgagtacctgaagcagcaggtgagcctgctgaaggagaaggccatcctgcaggccaccctgagagaggagaagaagctgagagtggagaacgccaagctgaagaaggagatcgaggagctgaagcaggagctgatccaggccgagatccagaacggcgtgaagcagatccccttccccagcggcacccccctgcacgccaacagcatggtgagcgagaacgtgatccagagcaccgccgtgaccaccgtgagcagcggcaccaaggagcagatcaagggcggcaccggcgacgagaagaaggccaaggagaagatcgagaagaagggcgagaagaaggagaagaagcagcagagcatcgccggcagcgccgacagcaagcccatcgacgtgagcagactggacctgagaatcggctgcatcatcaccgccagaaagcaccccgacgccgacagcctgtacgtggaggaggtggacgtgggcgagatcgcccccagaaccgtggtgagcggcctggtgaaccacgtgcccctggagcagatgcagaacagaatggtgatcctgctgtgcaacctgaagcccgccaagatgagaggcgtgctgagccaggccatggtgatgtgcgccagcagccccgagaagatcgagatcctggccccccccaacggcagcgtgcccggcgacagaatcaccttcgacgccttccccggcgagcccgacaaggagctgaaccccaagaagaagatctgggagcagatccagcccgacctgcacaccaacgacgagtgcgtggccacctacaagggcgtgcccttcgaggtgaagggcaagggcgtgtgcagagcccagaccatgagcaacagcggcatcaagtag

SEQ ID NO: 72604 - DNA, 1011 bp, synthetic construct
  misc_feature 1..1011: note = Description of Artificial Sequence: Synthetic coding sequence
  source 1..1011: mol_type = other DNA
atgctgcccgccgtggccgtgagcgagcccgtggtgctgagattcatgatcttctgcagactgctggccaagatggccaacaacgacgccgtgctgaagagactggagcagaagggcgccgaggccgaccagatcatcgagtacctgaagcagcaggtgagcctgctgaaggagaaggccatcctgcaggccaccctgagagaggagaagaagctgagagtggagaacgccaagctgaagaaggagatcgaggagctgaagcaggagctgatccaggccgagatccagaacggcgtgaagcagatccccttccccagcggcacccccctgcacgccaacagcatggtgagcgagaacgtgatccagagcaccgccgtgaccaccgtgagcagcggcaccaaggagcagatcaagggcggcaccggcgacgagaagaaggccaaggagaagatcgagaagaagggcgagaagaaggagaagaagcagcagagcatcgccggcagcgccgacagcaagcccatcgacgtgagcagactggacctgagaatcggctgcatcatcaccgccagaaagcaccccgacgccgacagcctgtacgtggaggaggtggacgtgggcgagatcgcccccagaaccgtggtgagcggcctggtgaaccacgtgcccctggagcagatgcagaacagaatggtgatcctgctgtgcaacctgaagcccgccaagatgagaggcgtgctgagccaggccatggtgatgtgcgccagcagccccgagaagatcgagatcctggccccccccaacggcagcgtgcccggcgacagaatcaccttcgacgccttccccggcgagcccgacaaggagctgaaccccaagaagaagatctgggagcagatccagcccgacctgcacaccaacgacgagtgcgtggccacctacaagggcgtgcccttcgaggtgaagggcaagggcgtgtgcagagcccagaccatgagcaacagcggcatcaagtag

SEQ ID NO: 72605 - DNA, 810 bp, synthetic construct
  misc_feature 1..810: note = Description of Artificial Sequence: Synthetic coding sequence
  source 1..810: mol_type = other DNA
atggccaacaacgacgccgtgctgaagagactggagcagaagggcgccgaggccgaccagatcatcgagtacctgaagcagcaggtgagcctgctgaaggagaaggccatcctgcaggccaccctgagagaggagaagaagctgagagtggagaacgccaagctgaagaaggagatcgaggagctgaagcaggagctgatccaggccgagatccagaacggcgtgaagcagatccccttccccagcggcacccccctgcacgccaacagcatggtgagcgagaacgtgatccagagcaccgccgtgaccaccgtgagcagcggcaccaaggagcagatcaagggcggcaccggcgacgagaagaaggccaaggagaagatcgagaagaagggcgagaagaaggagaagaagcagcagagcatcgcccccagaaccgtggtgagcggcctggtgaaccacgtgcccctggagcagatgcagaacagaatggtgatcctgctgtgcaacctgaagcccgccaagatgagaggcgtgctgagccaggccatggtgatgtgcgccagcagccccgagaagatcgagatcctggccccccccaacggcagcgtgcccggcgacagaatcaccttcgacgccttccccggcgagcccgacaaggagctgaaccccaagaagaagatctgggagcagatccagcccgacctgcacaccaacgacgagtgcgtggccacctacaagggcgtgcccttcgaggtgaagggcaagggcgtgtgcagagcccagaccatgagcaacagcggcatcaagtag

SEQ ID NO: 72606 - DNA, 939 bp, synthetic construct; identical to SEQ ID NO: 72603
  misc_feature 1..939: note = Description of Artificial Sequence: Synthetic coding sequence
  source 1..939: mol_type = other DNA

SEQ ID NO: 72607 - DNA, 453 bp, synthetic construct
  misc_feature 1..453: note = Description of Artificial Sequence: Synthetic coding sequence
  source 1..453: mol_type = other DNA
atggccaacaacgacgccgtgctgaagagactggagcagaagggcgccgaggccgaccagatcatcgagtacctgaagcagcaggtgagcctgctgaaggagaaggccatcctgcaggccaccctgagagaggagaagaagctgagagtggagaacgccaagctgaagaaggagatcgaggagctgaagcaggagctgatccaggccgagatccagaacggcgtgaagcagatccccttccccagcggcacccccctgcacgccaacagcatggtgagcgagaacgtgatccagagcaccgccgtgaccaccgtgagcagcggcaccaaggagcagatcaagggcggcaccggcgacgagaagaaggccaaggagaagatcgagaagaagggcgagaagaaggagaagaagcagcagagcatcgccggcagcgccgacagcaagcccatctag

SEQ ID NO: 72608 - DNA, 1227 bp, synthetic construct
  misc_feature 1..1227: note = Description of Artificial Sequence: Synthetic coding sequence
  source 1..1227: mol_type = other DNA
atgaccagcaagggccccgaggaggagcaccccagcgtgaccctgttcagacagtacctgagaatcagaaccgtgcagcccaagcccgactacggcgccgccgtggccttcttcgaggagaccgccagacagctgggcctgggctgccagaaggtggaggtggcccccggctacgtggtgaccgtgctgacctggcccggcaccaaccccaccctgagcagcatcctgctgaacagccacaccgacgtggtgcccgtgttcaaggagcactggagccacgaccccttcgaggccttcaaggacagcgagggctacatctacgccagaggcgcccaggacatgaagtgcgtgagcatccagtacctggaggccgtgagaagactgaaggtggagggccacagattccccagaaccatccacatgaccttcgtgcccgacgaggaggtgggcggccaccagggcatggagctgttcgtgcagagacccgagttccacgccctgagagccggcttcgccctggacgagggcatcgccaaccccaccgacgccttcaccgtgttctacagcgagagaagcccctggtgggtgagagtgaccagcaccggcagacccggccacgccagcagattcatggaggacaccgccgccgagaagctgcacaaggtggtgaacagcatcctggccttcagagagaaggagtggcagagactgcagagcaacccccacctgaaggagggcagcgtgaccagcgtgaacctgaccaagctggagggcggcgtggcctacaacgtgatccccgccaccatgagcgccagcttcgacttcagagtggcccccgacgtggacttcaaggccttcgaggagcagctgcagagctggtgccaggccgccggcgagggcgtgaccctggagttcgcccagaagtggatgcacccccaggtgacccccaccgacgacagcaacccctggtgggccgccttcagcagagtgtgcaaggacatgaacctgaccctggagcccgagatcatgcccgccgccaccgacaacagatacatcagagccgtgggcgtgcccgccctgggcttcagccccatgaacagaacccccgtgctgctgcacgaccacgacgagagactgcacgaggccgtgttcctgagaggcgtggacatctacaccagactgctgcccgccctggccagcgtgcccgccctgcccagcgacagctag

SEQ ID NO: 72609 - DNA, 1497 bp, synthetic construct
  misc_feature 1..1497: note = Description of Artificial Sequence: Synthetic coding sequence
  source 1..1497: mol_type = other DNA
atgtggggctgccaggcccccctgagcagactgcccgccagcggcgagacccccatgagccagagctggctggtgagccccctggccaccagacccagcttcaccgccagatgcagccacagcaccagacacaccggctggagatggtgctgcttcatggagagacccctgaccctgaccagaggcagcagctgggcccactgcagctactgccacagaggcgccaccggcccctggcccctgaccttccagctgaccaccagaagcgccatgaccagcaagggccccgaggaggagcaccccagcgtgaccctgttcagacagtacctgagaatcagaaccgtgcagcccaagcccgactacggcgccgccgtggccttcttcgaggagaccgccagacagctgggcctgggctgccagaaggtggaggtggcccccggctacgtggtgaccgtgctgacctggcccggcaccaaccccaccctgagcagcatcctgctgaacagccacaccgacgtggtgcccgtgttcaaggagcactggagccacgaccccttcgaggccttcaaggacagcgagggctacatctacgccagaggcgcccaggacatgaagtgcgtgagcatccagtacctggaggccgtgagaagactgaaggtggagggccacagattccccagaaccatccacatgaccttcgtgcccgacgaggaggtgggcggccaccagggcatggagctgttcgtgcagagacccgagttccacgccctgagagccggcttcgccctggacgagggcatcgccaaccccaccgacgccttcaccgtgttctacagcgagagaagcccctggtgggtgagagtgaccagcaccggcagacccggccacgccagcagattcatggaggacaccgccgccgagaagctgcacaaggtggtgaacagcatcctggccttcagagagaaggagtggcagagactgcagagcaacccccacctgaaggagggcagcgtgaccagcgtgaacctgaccaagctggagggcggcgtggcctacaacgtgatccccgccaccatgagcgccagcttcgacttcagagtggcccccgacgtggacttcaaggccttcgaggagcagctgcagagctggtgccaggccgccggcgagggcgtgaccctggagttcgcccagaagtggatgcacccccaggtgacccccaccgacgacagcaacccctggtgggccgccttcagcagagtgtgcaaggacatgaacctgaccctggagcccgagatcatgcccgccgccaccgacaacagatacatcagagccgtgggcgtgcccgccctgggcttcagccccatgaacagaacccccgtgctgctgcacgaccacgacgagagactgcacgaggccgtgttcctgagaggcgtggacatctacaccagactgctgcccgccctggccagcgtgcccgccctgcccagcgacagctag

SEQ ID NO: 72610 - DNA, 1122 bp, synthetic construct
  misc_feature 1..1122: note = Description of Artificial Sequence: Synthetic coding sequence
  source 1..1122: mol_type = other DNA
atgaccagcaagggccccgaggaggagcaccccagcgtgaccctgttcagacagtacctgagaatcagaaccgtgcagcccaagcccgactacggcaccaaccccaccctgagcagcatcctgctgaacagccacaccgacgtggtgcccgtgttcaaggagcactggagccacgaccccttcgaggccttcaaggacagcgagggctacatctacgccagaggcgcccaggacatgaagtgcgtgagcatccagtacctggaggccgtgagaagactgaaggtggagggccacagattccccagaaccatccacatgaccttcgtgcccgacgaggaggtgggcggccaccagggcatggagctgttcgtgcagagacccgagttccacgccctgagagccggcttcgccctggacgagggcatcgccaaccccaccgacgccttcaccgtgttctacagcgagagaagcccctggtgggtgagagtgaccagcaccggcagacccggccacgccagcagattcatggaggacaccgccgccgagaagctgcacaaggtggtgaacagcatcctggccttcagagagaaggagtggcagagactgcagagcaacccccacctgaaggagggcagcgtgaccagcgtgaacctgaccaagctggagggcggcgtggcctacaacgtgatccccgccaccatgagcgccagcttcgacttcagagtggcccccgacgtggacttcaaggccttcgaggagcagctgcagagctggtgccaggccgccggcgagggcgtgaccctggagttcgcccagaagtggatgcacccccaggtgacccccaccgacgacagcaacccctggtgggccgccttcagcagagtgtgcaaggacatgaacctgaccctggagcccgagatcatgcccgccgccaccgacaacagatacatcagagccgtgggcgtgcccgccctgggcttcagccccatgaacagaacccccgtgctgctgcacgaccacgacgagagactgcacgaggccgtgttcctgagaggcgtggacatctacaccagactgctgcccgccctggccagcgtgcccgccctgcccagcgacagctag

SEQ ID NO: 72611 - DNA, 1032 bp, synthetic construct
  misc_feature 1..1032: note = Description of Artificial Sequence: Synthetic coding sequence
  source 1..1032: mol_type = other DNA
atgaccagcaagggccccgaggaggagcaccccagcgtgaccctgttcagacagtacctgagaatcagaaccgtgcagcccaagcccgactacggcgccgccgtggccttcttcgaggagaccgccagacagctgggcctgggctgccagaaggtggaggtggcccccggctacgtggtgaccgtgctgacctggcccggcaccaaccccaccctgagcagcatcctgctgaacagccacaccgacgtggtgcccgtgttcaaggagcactggagccacgaccccttcgaggccttcaaggacagcgagggctacatctacgccagaggcgcccaggacatgaagtgcgtgagcatccagtacctggaggccgtgagaagactgaaggtggagggccacagattccccagaaccatccacatgaccttcgtgcccgacgaggaggtgggcggccaccagggcatggagctgttcgtgcagagacccgagttccacgccctgagagccggcttcgccctggacgagggcatcgccaaccccaccgacgccttcaccgtgttctacagcgagagaagcccctggtgggtgagagtgaccagcaccggcagacccggccacgccagcagattcatggaggacaccgccgccgagaagctggccttcgaggagcagctgcagagctggtgccaggccgccggcgagggcgtgaccctggagttcgcccagaagtggatgcacccccaggtgacccccaccgacgacagcaacccctggtgggccgccttcagcagagtgtgcaaggacatgaacctgaccctggagcccgagatcatgcccgccgccaccgacaacagatacatcagagccgtgggcgtgcccgccctgggcttcagccccatgaacagaacccccgtgctgctgcacgaccacgacgagagactgcacgaggccgtgttcctgagaggcgtggacatctacaccagactgctgcccgccctggccagcgtgcccgccctgcccagcgacagctag

SEQ ID NO: 72612 - DNA, 1011 bp, synthetic construct
  misc_feature 1..1011: note = Description of Artificial Sequence: Synthetic coding sequence
  source 1..1011: mol_type = other DNA
atgaccagcaagggccccgaggaggagcaccccagcgtgaccctgttcagacagtacctgagaatcagaaccgtgcagcccaagcccgactacggcgccgccgtggccttcttcgaggagaccgccagacagctgggcctgggctgccagaaggtggaggtggcccccggctacgtggtgaccgtgctgacctggcccggcaccaaccccaccctgagcagcatcctgctgaacagccacaccgacgtggtgcccgtgttcaaggagcactggagccacgaccccttcgaggccttcaaggacagcgagggcatcgccaaccccaccgacgccttcaccgtgttctacagcgagagaagcccctggtgggtgagagtgaccagcaccggcagacccggccacgccagcagattcatggaggacaccgccgccgagaagctgcacaaggtggtgaacagcatcctggccttcagagagaaggagtggcagagactgcagagcaacccccacctgaaggagggcagcgtgaccagcgtgaacctgaccaagctggagggcggcgtggcctacaacgtgatccccgccaccatgagcgccagcttcgacttcagagtggcccccgacgtggacttcaaggccttcgaggagcagctgcagagctggtgccaggccgccggcgagggcgtgaccctggagttcgcccagaagtggatgcacccccaggtgacccccaccgacgacagcaacccctggtgggccgccttcagcagagtgtgcaaggacatgaacctgaccctggagcccgagatcatgcccgccgccaccgacaacagatacatcagagccgtgggcgtgcccgccctgggcttcagccccatgaacagaacccccgtgctgctgcacgaccacgacgagagactgcacgaggccgtgttcctgagaggcgtggacatctacaccagactgctgcccgccctggccagcgtgcccgccctgcccagcgacagctag

SEQ ID NO: 72613 - DNA, 1278 bp, synthetic construct
  misc_feature 1..1278: note = Description of Artificial Sequence: Synthetic coding sequence
  source 1..1278: mol_type = other DNA
atgaactacgccagattcatcaccgccgccagcgccgccagaaaccccagccccatcagaaccatgaccgacatcctgagcagaggccccaagagcatgatcagcctggccggcggcctgcccaaccccaacatgttccccttcaagaccgccgtgatcaccgtggagaacggcaagaccatccagttcggcgaggagatgatgaagagagccctgcagtacagccccagcgccggcatccccgagctgctgagctggctgaagcagctgcagatcaagctgcacaacccccccaccatccactacccccccagccagggccagatggacctgtgcgtgaccagcggcagccagcagggcctgtgcaaggtgttcgagatgatcatcaaccccggcgacaacgtgctgctggacgagcccgcctacagcggcaccctgcagagcctgcaccccctgggctgcaacatcatcaacgtggccagcgacgagagcggcatcgtgcccgacagcctgagagacatcctgagcagatggaagcccgaggacgccaagaacccccagaagaacacccccaagttcctgtacaccgtgcccaacggcaacaaccccaccggcaacagcctgaccagcgagagaaagaaggagatctacgagctggccagaaagtacgacttcctgatcatcgaggacgacccctactacttcctgcagttcaacaagttcagagtgcccaccttcctgagcatggacgtggacggcagagtgatcagagccgacagcttcagcaagatcatcagcagcggcctgagaatcggcttcctgaccggccccaagcccctgatcgagagagtgatcctgcacatccaggtgagcaccctgcaccccagcaccttcaaccagctgatgatcagccagctgctgcacgagtggggcgaggagggcttcatggcccacgtggacagagtgatcgacttctacagcaaccagaaggacgccatcctggccgccgccgacaagtggctgaccggcctggccgagtggcacgtgcccgccgccggcatgttcctgtggatcaaggtgaagggcatcaacgacgtgaaggagctgatcgaggagaaggccgtgaagatgggcgtgctgatgctgcccggcaacgccttctacgtggacagcagcgcccccagcccctacctgagagccagcttcagcagcgccagccccgagcagatggacgtggccttccaggtgctggcccagctgatcaaggagagcctgtag

SEQ ID NO: 72614 - DNA, 1278 bp, synthetic construct; identical to SEQ ID NO: 72613
  misc_feature 1..1278: note = Description of Artificial Sequence: Synthetic coding sequence
  source 1..1278: mol_type = other DNA

SEQ ID NO: 72615 - DNA, 543 bp, synthetic construct
  misc_feature 1..543: note = Description of Artificial Sequence: Synthetic coding sequence
  source 1..543: mol_type = other DNA
atgaactacgccagattcatcaccgccgccagcgccgccagaaaccccagccccatcagaaccatgaccgacatcctgagcagaggccccaagagcatgatcagcctggccggcggcctgcccaaccccaacatgttccccttcaagaccgccgtgatcaccgtggagaacggcaagaccatccagttcggcgaggagatgatgaagagagccctgcagtacagccccagcgccggcatccccgagctgctgagctggctgaagcagctgcagatcaagctgcacaacccccccaccatccactacccccccagccagggccagatggacctgtgcgtgaccagcggcagccagcagggcctgtgcaaggtgttcgagatgatcatcaaccccggcgacaacgtgctgctggacgagcccgcctacagcggcaccctgcagagcctgcaccccctgggctgcaacatcatcaacgtggccagcgacgagagcggcatcgtgcccgacagcctgagagacatcctgagcagatggaagccctag

SEQ ID NO: 72616 - DNA, 630 bp, synthetic construct
  misc_feature 1..630: note = Description of Artificial Sequence: Synthetic coding sequence
  source 1..630: mol_type = other DNA
atgaactacgccagattcatcaccgccgccagcgccgccagaaaccccagccccatcagaaccatgaccgacatcctgagcagaggccccaagagcatgatcagcctggccggcggcctgcccaaccccaacatgttccccttcaagaccgccgtgatcaccgtggagaacggcaagaccatccagttcggcgaggagatgatgaagagagccctgcagtacagccccagcgccggcatccccgagctgctgagctggctgaagcagctgcagatcaagctgcacaacccccccaccatccactacccccccagccagggccagatggacctgtgcgtgaccagcggcagccagcagggcctgtgcaaggtgttcgagatgatcatcaaccccggcgacaacgtgctgctggacgagcccgcctacagcggcaccctgcagagcctgcaccccctgggctgcaacatcatcaacgtggccagcgacgagagcggcatcgtgcccgacagcctgagagacatcctgagcagatggaagcccgaggacgccaagaacccccagaagaacacccccaagttcctgtacaccgtgcccaacggcaacaaccccaccggcaacagcctgacctag

SEQ ID NO: 72617 - DNA, 1290 bp, synthetic construct
  misc_feature 1..1290: note = Description of Artificial Sequence: Synthetic coding sequence
  source 1..1290: mol_type = other DNA
atgaactacgccagattcatcaccgccgccagcgccgccagaaaccccagccccatcagaaccatgagcgagaagagagccgacatcctgagcagaggccccaagagcatgatcagcctggccggcggcctgcccaaccccaacatgttccccttcaagaccgccgtgatcaccgtggagaacggcaagaccatccagttcggcgaggagatgatgaagagagccctgcagtacagccccagcgccggcatccccgagctgctgagctggctgaagcagctgcagatcaagctgcacaacccccccaccatccactacccccccagccagggccagatggacctgtgcgtgaccagcggcagccagcagggcctgtgcaaggtgttcgagatgatcatcaaccccggcgacaacgtgctgctggacgagcccgcctacagcggcaccctgcagagcctgcaccccctgggctgcaacatcatcaacgtggccagcgacgagagcggcatcgtgcccgacagcctgagagacatcctgagcagatggaagcccgaggacgccaagaacccccagaagaacacccccaagttcctgtacaccgtgcccaacggcaacaaccccaccggcaacagcctgaccagcgagagaaagaaggagatctacgagctggccagaaagtacgacttcctgatcatcgaggacgacccctactacttcctgcagttcaacaagttcagagtgcccaccttcctgagcatggacgtggacggcagagtgatcagagccgacagcttcagcaagatcatcagcagcggcctgagaatcggcttcctgaccggccccaagcccctgatcgagagagtgatcctgcacatccaggtgagcaccctgcaccccagcaccttcaaccagctgatgatcagccagctgctgcacgagtggggcgaggagggcttcatggcccacgtggacagagtgatcgacttctacagcaaccagaaggacgccatcctggccgccgccgacaagtggctgaccggcctggccgagtggcacgtgcccgccgccggcatgttcctgtggatcaaggtgaagggcatcaacgacgtgaaggagctgatcgaggagaaggccgtgaagatgggcgtgctgatgctgcccggcaacgccttctacgtggacagcagcgcccccagcccctacctgagagccagcttcagcagcgccagccccgagcagatggacgtggccttccaggtgctggcccagctgatcaaggagagcctgtag

SEQ ID NO: 72618 - DNA, 1278 bp, synthetic construct; identical to SEQ ID NO: 72613
  misc_feature 1..1278: note = Description of Artificial Sequence: Synthetic coding sequence
  source 1..1278: mol_type = other DNA

SEQ ID NO: 72619 - DNA, 621 bp, synthetic construct
  misc_feature 1..621: note = Description of Artificial Sequence: Synthetic coding sequence
  source 1..621: mol_type = other DNA
atggcccccagccacctgagcgtgagagagatgagagaggacgagaagcccctggtgctggagatgctgaaggccggcgtgaaggacaccgagaacagagtggccctgcacgccctgaccagaccccccgccctgctgctgctggccgccgccagcagcggcctgagattcgtgctggccagcttcgccctggccctgctgctgcccgtgttcctggccgtggccgccgtgaagctgggcctgagagccagatggggcagcctgcccccccccggcggcctgggcggcccctgggtggccgtgagaggcagcggcgacgtgtgcggcgtgctggccctggcccccggcaccaacgccggcgacggcgccagagtgaccagactgagcgtgagcagatggcacagaagaagaggcgtgggcagaagactgctggccttcgccgaggccagagccagagcctgggccggcggcatgggcgagcccagagccagactggtggtgcccgtggccgtggccgcctggggcgtgggcggcatgctggagggctgcggctaccaggccgagggcggctggggctgcctgggctacaccctggtgagagagttcagcaaggacctgtag

SEQ ID NO: 72620 - DNA, 1842 bp, synthetic construct
  misc_feature 1..1842: note = Description of Artificial Sequence: Synthetic coding sequence
  source 1..1842: mol_type = other DNA
atggtgagcaaggacgccagcgtgaaggagtacatcttcaaggagctgcagaagtacctgcccagccacgccgtgcccgacgagctggtgctgatcgacagcctgcccttcaccagccacggcaagatcgacgtgagcgagctgaacaagatctacctgaactacatcaacctgaagagcgagaacaagctgagcggcaaggaggacctgtgggagaagctgcagtacctgtggaagagcaccctgaacctgcccgaggacctgctgagagtgcccgacgagagcctgttcctgaacagcggcggcgacagcctgaagagcatcagactgctgagcgagatcgagaagctggtgggcaccagcgtgcccggcctgctggagatcatcctgagcagcagcatcctggagatctacaaccacatcctgcagaccgtggtgcccgacgaggacgtgaccttcagaaagagctgcgccaccaagagaaagctgagcgacatcaaccaggaggaggccagcggcaccagcctgcaccagaaggccatcatgaccttcacctgccacaacgagatcaacgccttcgtggtgctgagcagaggcagccagatcctgagcctgaacagcaccagattcctgaccaagctgggccactgcagcagcgcctgccccagcgacagcgtgagccagaccaacatccagaacctgaagggcctgaacagccccgtgctgatcggcaagagcaaggaccccagctgcgtggccaaggtgagcgaggagggcaagcccgccatcggcacccagaagatggagctgcacgtgagatggagaagcgacaccggcaagtgcgtggacgccagccccctggtggtgatccccaccttcgacaagagcagcaccaccgtgtacatcggcagccacagccacagaatgaaggccgtggacttctacagcggcaaggtgaagtgggagcagatcctgggcgacagaatcgagagcagcgcctgcgtgagcaagtgcggcaacttcatcgtggtgggctgctacaacggcctggtgtacgtgctgaagagcaacagcggcgagaagtactggatgttcaccaccgaggacgccgtgaagagcagcgccaccatggaccccaccaccggcctgatctacatcggcagccacgaccagcacgcctacgccctggacatctacagaaagaagtgcgtgtggaagagcaagtgcggcggcaccgtgttcagcagcccctgcctgaacctgatcccccaccacctgtacttcgccaccctgggcggcctgctgctggccgtgaaccccgccaccggcaacgtgatctggaagcacagctgcggcaagcccctgttcagcagcccccagtgctgcagccagtacatctgcatcggctgcgtggacggcaacctgctgtgcttcacccacttcggcgagcaggtgtggcagttcagcaccagcggccccatcttcagcagcccctgcaccagccccagcgagcagaagatcttcttcggcagccacgactgcttcatctactgctgcaacatgaagggccacctgcagtggaagttcgagaccaccagcagagtgtacgccacccccttcgccttccacaactacaacggcagcaacgagatgctgctggccgccgccagcaccgacggcaaggtgtggatcctggagagccagagcggccagctgcagagcgtgtacgagctgcccggcgaggtgttcagcagccccgtggtgctggagagcatgctgatcatcggctgcagagacaactacgtgtactgcctggacctgctgggcggcaaccagaagtag

SEQ ID NO: 72621 - DNA, 2574 bp, synthetic construct
  misc_feature 1..2574: note = Description of Artificial Sequence: Synthetic coding sequence
  source 1..2574: mol_type = other DNA
atgaccctgcaggagctggtgcacaaggccgccagctgctacatggacagagtggccgtgtgcttcgacgagtgcaacaaccagctgcccgtgtactacacctacaagaccgtggtgaacgccgccagcgagctgagcaacttcctgctgctgcactgcgacttccagggcatcagagagatcggcctgtactgccagcccggcatcgacctgcccagctggatcctgggcatcctgcaggtgcccgccgcctacgtgcccatcgagcccgacagcccccccagcctgagcacccacttcatgaagaagtgcaacctgaagtacatcctggtggagaagaagcagatcaacaagttcaagagcttccacgagaccctgctgaactacgacaccttcaccgtggagcacaacgacctggtgctgttcagactgcactggaagaacaccgaggtgaacctgatgctgaacgacggcaaggagaagtacgagaaggagaagatcaagagcatcagcagcgagcacgtgaacgaggagaaggccgaggagcacatggacctgagactgaagcactgcctggcctacgtgctgcacaccagcggcaccaccggcatccccaagatcgtgagagtgccccacaagtgcatcgtgcccaacatccagcacttcagagtgctgttcgacatcacccaggaggacgtgctgttcctggccagccccctgaccttcgaccccagcgtggtggagatcttcctggccctgagcagcggcgccagcctgctgatcgtgcccaccagcgtgaagctgctgcccagcaagctggccagcgtgctgttcagccaccacagagtgaccgtgctgcaggccacccccaccctgctgagaagattcggcagccagctgatcaagagcaccgtgctgagcgccaccaccagcctgagagtgctggccctgggcggcgaggccttccccagcctgaccgtgctgagaagctggagaggcgagggcaacaagacccagatcttcaacgtgtacggcatcaccgaggtgagcagctgggccaccatctacagaatccccgagaagaccctgaacagcaccctgaagtgcgagctgcccgtgcagctgggcttccccctgctgggcaccgtggtggaggtgagagacaccaacggcttcaccatccaggagggcagcggccaggtgttcctgggcggcagaaacagagtgtgcttcctggacgacgaggtgaccgtgcccctgggcaccatgagagccaccggcgacttcgtgaccgtgaaggacggcgagatcttcttcctgggcagaaaggacagccagatcaagagacacggcaagagactgaacatcgagctggtgcagcaggtggccgaggagctgcagcaggtggagagctgcgccgtgacctggtacaaccaggagaagctgatcctgttcatggtgagcaaggacgccagcgtgaaggagtacatcttcaaggagctgcagaagtacctgcccagccacgccgtgcccgacgagctggtgctgatcgacagcctgcccttcaccagccacggcaagatcgacgtgagcgagctgaacaagatctacctgaactacatcaacctgaagagcgagaacaagctgagcggcaaggaggacctgtgggagaagctgcagtacctgtggaagagcaccctgaacctgcccgaggacctgctgagagtgcccgacgagagcctgttcctgaacagcggcggcgacagcctgaagagcatcagactgctgagcgagatcgagaagctggtgggcaccagcgtgcccggcctgctggagatcatcctgagcagcagcatcctggagatctacaaccacatcctgcagaccgtggtgcccgacgaggacgtgaccttcagaaagagctgcgccaccaagagaaagctgagcgacatcaaccaggaggaggccagcggcaccagcctgcaccagaaggccatcatgaccttcacctgccacaacgagatcaacgccttcgtggtgctgagcagaggcagccagatcctgagcctgaacagcaccagattcctgaccaagctgggccactgcagcagcgcctgccccagcgacagcgtgagccagaccaacatccagaacctgaagggcctgaacagccccgtgctgatcggcaagagcaaggaccccagctgcgtggccaaggtgagcgaggagggcaagcccgccatcggcacccagaagatggagctgcacgtgagatggagaagcgacaccggcaagtgcgtggacgccagccccctggtggtgatccccaccttcgacaagagcagcaccaccgtgtacatcggcagccacagccacagaatgaaggccgtggacttctacagcggcaaggtgaagtgggagcagatcctgggcgacagaatcgagagcagcgcctgcgtgagcaagtgcggcaacttcatcgtggtgggcctggccgtgctgtaccagtggaccaacctgttcatccccgtgtacctgaccatcagagccaagaacatcttctggttcccctag

SEQ ID NO: 72622 - DNA, 2526 bp, synthetic construct
  misc_feature 1..2526: note = Description of Artificial Sequence: Synthetic coding sequence
  source 1..2526: mol_type = other DNA
atgaccctgcaggagctggtgcacaaggccgccagctgctacatggacagagtggccgtgtgcttcgacgagtgcaacaaccagctgcccgtgtactacacctacaagaccgtggtgaacgccgccagcgagctgagcaacttcctgctgctgcactgcgacttccagggcatcagagagatcggcctgtactgccagcccggcatcgacctgcccagctggatcctgggcatcctgcaggtgcccgccgcctacgtgcccatcgagcccgacagcccccccagcctgagcacccacttcatgaagaagtgcaacctgaagtacatcctggtggagaagaagcagatcaacaagttcaagagcttccacgagaccctgctgaactacgacaccttcaccgtggagcacaacgacctggtgctgttcagactgcactggaagaacaccgaggtgaacctgatgctgaacgacggcaaggagaagtacgagaaggagaagatcaagagcatcagcagcgagcacgtgaacgaggagaaggccgaggagcacatggacctgagactgaagcactgcctggcctacgtgctgcacaccagcggcaccaccggcatccccaagatcgtgagagtgccccacaagtgcatcgtgcccaacatccagcacttcagagtgctgttcgacatcacccaggaggacgtgctgttcctggccagccccctgaccttcgaccccagcgtggtggagatcttcctggccctgagcagcggcgccagcctgctgatcgtgcccaccagcgtgaagctgctgcccagcaagctggccagcgtgctgttcagccaccacagagtgaccgtgctgcaggccacccccaccctgctgagaagattcggcagccagctgatcaagagcaccgtgctgagcgccaccaccagcctgagagtgctggccctgggcggcgaggccttccccagcctgaccgtgctgagaagctggagaggcgagggcaacaagacccagatcttcaacgtgtacggcatcaccgaggtgagcagctgggccaccatctacagaatccccgagaagaccctgaacagcaccctgaagtgcgagctgcccgtgcagctgggcttccccctgctgggcaccgtggtggaggtgagagacaccaacggcttcaccatccaggagggcagcggccaggtgttcctgggcggcagaaacagagtgtgcttcctggacgacgaggtgaccgtgcccctgggcaccatgagagccaccggcgacttcgtgaccgtgaaggacggcgagatcttcttcctgggcagaaaggacagccagatcaagagacacggcaagagactgaacatcgagctggtgcagcaggtggccgaggagctgcagcaggtggagagctgcgccgtgacctggtacaaccaggagaagctgatcctgttcatggtgagcaaggacgccagcgtgaaggagtacatcttcaaggagctgcagaagtacctgcccagccacgccgtgcccgacgagctggtgctgatcgacagcctgcccttcaccagccacggcaagatcgacgtgagcgagctgaacaagatctacctgaactacatcaacctgaagagcgagaacaagctgagcggcaaggaggacctgtgggagaagctgcagtacctgtggaagagcaccctgaacctgcccgaggacctgctgagagtgcccgacgagagcctgttcctgaacagcggcggcgacagcctgaagagcatcagactgctgagcgagatcgagaagctggtgggcaccagcgtgcccggcctgctggagatcatcctgagcagcagcatcctggagatctacaaccacatcctgcagaccgtggtgcccgacgaggacgtgaccttcagaaagagctgcgccaccaagagaaagctgagcgacatcaaccaggaggaggccagcggcaccagcctgcaccagaaggccatcatgaccttcacctgccacaacgagatcaacgccttcgtggtgctgagcagaggcagccagatcctgagcctgaacagcaccagattcctgaccaagctgggccactgcagcagcgcctgccccagcgacagcgtgagccagaccaacatccagaacctgaagggcctgaacagccccgtgctgatcggcaagagcaaggaccccagctgcgtggccaaggtgagcgaggagggcaagcccgccatcggcacccagaagatggagctgcacgtgagatggagaagcgacaccggcaagtgcgtggacgccagccccctggtggtgatccccaccttcgacaagagcagcaccaccgtgtacatcggcagccacagccacagaatgaaggccgtggacttctacagcggcaaggtgaagtgggagcagatcctgggcgacagaatcgagagcagcgcctgcgtgagcaagtgcggcaacttcatcgtggtgggcaagttcctgaacctgagattcgtggagctgaactag

SEQ ID NO: 72623 - DNA, 2997 bp, synthetic construct
  misc_feature 1..2997: note = Description of Artificial Sequence: Synthetic coding sequence
  source 1..2997: mol_type = other DNA
atgaagaagtgcaacctgaagtacatcctggtggagaagaagcagatcaacaagttcaagagcttccacgagaccctgctgaactacgacaccttcaccgtggagcacaacgacctggtgctgttcagactgcactggaagaacaccgaggtgaacctgatgctgaacgacggcaaggagaagtacgagaaggagaagatcaagagcatcagcagcgagcacgtgaacgaggagaaggccgaggagcacatggacctgagactgaagcactgcctggcctacgtgctgcacaccagcggcaccaccggcatccccaagatcgtgagagtgccccacaagtgcatcgtgcccaacatccagcacttcagagtgctgttcgacatcacccaggaggacgtgctgttcctggccagccccctgaccttcgaccccagcgtggtggagatcttcctggccctgagcagcggcgccagcctgctgatcgtgcccaccagcgtgaagctgctgcccagcaagctggccagcgtgctgttcagccaccacagagtgaccgtgctgcaggccacccccaccctgctgagaagattcggcagccagctgatcaagagcaccgtgctgagcgccaccaccagcctgagagtgctggccctgggcggcgaggccttccccagcctgaccgtgctgagaagctggagaggcgagggcaacaagacccagatcttcaacgtgtacggcatcaccgaggtgagcagctgggccaccatctacagaatccccgagaagaccctgaacagcaccctgaagtgcgagctgcccgtgcagctgggcttccccctgctgggcaccgtggtggaggtgagagacaccaacggcttcaccatccaggagggcagcggccaggtgttcctgggcggcagaaacagagtgtgcttcctggacgacgaggtgaccgtgcccctgggcaccatgagagccaccggcgacttcgtgaccgtgaaggacggcgagatcttcttcctgggcagaaaggacagccagatcaagagacacggcaagagactgaacatcgagctggtgcagcaggtggccgaggagctgcagcaggtggagagctgcgccgtgacctggtacaaccaggagaagctgatcctgttcatggtgagcaaggacgccagcgtgaaggagtacatcttcaaggagctgcagaagtacctgcccagccacgccgtgcccgacgagctggtgctgatcgacagcctgcccttcaccagccacggcaagatcgacgtgagcgagctgaacaagatctacctgaactacatcaacctgaagagcgagaacaagctgagcggcaaggaggacctgtgggagaagctgcagtacctgtggaagagcaccctgaacctgcccgaggacctgctgagagtgcccgacgagagcctgttcctgaacagcggcggcgacagcctgaagagcatcagactgctgagcgagatcgagaagctggtgggcaccagcgtgcccggcctgctggagatcatcctgagcagcagcatcctggagatctacaaccacatcctgcagaccgtggtgcccgacgaggacgtgaccttcagaaagagctgcgccaccaagagaaagctgagcgacatcaaccaggaggaggccagcggcaccagcctgcaccagaaggccatcatgaccttcacctgccacaacgagatcaacgccttcgtggtgctgagcagaggcagccagatcctgagcctgaacagcaccagattcctgaccaagctgggccactgcagcagcgcctgccccagcgacagcgtgagccagaccaacatccagaacctgaagggcctgaacagccccgtgctgatcggcaagagcaaggaccccagctgcgtggccaaggtgagcgaggagggcaagcccgccatcggcacccagaagatggagctgcacgtgagatggagaagcgacaccggcaagtgcgtggacgccagccccctggtggtgatccccaccttcgacaagagcagcaccaccgtgtacatcggcagccacagccacagaatgaaggccgtggacttctacagcggcaaggtgaagtgggagcagatcctgggcgacagaatcgagagcagcgcctgcgtgagcaagtgcggcaacttcatcgtggtgggctgctacaacggcctggtgtacgtgctgaagagcaacagcggcgagaagtactggatgttcaccaccgaggacgccgtgaagagcagcgccaccatggaccccaccaccggcctgatctacatcggcagccacgaccagcacgcctacgccctggacatctacagaaagaagtgcgtgtggaagagcaagtgcggcggcaccgtgttcagcagcccctgcctgaacctgatcccccaccacctgtacttcgccaccctgggcggcctgctgctggccgtgaaccccgccaccggcaacgtgatctggaagcacagctgcggcaagcccctgttcagcagcccccagtgctgcagccagtacatctgcatcggctgcgtggacggcaacctgctgtgcttcacccacttcggcgagcaggtgtggcagttcagcaccagcggccccatcttcagcagcccctgcaccagccccagcgagcagaagatcttcttcggcagccacgactgcttcatctactgctgcaacatgaagggccacctgcagtggaagttcgagaccaccagcagagtgtacgccacccccttcgccttccacaactacaacggcagcaacgagatgctgctggccgccgccagcaccgacggcaaggtgtggatcctggagagccagagcggccagctgcagagcgtgtacgagctgcccggcgaggtgttcagcagccccgtggtgctggagagcatgctgatcatcggctgcagagacaactacgtgtactgcctggacctgctgggcggcaaccagaagtag

SEQ ID NO: 72624 - DNA, 2781 bp, synthetic construct
  misc_feature 1..2781: note = Description of Artificial Sequence: Synthetic coding sequence
  source 1..2781: mol_type = other DNA
atgctgcaggtgcacagaaccggcctgggcagactgggcgtgagcctgagcaagggcctgcaccacaaggccgtgctggccgtgagaagagaggacgtgaacgcctgggagagaagagcccccctggcccccaagcacatcaagggcatcaccaacctgggctacaaggtgctgatccagcccagcaacagaagagccatccacgacaaggactacgtgaaggccggcggcatcctgcaggaggacatcagcgaggcctgcctgatcctgggcgtgaagagaccccccgaggagaagctgatgagcagaaagacctacgccttcttcagccacaccatcaaggcccaggaggccaacatgggcctgctggacgagatcctgaagcaggagatcagactgatcgactacgagaagatggtggaccacagaggcgtgagagtggtggccttcggccagtgggccggcgtggccggcatgatcaacatcctgcacggcatgggcctgagactgctggccctgggccaccacacccccttcatgcacatcggcatggcccacaactacagaaacagcagccaggccgtgcaggccgtgagagacgccggctacgagatcagcctgggcctgatgcccaagagcatcggccccctgaccttcgtgttcaccggcaccggcaacgtgagcaagggcgcccaggccatcttcaacgagctgccctgcgagtacgtggagccccacgagctgaaggaggtgagccagaccggcgacctgagaaaggtgtacggcaccgtgctgagcagacaccaccacctggtgagaaagaccgacgccgtgtacgaccccgccgagtacgacaagcaccccgagagatacatcagcagattcaacaccgacatcgccccctacaccacctgcctgatcaacggcatctactgggagcagaacacccccagactgctgaccagacaggacgcccagagcctgctggcccccggcaagttcagccccgccggcgtggagggctgccccgccctgccccacaagctggtggccatctgcgacatcagcgccgacaccggcggcagcatcgagttcatgaccgagtgcaccaccatcgagcaccccttctgcatgtacgacgccgaccagcacatcatccacgacagcgtggagggcagcggcatcctgatgtgcagcatcgacaacctgcccgcccagctgcccatcgaggccaccgagtgcttcggcgacatgctgtacccctacgtggaggagatgatcctgagcgacgccacccagcccctggagagccagaacttcagccccgtggtgagagacgccgtgatcaccagcaacggcaccctgcccgacaagtacaagtacatccagaccctgagagagagcagagagagagcccagagcctgagcatgggcaccagaagaaaggtgctggtgctgggcagcggctacatcagcgagcccgtgctggagtacctgagcagagacggcaacatcgagatcaccgtgggcagcgacatgaagaaccagatcgagcagctgggcaagaagtacaacatcaaccccgtgagcatggacatctgcaagcaggaggagaagctgggcttcctggtggccaagcaggacctggtgatcagcctgctgccctacgtgctgcaccccctggtggccaaggcctgcatcaccaacaaggtgaacatggtgaccgccagctacatcacccccgccctgaaggagctggagaagagcgtggaggacgccggcatcaccatcatcggcgagctgggcctggaccccggcctggaccacatgctggccatggagaccatcgacaaggccaaggaggtgggcgccaccatcgagagctacatcagctactgcggcggcctgcccgcccccgagcacagcaacaaccccctgagatacaagttcagctggagccccgtgggcgtgctgatgaacgtgatgcagagcgccacctacctgctggacggcaaggtggtgaacgtggccggcggcatcagcttcctggacgccgtgaccagcatggacttcttccccggcctgaacctggagggctaccccaacagagacagcaccaagtacgccgagatctacggcatcagcagcgcccacaccctgctgagaggcaccctgagatacaagggctacatgaaggccctgaacggcttcgtgaagctgggcctgatcaacagagaggccctgcccgccttcagacccgaggccaaccccctgacctggaagcagctgctgtgcgacctggtgggcatcagccccagcagcgagcacgacgtgctgaaggaggccgtgctgaagaagctgggcggcgacaacacccagctggaggccgccgagtggctgggcctgctgggcgacgagcaggtgccccaggccgagagcatcctggacgccctgagcaagcacctggtgatgaagctgagctacggccccgaggagaaggacatgatcgtgatgagagacagcttcggcatcagacaccccagcggccacctggagcacaagaccatcgacctggtggcctacggcgacatcaacggcttcagcgccatggccaagaccgtgggcctgcccaccgccatggccgccaagatgctgctggacggcgagatcggcgccaagggcctgatgggccccttcagcaaggagatctacggccccatcctggagagaatcaaggccgagggcatcatctacaccacccagagcaccatcaagccctag

SEQ ID NO: 72625 - DNA, 2781 bp, synthetic construct; identical to SEQ ID NO: 72624
  misc_feature 1..2781: note = Description of Artificial Sequence: Synthetic coding sequence
  source 1..2781: mol_type = other DNA

SEQ ID NO: 72626 - DNA, 942 bp, synthetic construct
  misc_feature 1..942: note = Description of Artificial Sequence: Synthetic coding sequence
  source 1..942: mol_type = other DNA
atgcagccccagagcgtgctgcacagcggctacttccaccccctgctgagagcctggcagaccgccaccaccaccctgaacgccagcaacctgatctaccccatcttcgtgacctacggcgtgaagagactggaggagatgctgagacccctggtggaggagggcctgagatgcgtgctgatcttcggcgtgcccagcagagtgcccaaggacgagagaggcagcgccgccgacagcgaggagagccccgccatcgaggccatccacctgctgagaaagaccttccccaacctgctggtggcctgcgacgtgtgcctgtgcccctacaccagccacggccactgcggcctgctgagcgagaacggcgccttcagagccgaggagagcagacagagactggccgaggtggccctggcctacgccaaggccggctgccaggtggtggcccccagcgacatgatggacggcagagtggaggccatcaaggaggccctgatggcccacggcctgggcaacagagtgagcgtgatgagctacagcgccaagttcgccagctgcttctacggccccttcagagacgccgccaagagcagccccgccttcggcgacagaagatgctaccagctgccccccggcgccagaggcctggccctgagagccgtggacagagacgtgagagagggcgccgacatgctgatggtgaagcccggcatgccctacctggacatcgtgagagaggtgaaggacaagcaccccgacctgcccctggccgtgtaccacgtgagcggcgagttcgccatgctgtggcacggcgcccaggccggcgccttcgacctgaaggccgccgtgctggaggccatgaccgccttcagaagagccggcgccgacatcatcatcacctactacaccccccagctgctgcagtggctgaaggaggagtag

SEQ ID NO: 72627 - DNA, 993 bp, synthetic construct
  misc_feature 1..993: note = Description of Artificial Sequence: Synthetic coding sequence
  source 1..993: mol_type = other DNA
atgcagccccagagcgtgctgcacagcggctacttccaccccctgctgagagcctggcagaccgccaccaccaccctgaacgccagcaacctgatctaccccatcttcgtgaccgacgtgcccgacgacatccagcccatcaccagcctgcccggcgtggccagatacggcgtgaagagactggaggagatgctgagacccctggtggaggagggcctgagatgcgtgctgatcttcggcgtgcccagcagagtgcccaaggacgagagaggcagcgccgccgacagcgaggagagccccgccatcgaggccatccacctgctgagaaagaccttccccaacctgctggtggcctgcgacgtgtgcctgtgcccctacaccagccacggccactgcggcctgctgagcgagaacggcgccttcagagccgaggagagcagacagagactggccgaggtggccctggcctacgccaaggccggctgccaggtggtggcccccagcgacatgatggacggcagagtggaggccatcaaggaggccctgatggcccacggcctgggcaacagagtgagcgtgatgagctacagcgccaagttcgccagctgcttctacggccccttcagagacgccgccaagagcagccccgccttcggcgacagaagatgctaccagctgccccccggcgccagaggcctggccctgagagccgtggacagagacgtgagagagggcgccgacatgctgatggtgaagcccggcatgccctacctggacatcgtgagagaggtgaaggacaagcaccccgacctgcccctggccgtgtaccacgtgagcggcgagttcgccatgctgtggcacggcgcccaggccggcgccttcgacctgaaggccgccgtgctggaggccatgaccgccttcagaagagccggcgccgacatcatcatcacctactacaccccccagctgctgcagtggctgaaggaggagtag

SEQ ID NO: 72628 - DNA, 45 bp, synthetic construct
  misc_feature 1..45: note = Description of Artificial Sequence: Synthetic coding sequence
  source 1..45: mol_type = other DNA
atgcccctgtgccccctggcccacgccatgcagccccagagctag

SEQ ID NO: 72629 - DNA, 363 bp, synthetic construct
  misc_feature 1..363: note = Description of Artificial Sequence: Synthetic coding sequence
  source 1..363: mol_type = other DNA
atgcccctgtgccccctggcccacgccatgcagccccagagcgtgctgcacagcggctacttccaccccctgctgagagcctggcagaccgccaccaccaccctgaacgccagcaacctgatctaccccatcttcgtgaccgacgtgcccgacgacatccagcccatcaccagcctgcccggcgtggccagatacggcgtgaagagactggaggagatgctgagacccctggtggaggagggcctgagatgcgtgctgatcttcggcgtgcccagcagagtgcccaaggacgagagaggcagcgccgccgacagcgaggagagccccgccatcgaggccatccacctgctgagaaagacctag

SEQ ID NO: 72630 - DNA, 180 bp, synthetic construct
  misc_feature 1..180: note = Description of Artificial Sequence: Synthetic coding sequence
  source 1..180: mol_type = other DNA
atgcccctgtgccccctggcccacgccatgcagccccagagcgtgctgcacagcggctacttccaccccctgctgagagcctggcagaccgccaccaccaccctgaacgccagcaacctgatctaccccatcttcgtgaccgacgtgcccgacgacatccagcccatcaccagcctgtag

SEQ ID NO: 72631 - DNA, 1923 bp, synthetic construct
  misc_feature 1..1923: note = Description of Artificial Sequence: Synthetic coding sequence
  source 1..1923: mol_type = other DNA
atggagagcgtggtgagaagatgccccttcctgagcagagtgccccaggccttcctgcagaaggccggcaagagcctgctgttctacgcccagaactgccccaagatgatggaggtgggcgccaagcccgcccccagagccctgagcaccgccgccgtgcactaccagcagatcaaggagaccccccccgccagcgagaaggacaagaccgccaaggccaaggtgcagcagacccccgacggcagccagcagagccccgacggcacccagctgcccagcggccaccccctgcccgccaccagccagggcaccgccagcaagtgccccttcctggccgcccagatgaaccagagaggcagcagcgtgttctgcaaggccagcctggagctgcaggaggacgtgcaggagatgaacgccgtgagaaaggaggtggccgagaccagcgccggccccagcgtggtgagcgtgaagaccgacggcggcgaccccagcggcctgctgaagaacttccaggacatcatgcagaagcagagacccgagagagtgagccacctgctgcaggacaacctgcccaagagcgtgagcaccttccagtacgacagattcttcgagaagaagatcgacgagaagaagaacgaccacacctacagagtgttcaagaccgtgaacagaagagcccacatcttccccatggccgacgactacagcgacagcctgatcaccaagaagcaggtgagcgtgtggtgcagcaacgactacctgggcatgagcagacaccccagagtgtgcggcgccgtgatggacaccctgaagcagcacggcgccggcgccggcggcaccagaaacatcagcggcaccagcaagttccacgtggacctggagagagagctggccgacctgcacggcaaggacgccgccctgctgttcagcagctgcttcgtggccaacgacagcaccctgttcaccctggccaagatgatgcccggctgcgagatctacagcgacagcggcaaccacgccagcatgatccagggcatcagaaacagcagagtgcccaagtacatcttcagacacaacgacgtgagccacctgagagagctgctgcagagaagcgaccccagcgtgcccaagatcgtggccttcgagaccgtgcacagcatggacggcgccgtgtgccccctggaggagctgtgcgacgtggcccacgagttcggcgccatcaccttcgtggacgaggtgcacgccgtgggcctgtacggcgccagaggcggcggcatcggcgacagagacggcgtgatgcccaagatggacatcatcagcggcaccctgggcaaggccttcggctgcgtgggcggctacatcgccagcaccagcagcctgatcgacaccgtgagaagctacgccgccggcttcatcttcaccaccagcctgccccccatgctgctggccggcgccctggagagcgtgagaatcctgaagagcgccgagggcagagtgctgagaagacagcaccagagaaacgtgaagctgatgagacagatgctgatggacgccggcctgcccgtggtgcactgccccagccacatcatccccgtgagagtggccgacgccgccaagaacaccgaggtgtgcgacgagctgatgagcagacacaacatctacgtgcaggccatcaactaccccaccgtgcccagaggcgaggagctgctgagaatcgcccccaccccccaccacaccccccagatgatgaactacttcctggagaacctgctggtgacctggaagcaggtgggcctggagctgaagccccacagcagcgccgagtgcaacttctgcagaagacccctgcacttcgaggtgatgagcgagagagagaagagctacttcagcggcctgagcaagctggtgagcgcccaggcctag

SEQ ID NO: 72632 - DNA, 1923 bp, synthetic construct; identical to SEQ ID NO: 72631
  misc_feature 1..1923: note = Description of Artificial Sequence: Synthetic coding sequence
  source 1..1923: mol_type = other DNA

SEQ ID NO: 72633 - DNA, 345 bp, synthetic construct
  misc_feature 1..345: note = Description of Artificial Sequence: Synthetic coding sequence
  source 1..345: mol_type = other DNA
atggagagcgtggtgagaagatgccccttcctgagcagagtgccccaggccttcctgcagaaggccggcaagagcctgctgttctacgcccagaactgccccaagatgatggaggtgggcgccaagcccgcccccagagccctgagcaccgccgccgtgcactaccagcagatcaaggagaccccccccgccagcgagaaggacaagaccgccaaggccaaggtgcagcagacccccgacggcagccagcagagccccgacggcacccagttcagactggacaccccctgcctgccccaggccagagccctgcaggccaacgccctgagctggcagcacagatag

SEQ ID NO: 72634 - DNA, 1923 bp, synthetic construct; identical to SEQ ID NO: 72631
  misc_feature 1..1923: note = Description of Artificial Sequence: Synthetic coding sequence
  source 1..1923: mol_type = other DNA

SEQ ID NO: 72635 - DNA, 1923 bp, synthetic construct; identical to SEQ ID NO: 72631
  misc_feature 1..1923: note = Description of Artificial Sequence: Synthetic coding sequence
  source 1..1923: mol_type = other DNA

SEQ ID NO: 72636 - DNA, 1764 bp, synthetic construct
  misc_feature 1..1764: note = Description of Artificial Sequence: Synthetic coding sequence
  source 1..1764: mol_type = other DNA
atggtgaccgccgccatgctgctgcagtgctgccccgtgctggccagaggccccaccagcctgctgggcaaggtggtgaagacccaccagttcctgttcggcatcggcagatgccccatcctggccacccagggccccaactgcagccagatccacctgaaggccaccaaggccggcggcgacagccccagctgggccaagggccactgccccttcatgctgagcgagctgcaggacggcaagagcaagatcgtgcagaaggccgcccccgaggtgcaggaggacgtgaaggccttcaagaccgacctgcccagcagcctggtgagcgtgagcctgagaaagcccttcagcggcccccaggagcaggagcagatcagcggcaaggtgacccacctgatccagaacaacatgcccggcaactacgtgttcagctacgaccagttcttcagagacaagatcatggagaagaagcaggaccacacctacagagtgttcaagaccgtgaacagatgggccgacgcctaccccttcgcccagcacttcagcgaggccagcgtggccagcaaggacgtgagcgtgtggtgcagcaacgactacctgggcatgagcagacacccccaggtgctgcaggccacccaggagaccctgcagagacacggcgccggcgccggcggcaccagaaacatcagcggcaccagcaagttccacgtggagctggagcaggagctggccgagctgcaccagaaggacagcgccctgctgttcagcagctgcttcgtggccaacgacagcaccctgttcaccctggccaagatcctgcccggctgcgagatctacagcgacgccggcaaccacgccagcatgatccagggcatcagaaacagcggcgccgccaagttcgtgttcagacacaacgaccccgaccacctgaagaagctgctggagaagagcaaccccaagatccccaagatcgtggccttcgagaccgtgcacagcatggacggcgccatctgccccctggaggagctgtgcgacgtgagccaccagtacggcgccctgaccttcgtggacgaggtgcacgccgtgggcctgtacggcagcagaggcgccggcatcggcgagagagacggcatcatgcacaagatcgacatcatcagcggcaccctgggcaaggccttcggctgcgtgggcggctacatcgccagcaccagagacctggtggacatggtgagaagctacgccgccggcttcatcttcaccaccagcctgccccccatggtgctgagcggcgccctggagagcgtgagactgctgaagggcgaggagggccaggccctgagaagagcccaccagagaaacgtgaagcacatgagacagctgctgatggacagaggcctgcccgtgatcccctgccccagccacatcatccccatcagagtgggcaacgccgccctgaacagcaagctgtgcgacctgctgctgagcaagcacggcatctacgtgcaggccatcaactaccccaccgtgcccagaggcgaggagctgctgagactggcccccagcccccaccacagcccccagatgatggaggacttcgtggagaagctgctgctggcctggaccgccgtgggcctgcccctgcaggacgtgagcgtggccgcctgcaacttctgcagaagacccgtgcacttcgagctgatgagcgagtgggagagaagctacttcggcaacatgggcccccagtacgtgaccacctacgcctag

SEQ ID NO: 72637 - DNA, 1653 bp, synthetic construct
  misc_feature 1..1653: note = Description of Artificial Sequence: Synthetic coding sequence
  source 1..1653: mol_type = other DNA
atggtgaccgccgccatgctgctgcagtgctgccccgtgctggccagaggccccaccagcctgctgggcaaggtggtgaagacccaccagttcctgttcggcatcggcagatgccccatcctggccacccagggccccaactgcagccagatccacctgaaggccaccaaggccggcggcgacagccccagctgggccaagggccactgccccttcatgctgagcgagctgcaggacggcaagagcaagatcgtgcagaaggccgcccccgaggtgcaggaggacgtgaaggccttcaagaccggcaactacgtgttcagctacgaccagttcttcagagacaagatcatggagaagaagcaggaccacacctacagagtgttcaagaccgtgaacagatgggccgacgcctaccccttcgcccagcacttcagcgaggccagcgtggccagcaaggacgtgagcgtgtggtgcagcaacgactacctgggcatgagcagacacccccaggtgctgcaggccacccaggagaccctgcagagacacggcgccggcgccggcggcaccagaaacatcagcggcaccagcaagttccacgtggagctggagcaggagctggccgagctgcaccagaaggacagcgccctgctgttcagcagctgcttcgtggccaacgacagcaccctgttcaccctggccaagatcctgcccggctgcgagatctacagcgacgccggcaaccacgccagcatgatccagggcatcagaaacagcggcgccgccaagttcgtgttcagacacaacgaccccgaccacctgaagaagctgctggagaagagcaaccccaagatccccaagatcgtggccttcgagaccgtgcacagcatggacggcgccatctgccccctggaggagctgtgcgacgtgagccaccagtacggcgccctgaccttcgtggacgaggtgcacgccgtgggcctgtacggcagcagaggcgccggcatcggcgagagagacggcatcatgcacaagatcgacatcatcagcggcaccctgggcaaggccttcggctgcgtgggcggctacatcgccagcaccagagacctggtggacatggtgagaagctacgccgccggcttcatcttcaccaccagcctgccccccatggtgctgagcggcgccctggagagcgtgagactgctgaagggcgaggagggccaggccctgagaagagcccaccagagaaacgtgaagcacatgagacagctgctgatggacagaggcctgcccgtgatcccctgccccagccacatcatccccatcagagtgggcaacgccgccctgaacagcaagctgtgcgacctgctgctgagcaagcacggcatctacgtgcaggccatcaactaccccaccgtgcccagaggcgaggagctgctgagactggcccccagcccccaccacagcccccagatgatggaggacttcgtggagaagctgctgctggcctggaccgccgtgggcctgcccctgcaggacgtgagcgtggccgcctgcaacttctgcagaagacccgtgcacttcgagctgatgagcgagtgggagagaagctacttcggcaacatgggcccccagtacgtgaccacctacgcctag

SEQ ID NO: 72638 - DNA, 1725 bp, synthetic construct
  misc_feature 1..1725: note = Description of Artificial Sequence: Synthetic coding sequence
  source 1..1725: mol_type = other DNA
atgagaggcggcgaggtggccctgggctggaacaagaagaagagactgttctgcgaggacttcagattcaagatggtgaccgccgccatgctgctgcagtgctgccccgtgctggccagaggccccaccagcctgctgggcaaggtggtgaagacccaccagttcctgttcggcatcggcagatgccccatcctggccacccagggccccaactgcagccagatccacctgaaggccaccaaggccggcggcgacagccccagctgggccaagggccactgccccttcatgctgagcgagctgcaggacggcaagagcaagatcgtgcagaaggccgcccccgaggtgcaggaggacgtgaaggccttcaagaccggcaactacgtgttcagctacgaccagttcttcagagacaagatcatggagaagaagcaggaccacacctacagagtgttcaagaccgtgaacagatgggccgacgcctaccccttcgcccagcacttcagcgaggccagcgtggccagcaaggacgtgagcgtgtggtgcagcaacgactacctgggcatgagcagacacccccaggtgctgcaggccacccaggagaccctgcagagacacggcgccggcgccggcggcaccagaaacatcagcggcaccagcaagttccacgtggagctggagcaggagctggccgagctgcaccagaaggacagcgccctgctgttcagcagctgcttcgtggccaacgacagcaccctgttcaccctggccaagatcctgcccggctgcgagatctacagcgacgccggcaaccacgccagcatgatccagggcatcagaaacagcggcgccgccaagttcgtgttcagacacaacgaccccgaccacctgaagaagctgctggagaagagcaaccccaagatccccaagatcgtggccttcgagaccgtgcacagcatggacggcgccatctgccccctggaggagctgtgcgacgtgagccaccagtacggcgccctgaccttcgtggacgaggtgcacgccgtgggcctgtacggcagcagaggcgccggcatcggcgagagagacggcatcatgcacaagatcgacatcatcagcggcaccctgggcaaggccttcggctgcgtgggcggctacatcgccagcaccagagacctggtggacatggtgagaagctacgccgccggcttcatcttcaccaccagcctgccccccatggtgctgagcggcgccctggagagcgtgagactgctgaagggcgaggagggccaggccctgagaagagcccaccagagaaacgtgaagcacatgagacagctgctgatggacagaggcctgcccgtgatcccctgccccagccacatcatccccatcagagtgggcaacgccgccctgaacagcaagctgtgcgacctgctgctgagcaagcacggcatctacgtgcaggccatcaactaccccaccgtgcccagaggcgaggagctgctgagactggcccccagcccccaccacagcccccagatgatggaggacttcgtggagaagctgctgctggcctggaccgccgtgggcctgcccctgcaggacgtgagcgtggccgcctgcaacttctgcagaagacccgtgcacttcgagctgatgagcgagtgggagagaagctacttcggcaacatgggcccccagtacgtgaccacctacgcctag

SEQ ID NO: 72639 - DNA, 669 bp, synthetic construct
  misc_feature 1..669: note = Description of Artificial Sequence: Synthetic coding sequence
  source 1..669: mol_type = other DNA
tgactgagcttcgtgagaccccagtgcagagccaccgacagccccagctgggccaagggccactgccccttcatgctgagcgagctgcaggacggcaagagcaagatcgtgcagaaggccgcccccgaggtgcaggaggacgtgaaggccttcaagaccgacctgcccagcagcctggtgagcgtgagcctgagaaagcccttcagcggcccccaggagcaggagcagatcagcggcaaggtgacccacctgatccagaacaacatgcccggcaactacgtgttcagctacgaccagttcttcagagacaagatcatggagaagaagcaggaccacacctacagagtgttcaagaccgtgaacagatgggccgacgcctaccccttcgcccagcacttcagcgaggccagcgtggccagcaaggacgtgagcgtgtggtgcagcaacgactacctgggcatgagcagacacccccaggtgctgcaggccacccaggagaccctgcagagacacggcgccggcgccggcggcaccagaaacatcagcggcaccagcaagttccacgtggagctggagcaggagctggccgagctgcaccagaaggacagcgccctgctgttcagcagctgcttcgtggccaacgacagcaccctgttcaccctggcctag

SEQ ID NO: 72640 - DNA, 1212 bp, synthetic construct
  misc_feature 1..1212: note = Description of Artificial Sequence: Synthetic coding sequence
  source 1..1212: mol_type = other DNA
atgcagagagccgtgagcgtggtggccagactgggcttcagactgcaggccttcccccccgccctgtgcagacccctgagctgcgcccaggaggtgctgagaagaacccccctgtacgacttccacctggcccacggcggcaagatggtggccttcgccggctggagcctgcccgtgcagtacagagacagccacaccgacagccacctgcacaccagacagcactgcagcctgttcgacgtgagccacatgctgcagaccaagatcctgggcagcgacagagtgaagctgatggagagcctggtggtgggcgacatcgccgagctgagacccaaccagggcaccctgagcctgttcaccaacgaggccggcggcatcctggacgacctgatcgtgaccaacaccagcgagggccacctgtacgtggtgagcaacgccggctgctgggagaaggacctggccctgatgcaggacaaggtgagagagctgcagaaccagggcagagacgtgggcctggaggtgctggacaacgccctgctggccctgcagggccccaccgccgcccaggtgctgcaggccggcgtggccgacgacctgagaaagctgcccttcatgaccagcgccgtgatggaggtgttcggcgtgagcggctgcagagtgaccagatgcggctacaccggcgaggacggcgtggagatcagcgtgcccgtggccggcgccgtgcacctggccaccgccatcctgaagaaccccgaggtgaagctggccggcctggccgccagagacagcctgagactggaggccggcctgtgcctgtacggcaacgacatcgacgagcacaccacccccgtggagggcagcctgagctggaccctgggcaagagaagaagagccgccatggacttccccggcgccaaggtgatcgtgccccagctgaagggcagagtgcagagaagaagagtgggcctgatgtgcgagggcgcccccatgagagcccacagccccatcctgaacatggagggcaccaagatcggcaccgtgaccagcggctgccccagccccagcctgaagaagaacgtggccatgggctacgtgccctgcgagtacagcagacccggcaccatgctgctggtggaggtgagaagaaagcagcagatggccgtggtgagcaagatgcccttcgtgcccaccaactactacaccctgaagtag

SEQ ID NO: 72641 - DNA, 1161 bp, synthetic construct
  misc_feature 1..1161: note = Description of Artificial Sequence: Synthetic coding sequence
  source 1..1161: mol_type = other DNA
atgcagagagccgtgagcgtggtggccagactgggcttcagactgcaggccttcccccccgccctgtgcagacccctgagctgcgcccaggaggtgctgagaagaacccccctgtacgacttccacctggcccacggcggcaagatggtggccttcgccggctggagcctgcccgtgcagtacagagacagccacaccgacagccacctgcacaccagacagcactgcagcctgttcgacgtgagccacatgctgcagaccaagatcctgggcagcgacagagtgaagctgatggagagcctggtggtgggcgacatcgccgagctgagacccaaccagggcaccctgagcctgttcaccaacgaggccggcggcatcctggacgacctgatcgtgaccaacaccagcgagggccacctgtacgtggtgagcaacgccggctgctgggagaaggacctggccctgatgcaggacaaggtgagagagctgcagaaccagggcagagacgtgggcctggaggtgctggacaacgccctgctggccctgcagggccccaccgccgcccaggtgctgcaggccggcgtggccgacgacctgagaaagctgcccttcatgaccagcgccgtgatggaggtgttcggcgtgagcggctgcagagtgaccagatgcggctacaccggcgaggacggcgtggagatcagcgtgcccgtggccggcgccgtgcacctggccaccgccatcctgaagaaccccgaggtgaagctggccggcctggccgccagagacagcctgagactggaggccggcctgtgcctgtacggcaacgacatcgacgagcacaccacccccgtggagggcagcctgagctggaccctgggcaagagaagaagagccgccatggacttccccggcgccaaggtgatcgtgccccagctgaagggcagagtgcagagaagaagagtgggcctgatgtgcgagggcgcccccatgagagcccacagccccatcctgaacatggagggcaccaagatcggcaccgtgaccagcggctgccccagccccagcctgaagaagaacgtggccatgggctacgtgccctgcgagtacagcagacccggcaccatgctgctggtggagctgcccagcggcccctgcttctag

SEQ ID NO: 72642 - DNA, 1155 bp, synthetic construct
  misc_feature 1..1155: note = Description of Artificial Sequence: Synthetic coding sequence
  source 1..1155: mol_type = other DNA
tgagccgtgagcgtggtggccagactgggcttcagactgcaggccttcccccccgccctgtgcagacccctgagctgcgcccaggaggtgctgagaagaacccccctgtacgacttccacctggcccacggcggcaagatggtggccttcgccggctggagcctgcccgtgcagtacagagacagccacaccgacagccacctgcacaccagacagcactgcagcctgttcgacgtgagccacatgctgcagaccaagatcctgggcagcgacagagtgaagctgatggagagcctggtggtgggcgacatcgccgagctgagacccaaccagggcaccctgagcctgttcaccaacgaggccggcggcatcctggacgacctgatcgtgaccaacaccagcgagggccacctgtacgtggtgagcaacgccggctgctgggagaaggacctggccctgatgcaggacaaggtgagagagctgcagaaccagggcagagacgtgggcctggaggtgctggacaacgccctgctggccctgcagggccccaccgccgcccaggtgctgcaggccggcgtggccgacgacctgagaaagctgcccttcatgaccagcgccgtgatggaggtgttcggcgtgagcggctgcagagtgaccagatgcggctacaccggcgaggacggcgtggagatcagcgtgcccgtggccggcgccgtgcacctggccaccgccatcctgaagaaccccgaggtgaagctggccggcctggccgccagagacagcctgagactggaggccggcctgtgcctgtacggcaacgacatcgacgagcacaccacccccgtggagggcagcctgagctggaccctgggcaagagaagaagagccgccatggacttccccggcgccaaggtgatcgtgccccagctgaagggcagagtgcagagaagaagagtgggcctgatgtgcgagggcgcccccatgagagcccacagccccatcctgaacatggagggcaccaagatcggcaccgtgaccagcggctgccccagccccagcctgaagaagaacgtggccatgggctacgtgccctgcgagtacagcagacccggcaccatgctgctggtggagctgcccagcggcccctgcttctag

SEQ ID NO: 72643 - DNA, 1080 bp, synthetic construct
  misc_feature 1..1080: note = Description of Artificial Sequence: Synthetic coding sequence
  source 1..1080: mol_type = other DNA
atgcagagagccgtgagcgtggtggccagactgggcttcagactgcaggccttcccccccgccctgtgcagacccctgagctgcgcccaggaggtgctgagaagaacccccctgtacgacttccacctggcccacggcggcaagatggtggccttcgccggctggagcctgcccgtgcagtacagagacagccacaccgacagccacctgcacaccagacagcactgcagcctgttcgacgtgagccacatgctgcagaccaagatcctgggcagcgacagagtgaagctgatggagagcctggtggtgggcgacatcgccgagctgagacccaaccaggacaaggtgagagagctgcagaaccagggcagagacgtgggcctggaggtgctggacaacgccctgctggccctgcagggccccaccgccgcccaggtgctgcaggccggcgtggccgacgacctgagaaagctgcccttcatgaccagcgccgtgatggaggtgttcggcgtgagcggctgcagagtgaccagatgcggctacaccggcgaggacggcgtggagatcagcgtgcccgtggccggcgccgtgcacctggccaccgccatcctgaagaaccccgaggtgaagctggccggcctggccgccagagacagcctgagactggaggccggcctgtgcctgtacggcaacgacatcgacgagcacaccacccccgtggagggcagcctgagctggaccctgggcaagagaagaagagccgccatggacttccccggcgccaaggtgatcgtgccccagctgaagggcagagtgcagagaagaagagtgggcctgatgtgcgagggcgcccccatgagagcccacagccccatcctgaacatggagggcaccaagatcggcaccgtgaccagcggctgccccagccccagcctgaagaagaacgtggccatgggctacgtgccctgcgagtacagcagacccggcaccatgctgctggtggaggtgagaagaaagcagcagatggccgtggtgagcaagatgcccttcgtgcccaccaactactacaccctgaagtag

SEQ ID NO: 72644 - DNA, 1044 bp, synthetic construct
  misc_feature 1..1044: note = Description of Artificial Sequence: Synthetic coding sequence
  source 1..1044: mol_type = other DNA
atgcagagagccgtgagcgtggtggccagactgggcttcagactgcaggccttcccccccgccctgtgcagacccctgagctgcgcccagaccaagatcctgggcagcgacagagtgaagctgatggagagcctggtggtgggcgacatcgccgagctgagacccaaccagggcaccctgagcctgttcaccaacgaggccggcggcatcctggacgacctgatcgtgaccaacaccagcgagggccacctgtacgtggtgagcaacgccggctgctgggagaaggacctggccctgatgcaggacaaggtgagagagctgcagaaccagggcagagacgtgggcctggaggtgctggacaacgccctgctggccctgcagggccccaccgccgcccaggtgctgcaggccggcgtggccgacgacctgagaaagctgcccttcatgaccagcgccgtgatggaggtgttcggcgtgagcggctgcagagtgaccagatgcggctacaccggcgaggacggcgtggagatcagcgtgcccgtggccggcgccgtgcacctggccaccgccatcctgaagaaccccgaggtgaagctggccggcctggccgccagagacagcctgagactggaggccggcctgtgcctgtacggcaacgacatcgacgagcacaccacccccgtggagggcagcctgagctggaccctgggcaagagaagaagagccgccatggacttccccggcgccaaggtgatcgtgccccagctgaagggcagagtgcagagaagaagagtgggcctgatgtgcgagggcgcccccatgagagcccacagccccatcctgaacatggagggcaccaagatcggcaccgtgaccagcggctgccccagccccagcctgaagaagaacgtggccatgggctacgtgccctgcgagtacagcagacccggcaccatgctgctggtggaggtgagaagaaagcagcagatggccgtggtgagcaagatgcccttcgtgcccaccaactactacaccctgaagtag

SEQ ID NO: 72645 - DNA, 921 bp, synthetic construct
  misc_feature 1..921: note = Description of Artificial Sequence: Synthetic coding sequence
  source 1..921: mol_type = other DNA
atggagagcctggtggtgggcgacatcgccgagctgagacccaaccagggcaccctgagcctgttcaccaacgaggccggcggcatcctggacgacctgatcgtgaccaacaccagcgagggccacctgtacgtggtgagcaacgccggctgctgggagaaggacctggccctgatgcaggacaaggtgagagagctgcagaaccagggcagagacgtgggcctggaggtgctggacaacgccctgctggccctgcagggccccaccgccgcccaggtgctgcaggccggcgtggccgacgacctgagaaagctgcccttcatgaccagcgccgtgatggaggtgttcggcgtgagcggctgcagagtgaccagatgcggctacaccggcgaggacggcgtggagatcagcgtgcccgtggccggcgccgtgcacctggccaccgccatcctgaagaaccccgaggtgaagctggccggcctggccgccagagacagcctgagactggaggccggcctgtgcctgtacggcaacgacatcgacgagcacaccacccccgtggagggcagcctgagctggaccctgggcaagagaagaagagccgccatggacttccccggcgccaaggtgatcgtgccccagctgaagggcagagtgcagagaagaagagtgggcctgatgtgcgagggcgcccccatgagagcccacagccccatcctgaacatggagggcaccaagatcggcaccgtgaccagcggctgccccagccccagcctgaagaagaacgtggccatgggctacgtgccctgcgagtacagcagacccggcaccatgctgctggtggaggtgagaagaaagcagcagatggccgtggtgagcaagatgcccttcgtgcccaccaactactacaccctgaagtag

SEQ ID NO: 72646 - DNA, 2760 bp, synthetic construct
  misc_feature 1..2760: note = Description of Artificial Sequence: Synthetic coding sequence
  source 1..2760: mol_type = other DNA
atgtggctggccgccgccgcccccagcctggccagaagactgctgttcctgggccccccccccccccccctgctgctgctggtgttcagcagaagcagcagaagaagactgcacagcctgggcctggccgccatgcccgagaagagacccttcgagagactgcccgccgacgtgagccccatcaactacagcctgtgcctgaagcccgacctgctggacttcaccttcgagggcaagctggaggccgccgcccaggtgagacaggccaccaaccagatcgtgatgaactgcgccgacatcgacatcatcaccgccagctacgcccccgagggcgacgaggagatccacgccaccggcttcaactaccagaacgaggacgagaaggtgaccctgagcttccccagcaccctgcagaccggcaccggcaccctgaagatcgacttcgtgggcgagctgaacgacaagatgaagggcttctacagaagcaagtacaccacccccagcggcgaggtgagatacgccgccgtgacccagttcgaggccaccgacgccagaagagccttcccctgctgggacgagcccgccatcaaggccaccttcgacatcagcctggtggtgcccaaggacagagtggccctgagcaacatgaacgtgatcgacagaaagccctaccccgacgacgagaacctggtggaggtgaagttcgccagaacccccgtgatgagcacctacctggtggccttcgtggtgggcgagtacgacttcgtggagaccagaagcaaggacggcgtgtgcgtgagagtgtacacccccgtgggcaaggccgagcagggcaagttcgccctggaggtggccgccaagaccctgcccttctacaaggactacttcaacgtgccctaccccctgcccaagatcgacctgatcgccatcgccgacttcgccgccggcgccatggagaactggggcctggtgacctacagagagaccgccctgctgatcgaccccaagaacagctgcagcagcagcagacagtgggtggccctggtggtgggccacgagctggcccaccagtggttcggcaacctggtgaccatggagtggtggacccacctgtggctgaacgagggcttcgccagctggatcgagtacctgtgcgtggaccactgcttccccgagtacgacatctggacccagttcgtgagcgccgactacaccagagcccaggagctggacgccctggacaacagccaccccatcgaggtgagcgtgggccaccccagcgaggtggacgagatcttcgacgccatcagctacagcaagggcgccagcgtgatcagaatgctgcacgactacatcggcgacaaggacttcaagaagggcatgaacatgtacctgaccaagttccagcagaagaacgccgccaccgaggacctgtgggagagcctggagaacgccagcggcaagcccatcgccgccgtgatgaacacctggaccaagcagatgggcttccccctgatctacgtggaggccgagcaggtggaggacgacagactgctgagactgagccagaagaagttctgcgccggcggcagctacgtgggcgaggactgcccccagtggatggtgcccatcaccatcagcaccagcgaggaccccaaccaggccaagctgaagatcctgatggacaagcccgagatgaacgtggtgctgaagaacgtgaagcccgaccagtgggtgaagctgaacctgggcaccgtgggcttctacagaacccagtacagcagcgccatgctggagagcctgctgcccggcatcagagacctgagcctgccccccgtggacagactgggcctgcagaacgacctgttcagcctggccagagccggcatcatcagcaccgtggaggtgctgaaggtgatggaggccttcgtgaacgagcccaactacaccgtgtggagcgacctgagctgcaacctgggcatcctgagcaccctgctgagccacaccgacttctacgaggagatccaggagttcgtgaaggacgtgttcagccccatcggcgagagactgggctgggaccccaagcccggcgagggccacctggacgccctgctgagaggcctggtgctgggcaagctgggcaaggccggccacaaggccaccctggaggaggccagaagaagattcaaggaccacgtggagggcaagcagatcctgagcgccgacctgagaagccccgtgtacctgaccgtgctgaagcacggcgacggcaccaccctggacatcatgctgaagctgcacaagcaggccgacatgcaggaggagaagaacagaatcgagagagtgctgggcgccaccctgctgcccgacctgatccagaaggtgctgaccttcgccctgagcgaggaggtgagaccccaggacaccgtgagcgtgatcggcggcgtggccggcggcagcaagcacggcagaaaggccgcctggaagttcatcaaggacaactgggaggagctgtacaacagataccagggcggcttcctgatcagcagactgatcaagctgagcgtggagggcttcgccgtggacaagatggccggcgaggtgaaggccttcttcgagagccaccccgcccccagcgccgagagaaccatccagcagtgctgcgagaacatcctgctgaacgccgcctggctgaagagagacgccgagagcatccaccagtacctgctgcagagaaaggccagcccccccaccgtgtag

SEQ ID NO: 72647 - DNA, 1884 bp, synthetic construct
  misc_feature 1..1884: note = Description of Artificial Sequence: Synthetic coding sequence
  source 1..1884: mol_type = other DNA
atgtggctggccgccgccgcccccagcctggccagaagactgctgttcctgggccccccccccccccccctgctgctgctggtgttcagcagaagcagcagaagaagactgcacagcctgggcctggccgacgtgagccccatcaactacagcctgtgcctgaagcccgacctgctggacttcaccttcgagggcaagctggaggccgccgcccaggtgagacaggccaccaaccagatcgtgatgaactgcgccgacatcgacatcatcaccgccagctacgcccccgagggcgacgaggagatccacgccaccggcttcaactaccagaacgaggacgagaaggtgaccctgagcttccccagcaccctgcagaccggcaccggcaccctgaagatcgacttcgtgggcgagctgaacgacaagatgaagggcttctacagaagcaagtacaccacccccagcggcgaggtgagatacgccgccgtgacccagttcgaggccaccgacgccagaagagccttcccctgctgggacgagcccgccatcaaggccaccttcgacatcagcctggtggtgcccaaggacagagtggccctgagcaacatgaacgtgatcgacagaaagccctaccccgacgacgagaacctggtggaggtgaagttcgccagaacccccgtgatgagcacctacctggtggccttcgtggtgggcgagtacgacttcgtggagaccagaagcaaggacggcgtgtgcgtgagagtgtacacccccgtgggcaaggccgagcagggcaagttcgccctggaggtggccgccaagaccctgcccttctacaaggactacttcaacgtgccctaccccctgcccaagatcgacctgatcgccatcgccgacttcgccgccggcgccatggagaactggggcctggtgacctacagagagaccgccctgctgatcgaccccaagaacagctgcagcagcagcagacagtgggtggccctggtggtgggccacgagctggcccaccagtggttcggcaacctggtgaccatggagtggtggacccacctgtggctgaacgagggcttcgccagctggatcgagtacctgtgcgtggaccactgcttccccgagtacgacatctggacccagttcgtgagcgccgactacaccagagcccaggagctggacgccctggacaacagccaccccatcgaggtgagcgtgggccaccccagcgaggtggacgagatcttcgacgccatcagctacagcaagggcgccagcgtgatcagaatgctgcacgactacatcggcgacaaggacttcaagaagggcatgaacatgtacctgaccaagttccagcagaagaacgccgccaccgaggacctgtgggagagcctggagaacgccagcggcaagcccatcgccgccgtgatgaacacctggaccaagcagatgggcttccccctgatctacgtggaggccgagcaggtggaggacgacagactgctgagactgagccagaagaagttctgcgccggcggcagctacgtgggcgaggactgcccccagtggatggtgcccatcaccatcagcaccagcgaggaccccaaccaggccaagctgaagatcctgatggacaagcccgagatgaacgtggtgctgaagaacgtgaagcccgaccagtgggtgaagctgaacctgggcaccgtgggcttctacagaacccagtacagcagcgccatgctggagagcctgctgcccggcatcagagacctgagcctgccccccgtggacagactgggcctgcagaacgacctgttcagcctgttcatcctgtgcgtgagagaggtgagcggcaactgctgcagagcctag

SEQ ID NO: 72648 - DNA, 2520 bp, synthetic construct
  misc_feature 1..2520: note = Description of Artificial Sequence: Synthetic coding sequence
  source 1..2520: mol_type = other DNA
atgcccgagaagagacccttcgagagactgcccgccgacgtgagccccatcaactacagcctgtgcctgaagcccgacctgctggacttcaccttcgagggcaagctggaggccgccgcccaggtgagacaggccaccaaccagatcgtgatgaactgcgccgacatcgacatcatcaccgccagctacgcccccgagggcgacgaggagatccacgccaccggcttcaactaccagaacgaggacgagaaggtgaccctgagcttccccagcaccctgcagaccggcaccggcaccctgaagatcgacttcgtgggcgagctgaacgacaagatgaagggcttctacagaagcaagtacaccacccccagcggcgaggtgagatacgccgccgtgacccagttcgagaacgtgatcgacagaaagccctaccccgacgacgagaacctggtggaggtgaagttcgccagaacccccgtgatgagcacctacctggtggccttcgtggtgggcgagtacgacttcgtggagaccagaagcaaggacggcgtgtgcgtgagagtgtacacccccgtgggcaaggccgagcagggcaagttcgccctggaggtggccgccaagaccctgcccttctacaaggactacttcaacgtgccctaccccctgcccaagatcgacctgatcgccatcgccgacttcgccgccggcgccatggagaactggggcctggtgacctacagagagaccgccctgctgatcgaccccaagaacagctgcagcagcagcagacagtgggtggccctggtggtgggccacgagctggcccaccagtggttcggcaacctggtgaccatggagtggtggacccacctgtggctgaacgagggcttcgccagctggatcgagtacctgtgcgtggaccactgcttccccgagtacgacatctggacccagttcgtgagcgccgactacaccagagcccaggagctggacgccctggacaacagccaccccatcgaggtgagcgtgggccaccccagcgaggtggacgagatcttcgacgccatcagctacagcaagggcgccagcgtgatcagaatgctgcacgactacatcggcgacaaggacttcaagaagggcatgaacatgtacctgaccaagttccagcagaagaacgccgccaccgaggacctgtgggagagcctggagaacgccagcggcaagcccatcgccgccgtgatgaacacctggaccaagcagatgggcttccccctgatctacgtggaggccgagcaggtggaggacgacagactgctgagactgagccagaagaagttctgcgccggcggcagctacgtgggcgaggactgcccccagtggatggtgcccatcaccatcagcaccagcgaggaccccaaccaggccaagctgaagatcctgatggacaagcccgagatgaacgtggtgctgaagaacgtgaagcccgaccagtgggtgaagctgaacctgggcaccgtgggcttctacagaacccagtacagcagcgccatgctggagagcctgctgcccggcatcagagacctgagcctgccccccgtggacagactgggcctgcagaacgacctgttcagcctggccagagccggcatcatcagcaccgtggaggtgctgaaggtgatggaggccttcgtgaacgagcccaactacaccgtgtggagcgacctgagctgcaacctgggcatcctgagcaccctgctgagccacaccgacttctacgaggagatccaggagttcgtgaaggacgtgttcagccccatcggcgagagactgggctgggaccccaagcccggcgagggccacctggacgccctgctgagaggcctggtgctgggcaagctgggcaaggccggccacaaggccaccctggaggaggccagaagaagattcaaggaccacgtggagggcaagcagatcctgagcgccgacctgagaagccccgtgtacctgaccgtgctgaagcacggcgacggcaccaccctggacatcatgctgaagctgcacaagcaggccgacatgcaggaggagaagaacagaatcgagagagtgctgggcgccaccctgctgcccgacctgatccagaaggtgctgaccttcgccctgagcgaggaggtgagaccccaggacaccgtgagcgtgatcggcggcgtggccggcggcagcaagcacggcagaaaggccgcctggaagttcatcaaggacaactgggaggagctgtacaacagataccagggcggcttcctgatcagcagactgatcaagctgagcgtggagggcttcgccgtggacaagatggccggcgaggtgaaggccttcttcgagagccaccccgcccccagcgccgagagaaccatccagcagtgctgcgagaacatcctgctgaacgccgcctggctgaagagagacgccgagagcatccaccagtacctgctgcagagaaaggccagcccccccaccgtgtag

SEQ ID NO: 72649 - DNA, 1125 bp, synthetic construct
  misc_feature 1..1125: note = Description of Artificial Sequence: Synthetic coding sequence
  source 1..1125: mol_type = other DNA
atgagaagccccgccgtgcccacccccgccagaggccagctgggcgtggccttcgtgctgctgcccccccacagcgagggcgccagagtgttcggcgccctgggccccatcggccccagcagccccggcctgaccctgggcggcctggccgtgagcgagcacagactgagcaacaagctgctggcctggagcggcgtgctggagtggcaggagaagagaagaccctacagcgacagcaccgccaagctgaagagaaccctgccctgccaggcctacgtgaaccagggcgagaacctggagaccgaccagtggccccagaagctgatcatgcagctgatcccccagcagctgctgaccaccctgggccccctgttcagaaacagccagctggcccagttccacttcaccaacagagactgcgacagcctgaagggcctgtgcagaatcatgggcaacggcttcgccggctgcatgctgttcccccacatcagcccctgcgaggtgagagtgctgatgctgctgtacagcagcaagaagaagatcttcatgggcctgatcccctacgaccagagcggcttcgtgagcgccatcagacaggtgatcaccaccagaaagcaggccgtgggccccggcggcgtgaacagcggccccgtgcagatcgtgaacaacaagttcctggcctggagcggcgtgatggagtggcaggagcccagacccgagcccaacagcagaagcaagagatggctgcccagccacgtgtacgtgaaccagggcgagatcctgagaaccgagcagtggcccagaaagctgtacatgcagctgatcccccagcagctgctgaccaccctggtgcccctgttcagaaacagcagactggtgcagttccacttcaccaaggacctggagaccctgaagagcctgtgcagaatcatggacaacggcttcagaagaaagagcagcctggccagcagccccatgaccagagccaccctgagcaccgccagcggcgtgagcctgcccaccagcagcagaagctgcagcggcacctggagcagaagcaacagcaacgagggctggggcggcagcggctaccccggcctgggccccagcagaagccacagatag

SEQ ID NO: 72650 - DNA, 594 bp, synthetic construct
  misc_feature 1..594: note = Description of Artificial Sequence: Synthetic coding sequence
  source 1..594: mol_type = other DNA
atgatgttcccccagagcagacacagcggcagcagccacctgccccagcagctgaagttcaccaccagcgacagctgcgacagaatcaaggacgagttccagctgctgcaggcccagtaccacagcctgaagctggagtgcgacaagctggccagcgagaagagcgagatgcagagacactacgtgatgtactacgagatgagctacggcctgaacatcgagatgcacaagcaggccgagatcgtgaagagactgaacggcatctgcgcccaggtgctgccctacctgagccaggagcaccagcagcaggtgctgggcgccatcgagagagccaagcaggtgaccgcccccgagctgaacagcatcatcagacagcagctgcaggcccaccagctgagccagctgcaggccctggccctgcccctgacccccctgcccgtgggcctgcagccccccagcctgcccgccgtgagcgccggcaccggcctgctgagcctgagcgccctgggcagccaggcccacctgagcaaggaggacaagaacggccacgacggcgacacccaccaggaggacgacggcgagaagagcgactag

SEQ ID NO: 72651 - DNA, 1362 bp, synthetic construct
  misc_feature 1..1362: note = Description of Artificial Sequence: Synthetic coding sequence
  source 1..1362: mol_type = other DNA
atgggcgtgctgggcagagtgctgctgtggctgcagctgtgcgccctgacccaggccgtgagcaagctgtgggtgcccaacaccgacttcgacgtggccgccaactggagccagaacagaaccccctgcgccggcggcgccgtggagttccccgccgacaagatggtgagcgtgctggtgcaggagggccacgccgtgagcgacatgctgctgcccctggacggcgagctggtgctggccagcggcgccggcttcggcgtgagcgacgtgggcagccacctggactgcggcgccggcgagcccgccgtgttcagagacagcgacagattcagctggcacgacccccacctgtggagaagcggcgacgaggcccccggcctgttcttcgtggacgccgagagagtgccctgcagacacgacgacgtgttcttcccccccagcgccagcttcagagtgggcctgggccccggcgccagccccgtgagagtgagaagcatcagcgccctgggcagaaccttcaccagagacgaggacctggccgtgttcctggccagcagagccggcagactgagattccacggccccggcgccctgagcgtgggccccgaggactgcgccgaccccagcggctgcgtgtgcggcaacgccgaggcccagccctggatctgcgccgccctgctgcagcccctgggcggcagatgcccccaggccgcctgccacagcgccctgagaccccagggccagtgctgcgacctgtgcggcgccgtggtgctgctgacccacggccccgccttcgacctggagagatacagagccagaatcctggacaccttcctgggcctgccccagtaccacggcctgcaggtggccgtgagcaaggtgcccagaagcagcagactgagagaggccgacaccgagatccaggtggtgctggtggagaacggccccgagaccggcggcgccggcagactggccagagccctgctggccgacgtggccgagaacggcgaggccctgggcgtgctggaggccaccatgagagagagcggcgcccacgtgtggggcagcagcgccgccggcctggccggcggcgtggccgccgccgtgctgctggccctgctggtgctgctggtggccccccccctgctgagaagagccggcagactgagatggagaagacacgaggccgccgcccccgccggcgcccccctgggcttcagaaaccccgtgttcgacgtgaccgccagcgaggagctgcccctgcccagaagactgagcctggtgcccaaggccgccgccgacagcaccagccacagctacttcgtgaaccccctgttcgccggcgccgaggccgaggcctag

SEQ ID NO: 72652 - DNA, 1962 bp, synthetic construct
  misc_feature 1..1962: note = Description of Artificial Sequence: Synthetic coding sequence
  source 1..1962: mol_type = other DNA
atggccgacatcaagaccggcatcttcgccaagaacgtgcagaagagactgaacagagcccaggagaaggtgctgcagaagctgggcaaggccgacgagaccaaggacgagcagttcgaggagtacgtgcagaacttcaagagacaggaggccgagggcaccagactgcagagagagctgagaggctacctggccgccatcaagggcatgcaggaggccagcatgaagctgaccgagagcctgcacgaggtgtacgagcccgactggtacggcagagaggacgtgaagatggtgggcgagaagtgcgacgtgctgtgggaggacttccaccagaagctggtggacggcagcctgctgaccctggacacctacctgggccagttccccgacatcaagaacagaatcgccaagagaagcagaaagctggtggactacgacagcgccagacaccacctggaggccctgcagagcagcaagagaaaggacgagagcagaatcagcaaggccgaggaggagttccagaaggcccagaaggtgttcgaggagttcaacgtggacctgcaggaggagctgcccagcctgtggagcagaagagtgggcttctacgtgaacaccttcaagaacgtgagcagcctggaggccaagttccacaaggagatcgccgtgctgtgccacaagctgtacgaggtgatgaccaagctgggcgaccagcacgccgacaaggccttcaccatccagggcgcccccagcgacagcggccccctgagaatcgccaagacccccagcccccccgaggagcccagccccctgcccagccccaccgccagccccaaccacaccctggcccccgccagccccgcccccgccagacccagaagccccagccagaccagaaagggcccccccgtgccccccctgcccaaggtgacccccaccaaggagctgcagcaggagaacatcatcagcttcttcgaggacaacttcgtgcccgagatcagcgtgaccacccccagccagaacgaggtgcccgaggtgaagaaggaggagaccctgctggacctggacttcgaccccttcaagcccgaggtgacccccgccggcagcgccggcgtgacccacagccccatgagccagaccctgccctgggacctgtggaccaccagcaccgacctggtgcagcccgccagcggcggcagcttcaacggcttcacccagccccaggacaccagcctgttcaccatgcagaccgaccagagcatgatctgcaacctgatcatccccggcgccgacgccgacgccgccgtgggcaccctggtgagcgccgccgagggcgcccccggcgaggaggccgaggccgagaaggccaccgtgcccgccggcgagggcgtgagcctggaggaggccaagatcggcaccgagaccaccgagggcgccgagagcgcccagcccgaggccgaggagctggaggccaccgtgccccaggagaaggtgatccccagcgtggtgatcgagcccgccagcaaccacgaggaggagggcgagaacgagatcaccatcggcgccgagcccaaggagaccaccgaggacgccgccccccccggccccaccagcgagacccccgagctggccaccgagcagaagcccatccaggacccccagcccacccccagcgcccccgccatgggcgccgccgaccagctggccagcgccagagaggccagccaggagctgccccccggcttcctgtacaaggtggagaccctgcacgacttcgaggccgccaacagcgacgagctgaccctgcagagaggcgacgtggtgctggtggtgcccagcgacagcgaggccgaccaggacgccggctggctggtgggcgtgaaggagagcgactggctgcagtacagagacctggccacctacaagggcctgttccccgagaacttcaccagaagactggactag

SEQ ID NO: 72653 - DNA, 1794 bp, synthetic construct
  misc_feature 1..1794: note = Description of Artificial Sequence: Synthetic coding sequence
  source 1..1794: mol_type = other DNA
atgaccaagctgggcgaccagcacgccgacaaggccttcaccatccagggcgcccccagcgacagcggccccctgagaatcgccaagacccccagcccccccgaggagcccagccccctgcccagccccaccgccagccccaaccacaccctggcccccgccagccccgcccccgccagacccagaagccccagccagaccagaaagggcccccccgtgccccccctgcccaaggtgacccccaccaaggagctgcagcaggagaacatcatcagcttcttcgaggacaacttcgtgcccgagatcagcgtgaccacccccagccagaacgaggtgcccgaggtgaagaaggaggagaccctgctggacctggacttcgaccccttcaagcccgaggtgacccccgccggcagcgccggcgtgacccacagccccatgagccagaccctgccctgggacctgtggaccacccacaccttcaacgacgacatcaccgacagcagcgagagcctgagcctgtgcaacctgatcatggaggagacccccgacagcggcctggccgaggagatccagagaagccagaacgacatcggcgccttcacctggggccccgacgccagcaccgacagagtgagccaggaggtgaccagcggcggcttcggcgaggacagcgcctgccccagcgagaccgagcaggacatcagactgagcaccagcctgctgagcagcgccgactggcccaccgtggccgaggagagcgagcacgcccccggccccgccttccccggcggcaacgagcagctgccccccaagcccgcccccgaggccggcgtggccatcgccgcctgcgtggagatggagcagctgtacgaccccctggacagcgacatgcccgccatggacaccgccggcctgttcaaggagagccacgaggacatgaagaagagcgacgaggaggaggagaagcagaagatggaggacagcctgtgggccggcgtggaggcctgccagaaggccagcggcggcagcttcaacggcttcacccagccccaggacaccagcctgttcaccatgcagaccgaccagagcatgatctgcaacctgatcatccccggcgccgacgccgacgccgccgtgggcaccctggtgagcgccgccgagggcgcccccggcgaggaggccgaggccgagaaggccaccgtgcccgccggcgagggcgtgagcctggaggaggccaagatcggcaccgagaccaccgagggcgccgagagcgcccagcccgaggccgaggagctggaggccaccgtgccccaggagaaggtgatccccagcgtggtgatcgagcccgccagcaaccacgaggaggagggcgagaacgagatcaccatcggcgccgagcccaaggagaccaccgaggacgccgccccccccggccccaccagcgagacccccgagctggccaccgagcagaagcccatccaggacccccagcccacccccagcgcccccgccatgggcgccgccgaccagctggccagcgccagagaggccagccaggagctgccccccggcttcctgtacaaggtggagaccctgcacgacttcgaggccgccaacagcgacgagctgaccctgcagagaggcgacgtggtgctggtggtgcccagcgacagcgaggccgaccaggacgccggctggctggtgggcgtgaaggagagcgactggctgcagtacagagacctggccacctacaagggcctgttccccgagaacttcaccagaagactggactag

SEQ ID NO: 72654 - DNA, 2088 bp, synthetic construct
  misc_feature 1..2088: note = Description of Artificial Sequence: Synthetic coding sequence
  source 1..2088: mol_type = other DNA
atggccgacatcaagaccggcatcttcgccaagaacgtgcagaagagactgaacagagcccaggagaaggtgctgcagaagctgggcaaggccgacgagaccaaggacgagcagttcgaggagtacgtgcagaacttcaagagacaggaggccgagggcaccagactgcagagagagctgagaggctacctggccgccatcaagggcatgcaggaggccagcatgaagctgaccgagagcctgcacgaggtgtacgagcccgactggtacggcagagaggacgtgaagatggtgggcgagaagtgcgacgtgctgtgggaggacttccaccagaagctggtggacggcagcctgctgaccctggacacctacctgggccagttccccgacatcaagaacagaatcgccaagagaagcagaaagctggtggactacgacagcgccagacaccacctggaggccctgcagagcagcaagagaaaggacgagagcagaatcagcaaggccgaggaggagttccagaaggcccagaaggtgttcgaggagttcaacgtggacctgcaggaggagctgcccagcctgtggagcagaagagtgggcttctacgtgaacaccttcaagaacgtgagcagcctggaggccaagttccacaaggagatcgccgtgctgtgccacaagctgtacgaggtgatgaccaagctgggcgaccagcacgccgacaaggccttcaccatccagggcgcccccagcgacagcggccccctgagaatcgccaagacccccagcccccccgaggagcccagccccctgcccagccccaccgccagccccaaccacaccctggcccccgccagccccgcccccgccagacccagaagccccagccagaccagaaagggcccccccgtgccccccctgcccaaggtgacccccaccaaggagctgcagcaggagaacatcatcagcttcttcgaggacaacttcgtgcccgagatcagcgtgaccacccccagccagaacgaggtgcccgaggtgaagaaggaggagaccctgctggacctggacttcgaccccttcaagcccgaggtgacccccgccggcagcgccggcgtgacccacagccccatgagccagaccctgccctgggacctgtggaccaccagcaccgacctggtgcagcccgccagcggcggcagcttcaacggcttcacccagccccaggacaccagcctgttcaccatgcagaccgaccagagcatgatctgcaacctggccgagagcgagcaggccccccccaccgagcccaaggccgaggagcccctggccgccgtgacccccgccgtgggcctggacctgggcatggacaccagagccgaggagcccgtggaggaggccgtgatcatccccggcgccgacgccgacgccgccgtgggcaccctggtgagcgccgccgagggcgcccccggcgaggaggccgaggccgagaaggccaccgtgcccgccggcgagggcgtgagcctggaggaggccaagatcggcaccgagaccaccgagggcgccgagagcgcccagcccgaggccgaggagctggaggccaccgtgccccaggagaaggtgatccccagcgtggtgatcgagcccgccagcaaccacgaggaggagggcgagaacgagatcaccatcggcgccgagcccaaggagaccaccgaggacgccgccccccccggccccaccagcgagacccccgagctggccaccgagcagaagcccatccaggacccccagcccacccccagcgcccccgccatgggcgccgccgaccagctggccagcgccagagaggccagccaggagctgccccccggcttcctgtacaaggtggagaccctgcacgacttcgaggccgccaacagcgacgagctgaccctgcagagaggcgacgtggtgctggtggtgcccagcgacagcgaggccgaccaggacgccggctggctggtgggcgtgaaggagagcgactggctgcagtacagagacctggccacctacaagggcctgttccccgagaacttcaccagaagactggactag

SEQ ID NO: 72655 - DNA, 591 bp, synthetic construct
  misc_feature 1..591: note = Description of Artificial Sequence: Synthetic coding sequence
  source 1..591: mol_type = other DNA
atggaggagacccccgacagcggcctggccgaggagatccagagaagccagaacgacatcggcgccttcacctggggccccgacgccagcaccgacagagtgagccaggaggtgaccagcggcggcttcggcgaggacagcgcctgccccagcgagaccgagcaggacatcagactgagcaccagcctgctgagcagcgccgactggcccaccgtggccgaggagagcgagcacgcccccggccccgccttccccggcggcaacgagcagctgccccccaagcccgcccccgaggccggcgtggccatcgccgcctgcgtggagatggagcagctgtacgaccccctggacagcgacatgcccgccatggacaccgccggcctgttcaaggagagccacgaggacatgaagaagagcgacgaggaggaggagaagcagaagatggaggacagcctgtgggccggcgtggaggcctgccagaaggccagcggcggcagcttcaacggcttcacccagccccaggacaccagcctgttcaccatgcagaccgaccagagcatgatctgcaacctggagatcaccgtgaactag

SEQ ID NO: 72656 - DNA, 1962 bp, synthetic construct
  misc_feature 1..1962: note = Description of Artificial Sequence: Synthetic coding sequence
  source 1..1962: mol_type = other DNA
atggccgacatcaagaccggcatcttcgccaagaacgtgcagaagagactgaacagagcccaggagaaggtgctgcagaagctgggcaaggccgacgagaccaaggacgagcagttcgaggagtacgtgcagaacttcaagagacaggaggccgagggcaccagactgcagagagagctgagaggctacctggccgccatcaagggcatgcaggaggccagcatgaagctgaccgagagcctgcacgaggtgtacgagcccgactggtacggcagagaggacgtgaagatggtgggcgagaagtgcgacgtgctgtgggaggacttccaccagaagctggtggacggcagcctgctgaccctggacacctacctgggccagttccccgacatcaagaacagaatcgccaagagaagcagaaagctggtggactacgacagcgccagacaccacctggaggccctgcagagcagcaagagaaaggacgagagcagaatcagcaaggccgaggaggagttccagaaggcccagaaggtgttcgaggagttcaacgtggacctgcaggaggagctgcccagcctgtggagcagaagagtgggcttctacgtgaacaccttcaagaacgtgagcagcctggaggccaagttccacaaggagatcgccgtgctgtgccacaagctgtacgaggtgatgaccaagctgggcgaccagcacgccgacaaggccttcaccatccagggcgcccccagcgacagcggccccctgagaatcgccaagacccccagcccccccgaggagcccagccccctgcccagccccaccgccagccccaaccacaccctggcccccgccagccccgcccccgccagacccagaagccccagccagaccagaaagggcccccccgtgccccccctgcccaaggtgacccccaccaaggagctgcagcaggagaacatcatcagcttcttcgaggacaacttcgtgcccgagatcagcgtgaccacccccagccagaacgaggtgcccgaggtgaagaaggaggagaccctgctggacctggacttcgaccccttcaagcccgaggtgacccccgccggcagcgccggcgtgacccacagccccatgagccagaccctgccctgggacctgtggaccgccggcgtggaggcctgccagaaggccagcggcggcagcttcaacggcttcacccagccccaggacaccagcctgttcaccatgcagaccgaccagagcatgatctgcaacctgatcatccccggcgccgacgccgacgccgccgtgggcaccctggtgagcgccgccgagggcgcccccggcgaggaggccgaggccgagaaggccaccgtgcccgccggcgagggcgtgagcctggaggaggccaagatcggcaccgagaccaccgagggcgccgagagcgcccagcccgaggccgaggagctggaggccaccgtgccccaggagaaggtgatccccagcgtggtgatcgagcccgccagcaaccacgaggaggagggcgagaacgagatcaccatcggcgccgagcccaaggagaccaccgaggacgccgccccccccggccccaccagcgagacccccgagctggccaccgagcagaagcccatccaggacccccagcccacccccagcgcccccgccatgggcgccgccgaccagctggccagcgccagagaggccagccaggagctgccccccggcttcctgtacaaggtggagaccctgcacgacttcgaggccgccaacagcgacgagctgaccctgcagagaggcgacgtggtgctggtggtgcccagcgacagcgaggccgaccaggacgccggctggctggtgggcgtgaaggagagcgactggctgcagtacagagacctggccacctacaagggcctgttccccgagaacttcaccagaagactggactag

SEQ ID NO: 72657 - DNA, 1158 bp, synthetic construct
  misc_feature 1..1158: note = Description of Artificial Sequence: Synthetic coding sequence
  source 1..1158: mol_type = other DNA
atggccgacatcaagaccggcatcttcgccaagaacgtgcagaagagactgaacagagcccaggagaaggtgctgcagaagctgggcaaggccgacgagaccaaggacgagcagttcgaggagtacgtgcagaacttcaagagacaggaggccgagggcaccagactgcagagagagctgagaggctacctggccgccatcaagggcatgcaggaggccagcatgaagctgaccgagagcctgcacgaggtgtacgagcccgactggtacggcagagaggacgtgaagatggtgggcgagaagtgcgacgtgctgtgggaggacttccaccagaagctggtggacggcagcctgctgaccctggacacctacctgggccagttccccgacatcaagaacagaatcgccaagagaagcagaaagctggtggactacgacagcgccagacaccacctggaggccctgcagagcagcaagagaaaggacgagagcagaatcagcaaggccgaggaggagttccagaaggcccagaaggtgttcgaggagttcaacgtggacctgcaggaggagctgcccagcctgtggagcagaagagtgggcttctacgtgaacaccttcaagaacgtgagcagcctggaggccaagttccacaaggagatcgccgtgctgtgccacaagctgtacgaggtgatgaccaagctgggcgaccagcacgccgacaaggccttcaccatccagggcgcccccagacagtacctggacagcggccccctgagaatcgccaagacccccagcccccccgaggagcccagccccctgcccagccccaccgccagccccaaccacaccctggcccccgccagccccgcccccgccagacccagaagccccagccagaccagaaagggcccccccgtgccccccctgcccaaggtgacccccaccaaggagctgcagcaggagaacatcatcagcttcttcgaggacaacttcgtgcccgagatcagcgtgaccacccccagccagaacgaggtgcccgaggtgaagaaggaggagaccctgctggacctggacttcgaccccttcaagcccgaggtgacccccgccggcagcgccggcgtgacccacagccccatgagccagaccgtgggctggtag

SEQ ID NO: 72658 - DNA, 759 bp, synthetic construct
  misc_feature 1..759: note = Description of Artificial Sequence: Synthetic coding sequence
  source 1..759: mol_type = other DNA
atgagagcccccctgctgccccccgcccccgtggtgctgagcctgctgatcctgggcagcggccactacgccgccggcctggacctgaacgacacctacagcggcaagagagagcccttcagcggcgaccacagcgccgacggcttcgaggtgaccagcagaagcgagatgagcagcggcagcgagatcagccccgtgagcgagatgcccagcagcagcgagcccagcagcggcgccgactacgactacagcgaggagtacgacaacgagccccagatccccggctacatcgtggacgacagcgtgagagtggagcaggtggtgaagcccccccagaacaagaccgagagcgagaacaccagcgacaagcccaagagaaagaagaagggcggcaagaacggcaagaacagaagaaacagaaagaagaagaacccctgcaacgccgagttccagaacttctgcatccacggcgagtgcaagtacatcgagcacctggaggccgtgacctgcaagtgccagcaggagtacttcggcgagagatgcggcgagaagagcatgaagacccacagcatgatcgacagcagcctgagcaagatcgccctggccgccatcgccgccttcatgagcgccgtgatcctgaccgccgtggccgtgatcaccgtgcagctgagaagacagtacgtgagaaagtacgagggcgaggccgaggagagaaagaagctgagacaggagaacggcaacgtgcacgccatcgcctag

SEQ ID NO: 72659 - DNA, 759 bp, synthetic construct; identical to SEQ ID NO: 72658
  misc_feature 1..759: note = Description of Artificial Sequence: Synthetic coding sequence
  source 1..759: mol_type = other DNA

SEQ ID NO: 72660 - DNA, 1536 bp, synthetic construct
  misc_feature 1..1536: note = Description of Artificial Sequence: Synthetic coding sequence
  source 1..1536: mol_type = other DNA
atgaagctgttctggctgctgttcaccatcggcttctgctgggcccagtacagcagcaacacccagcagggcagaaccagcatcgtgcacctgttcgagtggagatgggtggacatcgccctggagtgcgagagatacctggcccccaagggcttcggcggcgtgcaggtgagcccccccaacgagaacgtggccatccacaaccccttcagaccctggtgggagagataccagcccgtgagctacaagctgtgcaccagaagcggcaacgaggacgagttcagaaacatggtgaccagatgcaacaacgtgggcgtgagaatctacgtggacgccgtgatcaaccacatgtgcggcaacgccgtgagcgccggcaccagcagcacctgcggcagctacttcaaccccggcagcagagacttccccgccgtgccctacagcggctgggacttcaacgacggcaagtgcaagaccggcagcggcgacatcgagaactacaacgacgccacccaggtgagagactgcagactgagcggcctgctggacctggccctgggcaaggactacgtgagaagcaagatcgccgagtacatgaaccacctgatcgacatcggcgtggccggcttcagaatcgacgccagcaagcacatgtggcccggcgacatcaaggccatcctggacaagctgcacaacctgaacagcaactggttccccgagggcagcaagcccttcatctaccaggaggtgatcgacctgggcggcgagcccatcaagagcagcgactacttcggcaacggcagagtgaccgagttcaagtacggcgccaagctgggcaccgtgatcagaaagtggaacggcgagaagatgagctacctgaagaactggggcgagggctggggcttcatgcccagcgacagagccctggtgttcgtggacaaccacgacaaccagagaggccacggcgccggcggcgccagcatcctgaccttctgggacgccagactgtacaagatggccgtgggcttcatgctggcccacccctacggcttcaccagagtgatgagcagctacagatggcccagatacttcgagaacggcaaggacgtgaacgactgggtgggcccccccaacgacaacggcgtgaccaaggaggtgaccatcaaccccgacaccacctgcggcaacgactgggtgtgcgagcacagatggagacagatcagaaacatggtgaacttcagaaacgtggtggacggccagcccttcaccaactggtacgacaacggcagcaaccaggtggccttcggcagaggcaacagaggcttcatcgtgttcaacaacgacgactggaccttcagcctgaccctgcagaccggcctgcccgccggcacctactgcgacgtgatcagcggcgacaagatcaacggcaactgcaccggcatcaagatctacgtgagcgacgacggcaaggcccacttcagcatcagcaacagcgccgaggaccccttcatcgccatccacgccgagagcaagctgtag

SEQ ID NO: 72661 - DNA, 318 bp, synthetic construct
  misc_feature 1..318: note = Description of Artificial Sequence: Synthetic coding sequence
  source 1..318: mol_type = other DNA
atgaagctgttctggctgctgttcaccatcggcttctgctgggcccagtacagcagcaacacccagcagggcagaaccagcatcgtgcacctgttcgagtggagatgggtggacatcgccctggagtgcgagagatacctggcccccaagggcttcggcggcgtgcaggtgagcccccccaacgagaacgtggccatccacaaccccttcagaccctggtgggagagataccagcccgtgagctacaagctgtgcaccagaagcggcaacgaggacgagttcagaaacatggtgaccagatgcaacaacgtgggctag

SEQ ID NO: 72662 - DNA, 681 bp, synthetic construct
  misc_feature 1..681: note = Description of Artificial Sequence: Synthetic coding sequence
  source 1..681: mol_type = other DNA
atgaagctgttctggctgctgttcaccatcggcttctgctgggcccagtacagcagcaacacccagcagggcagaaccagcatcgtgcacctgttcgagtggagatgggtggacatcgccctggagtgcgagagatacctggcccccaagggcttcggcggcgtgcaggtgagcccccccaacgagaacgtggccatccacaaccccttcagaccctggtgggagagataccagcccgtgagctacaagctgtgcaccagaagcggcaacgaggacgagttcagaaacatggtgaccagatgcaacaacgtgggcgtgagaatctacgtggacgccgtgatcaaccacatgtgcggcaacgccgtgagcgccggcaccagcagcacctgcggcagctacttcaaccccggcagcagagacttccccgccgtgccctacagcggctgggacttcaacgacggcaagtgcaagaccggcagcggcgacatcgagaactacaacgacgccacccaggtgagagactgcagactgagcggcctgctggacctggccctgggcaaggactacgtgagaagcaagatcgccgagtacatgaaccacctgatcgacatcggcgtggccggcttcagaatcgacgccagcaagcacatgtggcccggcgacatcaaggccatcctgtag

SEQ ID NO: 72663 - DNA, 1536 bp, synthetic construct; identical to SEQ ID NO: 72660
  misc_feature 1..1536: note = Description of Artificial Sequence: Synthetic coding sequence
  source 1..1536: mol_type = other DNA

SEQ ID NO: 72664 - DNA, 1536 bp, synthetic construct; identical to SEQ ID NO: 72660
  misc_feature 1..1536: note = Description of Artificial Sequence: Synthetic coding sequence
  source 1..1536: mol_type = other DNA

SEQ ID NO: 72665 - DNA, 318 bp, synthetic construct; identical to SEQ ID NO: 72661
  misc_feature 1..318: note = Description of Artificial Sequence: Synthetic coding sequence
  source 1..318: mol_type = other DNA

SEQ ID NO: 72666 - DNA, 681 bp, synthetic construct; identical to SEQ ID NO: 72662
  misc_feature 1..681: note = Description of Artificial Sequence: Synthetic coding sequence
  source 1..681: mol_type = other DNA

SEQ ID NO: 72667 - DNA, 1536 bp, synthetic construct; identical to SEQ ID NO: 72660
  misc_feature 1..1536: note = Description of Artificial Sequence: Synthetic coding sequence
  source 1..1536: mol_type = other DNA

SEQ ID NO: 72668 - DNA, 1536 bp, synthetic construct
  misc_feature 1..1536: note = Description of Artificial Sequence: Synthetic coding sequence
  source 1..1536: mol_type = other DNA
atgaagttcttcctgctgctgttcaccatcggcttctgctgggcccagtacagccccaacacccagcagggcagaaccagcatcgtgcacctgttcgagtggagatgggtggacatcgccctggagtgcgagagatacctggcccccaagggcttcggcggcgtgcaggtgagcccccccaacgagaacgtggccatctacaaccccttcagaccctggtgggagagataccagcccgtgagctacaagctgtgcaccagaagcggcaacgaggacgagttcagaaacatggtgaccagatgcaacaacgtgggcgtgagaatctacgtggacgccgtgatcaaccacatgtgcggcaacgccgtgagcgccggcaccagcagcacctgcggcagctacttcaaccccggcagcagagacttccccgccgtgccctacagcggctgggacttcaacgacggcaagtgcaagaccggcagcggcgacatcgagaactacaacgacgccacccaggtgagagactgcagactgaccggcctgctggacctggccctggagaaggactacgtgagaagcaagatcgccgagtacatgaaccacctgatcgacatcggcgtggccggcttcagactggacgccagcaagcacatgtggcccggcgacatcaaggccatcctggacaagctgcacaacctgaacagcaactggttccccgccggcagcaagcccttcatctaccaggaggtgatcgacctgggcggcgagcccatcaagagcagcgactacttcggcaacggcagagtgaccgagttcaagtacggcgccaagctgggcaccgtgatcagaaagtggaacggcgagaagatgagctacctgaagaactggggcgagggctggggcttcgtgcccagcgacagagccctggtgttcgtggacaaccacgacaaccagagaggccacggcgccggcggcgccagcatcctgaccttctgggacgccagactgtacaagatggccgtgggcttcatgctggcccacccctacggcttcaccagagtgatgagcagctacagatggcccagacagttccagaacggcaacgacgtgaacgactgggtgggcccccccaacaacaacggcgtgatcaaggaggtgaccatcaaccccgacaccacctgcggcaacgactgggtgtgcgagcacagatggagacagatcagaaacatggtgatcttcagaaacgtggtggacggccagcccttcaccaactggtacgacaacggcagcaaccaggtggccttcggcagaggcaacagaggcttcatcgtgttcaacaacgacgactggagcttcagcctgaccctgcagaccggcctgcccgccggcacctactgcgacgtgatcagcggcgacaagatcaacggcaactgcaccggcatcaagatctacgtgagcgacgacggcaaggcccacttcagcatcagcaacagcgccgaggaccccttcatcgccatccacgccgagagcaagctgtag

SEQ ID NO: 72669 - DNA, 1536 bp, synthetic construct
  misc_feature 1..1536: note = Description of Artificial Sequence: Synthetic coding sequence
  source 1..1536: mol_type = other DNA
atgaagttcttcctgctgctgttcaccatcggcttctgctgggcccagtacagccccaacacccagcagggcagaaccagcatcgtgcacctgttcgagtggagatgggtggacatcgccctggagtgcgagagatacctggcccccaagggcttcggcggcgtgcaggtgagcccccccaacgagaacgtggccatccacaaccccttcagaccctggtgggagagataccagcccgtgagctacaagctgtgcaccagaagcggcaacgaggacgagttcagaaacatggtgaccagatgcaacaacgtgggcgtgagaatctacgtggacgccgtgatcaaccacatgagcggcaacgccgtgagcgccggcaccagcagcacctgcggcagctacttcaaccccggcagcagagacttccccgccgtgccctacagcggctgggacttcaacgacggcaagtgcaagaccggcagcggcgacatcgagaactacaacgacgccacccaggtgagagactgcagactggtgggcctgctggacctggccctggagaaggactacgtgagaagcaagatcgccgagtacatgaaccacctgatcgacatcggcgtggccggcttcagactggacgccagcaagcacatgtggcccggcgacatcaaggccatcctggacaagctgcacaacctgaacagcaactggttccccgccggcagcaagcccttcatctaccaggaggtgatcgacctgggcggcgagcccatcaagagcagcgactacttcggcaacggcagagtgaccgagttcaagtacggcgccaagctgggcaccgtgatcagaaagtggaacggcgagaagatgagctacctgaagaactggggcgagggctggggcttcatgcccagcgacagagccctggtgttcgtggacaaccacgacaaccagagaggccacggcgccggcggcgccagcatcctgaccttctgggacgccagactgtacaagatggccgtgggcttcatgctggcccacccctacggcttcaccagagtgatgagcagctacagatggcccagacagttccagaacggcaacgacgtgaacgactgggtgggcccccccaacaacaacggcgtgatcaaggaggtgaccatcaaccccgacaccacctgcggcaacgactgggtgtgcgagcacagatggagacagatcagaaacatggtgaacttcagaaacgtggtggacggccagcccttcaccaactggtacgacaacggcagcaaccaggtggccttcggcagaggcaacagaggcttcatcgtgttcaacaacgacgactggaccttcagcctgaccctgcagaccggcctgcccgccggcacctactgcgacgtgatcagcggcgacaagatcaacggcaactgcaccggcatcaagatctacgtgagcgacgacggcaaggcccacttcagcatcagcaacagcgccgaggaccccttcatcgccatccacgccgagagcaagctgtag

SEQ ID NO: 72670 - DNA, 291 bp, synthetic construct
  misc_feature 1..291: note = Description of Artificial Sequence: Synthetic coding sequence
  source 1..291: mol_type = other DNA
atgaagttcttcctgctgctgttcaccatcggcttctgctgggcccagtacagccccaacacccagcagggcagaaccagcatcgtgcacctgttcgagtggagatgggtggacatcgccctggagtgcgagagatacctggcccccaagggcttcggcggcgtgcaggtgagcccccccaacgagaacgtggccatccacaaccccttcagaccctggtgggagagataccagcccgtgagctacaagctgtgcaccagaagcggcaacgaggacgagttcagaaactag

SEQ ID NO: 72671 - DNA, 261 bp, synthetic construct
  misc_feature 1..261: note = Description of Artificial Sequence: Synthetic coding sequence
  source 1..261: mol_type = other DNA
atgaagttcttcctgctgctgttcaccatcggcttctgctgggcccagtacagccccaacacccagcagggcagaaccagcatcgtgcacctgttcgagtggagatgggtggacatcgccctggagtgcgagagatacctggcccccaagggcttcggcggcgtgcaggtgagcccccccaacgagaacgtggccatccacaaccccttcagaccctggtgggagagataccagcccgtgagctacaagctgtgcacctag

SEQ ID NO: 72672 - DNA, 2313 bp, synthetic construct
  misc_feature 1..2313: note = Description of Artificial Sequence: Synthetic coding sequence
  source 1..2313: mol_type = other DNA
atgctgcccggcctggccctgctgctgctggccgcctggaccgccagagccctggaggtgcccaccgacggcaacgccggcctgctggccgagccccagatcgccatgttctgcggcagactgaacatgcacatgaacgtgcagaacggcaagtgggacagcgaccccagcggcaccaagacctgcatcgacaccaaggagggcatcctgcagtactgccaggaggtgtaccccgagctgcagatcaccaacgtggtggaggccaaccagcccgtgaccatccagaactggtgcaagagaggcagaaagcagtgcaagacccacccccacttcgtgatcccctacagatgcctggtgggcgagttcgtgagcgacgccctgctggtgcccgacaagtgcaagttcctgcaccaggagagaatggacgtgtgcgagacccacctgcactggcacaccgtggccaaggagacctgcagcgagaagagcaccaacctgcacgactacggcatgctgctgccctgcggcatcgacaagttcagaggcgtggagttcgtgtgctgccccctggccgaggagagcgacaacgtggacagcgccgacgccgaggaggacgacagcgacgtgtggtggggcggcgccgacaccgactacgccgacggcagcgaggacaaggtggtggaggtggccgaggaggaggaggtggccgaggtggaggaggaggaggccgacgacgacgaggacgacgaggacggcgacgaggtggaggaggaggccgaggagccctacgaggaggccaccgagagaaccaccagcatcgccaccaccaccaccaccaccaccgagagcgtggaggaggtggtgagagaggtgtgcagcgagcaggccgagaccggcccctgcagagccatgatcagcagatggtacttcgacgtgaccgagggcaagtgcgcccccttcttctacggcggctgcggcggcaacagaaacaacttcgacaccgaggagtactgcatggccgtgtgcggcagcgccatgagccagagcctgctgaagaccacccaggagcccctggccagagaccccgtgaagctgcccaccaccgccgccagcacccccgacgccgtggacaagtacctggagacccccggcgacgagaacgagcacgcccacttccagaaggccaaggagagactggaggccaagcacagagagagaatgagccaggtgatgagagagtgggaggaggccgagagacaggccaagaacctgcccaaggccgacaagaaggccgtgatccagcacttccaggagaaggtggagagcctggagcaggaggccgccaacgagagacagcagctggtggagacccacatggccagagtggaggccatgctgaacgacagaagaagactggccctggagaactacatcaccgccctgcaggccgtgccccccagacccagacacgtgttcaacatgctgaagaagtacgtgagagccgagcagaaggacagacagcacaccctgaagcacttcgagcacgtgagaatggtggaccccaagaaggccgcccagatcagaagccaggtgatgacccacctgagagtgatctacgagagaatgaaccagagcctgagcctgctgtacaacgtgcccgccgtggccgaggagatccaggacgaggtggacgagctgctgcagaaggagcagaactacagcgacgacgtgctggccaacatgatcagcgagcccagaatcagctacggcaacgacgccctgatgcccagcctgaccgagaccaagaccaccgtggagctgctgcccgtgaacggcgagttcagcctggacgacctgcagccctggcacagcttcggcgccgacagcgtgcccgccaacaccgagaacgaggtggagcccgtggacgccagacccgccgccgacagaggcctgaccaccagacccggcagcggcctgaccaacatcaagaccgaggagatcagcgaggtgaagatggacgccgagttcagacacgacagcggctacgaggtgcaccaccagaagctggtgttcttcgccgaggacgtgggcagcaacaagggcgccatcatcggcctgatggtgggcggcgtggtgatcgccaccgtgatcgtgatcaccctggtgatgctgaagaagaagcagtacaccagcatccaccacggcgtggtggaggtggacgccgccgtgacccccgaggagagacacctgagcaagatgcagcagaacggctacgagaaccccacctacaagttcttcgagcagatgcagaactag

SEQ ID NO: 72673 - DNA, 2088 bp, synthetic construct
  misc_feature 1..2088: note = Description of Artificial Sequence: Synthetic coding sequence
  source 1..2088: mol_type = other DNA
atgctgcccggcctggccctgctgctgctggccgcctggaccgccagagccctggaggtgcccaccgacggcaacgccggcctgctggccgagccccagatcgccatgttctgcggcagactgaacatgcacatgaacgtgcagaacggcaagtgggacagcgaccccagcggcaccaagacctgcatcgacaccaaggagggcatcctgcagtactgccaggaggtgtaccccgagctgcagatcaccaacgtggtggaggccaaccagcccgtgaccatccagaactggtgcaagagaggcagaaagcagtgcaagacccacccccacttcgtgatcccctacagatgcctggtgggcgagttcgtgagcgacgccctgctggtgcccgacaagtgcaagttcctgcaccaggagagaatggacgtgtgcgagacccacctgcactggcacaccgtggccaaggagacctgcagcgagaagagcaccaacctgcacgactacggcatgctgctgccctgcggcatcgacaagttcagaggcgtggagttcgtgtgctgccccctggccgaggagagcgacaacgtggacagcgccgacgccgaggaggacgacagcgacgtgtggtggggcggcgccgacaccgactacgccgacggcagcgaggacaaggtggtggaggtggccgaggaggaggaggtggccgaggtggaggaggaggaggccgacgacgacgaggacgacgaggacggcgacgaggtggaggaggaggccgaggagccctacgaggaggccaccgagagaaccaccagcatcgccaccaccaccaccaccaccaccgagagcgtggaggaggtggtgagagtgcccaccaccgccgccagcacccccgacgccgtggacaagtacctggagacccccggcgacgagaacgagcacgcccacttccagaaggccaaggagagactggaggccaagcacagagagagaatgagccaggtgatgagagagtgggaggaggccgagagacaggccaagaacctgcccaaggccgacaagaaggccgtgatccagcacttccaggagaaggtggagagcctggagcaggaggccgccaacgagagacagcagctggtggagacccacatggccagagtggaggccatgctgaacgacagaagaagactggccctggagaactacatcaccgccctgcaggccgtgccccccagacccagacacgtgttcaacatgctgaagaagtacgtgagagccgagcagaaggacagacagcacaccctgaagcacttcgagcacgtgagaatggtggaccccaagaaggccgcccagatcagaagccaggtgatgacccacctgagagtgatctacgagagaatgaaccagagcctgagcctgctgtacaacgtgcccgccgtggccgaggagatccaggacgaggtggacgagctgctgcagaaggagcagaactacagcgacgacgtgctggccaacatgatcagcgagcccagaatcagctacggcaacgacgccctgatgcccagcctgaccgagaccaagaccaccgtggagctgctgcccgtgaacggcgagttcagcctggacgacctgcagccctggcacagcttcggcgccgacagcgtgcccgccaacaccgagaacgaggtggagcccgtggacgccagacccgccgccgacagaggcctgaccaccagacccggcagcggcctgaccaacatcaagaccgaggagatcagcgaggtgaagatggacgccgagttcagacacgacagcggctacgaggtgcaccaccagaagctggtgttcttcgccgaggacgtgggcagcaacaagggcgccatcatcggcctgatggtgggcggcgtggtgatcgccaccgtgatcgtgatcaccctggtgatgctgaagaagaagcagtacaccagcatccaccacggcgtggtggaggtggacgccgccgtgacccccgaggagagacacctgagcaagatgcagcagaacggctacgagaaccccacctacaagttcttcgagcagatgcagaactag

SEQ ID NO: 72674 - DNA, 1920 bp, synthetic construct
  misc_feature 1..1920: note = Description of Artificial Sequence: Synthetic coding sequence
  source 1..1920: mol_type = other DNA
atgctgcccggcctggccctgctgctgctggccgcctggaccgccagagccctggaggtgtaccccgagctgcagatcaccaacgtggtggaggccaaccagcccgtgaccatccagaactggtgcaagagaggcagaaagcagtgcaagacccacccccacttcgtgatcccctacagatgcctggtgggcgagttcgtgagcgacgccctgctggtgcccgacaagtgcaagttcctgcaccaggagagaatggacgtgtgcgagacccacctgcactggcacaccgtggccaaggagacctgcagcgagaagagcaccaacctgcacgactacggcatgctgctgccctgcggcatcgacaagttcagaggcgtggagttcgtgtgctgccccctggccgaggagagcgacaacgtggacagcgccgacgccgaggaggacgacagcgacgtgtggtggggcggcgccgacaccgactacgccgacggcagcgaggacaaggtggtggaggtggccgaggaggaggaggtggccgaggtggaggaggaggaggccgacgacgacgaggacgacgaggacggcgacgaggtggaggaggaggccgaggagccctacgaggaggccaccgagagaaccaccagcatcgccaccaccaccaccaccaccaccgagagcgtggaggaggtggtgagagtgcccaccaccgccgccagcacccccgacgccgtggacaagtacctggagacccccggcgacgagaacgagcacgcccacttccagaaggccaaggagagactggaggccaagcacagagagagaatgagccaggtgatgagagagtgggaggaggccgagagacaggccaagaacctgcccaaggccgacaagaaggccgtgatccagcacttccaggagaaggtggagagcctggagcaggaggccgccaacgagagacagcagctggtggagacccacatggccagagtggaggccatgctgaacgacagaagaagactggccctggagaactacatcaccgccctgcaggccgtgccccccagacccagacacgtgttcaacatgctgaagaagtacgtgagagccgagcagaaggacagacagcacaccctgaagcacttcgagcacgtgagaatggtggaccccaagaaggccgcccagatcagaagccaggtgatgacccacctgagagtgatctacgagagaatgaaccagagcctgagcctgctgtacaacgtgcccgccgtggccgaggagatccaggacgaggtggacgagctgctgcagaaggagcagaactacagcgacgacgtgctggccaacatgatcagcgagcccagaatcagctacggcaacgacgccctgatgcccagcctgaccgagaccaagaccaccgtggagctgctgcccgtgaacggcgagttcagcctggacgacctgcagccctggcacagcttcggcgccgacagcgtgcccgccaacaccgagaacgaggtggagcccgtggacgccagacccgccgccgacagaggcctgaccaccagacccggcagcggcctgaccaacatcaagaccgaggagatcagcgaggtgaagatggacgccgagttcagacacgacagcggctacgaggtgcaccaccagaagctggtgttcttcgccgaggacgtgggcagcaacaagggcgccatcatcggcctgatggtgggcggcgtggtgatcgccaccgtgatcgtgatcaccctggtgatgctgaagaagaagcagtacaccagcatccaccacggcgtggtggaggtggacgccgccgtgacccccgaggagagacacctgagcaagatgcagcagaacggctacgagaaccccacctacaagttcttcgagcagatgcagaactag

SEQ ID NO: 72675 - DNA, 2256 bp, synthetic construct
  misc_feature 1..2256: note = Description of Artificial Sequence: Synthetic coding sequence
  source 1..2256: mol_type = other DNA
atgctgcccggcctggccctgctgctgctggccgcctggaccgccagagccctggaggtgcccaccgacggcaacgccggcctgctggccgagccccagatcgccatgttctgcggcagactgaacatgcacatgaacgtgcagaacggcaagtgggacagcgaccccagcggcaccaagacctgcatcgacaccaaggagggcatcctgcagtactgccaggaggtgtaccccgagctgcagatcaccaacgtggtggaggccaaccagcccgtgaccatccagaactggtgcaagagaggcagaaagcagtgcaagacccacccccacttcgtgatcccctacagatgcctggtgggcgagttcgtgagcgacgccctgctggtgcccgacaagtgcaagttcctgcaccaggagagaatggacgtgtgcgagacccacctgcactggcacaccgtggccaaggagacctgcagcgagaagagcaccaacctgcacgactacggcatgctgctgccctgcggcatcgacaagttcagaggcgtggagttcgtgtgctgccccctggccgaggagagcgacaacgtggacagcgccgacgccgaggaggacgacagcgacgtgtggtggggcggcgccgacaccgactacgccgacggcagcgaggacaaggtggtggaggtggccgaggaggaggaggtggccgaggtggaggaggaggaggccgacgacgacgaggacgacgaggacggcgacgaggtggaggaggaggccgaggagccctacgaggaggccaccgagagaaccaccagcatcgccaccaccaccaccaccaccaccgagagcgtggaggaggtggtgagagaggtgtgcagcgagcaggccgagaccggcccctgcagagccatgatcagcagatggtacttcgacgtgaccgagggcaagtgcgcccccttcttctacggcggctgcggcggcaacagaaacaacttcgacaccgaggagtactgcatggccgtgtgcggcagcgccatccccaccaccgccgccagcacccccgacgccgtggacaagtacctggagacccccggcgacgagaacgagcacgcccacttccagaaggccaaggagagactggaggccaagcacagagagagaatgagccaggtgatgagagagtgggaggaggccgagagacaggccaagaacctgcccaaggccgacaagaaggccgtgatccagcacttccaggagaaggtggagagcctggagcaggaggccgccaacgagagacagcagctggtggagacccacatggccagagtggaggccatgctgaacgacagaagaagactggccctggagaactacatcaccgccctgcaggccgtgccccccagacccagacacgtgttcaacatgctgaagaagtacgtgagagccgagcagaaggacagacagcacaccctgaagcacttcgagcacgtgagaatggtggaccccaagaaggccgcccagatcagaagccaggtgatgacccacctgagagtgatctacgagagaatgaaccagagcctgagcctgctgtacaacgtgcccgccgtggccgaggagatccaggacgaggtggacgagctgctgcagaaggagcagaactacagcgacgacgtgctggccaacatgatcagcgagcccagaatcagctacggcaacgacgccctgatgcccagcctgaccgagaccaagaccaccgtggagctgctgcccgtgaacggcgagttcagcctggacgacctgcagccctggcacagcttcggcgccgacagcgtgcccgccaacaccgagaacgaggtggagcccgtggacgccagacccgccgccgacagaggcctgaccaccagacccggcagcggcctgaccaacatcaagaccgaggagatcagcgaggtgaagatggacgccgagttcagacacgacagcggctacgaggtgcaccaccagaagctggtgttcttcgccgaggacgtgggcagcaacaagggcgccatcatcggcctgatggtgggcggcgtggtgatcgccaccgtgatcgtgatcaccctggtgatgctgaagaagaagcagtacaccagcatccaccacggcgtggtggaggtggacgccgccgtgacccccgaggagagacacctgagcaagatgcagcagaacggctacgagaaccccacctacaagttcttcgagcagatgcagaactag

SEQ ID NO: 72676 - DNA, 2259 bp, synthetic construct
  misc_feature 1..2259: note = Description of Artificial Sequence: Synthetic coding sequence
  source 1..2259: mol_type = other DNA
atgctgcccggcctggccctgctgctgctggccgcctggaccgccagagccctggaggtgcccaccgacggcaacgccggcctgctggccgagccccagatcgccatgttctgcggcagactgaacatgcacatgaacgtgcagaacggcaagtgggacagcgaccccagcggcaccaagacctgcatcgacaccaaggagggcatcctgcagtactgccaggaggtgtaccccgagctgcagatcaccaacgtggtggaggccaaccagcccgtgaccatccagaactggtgcaagagaggcagaaagcagtgcaagacccacccccacttcgtgatcccctacagatgcctggtgggcgagttcgtgagcgacgccctgctggtgcccgacaagtgcaagttcctgcaccaggagagaatggacgtgtgcgagacccacctgcactggcacaccgtggccaaggagacctgcagcgagaagagcaccaacctgcacgactacggcatgctgctgccctgcggcatcgacaagttcagaggcgtggagttcgtgtgctgccccctggccgaggagagcgacaacgtggacagcgccgacgccgaggaggacgacagcgacgtgtggtggggcggcgccgacaccgactacgccgacggcagcgaggacaaggtggtggaggtggccgaggaggaggaggtggccgaggtggaggaggaggaggccgacgacgacgaggacgacgaggacggcgacgaggtggaggaggaggccgaggagccctacgaggaggccaccgagagaaccaccagcatcgccaccaccaccaccaccaccaccgagagcgtggaggaggtggtgagagaggtgtgcagcgagcaggccgagaccggcccctgcagagccatgatcagcagatggtacttcgacgtgaccgagggcaagtgcgcccccttcttctacggcggctgcggcggcaacagaaacaacttcgacaccgaggagtactgcatggccgtgtgcggcagcgccatgagccagagcctgctgaagaccacccaggagcccctggccagagaccccgtgaagctgcccaccaccgccgccagcacccccgacgccgtggacaagtacctggagacccccggcgacgagaacgagcacgcccacttccagaaggccaaggagagactggaggccaagcacagagagagaatgagccaggtgatgagagagtgggaggaggccgagagacaggccaagaacctgcccaaggccgacaagaaggccgtgatccagcacttccaggagaaggtggagagcctggagcaggaggccgccaacgagagacagcagctggtggagacccacatggccagagtggaggccatgctgaacgacagaagaagactggccctggagaactacatcaccgccctgcaggccgtgccccccagacccagacacgtgttcaacatgctgaagaagtacgtgagagccgagcagaaggacagacagcacaccctgaagcacttcgagcacgtgagaatggtggaccccaagaaggccgcccagatcagaagccaggtgatgacccacctgagagtgatctacgagagaatgaaccagagcctgagcctgctgtacaacgtgcccgccgtggccgaggagatccaggacgaggtggacgagctgctgcagaaggagcagaactacagcgacgacgtgctggccaacatgatcagcgagcccagaatcagctacggcaacgacgccctgatgcccagcctgaccgagaccaagaccaccgtggagctgctgcccgtgaacggcgagttcagcctggacgacctgcagccctggcacagcttcggcgccgacagcgtgcccgccaacaccgagaacgagggcagcggcctgaccaacatcaagaccgaggagatcagcgaggtgaagatggacgccgagttcagacacgacagcggctacgaggtgcaccaccagaagctggtgttcttcgccgaggacgtgggcagcaacaagggcgccatcatcggcctgatggtgggcggcgtggtgatcgccaccgtgatcgtgatcaccctggtgatgctgaagaagaagcagtacaccagcatccaccacggcgtggtggaggtggacgccgccgtgacccccgaggagagacacctgagcaagatgcagcagaacggctacgagaaccccacctacaagttcttcgagcagatgcagaactag

SEQ ID NO: 72677 - DNA, 2145 bp, synthetic construct
  misc_feature 1..2145: note = Description of Artificial Sequence: Synthetic coding sequence
  source 1..2145: mol_type = other DNA
atgctgcccggcctggccctgctgctgctggccgcctggaccgccagagccctggaggtgcccaccgacggcaacgccggcctgctggccgagccccagatcgccatgttctgcggcagactgaacatgcacatgaacgtgcagaacggcaagtgggacagcgaccccagcggcaccaagacctgcatcgacaccaaggagggcatcctgcagtactgccaggaggtgtaccccgagctgcagatcaccaacgtggtggaggccaaccagcccgtgaccatccagaactggtgcaagagaggcagaaagcagtgcaagacccacccccacttcgtgatcccctacagatgcctggtgggcgagttcgtgagcgacgccctgctggtgcccgacaagtgcaagttcctgcaccaggagagaatggacgtgtgcgagacccacctgcactggcacaccgtggccaaggagacctgcagcgagaagagcaccaacctgcacgactacggcatgctgctgccctgcggcatcgacaagttcagaggcgtggagttcgtgtgctgccccctggccgaggagagcgacaacgtggacagcgccgacgccgaggaggacgacagcgacgtgtggtggggcggcgccgacaccgactacgccgacggcagcgaggacaaggtggtggaggtggccgaggaggaggaggtggccgaggtggaggaggaggaggccgacgacgacgaggacgacgaggacggcgacgaggtggaggaggaggccgaggagccctacgaggaggccaccgagagaaccaccagcatcgccaccaccaccaccaccaccaccgagagcgtggaggaggtggtgagagtgagccagagcctgctgaagaccacccaggagcccctggccagagaccccgtgaagctgcccaccaccgccgccagcacccccgacgccgtggacaagtacctggagacccccggcgacgagaacgagcacgcccacttccagaaggccaaggagagactggaggccaagcacagagagagaatgagccaggtgatgagagagtgggaggaggccgagagacaggccaagaacctgcccaaggccgacaagaaggccgtgatccagcacttccaggagaaggtggagagcctggagcaggaggccgccaacgagagacagcagctggtggagacccacatggccagagtggaggccatgctgaacgacagaagaagactggccctggagaactacatcaccgccctgcaggccgtgccccccagacccagacacgtgttcaacatgctgaagaagtacgtgagagccgagcagaaggacagacagcacaccctgaagcacttcgagcacgtgagaatggtggaccccaagaaggccgcccagatcagaagccaggtgatgacccacctgagagtgatctacgagagaatgaaccagagcctgagcctgctgtacaacgtgcccgccgtggccgaggagatccaggacgaggtggacgagctgctgcagaaggagcagaactacagcgacgacgtgctggccaacatgatcagcgagcccagaatcagctacggcaacgacgccctgatgcccagcctgaccgagaccaagaccaccgtggagctgctgcccgtgaacggcgagttcagcctggacgacctgcagccctggcacagcttcggcgccgacagcgtgcccgccaacaccgagaacgaggtggagcccgtggacgccagacccgccgccgacagaggcctgaccaccagacccggcagcggcctgaccaacatcaagaccgaggagatcagcgaggtgaagatggacgccgagttcagacacgacagcggctacgaggtgcaccaccagaagctggtgttcttcgccgaggacgtgggcagcaacaagggcgccatcatcggcctgatggtgggcggcgtggtgatcgccaccgtgatcgtgatcaccctggtgatgctgaagaagaagcagtacaccagcatccaccacggcgtggtggaggtggacgccgccgtgacccccgaggagagacacctgagcaagatgcagcagaacggctacgagaaccccacctacaagttcttcgagcagatgcagaactag

SEQ ID NO: 72678 - DNA, 2145 bp, synthetic construct
  misc_feature 1..2145: note = Description of Artificial Sequence: Synthetic coding sequence
  source 1..2145: mol_type = other DNA
atgctgcccggcctggccctgctgctgctggccgcctggaccgccagagccctggaggtgtaccccgagctgcagatcaccaacgtggtggaggccaaccagcccgtgaccatccagaactggtgcaagagaggcagaaagcagtgcaagacccacccccacttcgtgatcccctacagatgcctggtgggcgagttcgtgagcgacgccctgctggtgcccgacaagtgcaagttcctgcaccaggagagaatggacgtgtgcgagacccacctgcactggcacaccgtggccaaggagacctgcagcgagaagagcaccaacctgcacgactacggcatgctgctgccctgcggcatcgacaagttcagaggcgtggagttcgtgtgctgccccctggccgaggagagcgacaacgtggacagcgccgacgccgaggaggacgacagcgacgtgtggtggggcggcgccgacaccgactacgccgacggcagcgaggacaaggtggtggaggtggccgaggaggaggaggtggccgaggtggaggaggaggaggccgacgacgacgaggacgacgaggacggcgacgaggtggaggaggaggccgaggagccctacgaggaggccaccgagagaaccaccagcatcgccaccaccaccaccaccaccaccgagagcgtggaggaggtggtgagagaggtgtgcagcgagcaggccgagaccggcccctgcagagccatgatcagcagatggtacttcgacgtgaccgagggcaagtgcgcccccttcttctacggcggctgcggcggcaacagaaacaacttcgacaccgaggagtactgcatggccgtgtgcggcagcgccatgagccagagcctgctgaagaccacccaggagcccctggccagagaccccgtgaagctgcccaccaccgccgccagcacccccgacgccgtggacaagtacctggagacccccggcgacgagaacgagcacgcccacttccagaaggccaaggagagactggaggccaagcacagagagagaatgagccaggtgatgagagagtgggaggaggccgagagacaggccaagaacctgcccaaggccgacaagaaggccgtgatccagcacttccaggagaaggtggagagcctggagcaggaggccgccaacgagagacagcagctggtggagacccacatggccagagtggaggccatgctgaacgacagaagaagactggccctggagaactacatcaccgccctgcaggccgtgccccccagacccagacacgtgttcaacatgctgaagaagtacgtgagagccgagcagaaggacagacagcacaccctgaagcacttcgagcacgtgagaatggtggaccccaagaaggccgcccagatcagaagccaggtgatgacccacctgagagtgatctacgagagaatgaaccagagcctgagcctgctgtacaacgtgcccgccgtggccgaggagatccaggacgaggtggacgagctgctgcagaaggagcagaactacagcgacgacgtgctggccaacatgatcagcgagcccagaatcagctacggcaacgacgccctgatgcccagcctgaccgagaccaagaccaccgtggagctgctgcccgtgaacggcgagttcagcctggacgacctgcagccctggcacagcttcggcgccgacagcgtgcccgccaacaccgagaacgaggtggagcccgtggacgccagacccgccgccgacagaggcctgaccaccagacccggcagcggcctgaccaacatcaagaccgaggagatcagcgaggtgaagatggacgccgagttcagacacgacagcggctacgaggtgcaccaccagaagctggtgttcttcgccgaggacgtgggcagcaacaagggcgccatcatcggcctgatggtgggcggcgtggtgatcgccaccgtgatcgtgatcaccctggtgatgctgaagaagaagcagtacaccagcatccaccacggcgtggtggaggtggacgccgccgtgacccccgaggagagacacctgagcaagatgcagcagaacggctacgagaaccccacctacaagttcttcgagcagatgcagaactag

SEQ ID NO: 72679 - DNA, 2241 bp, synthetic construct
  misc_feature 1..2241: note = Description of Artificial Sequence: Synthetic coding sequence
  source 1..2241: mol_type = other DNA
atggaccagctggaggacctgctggtgctgttcatcaactacgtgcccaccgacggcaacgccggcctgctggccgagccccagatcgccatgttctgcggcagactgaacatgcacatgaacgtgcagaacggcaagtgggacagcgaccccagcggcaccaagacctgcatcgacaccaaggagggcatcctgcagtactgccaggaggtgtaccccgagctgcagatcaccaacgtggtggaggccaaccagcccgtgaccatccagaactggtgcaagagaggcagaaagcagtgcaagacccacccccacttcgtgatcccctacagatgcctggtgggcgagttcgtgagcgacgccctgctggtgcccgacaagtgcaagttcctgcaccaggagagaatggacgtgtgcgagacccacctgcactggcacaccgtggccaaggagacctgcagcgagaagagcaccaacctgcacgactacggcatgctgctgccctgcggcatcgacaagttcagaggcgtggagttcgtgtgctgccccctggccgaggagagcgacaacgtggacagcgccgacgccgaggaggacgacagcgacgtgtggtggggcggcgccgacaccgactacgccgacggcagcgaggacaaggtggtggaggtggccgaggaggaggaggtggccgaggtggaggaggaggaggccgacgacgacgaggacgacgaggacggcgacgaggtggaggaggaggccgaggagccctacgaggaggccaccgagagaaccaccagcatcgccaccaccaccaccaccaccaccgagagcgtggaggaggtggtgagagaggtgtgcagcgagcaggccgagaccggcccctgcagagccatgatcagcagatggtacttcgacgtgaccgagggcaagtgcgcccccttcttctacggcggctgcggcggcaacagaaacaacttcgacaccgaggagtactgcatggccgtgtgcggcagcgccatccccaccaccgccgccagcacccccgacgccgtggacaagtacctggagacccccggcgacgagaacgagcacgcccacttccagaaggccaaggagagactggaggccaagcacagagagagaatgagccaggtgatgagagagtgggaggaggccgagagacaggccaagaacctgcccaaggccgacaagaaggccgtgatccagcacttccaggagaaggtggagagcctggagcaggaggccgccaacgagagacagcagctggtggagacccacatggccagagtggaggccatgctgaacgacagaagaagactggccctggagaactacatcaccgccctgcaggccgtgccccccagacccagacacgtgttcaacatgctgaagaagtacgtgagagccgagcagaaggacagacagcacaccctgaagcacttcgagcacgtgagaatggtggaccccaagaaggccgcccagatcagaagccaggtgatgacccacctgagagtgatctacgagagaatgaaccagagcctgagcctgctgtacaacgtgcccgccgtggccgaggagatccaggacgaggtggacgagctgctgcagaaggagcagaactacagcgacgacgtgctggccaacatgatcagcgagcccagaatcagctacggcaacgacgccctgatgcccagcctgaccgagaccaagaccaccgtggagctgctgcccgtgaacggcgagttcagcctggacgacctgcagccctggcacagcttcggcgccgacagcgtgcccgccaacaccgagaacgaggtggagcccgtggacgccagacccgccgccgacagaggcctgaccaccagacccggcagcggcctgaccaacatcaagaccgaggagatcagcgaggtgaagatggacgccgagttcagacacgacagcggctacgaggtgcaccaccagaagctggtgttcttcgccgaggacgtgggcagcaacaagggcgccatcatcggcctgatggtgggcggcgtggtgatcgccaccgtgatcgtgatcaccctggtgatgctgaagaagaagcagtacaccagcatccaccacggcgtggtggaggtggacgccgccgtgacccccgaggagagacacctgagcaagatgcagcagaacggctacgagaaccccacctacaagttcttcgagcagatgcagaactag

SEQ ID NO: 72680 - DNA, 1983 bp, synthetic construct
  misc_feature 1..1983: note = Description of Artificial Sequence: Synthetic coding sequence
  source 1..1983: mol_type = other DNA
atgttctgcggcagactgaacatgcacatgaacgtgcagaacggcaagtgggacagcgaccccagcggcaccaagacctgcatcgacaccaaggagggcatcctgcagtactgccaggaggtgtaccccgagctgcagatcaccaacgtggtggaggccaaccagcccgtgaccatccagaactggtgcaagagaggcagaaagcagtgcaagacccacccccacttcgtgatcccctacagatgcctggtgggcgagttcgtgagcgacgccctgctggtgcccgacaagtgcaagttcctgcaccaggagagaatggacgtgtgcgagacccacctgcactggcacaccgtggccaaggagacctgcagcgagaagagcaccaacctgcacgactacggcatgctgctgccctgcggcatcgacaagttcagaggcgtggagttcgtgtgctgccccctggccgaggagagcgacaacgtggacagcgccgacgccgaggaggacgacagcgacgtgtggtggggcggcgccgacaccgactacgccgacggcagcgaggacaaggtggtggaggtggccgaggaggaggaggtggccgaggtggaggaggaggaggccgacgacgacgaggacgacgaggacggcgacgaggtggaggaggaggccgaggagccctacgaggaggccaccgagagaaccaccagcatcgccaccaccaccaccaccaccaccgagagcgtggaggaggtggtgagagtgcccaccaccgccgccagcacccccgacgccgtggacaagtacctggagacccccggcgacgagaacgagcacgcccacttccagaaggccaaggagagactggaggccaagcacagagagagaatgagccaggtgatgagagagtgggaggaggccgagagacaggccaagaacctgcccaaggccgacaagaaggccgtgatccagcacttccaggagaaggtggagagcctggagcaggaggccgccaacgagagacagcagctggtggagacccacatggccagagtggaggccatgctgaacgacagaagaagactggccctggagaactacatcaccgccctgcaggccgtgccccccagacccagacacgtgttcaacatgctgaagaagtacgtgagagccgagcagaaggacagacagcacaccctgaagcacttcgagcacgtgagaatggtggaccccaagaaggccgcccagatcagaagccaggtgatgacccacctgagagtgatctacgagagaatgaaccagagcctgagcctgctgtacaacgtgcccgccgtggccgaggagatccaggacgaggtggacgagctgctgcagaaggagcagaactacagcgacgacgtgctggccaacatgatcagcgagcccagaatcagctacggcaacgacgccctgatgcccagcctgaccgagaccaagaccaccgtggagctgctgcccgtgaacggcgagttcagcctggacgacctgcagccctggcacagcttcggcgccgacagcgtgcccgccaacaccgagaacgaggtggagcccgtggacgccagacccgccgccgacagaggcctgaccaccagacccggcagcggcctgaccaacatcaagaccgaggagatcagcgaggtgaagatggacgccgagttcagacacgacagcggctacgaggtgcaccaccagaagctggtgttcttcgccgaggacgtgggcagcaacaagggcgccatcatcggcctgatggtgggcggcgtggtgatcgccaccgtgatcgtgatcaccctggtgatgctgaagaagaagcagtacaccagcatccaccacggcgtggtggaggtggacgccgccgtgacccccgaggagagacacctgagcaagatgcagcagaacggctacgagaaccccacctacaagttcttcgagcagatgcagaactag

SEQ ID NO: 72681 - DNA, 789 bp, synthetic construct
  misc_feature 1..789: note = Description of Artificial Sequence: Synthetic coding sequence
  source 1..789: mol_type = other DNA
atgagagtgcaggacaccagcggcacctactactggcacatccccaccggcaccacccagtgggagccccccggcagagccagccccagccagggcagcagcccccaggaggagagccagctgacctggaccggcttcgcccacggcgagggcttcgaggacggcgagttctggaaggacgagcccagcgacgaggcccccatggagctgggcctgaaggagcccgaggagggcaccctgaccttccccgcccagagcctgagccccgagcccctgccccaggaggaggagaagctgccccccagaaacaccaaccccggcatcaagtgcttcgccgtgagaagcctgggctgggtggagatgaccgaggaggagctggcccccggcagaagcagcgtggccgtgaacaactgcatcagacagctgagctaccacaagaacaacctgcacgaccccatgagcggcggctggggcgagggcaaggacctgctgctgcagctggaggacgagaccctgaagctggtggagccccagagccaggccctgctgcacgcccagcccatcatcagcatcagagtgtggggcgtgggcagagacagcggcagagacttcgcctacgtggccagagacaagctgacccagatgctgaagtgccacgtgttcagatgcgaggcccccgccaagaacatcgccaccagcctgcacgagatctgcagcaaggccagacccccccccctgcccggcctggtggccaccttcgccctgcagggctgcggctggggccactag

SEQ ID NO: 72682 - DNA, 1482 bp, synthetic construct
  misc_feature 1..1482: note = Description of Artificial Sequence: Synthetic coding sequence
  source 1..1482: mol_type = other DNA
atgctgggcaaggactacatgctggccatcatcctggtgaactgcgacgacgacctgtggggcgaccacagcctggaggtggaggccggcctgccccccggctggagaaagatccacgacgccgccggcacctactactggcacgtgcccagcggcagcacccagtggcagagacccacctgggagctgggcgacgccgaggaccccggcaccggcaccgagggcatctggggcctgagaccccccaagggcagaagcttcagcagcctggagagcagcctggacagaagcaacagcctgagctggtacggcggcgagagctacatccagagcatggagcccggcgccaagtgcttcgccgtgagaagcctgggctgggtggaggtgcccgaggaggacctggcccccggcaagagcagcatcgccgtgaacaactgcatccagcagctggcccagaccagaagcagaagccagccccccgacggcgcctggggcgagggccagaacatgctgatgatcctgaagaaggacgccatgagcctggtgaaccccctggaccacagcctgatccactgccagcccctggtgcacatcagagtgtggggcgtgggcagcagcaagggcagagacagccccatcagcgcccccgccagagacttcgccttcgtggccagcgacaaggacagctgcatgctgaagtgccacgtgttctgctgcgacgtgcccgccaaggccatcgccagcgccctgcacggcctgtgcgcccagatcctgagcgagagagtggaggtgagcggcgacgccagctgctgcagccccgaccccatcagccccgaggacctgcccagacaggtggagctgctggacgccgtgagccaggccgcccagaagtacgaggccctgtacatgggcaccctgcccgtgaccaaggccatgggcatggacgtgctgaacgaggccatcggcaccctgaccgccagaggcgacagaaacgcctgggtgcccaccatgctgagcgtgagcgacagcctgatgaccgcccaccccatccaggccgaggccagcaccgaggaggagcccctgtggcagtgccccgtgagactggtgaccttcatcggcgtgggcagagacccccacaccttcggcctgatcgccgacctgggcagacagagcttccagtgcgccgccttctggtgccagccccacgccggcggcctgagcgaggccgtgcaggccgcctgcatggtgcagtaccagaagtgcctggtggccagcgccgccagaggcaaggcctggggcgcccaggccagagccagactgagactgaagagaaccagcagcatggacagccccggcggccccctgcccctgcccctgctgaagggcggcgtgggcggcgccggcgccacccccagaaagagaggcgtgttcagcttcctggacgccttcagactgaagcccagcctgctgcacatgccctag

SEQ ID NO: 72683 - DNA, 1377 bp, synthetic construct
  misc_feature 1..1377: note = Description of Artificial Sequence: Synthetic coding sequence
  source 1..1377: mol_type = other DNA
atgatcaccaagacccacaaggtggacctgggcctgcccgagaagaagaagaagaagaaggtggtgaaggagcccgagaccagatacagcgtgctgaacaacgacgactacttcgccgacgtgagccccctgagagccaccagccccagcaagagcgtggcccacggccaggcccccgagatgcccctggtgaagaagaagaagaagaagaagaagggcgtgagcaccctgtgcgaggagcacgtggagcccgagaccaccctgcccgccagaagaaccgagaagagccccagcctgagaaagcaggtgttcggccacctggagttcctgagcggcgagaagaagaacaagaagagccccctggccatgagccacgccagcggcgtgaagaccagccccgaccccagacagggcgaggaggagaccagagtgggcaagaagctgaagaagcacaagaaggagaagaagggcgcccaggaccccaccgccttcagcgtgcaggacccctggttctgcgaggccagagaggccagagacgtgggcgacacctgcagcgtgggcaagaaggacgaggagcaggccgccctgggccagaagagaaagagaaagagccccagagagcacaacggcaaggtgaagaagaagaagaagatccaccaggagggcgacgccctgcccggccacagcaagcccagcagaagcatggagagcagccccagaaagggcagcaagaagaagcccgtgaaggtggaggcccccgagtacatccccatcagcgacgaccccaaggccagcgccaagaagaagatgaagagcaagaagaaggtggagcagcccgtgatcgaggagcccgccctgaagagaaagaagaagaagaagagaaaggagagcggcgtggccggcgacccctggaaggaggagaccgacaccgacctggaggtggtgctggagaagaagggcaacatggacgaggcccacatcgaccaggtgagaagaaaggccctgcaggaggagatcgacagagagagcggcaagaccgaggccagcgagaccagaaagtggaccggcacccagttcggccagtgggacaccgccggcttcgagaacgaggaccagaagctgaagttcctgagactgatgggcggcttcaagaacctgagccccagcttcagcagacccgccagcaccatcgccagacccaacatggccctgggcaagaaggccgccgacagcctgcagcagaacctgcagagagactacgacagagccatgagctggaagtacagcagaggcgccggcctgggcttcagcaccgcccccaacaagatcttctacatcgacagaaacgccagcaagagcgtgaagctggaggactag

SEQ ID NO: 72684 - DNA, 2214 bp, synthetic construct
  misc_feature 1..2214: note = Description of Artificial Sequence: Synthetic coding sequence
  source 1..2214: mol_type = other DNA
atggcccacagaaagctggagagcgtgggcagcggcatgctggaccacagagtgagacccggccccgtgccccacagccaggagcccgagagcgaggacatggagctgcccctggagggctacgtgcccgagggcctggagctggccgccctgagacccgagagccccgcccccgaggagcaggagtgccacaaccacagccccgacggcgacagcagcagcgactacgtgaacaacaccagcgaggaggaggactacgacgagggcctgcccgaggaggaggagggcatcacctactacatcagatactgccccgaggacgacagctacctggagggcatggactgcaacggcgaggagtacctggcccacagcgcccaccccgtggacaccgacgagtgccaggaggccgtggaggagtggaccgacagcgccggcccccacccccacggccacgaggccgagggcagccaggactaccccgacggccagctgcccatccccgaggacgagcccagcgtgctggaggcccacgaccaggaggaggacggccactactgcgccagcaaggagggctaccaggactactaccccgaggaggccaacggcaacaccggcgccagcccctacagactgagaagaggcgacggcgacctggaggaccaggaggaggacatcgaccagatcgtggccgagatcaagatgagcctgagcatgaccagcatcaccagcgccagcgaggccagccccgagcacggccccgagcccggccccgaggacagcgtggaggcctgcccccccatcaaggccagctgcagccccagcagacacgaggccagacccaagagcctgaacctgctgcccgaggccaagcaccccggcgacccccagagaggcttcaagcccaagaccagaacccccgaggagagactgaagtggccccacgagcaggtgtgcaacggcctggagcagcccagaaagcagcagagaagcgacctgaacggccccgtggacaacaacaacatccccgagaccaagaaggtggccagcttccccagcttcgtggccgtgcccggcccctgcgagcccgaggacctgatcgacggcatcatcttcgccgccaactacctgggcagcacccagctgctgagcgagagaaaccccagcaagaacatcagaatgatgcaggcccaggaggccgtgagcagagtgaagaacagcgagggcgacgcccagaccctgaccgaggtggacctgttcatcagcacccagagaatcaaggtgctgaacgccgacacccaggagaccatgatggaccacgccctgagaaccatcagctacatcgccgacatcggcaacatcgtggtgctgatggccagaagaagaatgcccagaagcgccagccaggactgcatcgagaccacccccggcgcccaggagggcaagaagcagtacaagatgatctgccacgtgttcgagagcgaggacgcccagctgatcgcccagagcatcggccaggccttcagcgtggcctaccaggagttcctgagagccaacggcatcaaccccgaggacctgagccagaaggagtacagcgacatcatcaacacccaggagatgtacaacgacgacctgatccacttcagcaacagcgagaactgcaaggagctgcagctggagaagcacaagggcgagatcctgggcgtggtggtggtggagagcggctggggcagcatcctgcccaccgtgatcctggccaacatgatgaacggcggccccgccgccagaagcggcaagctgagcatcggcgaccagatcatgagcatcaacggcaccagcctggtgggcctgcccctggccacctgccagggcatcatcaagggcctgaagaaccagacccaggtgaagctgaacatcgtgagctgcccccccgtgaccaccgtgctgatcaagagacccgacctgaagtaccagctgggcttcagcgtgcagaacggcatcatctgcagcctgatgagaggcggcatcgccgagagaggcggcgtgagagtgggccacagaatcatcgagatcaacggccagagcgtggtggccaccgcccacgagaagatcgtgcaggccctgagcaacagcgtgggcgagatccacatgaagaccatgcccgccgccatgttcagactgctgaccggccaggagacccccctgtacatctag

SEQ ID NO: 72685 - DNA, 84 bp, synthetic construct
  misc_feature 1..84: note = Description of Artificial Sequence: Synthetic coding sequence
  source 1..84: mol_type = other DNA
atggcccacagaaagctggagagcgtgggcagcggcatgctggaccacagagtgagacccggccccgtgccccacagccagtag

SEQ ID NO: 72686 - DNA, 2250 bp, synthetic construct
  misc_feature 1..2250: note = Description of Artificial Sequence: Synthetic coding sequence
  source 1..2250: mol_type = other DNA
atggcccacagaaagctggagagcgtgggcagcggcatgctggaccacagagtgagacccggccccgtgccccacagccaggagcccgagagcgaggacatggagctgcccctggagggctacgtgcccgagggcctggagctggccgccctgagacccgagagccccgcccccgaggagcaggagtgccacaaccacagccccgacggcgacagcagcagcgactacgtgaacaacaccagcgaggaggaggactacgacgagggcctgcccgaggaggaggagggcatcacctactacatcagatactgccccgaggacgacagctacctggagggcatggactgcaacggcgaggagtacctggcccacagcgcccaccccgtggacaccgacgagtgccaggaggccgtggaggagtggaccgacagcgccggcccccacccccacggccacgaggccgagggcagccaggactaccccgacggccagctgcccatccccgaggacgagcccagcgtgctggaggcccacgaccaggaggaggacggccactactgcgccagcaaggagggctaccaggactactaccccgaggaggccaacggcaacaccggcgccagcccctacagactgagaagaggcgacggcgacctggaggaccaggaggaggacatcgaccagatcgtggccgagatcaagatgagcctgagcatgaccagcatcaccagcgccagcgaggccagccccgagcacggccccgagcccggccccgaggacagcgtggaggcctgcccccccatcaaggccagctgcagccccagcagacacgaggccagacccaagagcctgaacctgctgcccgaggccaagcaccccggcgacccccagagaggcttcaagcccaagaccagaacccccgaggagagactgaagtggccccacgagcaggtgtgcaacggcctggagcagcccagaaagcagcagagaagcgacctgaacggccccgtggacaacaacaacatccccgagaccaagaaggtggccagcttccccagcttcgtggccgtgcccggcccctgcgagcccgaggacctgatcgacggcatcatcttcgccgccaactacctgggcagcacccagctgctgagcgagagaaaccccagcaagaacatcagaatgatgcaggcccaggaggccgtgagcagagtgaagagaatgcagaaggccgccaagatcaagaagaaggccaacagcgagggcgacgcccagaccctgaccgaggtggacctgttcatcagcacccagagaatcaaggtgctgaacgccgacacccaggagaccatgatggaccacgccctgagaaccatcagctacatcgccgacatcggcaacatcgtggtgctgatggccagaagaagaatgcccagaagcgccagccaggactgcatcgagaccacccccggcgcccaggagggcaagaagcagtacaagatgatctgccacgtgttcgagagcgaggacgcccagctgatcgcccagagcatcggccaggccttcagcgtggcctaccaggagttcctgagagccaacggcatcaaccccgaggacctgagccagaaggagtacagcgacatcatcaacacccaggagatgtacaacgacgacctgatccacttcagcaacagcgagaactgcaaggagctgcagctggagaagcacaagggcgagatcctgggcgtggtggtggtggagagcggctggggcagcatcctgcccaccgtgatcctggccaacatgatgaacggcggccccgccgccagaagcggcaagctgagcatcggcgaccagatcatgagcatcaacggcaccagcctggtgggcctgcccctggccacctgccagggcatcatcaagggcctgaagaaccagacccaggtgaagctgaacatcgtgagctgcccccccgtgaccaccgtgctgatcaagagacccgacctgaagtaccagctgggcttcagcgtgcagaacggcatcatctgcagcctgatgagaggcggcatcgccgagagaggcggcgtgagagtgggccacagaatcatcgagatcaacggccagagcgtggtggccaccgcccacgagaagatcgtgcaggccctgagcaacagcgtgggcgagatccacatgaagaccatgcccgccgccatgttcagactgctgaccggccaggagacccccctgtacatctag

SEQ ID NO: 72687 - DNA, 2214 bp, synthetic construct; identical to SEQ ID NO: 72684
  misc_feature 1..2214: note = Description of Artificial Sequence: Synthetic coding sequence
  source 1..2214: mol_type = other DNA

SEQ ID NO: 72688 - DNA, 795 bp, synthetic construct
  misc_feature 1..795: note = Description of Artificial Sequence: Synthetic coding sequence
  source 1..795: mol_type = other DNA
atggcccacagaaagctggagagcgtgggcagcggcatgctggaccacagagtgagacccggccccgtgccccacagccaggagcccgagagcgaggacatggagctgcccctggagggctacgtgcccgagggcctggagctggccgccctgagacccgagagccccgcccccgaggagcaggagtgccacaaccacagccccgacggcgacagcagcagcgactacgtgaacaacaccagcgaggaggaggactacgacgagggcctgcccgaggaggaggagggcatcacctactacatcagatactgccccgaggacgacagctacctggagggcatggactgcaacggcgaggagtacctggcccacagcgcccaccccgtggacaccgacgagtgccaggaggccgtggaggagtggaccgacagcgccggcccccacccccacggccacgaggccgagggcagccaggactaccccgacggccagctgcccatccccgaggacgagcccagcgtgctggaggcccacgaccaggaggaggacggccactactgcgccagcaaggagggctaccaggactactaccccgaggaggccaacggcaacaccggcgccagcccctacagactgagaagaggcgacggcgacctggaggaccaggaggaggacatcgaccagatcgtggccgagatcaagatgagcctgagcatgaccagcatcaccagcgccagcgaggccagccccgagcacggccccgagcccggccccgaggacagcgtggaggcctag

SEQ ID NO: 72689 - DNA, 2250 bp, synthetic construct; identical to SEQ ID NO: 72686
  misc_feature 1..2250: note = Description of Artificial Sequence: Synthetic coding sequence
  source 1..2250: mol_type = other DNA

SEQ ID NO: 72690 - DNA, 213 bp, synthetic construct
  misc_feature 1..213: note = Description of Artificial Sequence: Synthetic coding sequence
  source 1..213: mol_type = other DNA
atggcccacagaaagctggagagcgtgggcagcggcatgctggaccacagagtgagacccggccccgtgccccacagccaggagcccgagagcgaggacatggagctgcccctggagggctacgtgcccgagggcctggagctggccgccctgagacccgagagccccgcccccgaggagcaggagtgccacaaccacagccccgacggctag

SEQ ID NO: 72691 - DNA, 15 bp, synthetic construct
  misc_feature 1..15: note = Description of Artificial Sequence: Synthetic coding sequence
  source 1..15: mol_type = other DNA
atggcccacagatag

SEQ ID NO: 72692 - DNA, 339 bp, synthetic construct
  misc_feature 1..339: note = Description of Artificial Sequence: Synthetic coding sequence
  source 1..339: mol_type = other DNA
atggcccacagaaagctggagagcgtgggcagcggcatgctggaccacagagtgagacccggccccgtgccccacagccaggagcccgagagcgaggacatggagctgcccctggagggctacgtgcccgagggcctggagctggccgccctgagacccgagagccccgcccccgaggagcaggagtgccacaaccacagccccgacggcgacagcagcagcgactacgtgaacaacaccagcgaggaggaggactacgacgagggcctgcccgaggaggaggagggcatcacctactacatcagatactgccccgaggacgacagctacctggagtag

SEQ ID NO: 72693 - DNA, 2250 bp, synthetic construct; identical to SEQ ID NO: 72686
  misc_feature 1..2250: note = Description of Artificial Sequence: Synthetic coding sequence
  source 1..2250: mol_type = other DNA

SEQ ID NO: 72694 - DNA, 2127 bp, synthetic construct
  misc_feature 1..2127: note = Description of Artificial Sequence: Synthetic coding sequence
  source 1..2127: mol_type = other DNA
atgagcgtgcccagcagcctgagccagagcgccatcaacgccaacagccacggcggccccgccctgagcctgcccctgcccctgcacgccgcccacaaccagctgctgaacgccaagctgcaggccaccgccgtgggccccaaggacctgagaagcgccatgggcgagggcggcggccccgagcccggccccgccaacgccaagtggctgaaggagggccagaaccagctgagaagagccgccaccgcccacagagaccagaacagaaacgtgaccctgaccctggccgaggaggccagccaggagcccgagatggcccccctgggccccaagggcctgatccacctgtacagcgagctggagctgagcgcccacaacgccgccaacagaggcctgagaggccccggcctgatcatcagcacccaggagcagggccccgacgagggcgaggagaaggccgccggcgaggccgaggaggaggaggaggacgacgacgacgaggaggaggaggaggacctgagcagcccccccggcctgcccgagcccctggagagcgtggaggccccccccagaccccaggccctgaccgacggccccagagagcacagcaagagcgccagcctgctgttcggcatgagaaacagcgccgccagcgacgaggacagcagctgggccaccctgagccagggcagccccagctacggcagccccgaggacaccgacagcttctggaaccccaacgccttcgagaccgacagcgacctgcccgccggctggatgagagtgcaggacaccagcggcacctactactggcacatccccaccggcaccacccagtgggagccccccggcagagccagccccagccagggcagcagcccccaggaggagagccagctgacctggaccggcttcgcccacggcgagggcttcgaggacggcgagttctggaaggacgagcccagcgacgaggcccccatggagctgggcctgaaggagcccgaggagggcaccctgaccttccccgcccagagcctgagccccgagcccctgccccaggaggaggagaagctgccccccagaaacaccaaccccggcatcaagtgcttcgccgtgagaagcctgggctgggtggagatgaccgaggaggagctggcccccggcagaagcagcgtggccgtgaacaactgcatcagacagctgagctaccacaagaacaacctgcacgaccccatgagcggcggctggggcgagggcaaggacctgctgctgcagctggaggacgagaccctgaagctggtggagccccagagccaggccctgctgcacgcccagcccatcatcagcatcagagtgtggggcgtgggcagagacagcggcagagacttcgcctacgtggccagagacaagctgacccagatgctgaagtgccacgtgttcagatgcgaggcccccgccaagaacatcgccaccagcctgcacgagatctgcagcaagatcatggccgagagaagaaacgccagatgcctggtgaacggcctgagcctggaccacagcaagctggtggacgtgcccttccaggtggagttccccgcccccaagaacgagctggtgcagaagttccaggtgtactacctgggcaacgtgcccgtggccaagcccgtgggcgtggacgtgatcaacggcgccctggagagcgtgctgagcagcagcagcagagagcagtggacccccagccacgtgagcgtggcccccgccaccctgaccatcctgcaccagcagaccgaggccgtgctgggcgagtgcagagtgagattcctgagcttcctggccgtgggcagagacgtgcacaccttcgccttcatcatggccgccggccccgccagcttctgctgccacatgttctggtgcgagcccaacgccgccagcctgagcgaggccgtgcaggccgcctgcatgctgagataccagaagtgcctggacgccagaagccaggccagcaccagctgcctgcccgccccccccgccgagagcgtggccagaagagtgggctggaccgtgagaagaggcgtgcagagcctgtggggcagcctgaagcccaagagactgggcgcccacaccccctag

SEQ ID NO: 72695 - DNA, 2127 bp, synthetic construct; identical to SEQ ID NO: 72694
  misc_feature 1..2127: note = Description of Artificial Sequence: Synthetic coding sequence
  source 1..2127: mol_type = other DNA

SEQ ID NO: 72696 - DNA, 2133 bp, synthetic construct
  misc_feature 1..2133: note = Description of Artificial Sequence: Synthetic coding sequence
  source 1..2133: mol_type = other DNA
atgagcgtgcccagcagcctgagccagagcgccatcaacgccaacagccacggcggccccgccctgagcctgcccctgcccctgcacgccgcccacaaccagctgctgaacgccaagctgcaggccaccgccgtgggccccaaggacctgagaagcgccatgggcgagggcggcggccccgagcccggccccgccaacgccaagtggctgaaggagggccagaaccagctgagaagagccgccaccgcccacagagaccagaacagaaacgtgaccctgaccctggccgaggaggccagccaggagcccgagatggcccccctgggccccaagggcctgatccacctgtacagcgagctggagctgagcgcccacaacgccgccaacagaggcctgagaggccccggcctgatcatcagcacccaggagcagggccccgacgagggcgaggagaaggccgccggcgaggccgaggaggaggaggaggacgacgacgacgaggaggaggaggaggacctgagcagcccccccggcctgcccgagcccctggagagcgtggaggccccccccagaccccaggccctgaccgacggccccagagagcacagcaagagcgccagcctgctgttcggcatgagaaacagcgccgccagcgacgaggacagcagctgggccaccctgagccagggcagccccagctacggcagccccgaggacaccgacagcttctggaaccccaacgccttcgagaccgacagcgacctgcccgccggctggatgagagtgcaggacaccagcggcacctactactggcacatccccaccggcaccacccagtgggagccccccggcagagccagccccagccagggcagcagcccccaggaggagagccagctgacctggaccggcttcgcccacggcgagggcttcgaggacggcgagttctggaaggacgagcccagcgacgaggcccccatggagctgggcctgaaggagcccgaggagggcaccctgaccttccccgcccagagcctgagccccgagcccctgccccaggaggaggagaagctgccccccagaaacaccaaccccggcatcaagtgcttcgccgtgagaagcctgggctgggtggagatgaccgaggaggagctggcccccggcagaagcagcgtggccgtgaacaactgcatcagacagctgagctaccacaagaacaacctgcacgaccccatgagcggcggctggggcgagggcaaggacctgctgctgcagctggaggacgagaccctgaagctggtggagccccagagccaggccctgctgcacgcccagcccatcatcagcatcagagtgtggggcgtgggcagagacagcggcagcaacagagacttcgcctacgtggccagagacaagctgacccagatgctgaagtgccacgtgttcagatgcgaggcccccgccaagaacatcgccaccagcctgcacgagatctgcagcaagatcatggccgagagaagaaacgccagatgcctggtgaacggcctgagcctggaccacagcaagctggtggacgtgcccttccaggtggagttccccgcccccaagaacgagctggtgcagaagttccaggtgtactacctgggcaacgtgcccgtggccaagcccgtgggcgtggacgtgatcaacggcgccctggagagcgtgctgagcagcagcagcagagagcagtggacccccagccacgtgagcgtggcccccgccaccctgaccatcctgcaccagcagaccgaggccgtgctgggcgagtgcagagtgagattcctgagcttcctggccgtgggcagagacgtgcacaccttcgccttcatcatggccgccggccccgccagcttctgctgccacatgttctggtgcgagcccaacgccgccagcctgagcgaggccgtgcaggccgcctgcatgctgagataccagaagtgcctggacgccagaagccaggccagcaccagctgcctgcccgccccccccgccgagagcgtggccagaagagtgggctggaccgtgagaagaggcgtgcagagcctgtggggcagcctgaagcccaagagactgggcgcccacaccccctag

SEQ ID NO: 72697 - DNA, 1356 bp, synthetic construct
  misc_feature 1..1356: note = Description of Artificial Sequence: Synthetic coding sequence
  source 1..1356: mol_type = other DNA
atgagagtgcaggacaccagcggcacctactactggcacatccccaccggcaccacccagtgggagccccccggcagagccagccccagccagggcagcagcccccaggaggagagccagctgacctggaccggcttcgcccacggcgagggcttcgaggacggcgagttctggaaggacgagcccagcgacgaggcccccatggagctgggcctgaaggagcccgaggagggcaccctgaccttccccgcccagagcctgagccccgagcccctgccccaggaggaggagaagctgccccccagaaacaccaaccccggcatcaagtgcttcgccgtgagaagcctgggctgggtggagatgaccgaggaggagctggcccccggcagaagcagcgtggccgtgaacaactgcatcagacagctgagctaccacaagaacaacctgcacgaccccatgagcggcggctggggcgagggcaaggacctgctgctgcagctggaggacgagaccctgaagctggtggagccccagagccaggccctgctgcacgcccagcccatcatcagcatcagagtgtggggcgtgggcagagacagcggcagcaacagagacttcgcctacgtggccagagacaagctgacccagatgctgaagtgccacgtgttcagatgcgaggcccccgccaagaacatcgccaccagcctgcacgagatctgcagcaagatcatggccgagagaagaaacgccagatgcctggtgaacggcctgagcctggaccacagcaagctggtggacgtgcccttccaggtggagttccccgcccccaagaacgagctggtgcagaagttccaggtgtactacctgggcaacgtgcccgtggccaagcccgtgggcgtggacgtgatcaacggcgccctggagagcgtgctgagcagcagcagcagagagcagtggacccccagccacgtgagcgtggcccccgccaccctgaccatcctgcaccagcagaccgaggccgtgctgggcgagtgcagagtgagattcctgagcttcctggccgtgggcagagacgtgcacaccttcgccttcatcatggccgccggccccgccagcttctgctgccacatgttctggtgcgagcccaacgccgccagcctgagcgaggccgtgcaggccgcctgcatgctgagataccagaagtgcctggacgccagaagccaggccagcaccagctgcctgcccgccccccccgccgagagcgtggccagaagagtgggctggaccgtgagaagaggcgtgcagagcctgtggggcagcctgaagcccaagagactgggcgcccacaccccctag

SEQ ID NO: 72698 - DNA, 1680 bp, synthetic construct
  misc_feature 1..1680: note = Description of Artificial Sequence: Synthetic coding sequence
  source 1..1680: mol_type = other DNA
atgagcgtgcccagcagcctgagccagagcgccatcaacgccaacagccacggcggccccgccctgagcctgcccctgcccctgcacgccgcccacaaccagctgctgaacgccaagctgcaggccaccgccgtgggccccaaggacctgcacagcaagagcgccagcctgctgttcggcatgagaaacagcgccgccagcgacgaggacagcagctgggccaccctgagccagggcagccccagctacggcagccccgaggacaccgacagcttctggaaccccaacgccttcgagaccgacagcgacctgcccgccggctggatgagagtgcaggacaccagcggcacctactactggcacatccccaccggcaccacccagtgggagccccccggcagagccagccccagccagggcagcagcccccaggaggagagccagctgacctggaccggcttcgcccacggcgagggcttcgaggacggcgagttctggaaggacgagcccagcgacgaggcccccatggagctgggcctgaaggagcccgaggagggcaccctgaccttccccgcccagagcctgagccccgagcccctgccccaggaggaggagaagctgccccccagaaacaccaaccccggcatcaagtgcttcgccgtgagaagcctgggctgggtggagatgaccgaggaggagctggcccccggcagaagcagcgtggccgtgaacaactgcatcagacagctgagctaccacaagaacaacctgcacgaccccatgagcggcggctggggcgagggcaaggacctgctgctgcagctggaggacgagaccctgaagctggtggagccccagagccaggccctgctgcacgcccagcccatcatcagcatcagagtgtggggcgtgggcagagacagcggcagcaacagagacttcgcctacgtggccagagacaagctgacccagatgctgaagtgccacgtgttcagatgcgaggcccccgccaagaacatcgccaccagcctgcacgagatctgcagcaagatcatggccgagagaagaaacgccagatgcctggtgaacggcctgagcctggaccacagcaagctggtggacgtgcccttccaggtggagttccccgcccccaagaacgagctggtgcagaagttccaggtgtactacctgggcaacgtgcccgtggccaagcccgtgggcgtggacgtgatcaacggcgccctggagagcgtgctgagcagcagcagcagagagcagtggacccccagccacgtgagcgtggcccccgccaccctgaccatcctgcaccagcagaccgaggccgtgctgggcgagtgcagagtgagattcctgagcttcctggccgtgggcagagacgtgcacaccttcgccttcatcatggccgccggccccgccagcttctgctgccacatgttctggtgcgagcccaacgccgccagcctgagcgaggccgtgcaggccgcctgcatgctgagataccagaagtgcctggacgccagaagccaggccagcaccagctgcctgcccgccccccccgccgagagcgtggccagaagagtgggctggaccgtgagaagaggcgtgcagagcctgtggggcagcctgaagcccaagagactgggcgcccacaccccctag

SEQ ID NO: 72699 - DNA, 1428 bp, synthetic construct
  misc_feature 1..1428: note = Description of Artificial Sequence: Synthetic coding sequence
  source 1..1428: mol_type = other DNA
atgacccagatgagagacagcttctggaaccccaacgccttcgagaccgacagcgacctgcccgccggctggatgagagtgcaggacaccagcggcacctactactggcacatccccaccggcaccacccagtgggagccccccggcagagccagccccagccagggcagcagcccccaggaggagagccagctgacctggaccggcttcgcccacggcgagggcttcgaggacggcgagttctggaaggacgagcccagcgacgaggcccccatggagctgggcctgaaggagcccgaggagggcaccctgaccttccccgcccagagcctgagccccgagcccctgccccaggaggaggagaagctgccccccagaaacaccaaccccggcatcaagtgcttcgccgtgagaagcctgggctgggtggagatgaccgaggaggagctggcccccggcagaagcagcgtggccgtgaacaactgcatcagacagctgagctaccacaagaacaacctgcacgaccccatgagcggcggctggggcgagggcaaggacctgctgctgcagctggaggacgagaccctgaagctggtggagccccagagccaggccctgctgcacgcccagcccatcatcagcatcagagtgtggggcgtgggcagagacagcggcagcaacagagacttcgcctacgtggccagagacaagctgacccagatgctgaagtgccacgtgttcagatgcgaggcccccgccaagaacatcgccaccagcctgcacgagatctgcagcaagatcatggccgagagaagaaacgccagatgcctggtgaacggcctgagcctggaccacagcaagctggtggacgtgcccttccaggtggagttccccgcccccaagaacgagctggtgcagaagttccaggtgtactacctgggcaacgtgcccgtggccaagcccgtgggcgtggacgtgatcaacggcgccctggagagcgtgctgagcagcagcagcagagagcagtggacccccagccacgtgagcgtggcccccgccaccctgaccatcctgcaccagcagaccgaggccgtgctgggcgagtgcagagtgagattcctgagcttcctggccgtgggcagagacgtgcacaccttcgccttcatcatggccgccggccccgccagcttctgctgccacatgttctggtgcgagcccaacgccgccagcctgagcgaggccgtgcaggccgcctgcatgctgagataccagaagtgcctggacgccagaagccaggccagcaccagctgcctgcccgccccccccgccgagagcgtggccagaagagtgggctggaccgtgagaagaggcgtgcagagcctgtggggcagcctgaagcccaagagactgggcgcccacaccccctag

SEQ ID NO: 72700 - DNA, 2277 bp, synthetic construct
  misc_feature 1..2277: note = Description of Artificial Sequence: Synthetic coding sequence
  source 1..2277: mol_type = other DNA
atgagcgaggtgctgcccgccgacagcggcgtggacaccctggccgtgttcatggccagcagcggcaccaccgacgtgaccaacagaaacagccccgccaccccccccaacaccctgaacctgagaagcagccacaacgagctgctgaacgccgagatcaagcacaccgagaccaagaacagcaccccccccaagtgcagaaagaagtacgccctgaccaacatccaggccgccatgggcctgagcgaccccgccgcccagcccctgctgggcaacggcagcgccaacatcaagctggtgaagaacggcgagaaccagctgagaaaggccgccgagcagggccagcaggaccccaacaagaacctgagccccaccgccgtgatcaacatcaccagcgagaagctggagggcaaggagccccacccccaggacagcagcagctgcgagatcctgcccagccagcccagaagaaccaagagcttcctgaactactacgccgacctggagaccagcgccagagagctggagcagaacagaggcaaccaccacggcaccgccgaggagaagagccagcccgtgcagggccaggccagcaccatcatcggcaacggcgacctgctgctgcagaagcccaacagaccccagagcagccccgaggacggccaggtggccaccgtgagcagcagccccgagaccaagaaggaccaccccaagaccggcgccaagaccgactgcgccctgcacagaatccagaacctggcccccagcgacgaggagagcagctggaccaccctgagccaggacagcgccagccccagcagccccgacgagaccgacatctggagcgaccacagcttccagaccgaccccgacctgccccccggctggaagagagtgagcgacatcgccggcacctactactggcacatccccaccggcaccacccagtgggagagacccgtgagcatccccgccgacctgcagggcagcagaaagggcagcctgagcagcgtgacccccagccccacccccgagaacgagaagcagccctggagcgacttcgccgtgctgaacggcggcaagatcaacagcgacatctggaaggacctgcacgccgccaccgtgaaccccgaccccagcctgaaggagttcgagggcgccaccctgagatacgccagcctgaagctgagaaacgccccccaccccgacgacgacgacagctgcagcatcaacagcgaccccgaggccaagtgcttcgccgtgagaagcctgggctgggtggagatggccgaggaggacctggcccccggcaagagcagcgtggccgtgaacaactgcatcagacagctgagctactgcaagaacgacatcagagacaccgtgggcatctggggcgagggcaaggacatgtacctgatcctggagaacgacatgctgagcctggtggaccccatggacagaagcgtgctgcacagccagcccatcgtgagcatcagagtgtggggcgtgggcagagacaacggcagagacttcgcctacgtggccagagacaaggacaccagaatcctgaagtgccacgtgttcagatgcgacacccccgccaaggccatcgccaccagcctgcacgagatctgcagcaagatcatggccgagagaaagaacgccaaggccctggcctgcagcagcctgcaggagagagccaacgtgaacctggacgtgcccctgcaggtggacttccccacccccaagaccgagctggtgcagaagttccacgtgcagtacctgggcatgctgcccgtggacaagcccgtgggcatggacatcctgaacagcgccatcgagaacctgatgaccagcagcaacaaggaggactggctgagcgtgaacatgaacgtggccgacgccaccgtgaccgtgatcagcgagaagaacgaggaggaggtgctggtggagtgcagagtgagattcctgagcttcatgggcgtgggcaaggacgtgcacaccttcgccttcatcatggacaccggcaaccagagattcgagtgccacgtgttctggtgcgagcccaacgccggcaacgtgagcgaggccgtgcaggccgcctgcatgctgagataccagaagtgcctggtggccagaccccccagccagaaggtgagacccccccccccccccgccgacagcgtgaccagaagagtgaccaccaacgtgaagagaggcgtgctgagcctgatcgacaccctgaagcagaagagacccgtgaccgagatgccctag

SEQ ID NO: 72701 - DNA, 2274 bp, synthetic construct
  misc_feature 1..2274: note = Description of Artificial Sequence: Synthetic coding sequence
  source 1..2274: mol_type = other DNA
agccactgcatccccgccgacagcggcgtggacaccctggccgtgttcatggccagcagcggcaccaccgacgtgaccaacagaaacagccccgccaccccccccaacaccctgaacctgagaagcagccacaacgagctgctgaacgccgagatcaagcacaccgagaccaagaacagcaccccccccaagtgcagaaagaagtacgccctgaccaacatccaggccgccatgggcctgagcgaccccgccgcccagcccctgctgggcaacggcagcgccaacatcaagctggtgaagaacggcgagaaccagctgagaaaggccgccgagcagggccagcaggaccccaacaagaacctgagccccaccgccgtgatcaacatcaccagcgagaagctggagggcaaggagccccacccccaggacagcagcagctgcgagatcctgcccagccagcccagaagaaccaagagcttcctgaactactacgccgacctggagaccagcgccagagagctggagcagaacagaggcaaccaccacggcaccgccgaggagaagagccagcccgtgcagggccaggccagcaccatcatcggcaacggcgacctgctgctgcagaagcccaacagaccccagagcagccccgaggacggccaggtggccaccgtgagcagcagccccgagaccaagaaggaccaccccaagaccggcgccaagaccgactgcgccctgcacagaatccagaacctggcccccagcgacgaggagagcagctggaccaccctgagccaggacagcgccagccccagcagccccgacgagaccgacatctggagcgaccacagcttccagaccgaccccgacctgccccccggctggaagagagtgagcgacatcgccggcacctactactggcacatccccaccggcaccacccagtgggagagacccgtgagcatccccgccgacctgcagggcagcagaaagggcagcctgagcagcgtgacccccagccccacccccgagaacgagaagcagccctggagcgacttcgccgtgctgaacggcggcaagatcaacagcgacatctggaaggacctgcacgccgccaccgtgaaccccgaccccagcctgaaggagttcgagggcgccaccctgagatacgccagcctgaagctgagaaacgccccccaccccgacgacgacgacagctgcagcatcaacagcgaccccgaggccaagtgcttcgccgtgagaagcctgggctgggtggagatggccgaggaggacctggcccccggcaagagcagcgtggccgtgaacaactgcatcagacagctgagctactgcaagaacgacatcagagacaccgtgggcatctggggcgagggcaaggacatgtacctgatcctggagaacgacatgctgagcctggtggaccccatggacagaagcgtgctgcacagccagcccatcgtgagcatcagagtgtggggcgtgggcagagacaacggcagagacttcgcctacgtggccagagacaaggacaccagaatcctgaagtgccacgtgttcagatgcgacacccccgccaaggccatcgccaccagcctgcacgagatctgcagcaagatcatggccgagagaaagaacgccaaggccctggcctgcagcagcctgcaggagagagccaacgtgaacctggacgtgcccctgcaggtggacttccccacccccaagaccgagctggtgcagaagttccacgtgcagtacctgggcatgctgcccgtggacaagcccgtgggcatggacatcctgaacagcgccatcgagaacctgatgaccagcagcaacaaggaggactggctgagcgtgaacatgaacgtggccgacgccaccgtgaccgtgatcagcgagaagaacgaggaggaggtgctggtggagtgcagagtgagattcctgagcttcatgggcgtgggcaaggacgtgcacaccttcgccttcatcatggacaccggcaaccagagattcgagtgccacgtgttctggtgcgagcccaacgccggcaacgtgagcgaggccgtgcaggccgcctgcatgctgagataccagaagtgcctggtggccagaccccccagccagaaggtgagacccccccccccccccgccgacagcgtgaccagaagagtgaccaccaacgtgaagagaggcgtgctgagcctgatcgacaccctgaagcagaagagacccgtgaccgagatgccctag

SEQ ID NO: 72702 - DNA, 633 bp, synthetic construct
  misc_feature 1..633: note = Description of Artificial Sequence: Synthetic coding sequence
  source 1..633: mol_type = other DNA
atggccgagagaaagaacgccaaggccctggcctgcagcagcctgcaggagagagccaacgtgaacctggacgtgcccctgcaggtggacttccccacccccaagaccgagctggtgcagaagttccacgtgcagtacctgggcatgctgcccgtggacaagcccgtgggcatggacatcctgaacagcgccatcgagaacctgatgaccagcagcaacaaggaggactggctgagcgtgaacatgaacgtggccgacgccaccgtgaccgtgatcagcgagaagaacgaggaggaggtgctggtggagtgcagagtgagattcctgagcttcatgggcgtgggcaaggacgtgcacaccttcgccttcatcatggacaccggcaaccagagattcgagtgccacgtgttctggtgcgagcccaacgccggcaacgtgagcgaggccgtgcaggccgcctgcatgctgagataccagaagtgcctggtggccagaccccccagccagaaggtgagacccccccccccccccgccgacagcgtgaccagaagagtgaccaccaacgtgaagagaggcgtgctgagcctgatcgacaccctgaagcagaagagacccgtgaccgagatgccctag

SEQ ID NO: 72703 - DNA, 33 bp, synthetic construct
  misc_feature 1..33: note = Description of Artificial Sequence: Synthetic coding sequence
  source 1..33: mol_type = other DNA
atgagcgaggtgctgcccgccgacagcggctag

SEQ ID NO: 72704 - DNA, 633 bp, synthetic construct; identical to SEQ ID NO: 72702
  misc_feature 1..633: note = Description of Artificial Sequence: Synthetic coding sequence
  source 1..633: mol_type = other DNA

SEQ ID NO: 72705 - DNA, 2214 bp, synthetic construct
  misc_feature 1..2214: note = Description of Artificial Sequence: Synthetic coding sequence
  source 1..2214: mol_type = other DNA
atgagcgaggtgctgcccgccgacagcggcgtggacaccctggccgtgttcatggccagcagcggcaccaccgacgtgaccaacagaaacagccccgccaccccccccaacaccctgaacctgagaagcagccacaacgagctgctgaacgccgagatcaagcacaccgagaccaagaacagcaccccccccaagtgcagaaagaagtacgccctgaccaacatccaggccgccatgggcctgagcgaccccgccgcccagcccctgctgggcaacggcagcgccaacatcaagctggtgaagaacggcgagaaccagctgagaaaggccgccgagcagggccagcaggaccccaacaagaacctgagccccaccgccgtgatcaacatcaccagcgagaagctggagggcaaggagccccacccccaggacagcagcagctgcgagatcctgcccagccagcccagaagaaccaagagcttcctgaactactacgccgacctggagaccagcgccagagagctggagcagaacagaggcaaccaccacggcaccgccgaggagaagagccagcccgtgcagggccaggccagcaccatcatcggcaacggcgacctgctgctgcagaagcccaacagaccccagagcagccccgaggacggccaggtggccaccgtgagcagcagccccgagaccaagaaggaccaccccaagaccggcgccaagaccgactgcgccctgcacagaatccagaacctggcccccagcgacgaggagagcagctggaccaccctgagccaggacagcgccagccccagcagccccgacgagaccgacatctggagcgaccacagcttccagaccgaccccgacctgccccccggctggaagagagtgagcgacatcgccggcacctactactggcacatccccaccggcaccacccagtgggagagacccgtgagcatccccgccgacctgcagggcagcagaaagggcagcctgagcagcgtgacccccagccccacccccgagaacgaggacctgcacgccgccaccgtgaaccccgaccccagcctgaaggagttcgagggcgccaccctgagatacgccagcctgaagctgagaaacgccccccaccccgacgacgacgacagctgcagcatcaacagcgaccccgaggccaagtgcttcgccgtgagaagcctgggctgggtggagatggccgaggaggacctggcccccggcaagagcagcgtggccgtgaacaactgcatcagacagctgagctactgcaagaacgacatcagagacaccgtgggcatctggggcgagggcaaggacatgtacctgatcctggagaacgacatgctgagcctggtggaccccatggacagaagcgtgctgcacagccagcccatcgtgagcatcagagtgtggggcgtgggcagagacaacggcagagacttcgcctacgtggccagagacaaggacaccagaatcctgaagtgccacgtgttcagatgcgacacccccgccaaggccatcgccaccagcctgcacgagatctgcagcaagatcatggccgagagaaagaacgccaaggccctggcctgcagcagcctgcaggagagagccaacgtgaacctggacgtgcccctgcaggtggacttccccacccccaagaccgagctggtgcagaagttccacgtgcagtacctgggcatgctgcccgtggacaagcccgtgggcatggacatcctgaacagcgccatcgagaacctgatgaccagcagcaacaaggaggactggctgagcgtgaacatgaacgtggccgacgccaccgtgaccgtgatcagcgagaagaacgaggaggaggtgctggtggagtgcagagtgagattcctgagcttcatgggcgtgggcaaggacgtgcacaccttcgccttcatcatggacaccggcaaccagagattcgagtgccacgtgttctggtgcgagcccaacgccggcaacgtgagcgaggccgtgcaggccgcctgcatgctgagataccagaagtgcctggtggccagaccccccagccagaaggtgagacccccccccccccccgccgacagcgtgaccagaagagtgaccaccaacgtgaagagaggcgtgctgagcctgatcgacaccctgaagcagaagagacccgtgaccgagatgccctag

SEQ ID NO: 72706 - DNA, 2280 bp, synthetic construct
  misc_feature 1..2280: note = Description of Artificial Sequence: Synthetic coding sequence
  source 1..2280: mol_type = other DNA
atgagcgaggtgctgcccgccgacagcggcgtggacaccctggccgtgttcatggccagcagcggcaccaccgacgtgaccaacagaaacagccccgccaccccccccaacaccctgaacctgagaagcagccacaacgagctgctgaacgccgagatcaagcacaccgagaccaagaacagcaccccccccaagtgcagaaagaagtacgccctgaccaacatccaggccgccatgggcctgagcgaccccgccgcccagcccctgctgggcaacggcagcgccaacatcaagctggtgaagaacggcgagaaccagctgagaaaggccgccgagcagggccagcaggaccccaacaagaacctgagccccaccgccgtgatcaacatcaccagcgagaagctggagggcaaggagccccacccccaggacagcagcagctgcgagatcctgcccagccagcccagaagaaccaagagcttcctgaactactacgccgacctggagaccagcgccagagagctggagcagaacagaggcaaccaccacggcaccgccgaggagaagagccagcccgtgcagggccaggccagcaccatcatcggcaacggcgacctgctgctgcagaagcccaacagaccccagagcagccccgaggacggccaggtggccaccgtgagcagcagccccgagaccaagaaggaccaccccaagaccggcgccaagaccgactgcgccctgcacagaatccagaacctggcccccagcgacgaggagagcagctggaccaccctgagccaggacagcgccagccccagcagccccgacgagaccgccgacatctggagcgaccacagcttccagaccgaccccgacctgccccccggctggaagagagtgagcgacatcgccggcacctactactggcacatccccaccggcaccacccagtgggagagacccgtgagcatccccgccgacctgcagggcagcagaaagggcagcctgagcagcgtgacccccagccccacccccgagaacgagaagcagccctggagcgacttcgccgtgctgaacggcggcaagatcaacagcgacatctggaaggacctgcacgccgccaccgtgaaccccgaccccagcctgaaggagttcgagggcgccaccctgagatacgccagcctgaagctgagaaacgccccccaccccgacgacgacgacagctgcagcatcaacagcgaccccgaggccaagtgcttcgccgtgagaagcctgggctgggtggagatggccgaggaggacctggcccccggcaagagcagcgtggccgtgaacaactgcatcagacagctgagctactgcaagaacgacatcagagacaccgtgggcatctggggcgagggcaaggacatgtacctgatcctggagaacgacatgctgagcctggtggaccccatggacagaagcgtgctgcacagccagcccatcgtgagcatcagagtgtggggcgtgggcagagacaacggcagagacttcgcctacgtggccagagacaaggacaccagaatcctgaagtgccacgtgttcagatgcgacacccccgccaaggccatcgccaccagcctgcacgagatctgcagcaagatcatggccgagagaaagaacgccaaggccctggcctgcagcagcctgcaggagagagccaacgtgaacctggacgtgcccctgcaggtggacttccccacccccaagaccgagctggtgcagaagttccacgtgcagtacctgggcatgctgcccgtggacaagcccgtgggcatggacatcctgaacagcgccatcgagaacctgatgaccagcagcaacaaggaggactggctgagcgtgaacatgaacgtggccgacgccaccgtgaccgtgatcagcgagaagaacgaggaggaggtgctggtggagtgcagagtgagattcctgagcttcatgggcgtgggcaaggacgtgcacaccttcgccttcatcatggacaccggcaaccagagattcgagtgccacgtgttctggtgcgagcccaacgccggcaacgtgagcgaggccgtgcaggccgcctgcatgctgagataccagaagtgcctggtggccagaccccccagccagaaggtgagacccccccccccccccgccgacagcgtgaccagaagagtgaccaccaacgtgaagagaggcgtgctgagcctgatcgacaccctgaagcagaagagacccgtgaccgagatgccctag

SEQ ID NO: 72707 - DNA, 84 bp, synthetic construct
  misc_feature 1..84: note = Description of Artificial Sequence: Synthetic coding sequence
  source 1..84: mol_type = other DNA
atgagcgaggtgctgcccgccgacagcggcgtggacaccctggccgtgttcatggccagcagcggcaccaccgacgtgacctag

SEQ ID NO: 72708 - DNA, 207 bp, synthetic construct
  misc_feature 1..207: note = Description of Artificial Sequence: Synthetic coding sequence
  source 1..207: mol_type = other DNA
atgagcgaggtgctgcccgccgacagcggcgtggacaccctggccgtgttcatggccagcagcggcaccaccgacgtgaccaacagaaacagccccgccaccccccccaacaccctgaacctgagaagcagccacaacgagctgctgaacgccgagatcaagcacaccgagaccaagaacagcaccccccccaagtgcagaaagtag

SEQ ID NO: 72709 - DNA, 2211 bp, synthetic construct
  misc_feature 1..2211: note = Description of Artificial Sequence: Synthetic coding sequence
  source 1..2211: mol_type = other DNA
atgagcgaggtgctgcccgccgacagcggcgtggacaccctggccgtgttcatggccagcagcggcaccaccgacgtgaccaacagaaacagccccgccaccccccccaacaccctgaacctgagaagcagccacaacgagctgctgaacgccgagatcaagcacaccgagaccaagaacagcaccccccccaagtgcagaaagaagtacgccctgaccaacatccaggccgccatgggcctgagcgaccccgccgcccagcccctgctgggcaacggcagcgccaacatcaagctggtgaagaacggcgagaaccagctgagaaaggccgccgagcagggccagcaggaccccaacaagaacctgagccccaccgccgtgatcaacatcaccagcgagaagctggagggcaaggagccccacccccaggacagcagcagctgcgagatcctgcccagccagcccagaagaaccaagagcttcctgaactactacgccgacctggagaccagcgccagagagctggagcagaacagaggcaaccaccacggcaccgccgaggagaagagccagcccgtgcagggccaggccagcaccatcatcggcaacggcgacctgctgctgcagaagcccaacagaccccagagcagccccgaggacggccaggtggccaccgtgagcagcagccccgagaccaagaaggaccaccccaagaccggcgccaagaccgactgcgccctgcacagaatccagaacctggcccccagcgacgaggagagcagctggaccaccctgagccaggacagcgccagccccagcagccccgacgagaccgacatctggagcgaccacagcttccagaccgaccccgacctgccccccggctggaagagagtgagcgacatcgccggcacctactactggcacatccccaccggcaccacccagtgggagagacccgtgagcatccccgccgacctgcagggcagcagaaagggcagcctgagcagcgtgacccccagccccacccccgagaacgaggacctgcacgccgccaccgtgaaccccgaccccagcctgaaggagttcgagggcgccaccctgagatacgccagcctgaagctgagaaacgccccccaccccgacgacgacgacagctgcagcatcaacagcgaccccgaggccaagtgcttcgccgtgagaagcctgggctgggtggagatggccgaggaggacctggcccccggcaagagcagcgtggccgtgaacaactgcatcagacagctgagctactgcaagaacgacatcagagacaccgtgggcatctggggcgagggcaaggacatgtacctgatcctggagaacgacatgctgagcctggtggaccccatggacagaagcgtgctgcacagccagcccatcgtgagcatcagagtgtggggcgtgggcagagacaacggcagagacttcgcctacgtggccagagacaaggacaccagaatcctgaagtgccacgtgttcagatgcgacacccccgccaaggccatcgccaccagcctgcacgagatctgcagcaagatcatggccgagagaaagaacgccaaggccctggcctgcagcagcctgcaggagagagccaacgtgaacctggacgtgcccctgcaggacttccccacccccaagaccgagctggtgcagaagttccacgtgcagtacctgggcatgctgcccgtggacaagcccgtgggcatggacatcctgaacagcgccatcgagaacctgatgaccagcagcaacaaggaggactggctgagcgtgaacatgaacgtggccgacgccaccgtgaccgtgatcagcgagaagaacgaggaggaggtgctggtggagtgcagagtgagattcctgagcttcatgggcgtgggcaaggacgtgcacaccttcgccttcatcatggacaccggcaaccagagattcgagtgccacgtgttctggtgcgagcccaacgccggcaacgtgagcgaggccgtgcaggccgcctgcatgctgagataccagaagtgcctggtggccagaccccccagccagaaggtgagacccccccccccccccgccgacagcgtgaccagaagagtgaccaccaacgtgaagagaggcgtgctgagcctgatcgacaccctgaagcagaagagacccgtgaccgagatgccctag

SEQ ID NO: 72710 - DNA, 2187 bp, synthetic construct
  misc_feature 1..2187: note = Description of Artificial Sequence: Synthetic coding sequence
  source 1..2187: mol_type = other DNA
tgagacaccctggccgtgttcatggccagcagcggcaccaccgacgtgaccaacagaaacagccccgccaccccccccaacaccctgaacctgagaagcagccacaacgagctgctgaacgccgagatcaagcacaccgagaccaagaacagcaccccccccaagtgcagaaagaagtacgccctgaccaacatccaggccgccatgggcctgagcgaccccgccgcccagcccctgctgggcaacggcagcgccaacatcaagctggtgaagaacggcgagaaccagctgagaaaggccgccgagcagggccagcaggaccccaacaagaacctgagccccaccgccgtgatcaacatcaccagcgagaagctggagggcaaggagccccacccccaggacagcagcagctgcgagatcctgcccagccagcccagaagaaccaagagcttcctgaactactacgccgacctggagaccagcgccagagagctggagcagaacagaggcaaccaccacggcaccgccgaggagaagagccagcccgtgcagggccaggccagcaccatcatcggcaacggcgacctgctgctgcagaagcccaacagaccccagagcagccccgaggacggccaggtggccaccgtgagcagcagccccgagaccaagaaggaccaccccaagaccggcgccaagaccgactgcgccctgcacagaatccagaacctggcccccagcgacgaggagagcagctggaccaccctgagccaggacagcgccagccccagcagccccgacgagaccgccgacatctggagcgaccacagcttccagaccgaccccgacctgccccccggctggaagagagtgagcgacatcgccggcacctactactggcacatccccaccggcaccacccagtgggagagacccgtgagcatccccgccgacctgcagggcagcagaaagggcagcctgagcagcgtgacccccagccccacccccgagaacgaggacctgcacgccgccaccgtgaaccccgaccccagcctgaaggagttcgagggcgccaccctgagatacgccagcctgaagctgagaaacgccccccaccccgacgacgacgacagctgcagcatcaacagcgaccccgaggccaagtgcttcgccgtgagaagcctgggctgggtggagatggccgaggaggacctggcccccggcaagagcagcgtggccgtgaacaactgcatcagacagctgagctactgcaagaacgacatcagagacaccgtgggcatctggggcgagggcaaggacatgtacctgatcctggagaacgacatgctgagcctggtggaccccatggacagaagcgtgctgcacagccagcccatcgtgagcatcagagtgtggggcgtgggcagagacaacggcagagacttcgcctacgtggccagagacaaggacaccagaatcctgaagtgccacgtgttcagatgcgacacccccgccaaggccatcgccaccagcctgcacgagatctgcagcaagatcatggccgagagaaagaacgccaaggccctggcctgcagcagcctgcaggagagagccaacgtgaacctggacgtgcccctgcaggtggacttccccacccccaagaccgagctggtgcagaagttccacgtgcagtacctgggcatgctgcccgtggacaagcccgtgggcatggacatcctgaacagcgccatcgagaacctgatgaccagcagcaacaaggaggactggctgagcgtgaacatgaacgtggccgacgccaccgtgaccgtgatcagcgagaagaacgaggaggaggtgctggtggagtgcagagtgagattcctgagcttcatgggcgtgggcaaggacgtgcacaccttcgccttcatcatggacaccggcaaccagagattcgagtgccacgtgttctggtgcgagcccaacgccggcaacgtgagcgaggccgtgcaggccgcctgcatgctgagataccagaagtgcctggtggccagaccccccagccagaaggtgagacccccccccccccccgccgacagcgtgaccagaagagtgaccaccaacgtgaagagaggcgtgctgagcctgatcgacaccctgaagcagaagagacccgtgaccgagatgccctag

SEQ ID NO: 72711 - DNA, 633 bp, synthetic construct; identical to SEQ ID NO: 72702
  misc_feature 1..633: note = Description of Artificial Sequence: Synthetic coding sequence
  source 1..633: mol_type = other DNA

SEQ ID NO: 72712 - DNA, 1476 bp, synthetic construct
  misc_feature 1..1476: note = Description of Artificial Sequence: Synthetic coding sequence
  source 1..1476: mol_type = other DNA
atgctgggcaaggactacatgctggccatcatcctggtgaactgcgacgacgacctgtggggcgaccacagcctggaggtggaggccggcctgccccccggctggagaaagatccacgacgccgccggcacctactactggcacgtgcccagcggcagcacccagtggcagagacccacctgggagctgggcgacgccgaggaccccggcaccggcaccgagggcatctggggcctgagaccccccaagggcagaagcttcagcagcctggagagcagcctggacagaagcaacagcctgagctggtacggcggcgagagctacatccagagcatggagcccggcgccaagtgcttcgccgtgagaagcctgggctgggtggaggtgcccgaggaggacctggcccccggcaagagcagcatcgccgtgaacaactgcatccagcagctggcccagaccagaagcagaagccagccccccgacggcgcctggggcgagggccagaacatgctgatgatcctgaagaaggacgccatgagcctggtgaaccccctggaccacagcctgatccactgccagcccctggtgcacatcagagtgtggggcgtgggcagcagcaagggcagacccatcagcgcccccgccagagacttcgccttcgtggccagcgacaaggacagctgcatgctgaagtgccacgtgttctgctgcgacgtgcccgccaaggccatcgccagcgccctgcacggcctgtgcgcccagatcctgagcgagagagtggaggtgagcggcgacgccagctgctgcagccccgaccccatcagccccgaggacctgcccagacaggtggagctgctggacgccgtgagccaggccgcccagaagtacgaggccctgtacatgggcaccctgcccgtgaccaaggccatgggcatggacgtgctgaacgaggccatcggcaccctgaccgccagaggcgacagaaacgcctgggtgcccaccatgctgagcgtgagcgacagcctgatgaccgcccaccccatccaggccgaggccagcaccgaggaggagcccctgtggcagtgccccgtgagactggtgaccttcatcggcgtgggcagagacccccacaccttcggcctgatcgccgacctgggcagacagagcttccagtgcgccgccttctggtgccagccccacgccggcggcctgagcgaggccgtgcaggccgcctgcatggtgcagtaccagaagtgcctggtggccagcgccgccagaggcaaggcctggggcgcccaggccagagccagactgagactgaagagaaccagcagcatggacagccccggcggccccctgcccctgcccctgctgaagggcggcgtgggcggcgccggcgccacccccagaaagagaggcgtgttcagcttcctggacgccttcagactgaagcccagcctgctgcacatgccctag

SEQ ID NO: 72713 - DNA, 1461 bp, synthetic construct
  misc_feature 1..1461: note = Description of Artificial Sequence: Synthetic coding sequence
  source 1..1461: mol_type = other DNA
atgctgggcaaggactacatgctggccatcatcctggtgaactgcgacgacgacctgtggggcgaccacagcctggaggtggaggccggcctgccccccggctggagaaagatccacgacgccgccggcacctactactggcacgtgcccagcggcagcacccagtggcagagacccacctgggagctgggcgacgccgaggaccccggcaccggcaccgagggcatctggggcctgagaccccccaagggcagaagcttcagcagcctggagagcagcctggacagaagcaacagcctgagctggtacggcggcgagagctacatccagagcatggagcccggcgccaagtgcttcgccgtgagaagcctgggctgggtggaggtgcccgaggaggacctggcccccggcaagagcagcatcgccgtgaacaactgcatccagcagctggcccagaccagaagcagaagccagccccccgacggcgcctggggcgagggccagaacatgctgatgatcctgaagaaggacgccatgagcctggtgaaccccctggaccacagcctgatccactgccagcccctggtgcacatcagagtgtggggcgtgggcagcagcaagggcagagacagagacttcgccttcgtggccagcgacaaggacagctgcatgctgaagtgccacgtgttctgctgcgacgtgcccgccaaggccatcgccagcgccctgcacggcctgtgcgcccagatcctgagcgagagagtggaggtgagcggcgacgccagctgctgcagccccgaccccatcagccccgaggacctgcccagacaggtggagctgctggacgccgtgagccaggccgcccagaagtacgaggccctgtacatgggcaccctgcccgtgaccaaggccatgggcatggacgtgctgaacgaggccatcggcaccctgaccgccagaggcgacagaaacgcctgggtgcccaccatgctgagcgtgagcgacagcctgatgaccgcccaccccatccaggccgaggccagcaccgaggaggagcccctgtggcagtgccccgtgagactggtgaccttcatcggcgtgggcagagacccccacaccttcggcctgatcgccgacctgggcagacagagcttccagtgcgccgccttctggtgccagccccacgccggcggcctgagcgaggccgtgcaggccgcctgcatggtgcagtaccagaagtgcctggtggccagcgccgccagaggcaaggcctggggcgcccaggccagagccagactgagactgaagagaaccagcagcatggacagccccggcggccccctgcccctgcccctgctgaagggcggcgtgggcggcgccggcgccacccccagaaagagaggcgtgttcagcttcctggacgccttcagactgaagcccagcctgctgcacatgccctag

SEQ ID NO: 72714 - DNA, 1020 bp, synthetic construct
  misc_feature 1..1020: note = Description of Artificial Sequence: Synthetic coding sequence
  source 1..1020: mol_type = other DNA
atgctgggcaaggactacatgctggccatcatcctggtgaactgcgacgacgacctgtggggcgaccacagcctggaggtggaggccggcctgccccccggctggagaaagatccacgacgccgccggcacctactactggcacgtgcccagcggcagcacccagtggcagagacccacctgggagctgggcgacgccgaggaccccggcaccggcaccgagggcatctggggcctgagaccccccaagggcagaagcttcagcagcctggagagcagcctggacagaagcaacagcctgagctggtacggcggcgagagctacatccagagcatggagcccggcgccaagtgcttcgccgtgagaagcctgggctgggtggaggtgcccgaggaggacctggcccccggcaagagcagcatcgccgtgaacaactgcatccagcagctggcccagaccagaagcagaagccagccccccgacggcgcctggggcgagggccagaacatgctgatgatcctgaagaaggacgccatgagcctggtgaaccccctggaccacagcctgatccactgccagcccctggtgcacatcagagtgtggggcgtgggcagcagcaagggcagagacagagacttcgccttcgtggccagcgacaaggacagctgcatgctgaagtgccacgtgttctgctgcgacgtgcccgccaaggccatcgccagcgccctgcacggcctgtgcgcccagatcctgagcgagagagtggaggtgagcggcgacgccagctgctgcagccccgaccccatcagccccgaggacctgcccagacaggtggagctgctggacgccgtgagccaggccgcccagaagtacgaggccctgtacatgggcaccctgcccgtgaccaaggccatgggcagaggccagtacagaggcggcgccatcgtggccgtgccctgcgccccctgcgacatctactggtgctggcccagacccacccacctgtggccccacagatag

SEQ ID NO: 72715 - DNA, 1455 bp, synthetic construct
  misc_feature 1..1455: note = Description of Artificial Sequence: Synthetic coding sequence
  source 1..1455: mol_type = other DNA
atgctgggcaaggactacatgctggccatcatcctggtgaactgcgacgacgacctgtggggcgaccacagcctggaggtggaggccggcctgccccccggctggagaaagatccacgacgccgccggcacctactactggcacgtgcccagcggcagcacccagtggcagagacccacctgggagctgggcgacgccgaggaccccggcaccggcaccgagggcatctggggcctgagaccccccaagggcagaagcttcagcagcctggagagcagcctggacagaagcaacagcctgagctggtacggcggcgagagctacatccagagcatggagcccggcgccaagtgcttcgccgtgagaagcctgggctgggtggaggtgcccgaggaggacctggcccccggcaagagcagcatcgccgtgaacaactgcatccagcagctggcccagaccagaagcagaagccagccccccgacggcgcctggggcgagggccagaacatgctgatgatcctgaagaaggacgccatgagcctggtgaaccccctggaccacagcctgatccactgccagcccctggtgcacatcagagtgtggggcgtgggcagcagcaagggcagagacttcgccttcgtggccagcgacaaggacagctgcatgctgaagtgccacgtgttctgctgcgacgtgcccgccaaggccatcgccagcgccctgcacggcctgtgcgcccagatcctgagcgagagagtggaggtgagcggcgacgccagctgctgcagccccgaccccatcagccccgaggacctgcccagacaggtggagctgctggacgccgtgagccaggccgcccagaagtacgaggccctgtacatgggcaccctgcccgtgaccaaggccatgggcatggacgtgctgaacgaggccatcggcaccctgaccgccagaggcgacagaaacgcctgggtgcccaccatgctgagcgtgagcgacagcctgatgaccgcccaccccatccaggccgaggccagcaccgaggaggagcccctgtggcagtgccccgtgagactggtgaccttcatcggcgtgggcagagacccccacaccttcggcctgatcgccgacctgggcagacagagcttccagtgcgccgccttctggtgccagccccacgccggcggcctgagcgaggccgtgcaggccgcctgcatggtgcagtaccagaagtgcctggtggccagcgccgccagaggcaaggcctggggcgcccaggccagagccagactgagactgaagagaaccagcagcatggacagccccggcggccccctgcccctgcccctgctgaagggcggcgtgggcggcgccggcgccacccccagaaagagaggcgtgttcagcttcctggacgccttcagactgaagcccagcctgctgcacatgccctag

SEQ ID NO: 72716 - DNA, 738 bp, synthetic construct
  misc_feature 1..738: note = Description of Artificial Sequence: Synthetic coding sequence
  source 1..738: mol_type = other DNA
atgctgggcaaggactacatgctggccatcatcctggtgaactgcgacgacgacctgtggggcgaccacagcctggaggtggaggccggcctgccccccggctggagaaagatccacgacgccgccggcacctactactggcacgtgcccagcggcagcacccagtggcagagacccacctgggagctgggcgacgccgaggaccccggcaccggcaccgagggcatctggggcctgagaccccccaagggcagaagcttcagcagcctggagagcagcctggacagaagcaacagcctgagctggtacggcggcgagagctacatccagagcatggagcccggcgccaagtgcttcgccgtgagaagcctgggctgggtggaggtgcccgaggaggacctggcccccggcaagagcagcatcgccgtgaacaactgcatccagcagctggcccagaccagaagcagaagccagccccccgacggcgcctggggcgagggccagaacatgctgatgatcctgaagaaggacgccatgagcctggtgaaccccctggaccacagcctgatccactgccagcccctggtgcacatcagagtgtggggcgtgggcagcagcaagggcagaagcagcgacgtggaccccggcctgctgcccctgcccggccccgccctggtgggcgagggcggccccagcagcgccggcaccgtgtggggcgagagcgagagactgggctag

SEQ ID NO: 72717 - DNA, 792 bp, synthetic construct
  misc_feature 1..792: note = Description of Artificial Sequence: Synthetic coding sequence
  source 1..792: mol_type = other DNA
atgctgaagtgccacgtgttctgctgcgacgtgcccgccaaggccatcgccagcgccctgcacggcctgtgcgcccagatcctgagcgagagagtggaggtgagcggcgacgccagctgctgcagccccgaccccatcagccccgaggacctgcccagacaggtggagctgctggacgccgtgagccaggccgcccagaagtacgaggccctgtacatgggcaccctgcccgtgaccaaggccatgggcatggacgtgctgaacgaggccatcggcaccctgaccgccagaggcgacagaaacgcctgggtgcccaccatgctgagcgtgagcgacagcctgatgaccgcccaccccatccaggccgaggccagcaccgaggaggagcccctgtggcagtgccccgtgagactggtgaccttcatcggcgtgggcagagacccccacaccttcggcctgatcgccgacctgggcagacagagcttccagtgcgccgccttctggtgccagccccacgccggcggcctgagcgaggccgtgcaggccgcctgcatggtgcagtaccagaagtgcctggtggccagcgccgccagaggcaaggcctggggcgcccaggccagagccagactgagactgaagagaaccagcagcatggacagccccggcggccccctgcccctgcccctgctgaagggcggcgtgggcggcgccggcgccacccccagaaagagaggcgtgttcagcttcctggacgccttcagactgaagcccagcctgctgcacatgccctag

SEQ ID NO: 72718 - DNA, 645 bp, synthetic construct
  misc_feature 1..645: note = Description of Artificial Sequence: Synthetic coding sequence
  source 1..645: mol_type = other DNA
atgctgggcaaggactacatgctggccatcatcctggtgaactgcgacgacgacctgtggggcgaccacagcctggaggtggaggccggcctgccccccggctggagaaagatccacgacgccgccggcacctactactggcacgtgcccagcggcagcacccagtggcagagacccacctgggagctgggcgacgccgaggaccccggcaccggcaccgagggcatctggggcctgagaccccccaagggcagaagcttcagcagcctggagagcagcctggacagaagcaacagcctgagctggtacggcggcgagagctacatccagagcatggagcccggcgccaagtgcttcgccgtgagaagcctgggctgggtggaggtgcccgaggaggacctggcccccggcaagagcagcatcgccgtgaacaactgcatccagcagctggcccagaccagaagcagaagccagccccccgacggcgcctggggcgagggccagaacatgctgatgatcctgaagaaggacgccatgagcctggtgaaccccctggaccacagcctgatccactgccagcccctggccgtgatccccaccgacgccgacccccagtacctgaacccctggacccagatcctgtag

SEQ ID NO: 72719 - DNA, 378 bp, synthetic construct
  misc_feature 1..378: note = Description of Artificial Sequence: Synthetic coding sequence
  source 1..378: mol_type = other DNA
atggagcccgacggcacctacgagcccggcttcgtgggcatcagattctgccaggagtgcaacaacatgctgtaccccaaggaggacaaggagaacagaatcctgctgtacgcctgcagaaactgcgactaccagcaggaggccgacaacagctgcatctacgtgaacaagatcacccacgaggtggacgagctgacccagatcatcgccgacgtgagccaggaccccaccctgcccagaaccgaggaccacccctgccagaagtgcggccacaaggaggccgtgttcttccagagccacagcgccagagccgaggacgccatgagactgtactacgtgtgcaccgccccccactgcggccacagatggaccgagtag

SEQ ID NO: 72720 - DNA, 1836 bp, synthetic construct
  misc_feature 1..1836: note = Description of Artificial Sequence: Synthetic coding sequence
  source 1..1836: mol_type = other DNA
atgctggccagcctggagaaggacaagaccgcccccggcagcgcccaggtggccggcctgtgcggcagactgaccctgcacagagacctgagaaccggcagatgggagcccgacccccagagaagcagaagatgcctgagagacccccagagagtgctggagtactgcagacagatgtaccccgagctgcagatcgccagagtggagcaggccacccaggccatccccatggagagatggtgcggcggcagcagaagcggcagctgcgcccacccccaccaccaggtggtgcccttcagatgcctgcccggcgagttcgtgagcgaggccctgctggtgcccgagggctgcagattcctgcaccaggagagaatggaccagtgcgagagcagcaccagaagacaccaggaggcccaggaggcctgcagcagccagggcctgatcctgcacggcagcggcatgctgctgccctgcggcagcgacagattcagaggcgtggagtacgtgtgctgccccccccccggcacccccgaccccagcggcaccgccgtgggcgaccccagcaccagaagctggccccccggcagcagagtggagggcgccgaggacgaggaggaggaggagagcttcccccagcccgtggacgactacttcgtggagcccccccaggccgaggaggaggaggagaccgtgcccccccccagcagccacaccctggccgtggtgggcaaggtgacccccacccccagacccaccgacggcgtggacatctacttcggcatgcccggcgagatcagcgagcacgagggcttcctgagagccaagatggacctggaggagagaagaatgagacagatcaacgaggtgatgagagagtgggccatggccgacaaccagagcaagaacctgcccaaggccgacagacaggccctgaacgagcacttccagagcatcctgcagaccctggaggagcaggtgagcggcgagagacagagactggtggagacccacgccaccagagtgatcgccctgatcaacgaccagagaagagccgccctggagggcttcctggccgccctgcaggccgaccccccccaggccgagagagtgctgctggccctgagaagatacctgagagccgagcagaaggagcagagacacaccctgagacactaccagcacgtggccgccgtggaccccgagaaggcccagcagatgagattccaggtgcacacccacctgcaggtgatcgaggagagagtgaaccagagcctgggcctgctggaccagaacccccacctggcccaggagctgagaccccagatccaggagctgctgcacagcgagcacctgggccccagcgagctggaggcccccgcccccggcggcagcagcgaggacaagggcggcctgcagccccccgacagcaaggacgacacccccatgaccctgcccaagggcagcaccgagcaggacgccgccagccccgagaaggagaagatgaaccccctggagcagtacgagagaaaggtgaacgccagcgtgcccagaggcttccccttccacagcagcgagatccagagagacgagctggcccccgccggcaccggcgtgagcagagaggccgtgagcggcctgctgatcatgggcgccggcggcggcagcctgatcgtgctgagcatgctgctgctgagaagaaagaagccctacggcgccatcagccacggcgtggtggaggtggaccccatgctgaccctggaggagcagcagctgagagagctgcagagacacggctacgagaaccccacctacagattcctggaggagagaccctag

SEQ ID NO: 72721 - DNA, 2292 bp, synthetic construct
  misc_feature 1..2292: note = Description of Artificial Sequence: Synthetic coding sequence
  source 1..2292: mol_type = other DNA
atggccgccaccggcaccgccgccgccgccgccaccggcagactgctgctgctgctgctggtgggcctgaccgcccccgccctggccctggccggctacatcgaggccctggccgccaacgccggcaccggcttcgccgtggccgagccccagatcgccatgttctgcggcaagctgaacatgcacgtgaacatccagaccggcaagtgggagcccgaccccaccggcaccaagagctgcttcgagaccaaggaggaggtgctgcagtactgccaggagatgtaccccgagctgcagatcaccaacgtgatggaggccaaccagagagtgagcatcgacaactggtgcagaagagacaagaagcagtgcaagagcagattcgtgacccccttcaagtgcctggtgggcgagttcgtgagcgacgtgctgctggtgcccgagaagtgccagttcttccacaaggagagaatggaggtgtgcgagaaccaccagcactggcacaccgtggtgaaggaggcctgcctgacccagggcatgaccctgtacagctacggcatgctgctgccctgcggcgtggaccagttccacggcaccgagtacgtgtgctgcccccagaccaagatcatcggcagcgtgagcaaggaggaggaggaggaggacgaggaggaggaggaggaggaggacgaggaggaggactacgacgtgtacaagagcgagttccccaccgaggccgacctggaggacttcaccgaggccgccgtggacgaggacgacgaggacgaggaggagggcgaggaggtggtggaggacagagactactactacgacaccttcaagggcgacgactacaacgaggagaaccccaccgagcccggcagcgacggcaccatgagcgacaaggagatcacccacgacgtgaaggccgtgtgcagccaggaggccatgaccggcccctgcagagccgtgatgcccagatggtacttcgacctgagcaagggcaagtgcgtgagattcatctacggcggctgcggcggcaacagaaacaacttcgagagcgaggactactgcatggccgtgtgcaaggccatgatcccccccacccccctgcccaccaacgacgtggacgtgtacttcgagaccagcgccgacgacaacgagcacgccagattccagaaggccaaggagcagctggagatcagacacagaaacagaatggacagagtgaagaaggagtgggaggaggccgagctgcaggccaagaacctgcccaaggccgagagacagaccctgatccagcacttccaggccatggtgaaggccctggagaaggaggccgccagcgagaagcagcagctggtggagacccacctggccagagtggaggccatgctgaacgacagaagaagaatggccctggagaactacctggccgccctgcagagcgacccccccagaccccacagaatcctgcaggccctgagaagatacgtgagagccgagaacaaggacagactgcacaccatcagacactaccagcacgtgctggccgtggaccccgagaaggccgcccagatgaagagccaggtgatgacccacctgcacgtgatcgaggagagaagaaaccagagcctgagcctgctgtacaaggtgccctacgtggcccaggagatccaggaggagatcgacgagctgctgcaggagcagagagccgacatggaccagttcaccgccagcatcagcgagacccccgtggacgtgagagtgagcagcgaggagagcgaggagatcccccccttccaccccttccaccccttccccgccctgcccgagaacgaggacacccagcccgagctgtaccaccccatgaagaagggcagcggcgtgggcgagcaggacggcggcctgatcggcgccgaggagaaggtgatcaacagcaagaacaaggtggacgagaacatggtgatcgacgagaccctggacgtgaaggagatgatcttcaacgccgagagagtgggcggcctggaggaggagagagagagcgtgggccccctgagagaggacttcagcctgagcagcagcgccctgatcggcctgctggtgatcgccgtggccatcgccaccgtgatcgtgatcagcctggtgatgctgagaaagagacagtacggcaccatcagccacggcatcgtggaggtggaccccatgctgacccccgaggagagacacctgaacaagatgcagaaccacggctacgagaaccccacctacaagtacctggagcagatgcagatctag

SEQ ID NO: 72722 - DNA, 2286 bp, synthetic construct
  misc_feature 1..2286: note = Description of Artificial Sequence: Synthetic coding sequence
  source 1..2286: mol_type = other DNA
atgctgagagcccccggcgagctgcccagacaggccgccagatgcagcctgtgcagactgggccccggcagaggcagagccttcttcaagtggagatgcctgcccgccagcgtggacagaggcaaccccctgtgggccctggccgccaacgccggcaccggcttcgccgtggccgagccccagatcgccatgttctgcggcaagctgaacatgcacgtgaacatccagaccggcaagtgggagcccgaccccaccggcaccaagagctgcttcgagaccaaggaggaggtgctgcagtactgccaggagatgtaccccgagctgcagatcaccaacgtgatggaggccaaccagagagtgagcatcgacaactggtgcagaagagacaagaagcagtgcaagagcagattcgtgacccccttcaagtgcctggtgggcgagttcgtgagcgacgtgctgctggtgcccgagaagtgccagttcttccacaaggagagaatggaggtgtgcgagaaccaccagcactggcacaccgtggtgaaggaggcctgcctgacccagggcatgaccctgtacagctacggcatgctgctgccctgcggcgtggaccagttccacggcaccgagtacgtgtgctgcccccagaccaagatcatcggcagcgtgagcaaggaggaggaggaggaggacgaggaggaggaggaggaggaggacgaggaggaggactacgacgtgtacaagagcgagttccccaccgaggccgacctggaggacttcaccgaggccgccgtggacgaggacgacgaggacgaggaggagggcgaggaggtggtggaggacagagactactactacgacaccttcaagggcgacgactacaacgaggagaaccccaccgagcccggcagcgacggcaccatgagcgacaaggagatcacccacgacgtgaaggccgtgtgcagccaggaggccatgaccggcccctgcagagccgtgatgcccagatggtacttcgacctgagcaagggcaagtgcgtgagattcatctacggcggctgcggcggcaacagaaacaacttcgagagcgaggactactgcatggccgtgtgcaaggccatgatcccccccacccccctgcccaccaacgacgtggacgtgtacttcgagaccagcgccgacgacaacgagcacgccagattccagaaggccaaggagcagctggagatcagacacagaaacagaatggacagagtgaagaaggagtgggaggaggccgagctgcaggccaagaacctgcccaaggccgagagacagaccctgatccagcacttccaggccatggtgaaggccctggagaaggaggccgccagcgagaagcagcagctggtggagacccacctggccagagtggaggccatgctgaacgacagaagaagaatggccctggagaactacctggccgccctgcagagcgacccccccagaccccacagaatcctgcaggccctgagaagatacgtgagagccgagaacaaggacagactgcacaccatcagacactaccagcacgtgctggccgtggaccccgagaaggccgcccagatgaagagccaggtgatgacccacctgcacgtgatcgaggagagaagaaaccagagcctgagcctgctgtacaaggtgccctacgtggcccaggagatccaggaggagatcgacgagctgctgcaggagcagagagccgacatggaccagttcaccgccagcatcagcgagacccccgtggacgtgagagtgagcagcgaggagagcgaggagatcccccccttccaccccttccaccccttccccgccctgcccgagaacgagggcagcggcgtgggcgagcaggacggcggcctgatcggcgccgaggagaaggtgatcaacagcaagaacaaggtggacgagaacatggtgatcgacgagaccctggacgtgaaggagatgatcttcaacgccgagagagtgggcggcctggaggaggagagagagagcgtgggccccctgagagaggacttcagcctgagcagcagcgccctgatcggcctgctggtgatcgccgtggccatcgccaccgtgatcgtgatcagcctggtgatgctgagaaagagacagtacggcaccatcagccacggcatcgtggaggtggaccccatgctgacccccgaggagagacacctgaacaagatgcagaaccacggctacgagaaccccacctacaagtacctggagcagatgcagatctag

SEQ ID NO: 72723 - DNA, 2256 bp, synthetic construct
  misc_feature 1..2256: note = Description of Artificial Sequence: Synthetic coding sequence
  source 1..2256: mol_type = other DNA
atggccgccaccggcaccgccgccgccgccgccaccggcagactgctgctgctgctgctggtgggcctgaccgcccccgccctggccctggccggctacatcgaggccctggccgccaacgccggcaccggcttcgccgtggccgagccccagatcgccatgttctgcggcaagctgaacatgcacgtgaacatccagaccggcaagtgggagcccgaccccaccggcaccaagagctgcttcgagaccaaggaggaggtgctgcagtactgccaggagatgtaccccgagctgcagatcaccaacgtgatggaggccaaccagagagtgagcatcgacaactggtgcagaagagacaagaagcagtgcaagagcagattcgtgacccccttcaagtgcctggtgggcgagttcgtgagcgacgtgctgctggtgcccgagaagtgccagttcttccacaaggagagaatggaggtgtgcgagaaccaccagcactggcacaccgtggtgaaggaggcctgcctgacccagggcatgaccctgtacagctacggcatgctgctgccctgcggcgtggaccagttccacggcaccgagtacgtgtgctgcccccagaccaagatcatcggcagcgtgagcaaggaggaggaggaggaggacgaggaggaggaggaggaggaggacgaggaggaggactacgacgtgtacaagagcgagttccccaccgaggccgacctggaggacttcaccgaggccgccgtggacgaggacgacgaggacgaggaggagggcgaggaggtggtggaggacagagactactactacgacaccttcaagggcgacgactacaacgaggagaaccccaccgagcccggcagcgacggcaccatgagcgacaaggagatcacccacgacgtgaaggccgtgtgcagccaggaggccatgaccggcccctgcagagccgtgatgcccagatggtacttcgacctgagcaagggcaagtgcgtgagattcatctacggcggctgcggcggcaacagaaacaacttcgagagcgaggactactgcatggccgtgtgcaaggccatgatcccccccacccccctgcccaccaacgacgtggacgtgtacttcgagaccagcgccgacgacaacgagcacgccagattccagaaggccaaggagcagctggagatcagacacagaaacagaatggacagagtgaagaaggagtgggaggaggccgagctgcaggccaagaacctgcccaaggccgagagacagaccctgatccagcacttccaggccatggtgaaggccctggagaaggaggccgccagcgagaagcagcagctggtggagacccacctggccagagtggaggccatgctgaacgacagaagaagaatggccctggagaactacctggccgccctgcagagcgacccccccagaccccacagaatcctgcaggccctgagaagatacgtgagagccgagaacaaggacagactgcacaccatcagacactaccagcacgtgctggccgtggaccccgagaaggccgcccagatgaagagccaggtgatgacccacctgcacgtgatcgaggagagaagaaaccagagcctgagcctgctgtacaaggtgccctacgtggcccaggagatccaggaggagatcgacgagctgctgcaggagcagagagccgacatggaccagttcaccgccagcatcagcgagacccccgtggacgtgagagtgagcagcgaggagagcgaggagatcccccccttccaccccttccaccccttccccgccctgcccgagaacgagggcagcggcgtgggcgagcaggacggcggcctgatcggcgccgaggagaaggtgatcaacagcaagaacaaggtggacgagaacatggtgatcgacgagaccctggacgtgaaggagatgatcttcaacgccgagagagtgggcggcctggaggaggagagagagagcgtgggccccctgagagaggacttcagcctgagcagcagcgccctgatcggcctgctggtgatcgccgtggccatcgccaccgtgatcgtgatcagcctggtgatgctgagaaagagacagtacggcaccatcagccacggcatcgtggaggtggaccccatgctgacccccgaggagagacacctgaacaagatgcagaaccacggctacgagaaccccacctacaagtacctggagcagatgcagatctag

SEQ ID NO: 72724 - DNA, 1569 bp, synthetic construct
  misc_feature 1..1569: note = Description of Artificial Sequence: Synthetic coding sequence
  source 1..1569: mol_type = other DNA
atggccgccaccggcaccgccgccgccgccgccaccggcagactgctgctgctgctgctggtgggcctgaccgcccccgccctggccctggccggctacatcgaggccctggccgccaacgccggcaccggcttcgccgtggccgagccccagatcgccatgttctgcggcaagctgaacatgcacgtgaacatccagaccggcaagtgggagcccgaccccaccggcaccaagagctgcttcgagaccaaggaggaggtgctgcagtactgccaggagatgtaccccgagctgcagatcaccaacgtgatggaggccaaccagagagtgagcatcgacaactggtgcagaagagacaagaagcagtgcaagagcagattcgtgacccccttcaagtgcctggtgccccccacccccctgcccaccaacgacgtggacgtgtacttcgagaccagcgccgacgacaacgagcacgccagattccagaaggccaaggagcagctggagatcagacacagaaacagaatggacagagtgaagaaggagtgggaggaggccgagctgcaggccaagaacctgcccaaggccgagagacagaccctgatccagcacttccaggccatggtgaaggccctggagaaggaggccgccagcgagaagcagcagctggtggagacccacctggccagagtggaggccatgctgaacgacagaagaagaatggccctggagaactacctggccgccctgcagagcgacccccccagaccccacagaatcctgcaggccctgagaagatacgtgagagccgagaacaaggacagactgcacaccatcagacactaccagcacgtgctggccgtggaccccgagaaggccgcccagatgaagagccaggtgatgacccacctgcacgtgatcgaggagagaagaaaccagagcctgagcctgctgtacaaggtgccctacgtggcccaggagatccaggaggagatcgacgagctgctgcaggagcagagagccgacatggaccagttcaccgccagcatcagcgagacccccgtggacgtgagagtgagcagcgaggagagcgaggagatcccccccttccaccccttccaccccttccccgccctgcccgagaacgagggcagcggcgtgggcgagcaggacggcggcctgatcggcgccgaggagaaggtgatcaacagcaagaacaaggtggacgagaacatggtgatcgacgagaccctggacgtgaaggagatgatcttcaacgccgagagagtgggcggcctggaggaggagagagagagcgtgggccccctgagagaggacttcagcctgagcagcagcgccctgatcggcctgctggtgatcgccgtggccatcgccaccgtgatcgtgatcagcctggtgatgctgagaaagagacagtacggcaccatcagccacggcatcgtggaggtggaccccatgctgacccccgaggagagacacctgaacaagatgcagaaccacggctacgagaaccccacctacaagtacctggagcagatgcagatctag

SEQ ID NO: 72725 - DNA, 2088 bp, synthetic construct
  misc_feature 1..2088: note = Description of Artificial Sequence: Synthetic coding sequence
  source 1..2088: mol_type = other DNA
atggccgccaccggcaccgccgccgccgccgccaccggcagactgctgctgctgctgctggtgggcctgaccgcccccgccctggccctggccggctacatcgaggccctggccgccaacgccggcaccggcttcgccgtggccgagccccagatcgccatgttctgcggcaagctgaacatgcacgtgaacatccagaccggcaagtgggagcccgaccccaccggcaccaagagctgcttcgagaccaaggaggaggtgctgcagtactgccaggagatgtaccccgagctgcagatcaccaacgtgatggaggccaaccagagagtgagcatcgacaactggtgcagaagagacaagaagcagtgcaagagcagattcgtgacccccttcaagtgcctggtgggcgagttcgtgagcgacgtgctgctggtgcccgagaagtgccagttcttccacaaggagagaatggaggtgtgcgagaaccaccagcactggcacaccgtggtgaaggaggcctgcctgacccagggcatgaccctgtacagctacggcatgctgctgccctgcggcgtggaccagttccacggcaccgagtacgtgtgctgcccccagaccaagatcatcggcagcgtgagcaaggaggaggaggaggaggacgaggaggaggaggaggaggaggacgaggaggaggactacgacgtgtacaagagcgagttccccaccgaggccgacctggaggacttcaccgaggccgccgtggacgaggacgacgaggacgaggaggagggcgaggaggtggtggaggacagagactactactacgacaccttcaagggcgacgactacaacgaggagaaccccaccgagcccggcagcgacggcaccatgagcgacaaggagatcacccacgacgtgaaggtgccccccacccccctgcccaccaacgacgtggacgtgtacttcgagaccagcgccgacgacaacgagcacgccagattccagaaggccaaggagcagctggagatcagacacagaaacagaatggacagagtgaagaaggagtgggaggaggccgagctgcaggccaagaacctgcccaaggccgagagacagaccctgatccagcacttccaggccatggtgaaggccctggagaaggaggccgccagcgagaagcagcagctggtggagacccacctggccagagtggaggccatgctgaacgacagaagaagaatggccctggagaactacctggccgccctgcagagcgacccccccagaccccacagaatcctgcaggccctgagaagatacgtgagagccgagaacaaggacagactgcacaccatcagacactaccagcacgtgctggccgtggaccccgagaaggccgcccagatgaagagccaggtgatgacccacctgcacgtgatcgaggagagaagaaaccagagcctgagcctgctgtacaaggtgccctacgtggcccaggagatccaggaggagatcgacgagctgctgcaggagcagagagccgacatggaccagttcaccgccagcatcagcgagacccccgtggacgtgagagtgagcagcgaggagagcgaggagatcccccccttccaccccttccaccccttccccgccctgcccgagaacgagggcagcggcgtgggcgagcaggacggcggcctgatcggcgccgaggagaaggtgatcaacagcaagaacaaggtggacgagaacatggtgatcgacgagaccctggacgtgaaggagatgatcttcaacgccgagagagtgggcggcctggaggaggagagagagagcgtgggccccctgagagaggacttcagcctgagcagcagcgccctgatcggcctgctggtgatcgccgtggccatcgccaccgtgatcgtgatcagcctggtgatgctgagaaagagacagtacggcaccatcagccacggcatcgtggaggtggaccccatgctgacccccgaggagagacacctgaacaagatgcagaaccacggctacgagaaccccacctacaagtacctggagcagatgcagatctag

SEQ ID NO: 72726 - DNA, 480 bp, synthetic construct
  misc_feature 1..480: note = Description of Artificial Sequence: Synthetic coding sequence
  source 1..480: mol_type = other DNA
atggccgccaccggcaccgccgccgccgccgccaccggcagactgctgctgctgctgctggtgggcctgaccgcccccgccctggccctggccggctacatcgagagcagccagatctgctgcagccccagaagcttcctgatcagcaccctgaagtgcctgatcgtggacgagatcaacgccctggccgccaacgccggcaccggcttcgccgtggccgagccccagatcgccatgttctgcggcaagctgaacatgcacgtgaacatccagaccggcaagtgggagcccgaccccaccggcaccaagagctgcttcgagaccaaggaggaggtgctgcagtactgccaggagatgtaccccgagctgcagatcaccaacgtgatggaggccaaccagagagtgagcatcgacaactggtgcagaagagacaagaagcagtgcaagagcagattcgtgacccccttcaagtgcctgtag

SEQ ID NO: 72727 - DNA, 351 bp, synthetic construct
  misc_feature 1..351: note = Description of Artificial Sequence: Synthetic coding sequence
  source 1..351: mol_type = other DNA
atggccgccaccggcaccgccgccgccgccgccaccggcagactgctgctgctgctgctggtgggcctgaccgcccccgccctggccctggccggctacatcgaggccctggccgccaacgccggcaccggcttcgccgtggccgagccccagatcgccatgttctgcggcaagctgaacatgcacgtgaacatccagaccggcaagtgggagcccgaccccaccggcaccaagagctgcttcgagaccaaggaggaggtgctgcagtactgccaggagatgtaccccgagctgcagatcaccaacagcggctggagatgcgtgagaatcaccagcaccggcaccagatag

SEQ ID NO: 72728 - DNA, 1656 bp, synthetic construct
  misc_feature 1..1656: note = Description of Artificial Sequence: Synthetic coding sequence
  source 1..1656: mol_type = other DNA
atggaggtgtgcgagaaccaccagcactggcacaccgtggtgaaggaggcctgcctgacccagggcatgaccctgtacagctacggcatgctgctgccctgcggcgtggaccagttccacggcaccgagtacgtgtgctgcccccagaccaagatcatcggcagcgtgagcaaggaggaggaggaggaggacgaggaggaggaggaggaggaggacgaggaggaggactacgacgtgtacaagagcgagttccccaccgaggccgacctggaggacttcaccgaggccgccgtggacgaggacgacgaggacgaggaggagggcgaggaggtggtggaggacagagactactactacgacaccttcaagggcgacgactacaacgaggagaaccccaccgagcccggcagcgacggcaccatgagcgacaaggagatcacccacgacgtgaaggtgccccccacccccctgcccaccaacgacgtggacgtgtacttcgagaccagcgccgacgacaacgagcacgccagattccagaaggccaaggagcagctggagatcagacacagaaacagaatggacagagtgaagaaggagtgggaggaggccgagctgcaggccaagaacctgcccaaggccgagagacagaccctgatccagcacttccaggccatggtgaaggccctggagaaggaggccgccagcgagaagcagcagctggtggagacccacctggccagagtggaggccatgctgaacgacagaagaagaatggccctggagaactacctggccgccctgcagagcgacccccccagaccccacagaatcctgcaggccctgagaagatacgtgagagccgagaacaaggacagactgcacaccatcagacactaccagcacgtgctggccgtggaccccgagaaggccgcccagatgaagagccaggtgatgacccacctgcacgtgatcgaggagagaagaaaccagagcctgagcctgctgtacaaggtgccctacgtggcccaggagatccaggaggagatcgacgagctgctgcaggagcagagagccgacatggaccagttcaccgccagcatcagcgagacccccgtggacgtgagagtgagcagcgaggagagcgaggagatcccccccttccaccccttccaccccttccccgccctgcccgagaacgaggacacccagcccgagctgtaccaccccatgaagaagggcagcggcgtgggcgagcaggacggcggcctgatcggcgccgaggagaaggtgatcaacagcaagaacaaggtggacgagaacatggtgatcgacgagaccctggacgtgaaggagatgatcttcaacgccgagagagtgggcggcctggaggaggagagagagagcgtgggccccctgagagaggacttcagcctgagcagcagcgccctgatcggcctgctggtgatcgccgtggccatcgccaccgtgatcgtgatcagcctggtgatgctgagaaagagacagtacggcaccatcagccacggcatcgtggaggtggaccccatgctgacccccgaggagagacacctgaacaagatgcagaaccacggctacgagaaccccacctacaagtacctggagcagatgcagatctag

SEQ ID NO: 72729 - DNA, 1977 bp, synthetic construct
  misc_feature 1..1977: note = Description of Artificial Sequence: Synthetic coding sequence
  source 1..1977: mol_type = other DNA
atgtaccccgagctgcagatcaccaacgtgatggaggccaaccagagagtgagcatcgacaactggtgcagaagagacaagaagcagtgcaagagcagattcgtgacccccttcaagtgcctggtgggcgagttcgtgagcgacgtgctgctggtgcccgagaagtgccagttcttccacaaggagagaatggaggtgtgcgagaaccaccagcactggcacaccgtggtgaaggaggcctgcctgacccagggcatgaccctgtacagctacggcatgctgctgccctgcggcgtggaccagttccacggcaccgagtacgtgtgctgcccccagaccaagatcatcggcagcgtgagcaaggaggaggaggaggaggacgaggaggaggaggaggaggaggacgaggaggaggactacgacgtgtacaagagcgagttccccaccgaggccgacctggaggacttcaccgaggccgccgtggacgaggacgacgaggacgaggaggagggcgaggaggtggtggaggacagagactactactacgacaccttcaagggcgacgactacaacgaggagaaccccaccgagcccggcagcgacggcaccatgagcgacaaggagatcacccacgacgtgaaggccgtgtgcagccaggaggccatgaccggcccctgcagagccgtgatgcccagatggtacttcgacctgagcaagggcaagtgcgtgagattcatctacggcggctgcggcggcaacagaaacaacttcgagagcgaggactactgcatggccgtgtgcaaggccatgatcccccccacccccctgcccaccaacgacgtggacgtgtacttcgagaccagcgccgacgacaacgagcacgccagattccagaaggccaaggagcagctggagatcagacacagaaacagaatggacagagtgaagaaggagtgggaggaggccgagctgcaggccaagaacctgcccaaggccgagagacagaccctgatccagcacttccaggccatggtgaaggccctggagaaggaggccgccagcgagaagcagcagctggtggagacccacctggccagagtggaggccatgctgaacgacagaagaagaatggccctggagaactacctggccgccctgcagagcgacccccccagaccccacagaatcctgcaggccctgagaagatacgtgagagccgagaacaaggacagactgcacaccatcagacactaccagcacgtgctggccgtggaccccgagaaggccgcccagatgaagagccaggtgatgacccacctgcacgtgatcgaggagagaagaaaccagagcctgagcctgctgtacaaggtgccctacgtggcccaggagatccaggaggagatcgacgagctgctgcaggagcagagagccgacatggaccagttcaccgccagcatcagcgagacccccgtggacgtgagagtgagcagcgaggagagcgaggagatcccccccttccaccccttccaccccttccccgccctgcccgagaacgagggcagcggcgtgggcgagcaggacggcggcctgatcggcgccgaggagaaggtgatcaacagcaagaacaaggtggacgagaacatggtgatcgacgagaccctggacgtgaaggagatgatcttcaacgccgagagagtgggcggcctggaggaggagagagagagcgtgggccccctgagagaggacttcagcctgagcagcagcgccctgatcggcctgctggtgatcgccgtggccatcgccaccgtgatcgtgatcagcctggtgatgctgagaaagagacagtacggcaccatcagccacggcatcgtggaggtggaccccatgctgacccccgaggagagacacctgaacaagatgcagaaccacggctacgagaaccccacctacaagtacctggagcagatgcagatctag

SEQ ID NO: 72730 - DNA, 1758 bp, synthetic construct
  misc_feature 1..1758: note = Description of Artificial Sequence: Synthetic coding sequence
  source 1..1758: mol_type = other DNA
atggccgccgtggagctggagtggatccccgagaccctgtacaacaccgccatcagcgccgtggtggacaactacatcagaagcagaagagacatcagaagcctgcccgagaacatccagttcgacgtgtactacaagctgtaccagcagggcagactgtgccagctgggcagcgagttctgcgagctggaggtgttcgccaaggtgctgagagccctggacaagagacacctgctgcaccactgcttccaggccctgatggaccacggcgtgaaggtggccagcgtgctggcctacagcttcagcagaagatgcagctacatcgccgagagcgacgccgccgtgaaggagaaggccatccaggtgggcttcgtgctgggcggcttcctgagcgacgccggctggtacagcgacgccgagaaggtgttcctgagctgcctgcagctgtgcaccctgcacgacgagatgctgcactggttcagagccgtggagtgctgcgtgagactgctgcacgtgagaaacggcaactgcaagtaccacctgggcgaggagaccttcaagctggcccagacctacatggacaagctgagcaagcacggccagcaggccaacaaggccgccctgtacggcgagctgtgcgccctgctgttcgccaagagccactacgacgaggcctacaagtggtgcatcgaggccatgaaggagatcaccgccggcctgcccgtgaaggtggtggtggacgtgctgagacaggccagcaaggcctgcgtggtgaagagagagttcaagaaggccgagcagctgatcaagcacgccgtgtacctggccagagaccacttcggcagcaagcaccccaagtacagcgacaccctgctggactacggcttctacctgctgaacgtggacaacatctgccagagcgtggccatctaccaggccgccctggacatcagacagagcgtgttcggcggcaagaacatccacgtggccaccgcccacgaggacctggcctacagcagctacgtgcaccagtacagcagcggcaagttcgacaacgccctgttccacgccgagagagccatcggcatcatcacccacatcctgcccgaggaccacctgctgctggccagcagcaagagagtgaaggccctgatcctggaggagatcgccatcgactgccacaacaaggagaccgagcagagactgctgcaggaggcccacgacctgcacctgagcagcctgcagctggccaagaaggccttcggcgagttcaacgtgcagaccgccaagcactacggcaacctgggcagactgtaccagagcatgagaaagttcaaggaggccgaggagatgcacatcaaggccatccagatcaaggagcagctgctgggccaggaggactacgaggtggccctgagcgtgggccacctggccagcctgtacaactacgacatgaaccagtacgagaacgccgagaagctgtacctgagaagcatcgccatcggcaagaagctgttcggcgagggctacagcggcctggagtacgactacagaggcctgatcaagctgtacaacagcatcggcaactacgagaaggtgttcgagtaccacaacgtgctgagcaactggaacagactgagagacagacagtacagcgtgaccgacgccctggaggacgtgagcaccagcccccagagcaccgaggaggtggtgcagagcttcctgatcagccagaacgtggagggccccagctgctag

SEQ ID NO: 72731 - DNA, 4974 bp, synthetic construct
  misc_feature 1..4974: note = Description of Artificial Sequence: Synthetic coding sequence
  source 1..4974: mol_type = other DNA
atggacagcaagaagagaagcagcaccgaggccgagggcagcaaggagagaggcctggtgcacatctggcaggccggcagcttccccatcacccccgagagactgcccggctggggcggcaagaccgtgctgcaggccgccctgggcgtgaagcacggcgtgctgctgaccgaggacggcgaggtgtacagcttcggcaccctgccctggagaagcggccccgtggagatctgccccagcagccccatcctggagaacgccctggtgggccagtacgtgatcaccgtggccaccggcagcttccacagcggcgccgtgaccgacaacggcgtggcctacatgtggggcgagaacagcgccggccagtgcgccgtggccaaccagcagtacgtgcccgagcccaaccccgtgagcatcgccgacagcgaggccagccccctgctggccgtgagaatcctgcagctggcctgcggcgaggagcacaccctggccctgagcatcagcagagagatctgggcctggggcaccggctgccagctgggcctgatcaccaccgccttccccgtgaccaagccccagaaggtggagcacctggccggcagagtggtgctgcaggtggcctgcggcgccttccacagcctggccctggtgcagtgcctgcccagccaggacctgaagcccgtgcccgagagatgcaaccagtgcagccagctgctgatcaccatgaccgacaaggaggaccacgtgatcatcagcgacagccactgctgccccctgggcgtgaccctgaccgagagccaggccgagaaccacgccagcaccgccctgagccccagcaccgagaccctggacagacaggaggaggtgttcgagaacaccctggtggccaacgaccagagcgtggccaccgagctgaacgccgtgagcgcccagatcaccagcagcgacgccatgagcagccagcagaacgtgatgggcaccaccgagatcagcagcgccagaaacatccccagctaccccgacacccaggccgtgaacgagtacctgagaaagctgagcgaccacagcgtgagagaggacagcgagcacggcgagaagcccgtgcccagccagcccctgctggaggaggccatccccaacctgcacagcccccccaccaccagcaccagcgccctgaacagcctggtggtgagctgcgccagcgccgtgggcgtgagagtggccgccacctacgaggccggcgccctgagcctgaagaaggtgatgaacttctacagcaccaccccctgcgagaccggcgcccaggccggcagcagcgccatcggccccgagggcctgaaggacagcagagaggagcaggtgaagcaggagagcatgcagggcaagaagagcagcagcctggtggacatcagagaggaggagaccgagggcggcagcagaagactgagcctgcccggcctgctgagccaggtgagccccagactgctgagaaaggccgccagagtgaagaccagaaccgtggtgctgacccccacctacagcggcgaggccgacgccctgctgcccagcctgagaaccgaggtgtggacctggggcaagggcaaggagggccagctgggccacggcgacgtgctgcccagactgcagcccctgtgcgtgaagtgcctggacggcaaggaggtgatccacctggaggccggcggctaccacagcctggccctgaccgccaagagccaggtgtacagctggggcagcaacaccttcggccagctgggccacagcgacttccccaccaccgtgcccagactggccaagatcagcagcgagaacggcgtgtggagcatcgccgccggcagagactacagcctgttcctggtggacaccgaggacttccagcccggcctgtactacagcggcagacaggaccccaccgagggcgacaacctgcccgagaaccacagcggcagcaagacccccgtgctgctgagctgcagcaagctgggctacatcagcagagtgaccgccggcaaggacagctacctggccctggtggacaagaacatcatgggctacatcgccagcctgcacgagctggccaccaccgagagaagattctacagcaagctgagcgacatcaagagccagatcctgagacccctgctgagcctggagaacctgggcaccaccaccaccgtgcagctgctgcaggaggtggccagcagattcagcaagctgtgctacctgatcggccagcacggcgccagcctgagcagcttcctgcacggcgtgaaggaggccagaagcctggtgatcctgaagcacagcagcctgttcctggacagctacaccgagtactgcaccagcatcaccaacttcctggtgatgggcggcttccagctgctggccaagcccgccatcgacttcctgaacaagaaccaggagctgctgcaggacctgagcgaggtgaacgacgagaacacccagctgatggagatcctgaacaccctgttcttcctgcccatcagaagactgcacaactacgccaaggtgctgctgaagctggccacctgcttcgaggtggccagccccgagtaccagaagctgcaggacagcagcagctgctacgagtgcctggccctgcacctgggcagaaagagaaaggaggccgagtacaccctgggcttctggaagaccttccccggcaagatgaccgacagcctgagaaagcccgagagaagactgctgtgcgagagcagcaacagagccctgagcctgcagcacgccggcagattcagcgtgaactggttcatcctgttcaacgacgccctggtgcacgcccagttcagcacccaccacgtgttccccctggccaccctgtgggccgagcccctgagcgaggaggccggcggcgtgaacggcctgaagatcaccacccccgaggagcagttcaccctgatcagcagcaccccccaggagaagaccaagtggctgagagccatcagccaggccgtggaccaggccctgagaggcatgagcgacctgcccccctacggcagcggcagcagcgtgcagagacaggagccccccatcagcagaagcgccaagtacaccttctacaaggaccccagactgaaggacgccacctacgacggcagatggctgagcggcaagccccacggcagaggcgtgctgaagtggcccgacggcaagatgtacagcggcatgttcagaaacggcctggaggacggctacggcgagtacagaatccccaacaaggccatgaacaaggaggaccactacgtgggccactggaaggagggcaagatgtgcggccagggcgtgtacagctacgccagcggcgaggtgttcgagggctgcttccaggacaacatgagacacggccacggcctgctgagaagcggcaagctgaccagcagcagccccagcatgttcatcggccagtgggtgatggacaagaaggccggctacggcgtgttcgacgacatcaccagaggcgagaagtacatgggcatgtggcaggacgacgtgtgccagggcaacggcgtggtggtgacccagttcggcctgtactacgagggcaacttccacctgaacaagatgatgggcaacggcgtgctgctgagcgaggacgacaccatctacgagggcgagttcagcgacgactggaccctgagcggcaagggcaccctgaccatgcccaacggcgactacatcgagggctacttcagcggcgagtggggcagcggcatcaagatcaccggcacctacttcaagcccagcctgtacgagagcgacaaggacagacccaaggtgttcagaaagctgggcaacctggccgtgcccgccgacgagaagtggaaggccgtgttcgacgagtgctggagacagctgggctgcgagggccccggccagggcgaggtgtggaaggcctgggacaacatcgccgtggccctgaccaccagcagaagacagcacagagacagccccgagatcctgagcagaagccagacccagaccctggagagcctggagttcatcccccagcacgtgggcgccttcagcgtggagaagtacgacgacatcagaaagtacctgatcaaggcctgcgacacccccctgcaccccctgggcagactggtggagaccctggtggccgtgtacagaatgacctacgtgggcgtgggcgccaacagaagactgctgcaggaggccgtgaaggagatcaagagctacctgaagagaatcttccagctggtgagattcctgttccccgagctgcccgaggagggcagcaccatccccctgagcgcccccctgcccaccgagagaaagagcttctgcaccggcaagagcgacagcagaagcgagagccccgagcccggctacgtggtgaccagcagcggcctgctgctgcccgtgctgctgcccagactgtacccccccctgttcatgctgtacgccctggacaacgacagagaggaggacatctactgggagtgcgtgctgagactgaacaagcagcccgacatcgccctgctgggcttcctgggcgtgcagagaaagttctggcccgccaccctgagcatcctgggcgagagcaagaaggtgctgcccaccaccaaggacgcctgcttcgccagcgccgtggagtgcctgcagcagatcagcaccaccttcacccccagcgacaagctgaaggtgatccagcagaccttcgaggagatcagccagagcgtgctggccagcctgcacgaggacttcctgtggagcatggacgacctgttccccgtgttcctgtacgtggtgctgagagccagaatcagaaacctgggcagcgaggtgcacctgatcgaggacctgatggacccctacctgcagcacggcgagcagggcatcatgttcaccaccctgaaggcctgctactaccagatccagagagagaagctgaactag

SEQ ID NO: 72732 - DNA, 420 bp, synthetic construct
  misc_feature 1..420: note = Description of Artificial Sequence: Synthetic coding sequence
  source 1..420: mol_type = other DNA
atggacagcaagaagagaagcagcaccgaggccgagggcagcaaggagagaggcctggtgcacatctggcaggccggcagcttccccatcacccccgagagactgcccggctggggcggcaagaccgtgctgcaggccgccctgggcgtgaagcacggcgtgctgctgaccgaggacggcgaggtgtacagcttcggcaccctgccctggagaagcggccccgtggagatctgccccagcagccccatcctggagaacgccctggtgggccagtacgtgatcaccgtggccaccggcagcttccacagcggcgccgtgaccgacaacggcgtggcctacatgtggggcgagaacagcgccggccagtgcgccgtggccaaccagcagtacgtgcccgagcccaaccccgtgagcatctag

SEQ ID NO: 72733 - DNA, 321 bp, synthetic construct
  misc_feature 1..321: note = Description of Artificial Sequence: Synthetic coding sequence
  source 1..321: mol_type = other DNA
atggacagcaagaagagaagcagcaccgaggccgagggcagcaaggagagaggcctggtgcacatctggcaggccggcagcttccccatcacccccgagagactgcccggctggggcggcaagaccgtgctgcaggccgccctgggcgtgaagcacggcgtgctgctgaccgaggacggcgaggtgtacagcttcggcaccctgccctggagaagcggccccgtggagatctgccccagcagccccatcctggagaacgccctggtgggccagtacgtgatcaccgtggccaccggcagcttccacagcggcgccgtgtag

SEQ ID NO: 72734 - DNA, 1758 bp, synthetic construct
  misc_feature 1..1758: note = Description of Artificial Sequence: Synthetic coding sequence
  source 1..1758: mol_type = other DNA
tgactggccctggtggacaagaacatcatgggctacatcgccagcctgcacgagctggccaccaccgagagaagattctacagcaagctgagcgacatcaagagccagatcctgagacccctgctgagcctggagaacctgggcaccaccaccaccgtgcagctgctgcaggaggtggccagcagattcagcaagctgtgctacctgatcggccagcacggcgccagcctgagcagcttcctgcacggcgtgaaggaggccagaagcctggtgatcctgaagcacagcagcctgttcctggacagctacaccgagtactgcaccagcatcaccaacttcctggtgatgggcggcttccagctgctggccaagcccgccatcgacttcctgaacaagaaccaggagctgctgcaggacctgagcgaggtgaacgacgagaacacccagctgatggagatcctgaacaccctgttcttcctgcccatcagaagactgcacaactacgccaaggtgctgctgaagctggccacctgcttcgaggtggccagccccgagtaccagaagctgcaggacagcagcagctgctacgagtgcctggccctgcacctgggcagaaagagaaaggaggccgagtacaccctgggcttctggaagaccttccccggcaagatgaccgacagcctgagaaagcccgagagaagactgctgtgcgagagcagcaacagagccctgagcctgcagcacgccggcagattcagcgtgaactggttcatcctgttcaacgacgccctggtgcacgcccagttcagcacccaccacgtgttccccctggccaccctgtgggccgagcccctgagcgaggaggccggcggcgtgaacggcctgaagatcaccacccccgaggagcagttcaccctgatcagcagcaccccccaggagaagaccaagtggctgagagccatcagccaggccgtggaccaggccctgagaggcatgagcgacctgcccccctacggcagcggcagcagcgtgcagagacaggagccccccatcagcagaagcgccaagtacaccttctacaaggaccccagactgaaggacgccacctacgacggcagatggctgagcggcaagccccacggcagaggcgtgctgaagtggcccgacggcaagatgtacagcggcatgttcagaaacggcctggaggacggctacggcgagtacagaatccccaacaaggccatgaacaaggaggaccactacgtgggccactggaaggagggcaagatgtgcggccagggcgtgtacagctacgccagcggcgaggtgttcgagggctgcttccaggacaacatgagacacggccacggcctgctgagaagcggcaagctgaccagcagcagccccagcatgttcatcggccagtgggtgatggacaagaaggccggctacggcgtgttcgacgacatcaccagaggcgagaagtacatgggcatgtggcaggacgacgtgtgccagggcaacggcgtggtggtgacccagttcggcctgtactacgagggcaacttccacctgaacaagatgatgggcaacggcgtgctgctgagcgaggacgacaccatctacgagggcgagttcagcgacgactggaccctgagcggcaaggacaacagcggcctgatcgagcaggtgggcaagtgcagcctgctgccctacttcctgaaggtgtgcgaggccctggtgctgttcctgctgtag

SEQ ID NO: 72735 - DNA, 1731 bp, synthetic construct
  misc_feature 1..1731: note = Description of Artificial Sequence: Synthetic coding sequence
  source 1..1731: mol_type = other DNA
atgggctacatcgccagcctgcacgagctggccaccaccgagagaagattctacagcaagctgagcgacatcaagagccagatcctgagacccctgctgagcctggagaacctgggcaccaccaccaccgtgcagctgctgcaggaggtggccagcagattcagcaagctgtgctacctgatcggccagcacggcgccagcctgagcagcttcctgcacggcgtgaaggaggccagaagcctggtgatcctgaagcacagcagcctgttcctggacagctacaccgagtactgcaccagcatcaccaacttcctggtgatgggcggcttccagctgctggccaagcccgccatcgacttcctgaacaagaaccaggagctgctgcaggacctgagcgaggtgaacgacgagaacacccagctgatggagatcctgaacaccctgttcttcctgcccatcagaagactgcacaactacgccaaggtgctgctgaagctggccacctgcttcgaggtggccagccccgagtaccagaagctgcaggacagcagcagctgctacgagtgcctggccctgcacctgggcagaaagagaaaggaggccgagtacaccctgggcttctggaagaccttccccggcaagatgaccgacagcctgagaaagcccgagagaagactgctgtgcgagagcagcaacagagccctgagcctgcagcacgccggcagattcagcgtgaactggttcatcctgttcaacgacgccctggtgcacgcccagttcagcacccaccacgtgttccccctggccaccctgtgggccgagcccctgagcgaggaggccggcggcgtgaacggcctgaagatcaccacccccgaggagcagttcaccctgatcagcagcaccccccaggagaagaccaagtggctgagagccatcagccaggccgtggaccaggccctgagaggcatgagcgacctgcccccctacggcagcggcagcagcgtgcagagacaggagccccccatcagcagaagcgccaagtacaccttctacaaggaccccagactgaaggacgccacctacgacggcagatggctgagcggcaagccccacggcagaggcgtgctgaagtggcccgacggcaagatgtacagcggcatgttcagaaacggcctggaggacggctacggcgagtacagaatccccaacaaggccatgaacaaggaggaccactacgtgggccactggaaggagggcaagatgtgcggccagggcgtgtacagctacgccagcggcgaggtgttcgagggctgcttccaggacaacatgagacacggccacggcctgctgagaagcggcaagctgaccagcagcagccccagcatgttcatcggccagtgggtgatggacaagaaggccggctacggcgtgttcgacgacatcaccagaggcgagaagtacatgggcatgtggcaggacgacgtgtgccagggcaacggcgtggtggtgacccagttcggcctgtactacgagggcaacttccacctgaacaagatgatgggcaacggcgtgctgctgagcgaggacgacaccatctacgagggcgagttcagcgacgactggaccctgagcggcaaggacaacagcggcctgatcgagcaggtgggcaagtgcagcctgctgccctacttcctgaaggtgtgcgaggccctggtgctgttcctgctgtag

SEQ ID NO: 72736 - DNA, 1191 bp, synthetic construct
  misc_feature 1..1191: note = Description of Artificial Sequence: Synthetic coding sequence
  source 1..1191: mol_type = other DNA
atggacagcaagaagagaagcagcaccgaggccgagggcagcaaggagagaggcctggtgcacatctggcaggccggcagcttccccatcacccccgagagactgcccggctggggcggcaagaccgtgctgcaggccgccctgggcgtgaagcacggcgtgctgctgaccgaggacggcgaggtgtacagcttcggcaccctgccctggagaagcggccccgtggagatctgccccagcagccccatcctggagaacgccctggtgggccagtacgtgatcaccgtggccaccggcagcttccacagcggcgccgtgaccgacaacggcgtggcctacatgtggggcgagaacagcgccggccagtgcgccgtggccaaccagcagtacgtgcccgagcccaaccccgtgagcatcgccgacagcgaggccagccccctgctggccgtgagaatcctgcagctggcctgcggcgaggagcacaccctggccctgagcatcagcagagagatctgggcctggggcaccggctgccagctgggcctgatcaccaccgccttccccgtgaccaagccccagaaggtggagcacctggccggcagagtggtgctgcaggtggcctgcggcgccttccacagcctggccctggtgcagtgcctgcccagccaggacctgaagcccgtgcccgagagatgcaaccagtgcagccagctgctgatcaccatgaccgacaaggaggaccacgtgatcatcagcgacagccactgctgccccctgggcgtgaccctgaccgagagccaggccgagaaccacgccagcaccgccctgagccccagcaccgagaccctggacagacaggaggaggtgttcgagaacaccctggtggccaacgaccagagcgtggccaccgagctgaacgccgtgagcgcccagatcaccagcagcgacgccatgagcagccagcagaacgtgatgggcaccaccgagatcagcagcgccagaaacatccccagctaccccgacacccaggccgtgaacgagtacctgagaaagctgagcgaccacagcgtgagagaggacagcgagcacggcgagaagcccgtgcccagccaggtgcccgcccagttctacaagatcaaggtgtgcctggagctgaactgcatgggcttcagcctggagaccctgaagtag

SEQ ID NO: 72737 - DNA, 2178 bp, synthetic construct
  misc_feature 1..2178: note = Description of Artificial Sequence: Synthetic coding sequence
  source 1..2178: mol_type = other DNA
atggagcagagcaacgacagcctgagagtgaaccacaacgacggcgaggagagcaagaccagcgcccaggtgttcgagcacctgatctgcatggacagcagagacagcagcttcggccagaacgacagccccaccgtgctgcccatcaccaccagagaggccaacaacagcctgatcagccagaacatccccggccccctgacccagacccagaccctgagcgccgagcagttccacctggtggaccagaacggccaggccatccagtacgagctgcagagcctgggcgagagcaacgcccagatgatgatcgtggccagccccaccgagaacggccaggtgctgagagtgatcccccccacccagaccggcatggcccaggtgatcatcccccagggccagctggtggacgtgaacagccccagagacgtgcccgaggagaagcccagcaacagaaacctgcccaccgtgagagtggacaccctggccgacaacaccagcaactacatcctgcacccccagaccagcttccccctgcccaagaagagcgtgaccggcatgctggaggagcccctgctgggccccctgcagcccctgagcagcaacacccccatctgggcctgcagactgagaagctgcgagaagatcggcgacagctacagaggctactgcgtgagcgagaccgagctggagagcgtgctgaccttccacaagcagcagacccagagcgtgtggggcaccagacagagccccagccccgccaagcccgccaccagactgatgtggaagagccagtacgtgccctacgacggcatccccttcgtgaacgccggcagcagagccgtggtgatggagtgccagtacggccccagaagaaagggcttccagctgaagaaggtgagcgagcaggagagcagaagctgccagctgtacaaggccacctgccccgccagaatctacatcaagaaggtgcagaagttccccgagtacagagtgcccaccgaccccaagatcgacaagaagatcatcagaatggagcaggagaaggccttcaacatgctgaagaagaacctggtggacgccggcggcgtgctgagatggtacgtgcagctgcccacccagcaggcccaccagtaccacgagctggagaccccctgcctgaccctgagccccagccccttccccgtgagcagcctggaggaggaggagaccgccgtgagagacgagaactgcgccctgcccagcagactgcacccccaggtggcccacaagatccaggagctggtgagccagggcatcgagcaggtgtacgccgtgagaaagcagctgagaaagttcgtggagagagagctgttcaagcccgacgaggtgcccgagagacacaacctgagcttcttccccaccgtgaacgacatcaagaaccacatccacgaggtgcagaagagcctgagaaacggcgacaccgtgtacaacagcgagatcatccccgccaccctgcagtggaccaccgacagcggcaacatcctgaaggagaccatgaccgtgaccttcgccgagggcaacagccccggcgagagcatcaccaccaaggtggagaccaaccagaccagaggcagcctgagccccgagcccacccacctgctgagcagcctgagcagcttccagcccaagatcttcacccagctgcagggcctgcagctgcagcccagatacaccagccccgacgagagccccgccgtggtgagcgtgaacaaccagcccagcagcagccccagcggcctgctggacaccatcggcagcgccgtgatgaacaacaacagcctgctgctgggccagagccacagcctgcagagagacacctgcctgacccagaacaacagcaccgccagcaccatgggcaacctgcccgagcccgaccagaacctggtggccatggacgagctggtggaggtgggcgacgtggaggacaccggcaacctggagggcaccgtgcacagaatcctgctgggcgacgtgcagaccatccccatccagatcatcgacaaccacagcgccctgatcgaggagaaccccgagagcaccatcagcgtgagccaggtgaagcaggagcccaaggagcccgccctgagcatggaggccaagaagaccgtggactacaagaagctgagcgccacctag

SEQ ID NO: 72738 - DNA, 2178 bp, synthetic construct; identical to SEQ ID NO: 72737
  misc_feature 1..2178: note = Description of Artificial Sequence: Synthetic coding sequence
  source 1..2178: mol_type = other DNA

SEQ ID NO: 72739 - DNA, 165 bp, synthetic construct
  misc_feature 1..165: note = Description of Artificial Sequence: Synthetic coding sequence
  source 1..165: mol_type = other DNA
atggagcagagcaacgacagcctgagagtgaaccacaacgacggcgaggagagcaagaccagcgcccaggtgttcgagcacctgatctgcatggacagcagagacagcagcttcggccagaacgacagccccaccgtgctgcccatcaccaccagagaggcctag

SEQ ID NO: 72740 - DNA, 396 bp, synthetic construct
  misc_feature 1..396: note = Description of Artificial Sequence: Synthetic coding sequence
  source 1..396: mol_type = other DNA
atggagcagagcaacgacagcctgagagtgaaccacaacgacggcgaggagagcaagaccagcgcccaggtgttcgagcacctgatctgcatggacagcagagacagcagcttcggccagaacgacagccccaccgtgctgcccatcaccaccagagaggccaacaacagcctgatcagccagaacatccccggccccctgacccagacccagaccctgagcgccgagcagttccacctggtggaccagaacggccaggccatccagtacgagctgcagagcctgggcgagagcaacgcccagatgatgatcgtggccagccccaccgagaacggccaggtgctgagagtgatcccccccacccagaccggcatggcccaggtgatcatcccctag

SEQ ID NO: 72741 - DNA, 66 bp, synthetic construct
  misc_feature 1..66: note = Description of Artificial Sequence: Synthetic coding sequence
  source 1..66: mol_type = other DNA
atggagcagagcaacgacagcctgagagtgaaccacaacgacggcgaggagagcaagaccagctag

SEQ ID NO: 72742 - DNA, 222 bp, synthetic construct
  misc_feature 1..222: note = Description of Artificial Sequence: Synthetic coding sequence
  source 1..222: mol_type = other DNA
atggagcagagcaacgacagcctgagagtgaaccacaacgacggcgaggagagcaagaccagcgcccaggtgttcgagcacctgatctgcatggacagcagagacagcagcttcggccagaacgacagccccaccgtgctgcccatcaccaccagagaggccaacaacagcctgatcagccagaacatccccggccccctgacccagacccagaccctgtag

SEQ ID NO: 72743 - DNA, 2178 bp, synthetic construct; identical to SEQ ID NO: 72737
  misc_feature 1..2178: note = Description of Artificial Sequence: Synthetic coding sequence
  source 1..2178: mol_type = other DNA

SEQ ID NO: 72744 - DNA, 222 bp, synthetic construct; identical to SEQ ID NO: 72742
  misc_feature 1..222: note = Description of Artificial Sequence: Synthetic coding sequence
  source 1..222: mol_type = other DNA

SEQ ID NO: 72745 - DNA, 288 bp, synthetic construct
  misc_feature 1..288: note = Description of Artificial Sequence: Synthetic coding sequence
  source 1..288: mol_type = other DNA
atggagcagagcaacgacagcctgagagtgaaccacaacgacggcgaggagagcaagaccagcgcccaggtgttcgagcacctgatctgcatggacagcagagacagcagcttcggccagaacgacagccccaccgtgctgcccatcaccaccagagaggccaacaacagcctgatcagccagaacatccccggccccctgacccagacccagaccctgagcgccgagcagttccacctggtggaccagaacggccaggccatccagtacgagctgcagagcctgtag

SEQ ID NO: 72746 - DNA, 624 bp, synthetic construct
  misc_feature 1..624: note = Description of Artificial Sequence: Synthetic coding sequence
  source 1..624: mol_type = other DNA
atgctggaggcctggaacctgaacctgagccactacctgaagcacctgatctgcatggacagcagagacagcagcttcggccagaacgacagccccaccgtgctgcccatcaccaccagagaggccaacaacagcctgatcagccagaacatccccggccccctgacccagacccagaccctgagcgccgagcagttccacctggtggaccagaacggccaggccatccagtacgagctgcagagcctgggcgagagcaacgcccagatgatgatcgtggccagccccaccgagaacggccaggtgctgagagtgatcccccccacccagaccggcatggcccaggtgatcatcccccagggccagctggtggacgtgaacagccccagagacgtgcccgaggagaagcccagcaacagaaacctgcccaccgtgagagtggacaccctggccgacaacaccagcaactacatcctgcacccccagaccagcttccccctgcccaagaagagcgtgaccggcatgctggaggagcccctgctgggccccctgcagcccctgagcagcaacacccccatctgggcctgcagactgagaagctgcgagggcgtggagctgtggtag

SEQ ID NO: 72747 - DNA, 1914 bp, synthetic construct
  misc_feature 1..1914: note = Description of Artificial Sequence: Synthetic coding sequence
  source 1..1914: mol_type = other DNA
atgctggaggcctggaacctgaacctgagccactacctgaagatgatcgtggccagccccaccgagaacggccaggtgctgagagtgatcccccccacccagaccggcatggcccaggtgatcatcccccagggccagctggtggacgtgaacagccccagagacgtgcccgaggagaagcccagcaacagaaacctgcccaccgtgagagtggacaccctggccgacaacaccagcaactacatcctgcacccccagaccagcttccccctgcccaagaagagcgtgaccggcatgctggaggagcccctgctgggccccctgcagcccctgagcagcaacacccccatctgggcctgcagactgagaagctgcgagaagatcggcgacagctacagaggctactgcgtgagcgagaccgagctggagagcgtgctgaccttccacaagcagcagacccagagcgtgtggggcaccagacagagccccagccccgccaagcccgccaccagactgatgtggaagagccagtacgtgccctacgacggcatccccttcgtgaacgccggcagcagagccgtggtgatggagtgccagtacggccccagaagaaagggcttccagctgaagaaggtgagcgagcaggagagcagaagctgccagctgtacaaggccacctgccccgccagaatctacatcaagaaggtgcagaagttccccgagtacagagtgcccaccgaccccaagatcgacaagaagatcatcagaatggagcaggagaaggccttcaacatgctgaagaagaacctggtggacgccggcggcgtgctgagatggtacgtgcagctgcccacccagcaggcccaccagtaccacgagctggagaccccctgcctgaccctgagccccagccccttccccgtgagcagcctggaggaggaggagaccgccgtgagagacgagaactgcgccctgcccagcagactgcacccccaggtggcccacaagatccaggagctggtgagccagggcatcgagcaggtgtacgccgtgagaaagcagctgagaaagttcgtggagagagagctgttcaagcccgacgaggtgcccgagagacacaacctgagcttcttccccaccgtgaacgacatcaagaaccacatccacgaggtgcagaagagcctgagaaacggcgacaccgtgtacaacagcgagatcatccccgccaccctgcagtggaccaccgacagcggcaacatcctgaaggagaccatgaccgtgaccttcgccgagggcaacagccccggcgagagcatcaccaccaaggtggagaccaaccagaccagaggcagcctgagccccgagcccacccacctgctgagcagcctgagcagcttccagcccaagatcttcacccagctgcagggcctgcagctgcagcccagatacaccagccccgacgagagccccgccgtggtgagcgtgaacaaccagcccagcagcagccccagcggcctgctggacaccatcggcagcgccgtgatgaacaacaacagcctgctgctgggccagagccacagcctgcagagagacacctgcctgacccagaacaacagcaccgccagcaccatgggcaacctgcccgagcccgaccagaacctggtggccatggacgagctggtggaggtgggcgacgtggaggacaccggcaacctggagggcaccgtgcacagaatcctgctgggcgacgtgcagaccatccccatccagatcatcgacaaccacagcgccctgatcgaggagaaccccgagagcaccatcagcgtgagccaggtgaagcaggagcccaaggagcccgccctgagcatggaggccaagaagaccgtggactacaagaagctgagcgccacctag

SEQ ID NO: 72748 - DNA, 1950 bp, synthetic construct
  misc_feature 1..1950: note = Description of Artificial Sequence: Synthetic coding sequence
  source 1..1950: mol_type = other DNA
atggagcagagcaacgacagcctgagagtgaaccacaacgacggcgaggagagcaagaccagcgcccaggtgttcgagatgatcgtggccagccccaccgagaacggccaggtgctgagagtgatcccccccacccagaccggcatggcccaggtgatcatcccccagggccagctggtggacgtgaacagccccagagacgtgcccgaggagaagcccagcaacagaaacctgcccaccgtgagagtggacaccctggccgacaacaccagcaactacatcctgcacccccagaccagcttccccctgcccaagaagagcgtgaccggcatgctggaggagcccctgctgggccccctgcagcccctgagcagcaacacccccatctgggcctgcagactgagaagctgcgagaagatcggcgacagctacagaggctactgcgtgagcgagaccgagctggagagcgtgctgaccttccacaagcagcagacccagagcgtgtggggcaccagacagagccccagccccgccaagcccgccaccagactgatgtggaagagccagtacgtgccctacgacggcatccccttcgtgaacgccggcagcagagccgtggtgatggagtgccagtacggccccagaagaaagggcttccagctgaagaaggtgagcgagcaggagagcagaagctgccagctgtacaaggccacctgccccgccagaatctacatcaagaaggtgcagaagttccccgagtacagagtgcccaccgaccccaagatcgacaagaagatcatcagaatggagcaggagaaggccttcaacatgctgaagaagaacctggtggacgccggcggcgtgctgagatggtacgtgcagctgcccacccagcaggcccaccagtaccacgagctggagaccccctgcctgaccctgagccccagccccttccccgtgagcagcctggaggaggaggagaccgccgtgagagacgagaactgcgccctgcccagcagactgcacccccaggtggcccacaagatccaggagctggtgagccagggcatcgagcaggtgtacgccgtgagaaagcagctgagaaagttcgtggagagagagctgttcaagcccgacgaggtgcccgagagacacaacctgagcttcttccccaccgtgaacgacatcaagaaccacatccacgaggtgcagaagagcctgagaaacggcgacaccgtgtacaacagcgagatcatccccgccaccctgcagtggaccaccgacagcggcaacatcctgaaggagaccatgaccgtgaccttcgccgagggcaacagccccggcgagagcatcaccaccaaggtggagaccaaccagaccagaggcagcctgagccccgagcccacccacctgctgagcagcctgagcagcttccagcccaagatcttcacccagctgcagggcctgcagctgcagcccagatacaccagccccgacgagagccccgccgtggtgagcgtgaacaaccagcccagcagcagccccagcggcctgctggacaccatcggcagcgccgtgatgaacaacaacagcctgctgctgggccagagccacagcctgcagagagacacctgcctgacccagaacaacagcaccgccagcaccatgggcaacctgcccgagcccgaccagaacctggtggccatggacgagctggtggaggtgggcgacgtggaggacaccggcaacctggagggcaccgtgcacagaatcctgctgggcgacgtgcagaccatccccatccagatcatcgacaaccacagcgccctgatcgaggagaaccccgagagcaccatcagcgtgagccaggtgaagcaggagcccaaggagcccgccctgagcatggaggccaagaagaccgtggactacaagaagctgagcgccacctag

SEQ ID NO: 72749 - DNA, 558 bp, synthetic construct
  misc_feature 1..558: note = Description of Artificial Sequence: Synthetic coding sequence
  source 1..558: mol_type = other DNA
atgaccacccccaacaagaccccccccggcgccgaccccaagcagctggagagaaccggcaccgtgagagagatcggcagccaggccgtgtggagcctgagcagctgcaagcccggcttcggcgtggaccagctgagagacgacaacctggagacctactggcagagcgacggcagccagccccacctggtgaacatccagttcagaagaaagaccaccgtgaagaccctgtgcatctacgccgactacaagagcgacgagagctacacccccagcaagatcagcgtgagagtgggcaacaacttccacaacctgcaggagatcagacagctggagctggtggagcccagcggctggatccacgtgcccctgaccgacaaccacaagaagcccaccagaaccttcatgatccagatcgccgtgctggccaaccaccagaacggcagagacacccacatgagacagatcaagatctacacccccgtggaggagagcagcatcggcaagttccccagatgcaccaccatcgacttcatgatgtacagaagcatcagatag

SEQ ID NO: 72750 - DNA, 558 bp, synthetic construct; identical to SEQ ID NO: 72749
  misc_feature 1..558: note = Description of Artificial Sequence: Synthetic coding sequence
  source 1..558: mol_type = other DNA

SEQ ID NO: 72751 - DNA, 207 bp, synthetic construct
  misc_feature 1..207: note = Description of Artificial Sequence: Synthetic coding sequence
  source 1..207: mol_type = other DNA
atgaccacccccaacaagaccccccccggcgccgaccccaagcagctggagagaaccggcaccgtgagagagatcggcagccaggccgtgtggagcctgagcagctgcaagcccggcttcggcgtggaccagctgagagacgacaacctggagacctactggcagagcgacggcagccagccccacctggtgaacatccagttctag

SEQ ID NO: 72752 - DNA, 330 bp, synthetic construct
  misc_feature 1..330: note = Description of Artificial Sequence: Synthetic coding sequence
  source 1..330: mol_type = other DNA
atgaccacccccaacaagaccccccccggcgccgaccccaagcagctggagagaaccggcaccgtgagagagatcggcagccaggccgtgtggagcctgagcagctgcaagcccggcttcggcgtggaccagctgagagacgacaacctggagacctactggcagagcgacggcagccagccccacctggtgaacatccagttcagaagaaagaccaccgtgaagaccctgtgcatctacgccgactacaagagcgacgagagctacacccccagcaagatcagcgtgagagtgggcaacaacttccacaacctgcaggagatcagatag

SEQ ID NO: 72753 - DNA, 558 bp, synthetic construct; identical to SEQ ID NO: 72749
  misc_feature 1..558: note = Description of Artificial Sequence: Synthetic coding sequence
  source 1..558: mol_type = other DNA

SEQ ID NO: 72754 - DNA, 477 bp, synthetic construct
  misc_feature 1..477: note = Description of Artificial Sequence: Synthetic coding sequence
  source 1..477: mol_type = other DNA
atgaccacccccaacaagaccccccccggcgccgaccccaagcagctggagagaaccggcaccgtgagagagatcggcagccaggccgtgtggagcctgagcagctgcaagcccggcttcggcgtggaccagctgagagacgacaacctggagacctactggcagagcgacggcagccagccccacctggtgaacatccagttcagaagaaagaccaccgtgaagaccctgtgcatctacgccgactacaagagcgacgagagctacacccccagcaagatcagcgtgagagtgggcaacaacttccacaacctgcaggagatcagacagctggagctggtggagcccagcggctggatccacgtgcccctgaccgacaaccacaagaagcccaccagaaccttcatgatccagatcgccgtgctggccaaccaccagaacggcagagacacccacatgagacagatcaagatctag

SEQ ID NO: 72755 - DNA, 477 bp, synthetic construct; identical to SEQ ID NO: 72754
  misc_feature 1..477: note = Description of Artificial Sequence: Synthetic coding sequence
  source 1..477: mol_type = other DNA

SEQ ID NO: 72756 - DNA, 333 bp, synthetic construct
  misc_feature 1..333: note = Description of Artificial Sequence: Synthetic coding sequence
  source 1..333: mol_type = other DNA
atggccgccagcagcagcagcagcagcgccggcggcgtgagcggcagcagcgtgaccggcagcggcttcagcgtgagcgacctggccccccccagaaaggccctgttcacctaccccaagggcgccggcgagatgctggaggacggcagcgagagattcctgtgcgagagcgtgttcagctaccaggtggccagcaccctgaagcaggtgaagcacgaccagcaggtggccagaatggagaagctggccggcctggtggaggagctggaggccgacgagtggagattcaagcccatcgagcagctgctgggcttcacccccagcagcggctag

SEQ ID NO: 72757 - DNA, 2427 bp, synthetic construct
  misc_feature 1..2427: note = Description of Artificial Sequence: Synthetic coding sequence
  source 1..2427: mol_type = other DNA
atgctgagattccccacctgcttccccagcttcagagtggtgggcgagaagcagctgccccaggagatcatcttcctggtgtggagccccaagagagacctgatcgccctggccaacaccgccggcgaggtgctgctgcacagactggccagcttccacagagtgtggagcttcccccccaacgagaacaccggcaaggaggtgacctgcctggcctggagacccgacggcaagctgctggccttcgccctggccgacaccaagaagatcgtgctgtgcgacgtggagaagcccgagagcctgcacagcttcagcgtggaggcccccgtgagctgcatgcactggatggaggtgaccgtggagagcagcgtgctgaccagcttctacaacgccgaggacgagagcaacctgctgctgcccaagctgcccaccctgcccaagaactacagcaacaccagcaagatcttcagcgaggagaacagcgacgagatcatcaagctgctgggcgacgtgagactgaacatcctggtgctgggcggcagcagcggcttcatcgagctgtacgcctacggcatgttcaagatcgccagagtgaccggcatcgccggcacctgcctggccctgtgcctgagcagcgacctgaagagcctgagcgtggtgaccgaggtgagcaccaacggcgccagcgaggtgagctacttccagctggagaccaacctgctgtacagcttcctgcccgaggtgaccagaatggccagaaagttcacccacatcagcgccctgctgcagtacatcaacctgagcctgacctgcatgtgcgaggcctgggaggagatcctgatgcagatggacagcagactgaccaagttcgtgcaggagaagaacaccaccaccagcgtgcaggacgagttcatgcacctgctgctgtggggcaaggccagcgccgagctgcagaccctgctgatgaaccagctgaccgtgaagggcctgaagaagctgggccagagcatcgagagcagctacagcagcatccagaagctggtgatcagccacctgcagagcggcagcgagagcctgctgtaccacctgagcgagctgaagggcatggccagctggaagcagaagtacgagcccctgggcctggacgccgccggcatcgaggaggccatcaccgccgtgggcagcttcatcctgaaggccaacgagctgctgcaggtgatcgacagcagcatgaagaacttcaaggccttcttcagatggctgtacgtggccatgctgagaatgaccgaggaccacgtgctgcccgagctgaacaagatgacccagaaggacatcaccttcgtggccgagttcctgaccgagcacttcaacgaggcccccgacctgtacaacagaaagggcaagtacttcaacgtggagagagtgggccagtacctgaaggacgaggacgacgacctggtgagcccccccaacaccgagggcaaccagtggtacgacttcctgcagaacagcagccacctgaaggagagccccctgctgttcccctactaccccagaaagagcctgcacttcgtgaagagaagaatggagaacatcatcgaccagtgcctgcagaagcccgccgacgtgatcggcaagagcatgaaccaggccatctgcatccccctgtacagagacaccagaagcgaggacagcaccagaagactgttcaagttccccttcctgtggaacaacaagaccagcaacctgcactacctgctgttcaccatcctggaggacagcctgtacaagatgtgcatcctgagaagacacaccgacatcagccagagcgtgagcaacggcctgatcgccatcaagttcggcagcttcacctacgccaccaccgagaaggtgagaagaagcatctacagctgcctggacgcccagttctacgacgacgagaccgtgaccgtggtgctgaaggacaccgtgggcagagagggcagagacagactgctggtgcagctgcccctgagcctggtgtacaacagcgaggacagcgccgagtaccagttcaccggcacctacagcaccagactggacgagcagtgcagcgccatccccaccagaaccatgcacttcgagaagcactggagactgctggagagcatgaaggcccagtacgtggccggcaacggcttcagaaaggtgagctgcgtgctgagcagcaacctgagacacgtgagagtgttcgagatggacatcgacgacgagtgggagctggacgagagcagcgacgaggaggaggaggccagcaacaagcccgtgaagatcaaggaggaggtgctgagcgagagcgaggccgagaaccagcaggccggcgccgccgccctggcccccgagatcgtgatcaaggtggagaagctggaccccgagctggacagctag

SEQ ID NO: 72758 - DNA, 489 bp, synthetic construct
  misc_feature 1..489: note = Description of Artificial Sequence: Synthetic coding sequence
  source 1..489: mol_type = other DNA
atgctgagattccccacctgcttccccagcttcagagtggtgggcgagaagcagctgccccaggagatcatcttcctggtgtggagccccaagagagacctgatcgccctggccaacaccgccggcgaggtgctgctgcacagactggccagcttccacagagtgtggagcttcccccccaacgagaacaccggcaaggaggtgacctgcctggcctggagacccgacggcaagctgctggccttcgccctggccgacaccaagaagatcgtgctgtgcgacgtggagaagcccgagagcctgcacagcttcagcgtggaggcccccgtgagctgcatgcactggatggaggtgaccgtggagagcagcgtgctgaccagcttctacaacgccgaggacgagagcaacctgctgctgcccaagctgcccaccctgcccaagaactacagcaacaccagcaagatcttcagcgaggagaacagcgactag

SEQ ID NO: 72759 - DNA, 2430 bp, synthetic construct
  misc_feature 1..2430: note = Description of Artificial Sequence: Synthetic coding sequence
  source 1..2430: mol_type = other DNA
atgctgagattccccacctgcttccccagcttcagagtggtgggcgagaagcagctgccccaggagatcatcttcctggtgtggagccccaagagagacctgatcgccctggccaacaccgccggcgaggtgctgctgcacagactggccagcttccacagagtgtggagcttcccccccaacgagaacaccggcaaggaggtgacctgcctggcctggagacccgacggcaagctgctggccttcgccctggccgacaccaagaagatcgtgctgtgcgacgtggagaagcccgagagcctgcacagcttcagcgtggaggcccccgtgagctgcatgcactggatggaggtgaccgtggagagcagcgtgctgaccagcttctacaacgccgaggacgagagcaacctgctgctgcccaagctgcccaccctgcccaagaactacagcaacaccagcaagatcttcagcgaggagaacagcgacgagatcatcaagctgctgggcgacgtgagactgaacatcctggtgctgggcggcagcagcggcttcatcgagctgtacgcctacggcatgttcaagatcgccagagtgaccggcatcgccggcacctgcctggccctgtgcctgagcagcgacctgaagagcctgagcgtggtgaccgaggtgagcaccaacggcgccagcgaggtgagctacttccagctggagaccaacctgctgtacagcttcctgcccgaggtgaccagaatggccagaaagttcacccacatcagcgccctgctgcagtacatcaacctgagcctgacctgcatgtgcgaggcctgggaggagatcctgatgcagatggacagcagactgaccaagttcgtgcaggagaagaacaccaccaccagcgtgcaggacgagttcatgcacctgctgctgtggggcaaggccagcgccgagctgcagaccctgctgatgaaccagctgaccgtgaagggcctgaagaagctgggccagagcatcgagagcagctacagcagcatccagaagctggtgatcagccacctgcagagcggcagcgagagcctgctgtaccacctgagcgagctgaagggcatggccagctggaagcagaagtacgagcccctgggcctggacgccgccggcatcgaggaggccatcaccgccgtgggcagcttcatcctgaaggccaacgagctgctgcaggtgatcgacagcagcatgaagaacttcaaggccttcttcagatggctgtacgtggccatgctgagaatgaccgaggaccacgtgctgcccgagctgaacaaggtgatgacccagaaggacatcaccttcgtggccgagttcctgaccgagcacttcaacgaggcccccgacctgtacaacagaaagggcaagtacttcaacgtggagagagtgggccagtacctgaaggacgaggacgacgacctggtgagcccccccaacaccgagggcaaccagtggtacgacttcctgcagaacagcagccacctgaaggagagccccctgctgttcccctactaccccagaaagagcctgcacttcgtgaagagaagaatggagaacatcatcgaccagtgcctgcagaagcccgccgacgtgatcggcaagagcatgaaccaggccatctgcatccccctgtacagagacaccagaagcgaggacagcaccagaagactgttcaagttccccttcctgtggaacaacaagaccagcaacctgcactacctgctgttcaccatcctggaggacagcctgtacaagatgtgcatcctgagaagacacaccgacatcagccagagcgtgagcaacggcctgatcgccatcaagttcggcagcttcacctacgccaccaccgagaaggtgagaagaagcatctacagctgcctggacgcccagttctacgacgacgagaccgtgaccgtggtgctgaaggacaccgtgggcagagagggcagagacagactgctggtgcagctgcccctgagcctggtgtacaacagcgaggacagcgccgagtaccagttcaccggcacctacagcaccagactggacgagcagtgcagcgccatccccaccagaaccatgcacttcgagaagcactggagactgctggagagcatgaaggcccagtacgtggccggcaacggcttcagaaaggtgagctgcgtgctgagcagcaacctgagacacgtgagagtgttcgagatggacatcgacgacgagtgggagctggacgagagcagcgacgaggaggaggaggccagcaacaagcccgtgaagatcaaggaggaggtgctgagcgagagcgaggccgagaaccagcaggccggcgccgccgccctggcccccgagatcgtgatcaaggtggagaagctggaccccgagctggacagctag

SEQ ID NO: 72760 - DNA, 2268 bp, synthetic construct
  misc_feature 1..2268: note = Description of Artificial Sequence: Synthetic coding sequence
  source 1..2268: mol_type = other DNA
atggccagcgtgcacgagagcctgtacttcaaccccatgatgaccaacggcgtggtgcacgccaacgtgttcggcatcaaggactgggtgaccccctacaagatcgccgtgctggtgctgctgaacgagatgagcagaaccggcgagggcgccgtgagcctgatggagagaagaagactgaaccagctgctgctgcccctgctgcagggccccgacatcaccctgagcaagctgtacaagctgatcgaggagagctgcccccagctggccaacagcgtgcagatcagaatcaagctgatggccgagggcgagctgaaggacatggagcagttcttcgacgacctgagcgacagcttcagcggcaccgagcccgaggtgcacaagaccagcgtggtgggcctgttcctgagacacatgatcctggcctacagcaagctgagcttcagccaggtgttcaagctgtacaccgccctgcagcagtacttccagaacggcgagaagaagaccgtggaggacgccgacatggagctgaccagcagagacgagggcgagagaaagatggagaaggaggagctggacgtgagcgtgagagaggaggaggtgagctgcagcggccccctgagccagaagcaggccgagttcttcctgagccagcaggccagcctgctgaagaacgacgagaccaaggccctgacccccgccagcctgcagaaggagctgaacaacctgctgaagttcaaccccgacttcgccgaggcccactacctgagctacctgaacaacctgagagtgcaggacgtgttcagcagcacccacagcctgctgcactacttcgacagactgatcctgaccggcgccgagagcaagagcaacggcgaggagggctacggcagaagcctgagatacgccgccctgaacctggccgccctgcactgcagattcggccactaccagcaggccgagctggccctgcaggaggccatcagaatcgcccaggagagcaacgaccacgtgtgcctgcagcactgcctgagctggctgtacgtgctgggccagaagagaagcgacagctacgtgctgctggagcacagcgtgaagaaggccgtgcacttcggcctgccctacctggccagcctgggcatccagagcctggtgcagcagagagccttcgccggcaagaccgccaacaagctgatggacgccctgaaggacagcgacctgctgcactggaagcacagcctgagcgagctgatcgacatcagcatcgcccagaagaccgccatctggagactgtacggcagaagcaccatggccctgcagcaggcccagatgctgctgagcatgaacagcctggaggccgtgaacgccggcgtgcagcagaacaacaccgagagcttcgccgtggccctgtgccacctggccgagctgcacgccgagcagggctgcttcgccgccgccagcgaggtgctgaagcacctgaaggagagattcccccccaacagccagcacgcccagctgtggatgctgtgcgaccagaagatccagttcgacagagccatgaacgacggcaagtaccacctggccgacagcctggtgaccggcatcaccgccctgaacagcatcgagggcgtgtacagaaaggccgtggtgctgcaggcccagaaccagatgagcgaggcccacaagctgctgcagaagctgctggtgcactgccagaagctgaagaacaccgagatggtgatcagcgtgctgctgagcgtggccgagctgtactggagaagcagcagccccaccatcgccctgcccatgctgctgcaggccctggccctgagcaaggagtacagactgcagtacctggccagcgagaccgtgctgaacctggccttcgcccagctgatcctgggcatccccgagcaggccctgagcctgctgcacatggccatcgagcccatcctggccgacggcgccatcctggacaagggcagagccatgttcctggtggccaagtgccaggtggccagcgccgccagctacgaccagcccaagaaggccgaggccctggaggccgccatcgagaacctgaacgaggccaagaactacttcgccaaggtggactgcaaggagagaatcagagacgtggtgtacttccaggccagactgtaccacaccctgggcaagacccaggagagaaacagatgcgccatgctgttcagacagctgcaccaggagctgcccagccacggcgtgcccctgatcaaccacctgtag

SEQ ID NO: 72761 - DNA, 1932 bp, synthetic construct
  misc_feature 1..1932: note = Description of Artificial Sequence: Synthetic coding sequence
  source 1..1932: mol_type = other DNA
atggccgagggcgagctgaaggacatggagcagttcttcgacgacctgagcgacagcttcagcggcaccgagcccgaggtgcacaagaccagcgtggtgggcctgttcctgagacacatgatcctggcctacagcaagctgagcttcagccaggtgttcaagctgtacaccgccctgcagcagtacttccagaacggcgagaagaagaccgtggaggacgccgacatggagctgaccagcagagacgagggcgagagaaagatggagaaggaggagctggacgtgagcgtgagagaggaggaggtgagctgcagcggccccctgagccagaagcaggccgagttcttcctgagccagcaggccagcctgctgaagaacgacgagaccaaggccctgacccccgccagcctgcagaaggagctgaacaacctgctgaagttcaaccccgacttcgccgaggcccactacctgagctacctgaacaacctgagagtgcaggacgtgttcagcagcacccacagcctgctgcactacttcgacagactgatcctgaccggcgccgagagcaagagcaacggcgaggagggctacggcagaagcctgagatacgccgccctgaacctggccgccctgcactgcagattcggccactaccagcaggccgagctggccctgcaggaggccatcagaatcgcccaggagagcaacgaccacgtgtgcctgcagcactgcctgagctggctgtacgtgctgggccagaagagaagcgacagctacgtgctgctggagcacagcgtgaagaaggccgtgcacttcggcctgcccagagccttcgccggcaagaccgccaacaagctgatggacgccctgaaggacagcgacctgctgcactggaagcacagcctgagcgagctgatcgacatcagcatcgcccagaagaccgccatctggagactgtacggcagaagcaccatggccctgcagcaggcccagatgctgctgagcatgaacagcctggaggccgtgaacgccggcgtgcagcagaacaacaccgagagcttcgccgtggccctgtgccacctggccgagctgcacgccgagcagggctgcttcgccgccgccagcgaggtgctgaagcacctgaaggagagattcccccccaacagccagcacgcccagctgtggatgctgtgcgaccagaagatccagttcgacagagccatgaacgacggcaagtaccacctggccgacagcctggtgaccggcatcaccgccctgaacagcatcgagggcgtgtacagaaaggccgtggtgctgcaggcccagaaccagatgagcgaggcccacaagctgctgcagaagctgctggtgcactgccagaagctgaagaacaccgagatggtgatcagcgtgctgctgagcgtggccgagctgtactggagaagcagcagccccaccatcgccctgcccatgctgctgcaggccctggccctgagcaaggagtacagactgcagtacctggccagcgagaccgtgctgaacctggccttcgcccagctgatcctgggcatccccgagcaggccctgagcctgctgcacatggccatcgagcccatcctggccgacggcgccatcctggacaagggcagagccatgttcctggtggccaagtgccaggtggccagcgccgccagctacgaccagcccaagaaggccgaggccctggaggccgccatcgagaacctgaacgaggccaagaactacttcgccaaggtggactgcaaggagagaatcagagacgtggtgtacttccaggccagactgtaccacaccctgggcaagacccaggagagaaacagatgcgccatgctgttcagacagctgcaccaggagctgcccagccacggcgtgcccctgatcaaccacctgtag

SEQ ID NO: 72762 - DNA, 1932 bp, synthetic construct; identical to SEQ ID NO: 72761
  misc_feature 1..1932: note = Description of Artificial Sequence: Synthetic coding sequence
  source 1..1932: mol_type = other DNA

SEQ ID NO: 72763 - DNA, 660 bp, synthetic construct
  misc_feature 1..660: note = Description of Artificial Sequence: Synthetic coding sequence
  source 1..660: mol_type = other DNA
atgctgagcccctgcctgagcagctacttcgtgggcctgttcctgagacacatgatcctggcctacagcaagctgagcttcagccaggtgttcaagctgtacaccgccctgcagcagtacttccagaacggcgagaagaagaccgtggaggacgccgacatggagctgaccagcagagacgagggcgagagaaagatggagaaggaggagctggacgtgagcgtgagagaggaggaggtgagctgcagcggccccctgagccagaagcaggccgagttcttcctgagccagcaggccagcctgctgaagaacgacgagaccaaggccctgacccccgccagcctgcagaaggagctgaacaacctgctgaagttcaaccccgacttcgccgaggcccactacctgagctacctgaacaacctgagagtgcaggacgtgttcagcagcacccacagcctgctgcactacttcgacagactgatcctgaccggcgccgagagcaagagcaacggcgaggagggctacggcagaagcctgagatacgccgccctgaacctggccgccctgcactgcagattcggccactacaccagccccccctgggagtacagccccctgttcaacagagagctgctgctgggcagaagacagaccagctag

SEQ ID NO: 72764 - DNA, 135 bp, synthetic construct
  misc_feature 1..135: note = Description of Artificial Sequence: Synthetic coding sequence
  source 1..135: mol_type = other DNA
atggccgagggcgagctgaaggacatggagcagttcttcgacgacctgagcgacagcttcagcggcaccgagcccgaggtgcacaagaccagcgtggtgggcctgttcctgagacacatgatcctggcctactag

SEQ ID NO: 72765 - DNA, 1074 bp, synthetic construct
  misc_feature 1..1074: note = Description of Artificial Sequence: Synthetic coding sequence
  source 1..1074: mol_type = other DNA
atggacgccctgaaggacagcgacctgctgcactggaagcacagcctgagcgagctgatcgacatcagcatcgcccagaagaccgccatctggagactgtacggcagaagcaccatggccctgcagcaggcccagatgctgctgagcatgaacagcctggaggccgtgaacgccggcgtgcagcagaacaacaccgagagcttcgccgtggccctgtgccacctggccgagctgcacgccgagcagggctgcttcgccgccgccagcgaggtgctgaagcacctgaaggagagattcccccccaacagccagcacgcccagctgtggatgctgtgcgaccagaagatccagttcgacagagccatgaacgacggcaagtaccacctggccgacagcctggtgaccggcatcaccgccctgaacagcatcgagggcgtgtacagaaaggccgtggtgctgcaggcccagaaccagatgagcgaggcccacaagctgctgcagaagctgctggtgcactgccagaagctgaagaacaccgagatggtgatcagcgtgctgctgagcgtggccgagctgtactggagaagcagcagccccaccatcgccctgcccatgctgctgcaggccctggccctgagcaaggagtacagactgcagtacctggccagcgagaccgtgctgaacctggccttcgcccagctgatcctgggcatccccgagcaggccctgagcctgctgcacatggccatcgagcccatcctggccgacggcgccatcctggacaagggcagagccatgttcctggtggccaagtgccaggtggccagcgccgccagctacgaccagcccaagaaggccgaggccctggaggccgccatcgagaacctgaacgaggccaagaactacttcgccaaggtggactgcaaggagagaatcagagacgtggtgtacttccaggccagactgtaccacaccctgggcaagacccaggagagaaacagatgcgccatgctgttcagacagctgcaccaggagctgcccagccacggcgtgcccctgatcaaccacctgtag

SEQ ID NO: 72766 - DNA, 2229 bp, synthetic construct
  misc_feature 1..2229: note = Description of Artificial Sequence: Synthetic coding sequence
  source 1..2229: mol_type = other DNA
atggccagcgtgcacgagagcctgtacttcaaccccatgatgaccaacggcgtggtgcacgccaacgtgttcggcatcaaggactgggtgaccccctacaagatcgccgtgctggtgctgctgaacgagatgagcagaaccggcgagggcgccgtgagcctgatggagagaagaagactgaaccagctgctgctgcccctgctgcagggccccgacatcaccctgagcaagctgtacaagctgatcgaggagagctgcccccagctggccaacagcgtgcagatcagaatcaagctgatggccgagggcgagctgaaggacatggagcagttcttcgacgacctgagcgacagcttcagcggcaccgagcccgaggtgcacaagaccagcgtggtgggcctgttcctgagacacatgatcctggcctacagcaagctgagcttcagccaggtgttcaagctgtacaccgccctgcagcagtacttccagaacggcgagaagaagaccgtggaggacgccgacatggagctgaccagcagagacgagggcgagagaaagatggagaaggaggagctggacgtgagcgtgagagaggaggaggtgagctgcagcggccccctgagccagaagcaggccgagttcttcctgagccagcaggccagcctgctgaagaacgacgagaccaaggccctgacccccgccagcctgcagaaggagctgaacaacctgctgaagttcaaccccgacttcgccgaggcccactacctgagctacctgaacaacctgagagtgcaggacgtgttcagcagcacccacagcctgctgcactacttcgacagactgatcctgaccggcgccgagagcaagagcaacggcgaggagggctacggcagaagcctgagatacgccgccctgaacctggccgccctgcactgcagattcggccactaccagcaggccgagctggccctgcaggaggccatcagaatcgcccaggagagcaacgaccacgtgtgcctgcagcactgcctgagctggctgtacgtgctgggccagaagagaagcgacagctacgtgctgctggagcacagcgtgaagaaggccgtgcacttcggcctgcccagagccttcgccggcaagaccgccaacaagctgatggacgccctgaaggacagcgacctgctgcactggaagcacagcctgagcgagctgatcgacatcagcatcgcccagaagaccgccatctggagactgtacggcagaagcaccatggccctgcagcaggcccagatgctgctgagcatgaacagcctggaggccgtgaacgccggcgtgcagcagaacaacaccgagagcttcgccgtggccctgtgccacctggccgagctgcacgccgagcagggctgcttcgccgccgccagcgaggtgctgaagcacctgaaggagagattcccccccaacagccagcacgcccagctgtggatgctgtgcgaccagaagatccagttcgacagagccatgaacgacggcaagtaccacctggccgacagcctggtgaccggcatcaccgccctgaacagcatcgagggcgtgtacagaaaggccgtggtgctgcaggcccagaaccagatgagcgaggcccacaagctgctgcagaagctgctggtgcactgccagaagctgaagaacaccgagatggtgatcagcgtgctgctgagcgtggccgagctgtactggagaagcagcagccccaccatcgccctgcccatgctgctgcaggccctggccctgagcaaggagtacagactgcagtacctggccagcgagaccgtgctgaacctggccttcgcccagctgatcctgggcatccccgagcaggccctgagcctgctgcacatggccatcgagcccatcctggccgacggcgccatcctggacaagggcagagccatgttcctggtggccaagtgccaggtggccagcgccgccagctacgaccagcccaagaaggccgaggccctggaggccgccatcgagaacctgaacgaggccaagaactacttcgccaaggtggactgcaaggagagaatcagagacgtggtgtacttccaggccagactgtaccacaccctgggcaagacccaggagagaaacagatgcgccatgctgttcagacagctgcaccaggagctgcccagccacggcgtgcccctgatcaaccacctgtag

SEQ ID NO: 72767 - DNA, 1425 bp, synthetic construct
  misc_feature 1..1425: note = Description of Artificial Sequence: Synthetic coding sequence
  source 1..1425: mol_type = other DNA
atggagctgcccagcggccccggccccgagagactgttcgacagccacagactgcccggcgactgcttcctgctgctggtgctgctgctgtacgcccccgtgggcttctgcctgctggtgctgagactgttcctgggcatccacgtgttcctggtgagctgcgccctgcccgacagcgtgctgagaagattcgtggtgagaaccatgtgcgccgtgctgggcctggtggccagacaggaggacagcggcctgagagaccacagcgtgagagtgctgatcagcaaccacgtgacccccttcgaccacaacatcgtgaacctgctgaccacctgcagcaccgtgagcgagagcgaggccgagagcgccaccggcagattccccggcgcccagctgaaggcccccctgagccccctggccttccccatggaggacaccgagctgcccctgacccccatcctgtaccccacctgccagttcttcttcatcttcctgaacatcttcctgctggccttcagcagccccggcagccagcccctgctgaacagcccccccagcttcgtgtgctggagcagaggcttcatggagatgaacggcagaggcgagctggtggagagcctgaagagattctgcgccagcaccagactgccccccacccccctgctgctgttccccgaggaggaggccaccaacggcagagagggcctgctgagattcagcagctggcccttcagcatccaggacgtggtgcagcccctgaccctgcaggtgcagagacccctggtgagcgtgaccgtgagcgacgccagctgggtgagcgagctgctgtggagcctgttcgtgcccttcaccgtgtaccaggtgagatggctgagacccgtgcacagacagctgggcgaggccaacgaggagttcgccctgagagtgcagcagctggtggccaaggagctgggccagaccggcaccagactgacccccgccgacaaggccgagcacatgaagagacagagacaccccagactgagaccccagagcgcccagagcagcttcccccccagccccggccccagccccgacgtgcagctggccaccctggcccagagagtgaaggaggtgctgccccacgtgcccctgggcgtgatccagagagacctggccaagaccggctgcgtggacctgaccatcaccaacctgctggagggcgccgtggccttcatgcccgaggacatcaccaagggcacccagagcctgcccaccgccagcgccagcaagttccccagcagcggccccgtgaccccccagcccaccgccctgaccttcgccaagagcagctgggccagacaggagagcctgcaggagagaaagcaggccctgtacgagtacgccagaagaagattcaccgagagaagagcccaggaggccgactag

SEQ ID NO: 72768 - DNA, 1233 bp, synthetic construct
  misc_feature 1..1233: note = Description of Artificial Sequence: Synthetic coding sequence
  source 1..1233: mol_type = other DNA
atggagctgcccagcggccccggccccgagagactgttcgacagccacagactgcccggcgactgcttcctgctgctggtgctgctgctgtacgcccccgtgggcttctgcctgctggtgctgagactgttcctgggcatccacgtgttcctggtgagctgcgccctgcccgacagcgtgctgagaagattcgtggtgagaaccatgtgcgccgtgctgggcctggtggccagacaggaggacagcggcctgagagaccacagcgtgagagtgctgatcagcaaccacgtgacccccttcgaccacaacatcgtgaacctgctgaccacctgcagcacccccctgctgaacagcccccccagcttcgtgtgctggagcagaggcttcatggagatgaacggcagaggcgagctggtggagagcctgaagagattctgcgccagcaccagactgccccccacccccctgctgctgttccccgaggaggaggccaccaacggcagagagggcctgctgagattcagcagctggcccttcagcatccaggacgtggtgcagcccctgaccctgcaggtgcagagacccctggtgagcgtgaccgtgagcgacgccagctgggtgagcgagctgctgtggagcctgttcgtgcccttcaccgtgtaccaggtgagatggctgagacccgtgcacagacagctgggcgaggccaacgaggagttcgccctgagagtgcagcagctggtggccaaggagctgggccagaccggcaccagactgacccccgccgacaaggccgagcacatgaagagacagagacaccccagactgagaccccagagcgcccagagcagcttcccccccagccccggccccagccccgacgtgcagctggccaccctggcccagagagtgaaggaggtgctgccccacgtgcccctgggcgtgatccagagagacctggccaagaccggctgcgtggacctgaccatcaccaacctgctggagggcgccgtggccttcatgcccgaggacatcaccaagggcacccagagcctgcccaccgccagcgccagcaagttccccagcagcggccccgtgaccccccagcccaccgccctgaccttcgccaagagcagctgggccagacaggagagcctgcaggagagaaagcaggccctgtacgagtacgccagaagaagattcaccgagagaagagcccaggaggccgactag

SEQ ID NO: 72769 - DNA, 1128 bp, synthetic construct
  misc_feature 1..1128: note = Description of Artificial Sequence: Synthetic coding sequence
  source 1..1128: mol_type = other DNA
atggagctgcccagcggccccggccccgagagactgttcgacagccacagactgcccggcgactgcttcctgctgctggtgctgctgctgtacgcccccgtgggcttctgcctgctggtgctgagactgttcctgggcatccacgtgttcctggtgagctgcgccctgcccgacagcgtgctgagaagattcagattcgtggtgagaaccatgtgcgccgtgctgggcctggtggccagacaggaggacagcggcctgagagaccacagcgtgagagtgctgatcagcaaccacgtgacccccttcgaccacaacatcgtgaacctgctgaccacctgcagcacccccctgctgaacagcccccccagcttcgtgtgctggagcagaggcttcatggagatgaacggcagaggcgagctggtggagagcctgaagagattctgcgccagcaccagactgccccccacccccctgctgctgttccccgaggaggaggccaccaacggcagagagggcctgctgagattcagcagctggcccttcagcatccaggacgtggtgcagcccctgaccctgcaggtgcagagacccctggtgagcgtgaccgtgagcgacgccagctgggtgagcgagctgctgtggagcctgttcgtgcccttcaccgtgtaccaggtgagatggctgagacccgtgcacagacagctgggcgaggccaacgaggagttcgccctgagagtgcagcagctggtggccaaggagctgggccagaccggcaccagactgacccccgccgacaaggccgagcacatgaagagacagagacaccccagactgagaccccagagcgcccagagcagcttcccccccagccccggccccagccccgacgtgcagctggccaccctggcccagagagtgaaggaggtgctgccccacgtgcccctgggcgtgatccagagagacctggccaagaccggctgcgtggacctgaccatcaccaacctgctggagggcgccgtggccttcatgcccgaggacatcaccaagggcacccagagcctgcccaccgccagcgccagcaaggccttcgacgcctgcctgatgatgatgaccccccaggccctgtag

SEQ ID NO: 72770 - DNA, 2145 bp, synthetic construct
  misc_feature 1..2145: note = Description of Artificial Sequence: Synthetic coding sequence
  source 1..2145: mol_type = other DNA
atggccagcgaggcccccagcccccccagaagcccccccccccccaccagccccgagcccgagctggcccagctgagaagaaaggtggagaagctggagagagagctgagaagctgcaagagacaggtgagagagatcgagaagctgctgcaccacaccgagagactgtaccagaacgccgagagcaacaaccaggagctgagaacccaggtggaggagctgagcaagatcctgcagagaggcagaaacgaggacaacaagaagagcgacgtggaggtgcagaccgagaaccacgccccctggagcatcagcgactacttctaccagacctactacaacgacgtgagcctgcccaacaaggtgaccgagctgagcgaccagcaggaccaggccatcgagaccagcatcctgaacagcaaggaccacctgcaggtggagaacgacgcctaccccggcaccgacagaaccgagaacgtgaagtacagacaggtggaccacttcgccagcaacagccaggagcccgccagcgccctggccaccgaggacaccagcctggagggcagcagcctggccgagagcctgagagccgccgccgaggccgccgtgagccagaccggcttcagctacgacgagaacaccggcctgtacttcgaccacagcaccggcttctactacgacagcgagaaccagctgtactacgaccccagcaccggcatctactactactgcgacgtggagagcggcagataccagttccacagcagagtggacctgcagccctaccccaccagcagcaccaagcagagcaaggacaagaagctgaagaagaagagaaaggaccccgacagcagcgccaccaacgaggagaaggacctgaacagcgaggaccagaaggccttcagcgtggagcacaccagctgcaacgaggaggagaacttcgccaacatgaagaagaaggccaagatcggcatccaccacaagaacagcccccccaaggtgaccgtgcccaccagcggcaacaccatcgagagccccctgcacgagaacatcagcaacagcaccagcttcaaggacgagaagatcatggagaccgacagcgagcccgaggagggcgagatcaccgacagccagaccgaggacagctacgacgaggccatcaccagcgagggcaacgtgaccgccgaggacagcgaggacgaggacgaggacaagatctggcccccctgcatcagagtgatcgtgatcagaagccccgtgctgcagatcggcagcctgttcatcatcaccgccgtgaaccccgccaccatcggcagagagaaggacatggagcacaccctgagaatccccgaggtgggcgtgagcaagttccacgccgagatctacttcgaccacgacctgcagagctacgtgctggtggaccagggcagccagaacggcaccatcgtgaacggcaagcagatcctgcagcccaagaccaagtgcgacccctacgtgctggagcacggcgacgaggtgaagatcggcgagaccgtgctgagcttccacatccaccccggcagcgacacctgcgacggctgcgagcccggccaggtgagagcccacctgagactggacaagaaggacgagagcttcgtgggccccaccctgagcaaggaggagaaggagctggagagaagaaaggagctgaagaagatcagagtgaagtacggcctgcagaacaccgagtacgaggacgagaagaccctgaagaaccccaagtacaaggacagagccggcaagagaagagagcaggtgggcagcgagggcaccttccagagagacgacgcccccgccagcgtgcacagcgagatcaccgacagcaacaagggcagaaagatgctggagaagatgggctggaagaagggcgagggcctgggcaaggacggcggcggcatgaagacccccatccagctgcagctgagaagaacccacgccggcctgggcaccggcaagcccagcagcttcgaggacgtgcacctgctgcagaacaagaacaagaagaactgggacaaggccagagagagattcaccgagaacttccccgagaccaagccccagaaggacgaccccggcaccatgccctgggtgaagggcaccctggagtag

SEQ ID NO: 72771 - DNA, 531 bp, synthetic construct
  misc_feature 1..531: note = Description of Artificial Sequence: Synthetic coding sequence
  source 1..531: mol_type = other DNA
atggccagcgaggcccccagcccccccagaagcccccccccccccaccagccccgagcccgagctggcccagctgagaagaaaggtggagaagctggagagagagctgagaagctgcaagagacaggtgagagagatcgagaagctgctgcaccacaccgagagactgtaccagaacgccgagagcaacaaccaggagctgagaacccaggtggaggagctgagcaagatcctgcagagaggcagaaacgaggacaacaagaagagcgacgtggaggtgcagaccgagaaccacgccccctggagcatcagcgactacttctaccagacctactacaacgacgtgagcctgcccaacaaggtgaccgagctgagcgaccagcaggaccaggccatcgagaccagcatcctgaacagcaaggaccacctgcaggtggagaacgacgcctaccccggcaccgacagaaccgagaacgtgaagtacagacaggtggaccacttcgccagcaacagccaggtgatcaagtgctag

SEQ ID NO: 72772 - DNA, 2028 bp, synthetic construct
  misc_feature 1..2028: note = Description of Artificial Sequence: Synthetic coding sequence
  source 1..2028: mol_type = other DNA
atgcccagagcccagcccagcagcgccagctaccagcccgtgcccgccgaccccttcgccatcgtgagcagagcccagcagatggtggagatcctgagcgacgagaacagaaacctgagacaggagctggagggctgctacgagaaggtggccagactgcagaaggtggagaccgagatccagagagtgagcgaggcctacgagaacctggtgaagagcagcagcaagagagaggccctggagaaggccatgagaaacaagctggagggcgagatcagaagaatgcacgacttcaacagagacctgagagagagactggagaccgccaacaagcagctggccgagaaggagtacgagggcagcgaggacaccagaaagaccatcagccagctgttcgccaagaacaaggagagccagagagagaaggagaagctggaggccgagctggccaccgccagaagcaccaacgaggaccagagaagacacatcgagatcagagaccaggccctgagcaacgcccaggccaaggtggtgaagctggaggaggagctgaagaagaagcaggtgtacgtggacaaggtggagaagatgcagcaggccctggtgcagctgcaggccgcctgcgagaagagagagcagctggagcacagactgagaaccagactggagagagagctggagagcctgagaatccagcagagacagggcaactgccagcccaccaacgtgagcgagtacaacgccgccgccctgatggagctgctgagagagaaggaggagagaatcctggccctggaggccgacatgaccaagtgggagcagaagtacctggaggagaacgtgatgagacacttcgccctggacgccgccgccaccgtggccgcccagagagacaccaccgtgatcagccacagccccaacaccagctacgacaccgccctggaggccagaatccagaaggaggaggaggagatcctgatggccaacaagagatgcctggacatggagggcagaatcaagaccctgcacgcccagatcatcgagaaggacgccatgatcaaggtgctgcagcagagaagcagaaaggagcccagcaagaccgagcagctgagctgcatgagacccgccaagagcctgatgagcatcagcaacgccggcagcggcctgctgagccacagcagcaccctgaccggcagccccatcatggaggagaagagagacgacaagagctggaagggcagcctgggcatcctgctgggcggcgactacagagccgagtacgtgcccagcacccccagccccgtgccccccagcacccccctgctgagcgcccacagcaagaccggcagcagagactgcagcacccagaccgagagaggcaccgagagcaacaagaccgccgccgtggcccccatcagcgtgcccgcccccgtggccgccgccgccaccgccgccgccatcaccgccaccgccgccaccatcaccaccaccatggtggccgccgcccccgtggccgtggccgccgccgccgcccccgccgccgccgccgcccccagccccgccaccgccgccgccaccgccgccgccgtgagccccgccgccgccggccagatccccgccgccgccagcgtggccagcgccgccgccgtggcccccagcgccgccgccgccgccgccgtgcaggtggcccccgccgcccccgcccccgtgcccgcccccgccctggtgcccgtgcccgcccccgccgccgcccaggccagcgcccccgcccagacccaggcccccaccagcgcccccgccgtggcccccacccccgcccccacccccacccccgccgtggcccaggccgaggtgcccgccagccccgccaccggccccggcccccacagactgagcatccccagcctgacctgcaaccccgacaagaccgacggccccgtgttccacagcaacaccctggagagaaagacccccatccagatcctgggccaggagcccgacgccgagatggtggagtacctgatctag

SEQ ID NO: 72773 - DNA, 1794 bp, synthetic construct
  misc_feature 1..1794: note = Description of Artificial Sequence: Synthetic coding sequence
  source 1..1794: mol_type = other DNA
atggagcacagaggccccccccccgagtaccccttcaagggcatgcccccccagagcgtggtgtgcaagccccaggagcccggccacttctacagcgagcacagactgaaccagcccggcagaaccgagggccagctgatgagataccagcacccccccgagtacggcgccgccagacccgcccaggacatcagcctgcccctgagcgccagaaacagccagccccacagccccaccagcagcctgaccagcggcggcagcctgcccctgctgcagagcccccccagcaccagactgagccccgccagacaccccctggtgcccaaccagggcgaccacagcgcccacctgcccagaccccagcagcacttcctgcccaaccaggcccaccagggcgaccactacagactgagccagcccggcctgagccagcagcagcagcagcagcagcagcagcaccaccaccaccaccaccaccagcagcagcagcagcagcagccccagcagcagcccggcgaggcctacagcgccatgcccagagcccagcccagcagcgccagctaccagcccgtgcccgccgaccccttcgccatcgtgagcagagcccagcagatggtggagatcctgagcgacgagaacagaaacctgagacaggagctggagggctgctacgagaaggtggccagactgcagaaggtggagaccgagatccagagagtgagcgaggcctacgagaacctggtgaagagcagcagcaagagagaggccctggagaaggccatgagaaacaagctggagggcgagatcagaagaatgcacgacttcaacagagacctgagagagagactggagaccgccaacaagcagctggccgagaaggagtacgagggcagcgaggacaccagaaagaccatcagccagctgttcgccaagaacaaggagagccagagagagaaggagaagctggaggccgagctggccaccgccagaagcaccaacgaggaccagagaagacacatcgagatcagagaccaggccctgagcaacgcccaggccaaggtggtgaagctggaggaggagctgaagaagaagcaggtgtacgtggacaaggtggagaagatgcagcaggccctggtgcagctgcaggccgcctgcgagaagagagagcagctggagcacagactgagaaccagactggagagagagctggagagcctgagaatccagcagagacagggcaactgccagcccaccaacgtgagcgagtacaacgccgccgccctgatggagctgctgagagagaaggaggagagaatcctggccctggaggccgacatgaccaagtgggagcagaagtacctggaggagaacgtgatgagacacttcgccctggacgccgccgccaccgtggccgcccagagagacaccaccgtgatcagccacagccccaacaccagctacgacaccgccctggaggccagaatccagaaggaggaggaggagatcctgatggccaacaagagatgcctggacatggagggcagaatcaagaccctgcacgcccagatcatcgagaaggacgccatgatcaaggtgctgcagcagagaagcagaaaggagcccagcaagaccgagcagctgagctgcatgagacccgccaagagcctgatgagcatcagcaacgccggcagcggcctgctgagccacagcagcaccctgaccggcagccccatcatggaggagaagagagacgacaagagctggaagggcagcctgggcaacgacagcaagtag

SEQ ID NO: 72774 - DNA, 3255 bp, synthetic construct
  misc_feature 1..3255: note = Description of Artificial Sequence: Synthetic coding sequence
  source 1..3255: mol_type = other DNA
atgagaaacagcgaggagcagcccagcggcggcaccaccgtgctgcagagactgctgcaggagcagctgagatacggcaaccccagcgagaacagaagcctgctggccatccaccagcaggccaccggcaacggcccccccttccccagcggcagcggcaaccccggcccccagagcgacgtgctgagcccccaggaccaccaccagcagctggtggcccacgccgccagacaggagccccagggccaggagatccagagcgagaacctgatcatggagaagcagctgagccccagaatgcagaacaacgaggagctgcccacctacgaggaggccaaggtgcagagccagtacttcagaggccagcagcacgccagcgtgggcgccgccttctacgtgaccggcgtgaccaaccagaagatgagaaccgagggcagacccagcgtgcagagactgaaccccggcaagatgcaccaggacgagggcctgagagacctgaagcagggccacgtgagaagcctgagcgagagactgatgcagatgagcctggccaccagcggcgtgaaggcccacccccccgtgaccagcgcccccctgagccccccccagcccaacgacctgtacaagaaccccaccagcagcagcgagttctacaaggcccagggccccctgcccaaccagcacagcctgaagggcatggagcacagaggccccccccccgagtaccccttcaagggcatgcccccccagagcgtggtgtgcaagccccaggagcccggccacttctacagcgagcacagactgaaccagcccggcagaaccgagggccagctgatgagataccagcacccccccgagtacggcgccgccagacccgcccaggacatcagcctgcccctgagcgccagaaacagccagccccacagccccaccagcagcctgaccagcggcggcagcctgcccctgctgcagagcccccccagcaccagactgagccccgccagacaccccctggtgcccaaccagggcgaccacagcgcccacctgcccagaccccagcagcacttcctgcccaaccaggcccaccagggcgaccactacagactgagccagcccggcctgagccagcagcagcagcagcagcagcagcagcaccaccaccaccaccaccaccagcagcagcagcagcagcagccccagcagcagcccggcgaggcctacagcgccatgcccagagcccagcccagcagcgccagctaccagcccgtgcccgccgaccccttcgccatcgtgagcagagcccagcagatggtggagatcctgagcgacgagaacagaaacctgagacaggagctggagggctgctacgagaaggtggccagactgcagaaggtggagaccgagatccagagagtgagcgaggcctacgagaacctggtgaagagcagcagcaagagagaggccctggagaaggccatgagaaacaagctggagggcgagatcagaagaatgcacgacttcaacagagacctgagagagagactggagaccgccaacaagcagctggccgagaaggagtacgagggcagcgaggacaccagaaagaccatcagccagctgttcgccaagaacaaggagagccagagagagaaggagaagctggaggccgagctggccaccgccagaagcaccaacgaggaccagagaagacacatcgagatcagagaccaggccctgagcaacgcccaggccaaggtggtgaagctggaggaggagctgaagaagaagcaggtgtacgtggacaaggtggagaagatgcagcaggccctggtgcagctgcaggccgcctgcgagaagagagagcagctggagcacagactgagaaccagactggagagagagctggagagcctgagaatccagcagagacagggcaactgccagcccaccaacgtgagcgagtacaacgccgccgccctgatggagctgctgagagagaaggaggagagaatcctggccctggaggccgacatgaccaagtgggagcagaagtacctggaggagaacgtgatgagacacttcgccctggacgccgccgccaccgtggccgcccagagagacaccaccgtgatcagccacagccccaacaccagctacgacaccgccctggaggccagaatccagaaggaggaggaggagatcctgatggccaacaagagatgcctggacatggagggcagaatcaagaccctgcacgcccagatcatcgagaaggacgccatgatcaaggtgctgcagcagagaagcagaaaggagcccagcaagaccgagcagctgagctgcatgagacccgccaagagcctgatgagcatcagcaacgccggcagcggcctgctgagccacagcagcaccctgaccggcagccccatcatggaggagaagagagacgacaagagctggaagggcagcctgggcatcctgctgggcggcgactacagagccgagtacgtgcccagcacccccagccccgtgccccccagcacccccctgctgagcgcccacagcaagaccggcagcagagactgcagcacccagaccgagagaggcaccgagagcaacaagaccgccgccgtggcccccatcagcgtgcccgcccccgtggccgccgccgccaccgccgccgccatcaccgccaccgccgccaccatcaccaccaccatggtggccgccgcccccgtggccgtggccgccgccgccgcccccgccgccgccgccgcccccagccccgccaccgccgccgccaccgccgccgccgtgagccccgccgccgccggccagatccccgccgccgccagcgtggccagcgccgccgccgtggcccccagcgccgccgccgccgccgccgtgcaggtggcccccgccgcccccgcccccgtgcccgcccccgccctggtgcccgtgcccgcccccgccgccgcccaggccagcgcccccgcccagacccaggcccccaccagcgcccccgccgtggcccccacccccgcccccacccccacccccgccgtggcccaggccgaggtgcccgccagccccgccaccggccccggcccccacagactgagcatccccagcctgacctgcaaccccgacaagaccgacggccccgtgttccacagcaacaccctggagagaaagacccccatccagatcctgggccaggagcccgacgccgagatggtggagtacctgatctag

SEQ ID NO: 72775 - DNA, 2559 bp, synthetic construct
  misc_feature 1..2559: note = Description of Artificial Sequence: Synthetic coding sequence
  source 1..2559: mol_type = other DNA
atggagcacagaggccccccccccgagtaccccttcaagggcatgcccccccagagcgtggtgtgcaagccccaggagcccggccacttctacagcgagcacagactgaaccagcccggcagaaccgagggccagctgatgagataccagcacccccccgagtacggcgccgccagacccgcccaggacatcagcctgcccctgagcgccagaaacagccagccccacagccccaccagcagcctgaccagcggcggcagcctgcccctgctgcagagcccccccagcaccagactgagccccgccagacaccccctggtgcccaaccagggcgaccacagcgcccacctgcccagaccccagcagcacttcctgcccaaccaggcccaccagggcgaccactacagactgagccagcccggcctgagccagcagcagcagcagcagcagcagcagcaccaccaccaccaccaccaccagcagcagcagcagcagcagccccagcagcagcccggcgaggcctacagcgccatgcccagagcccagcccagcagcgccagctaccagcccgtgcccgccgaccccttcgccatcgtgagcagagcccagcagatggtggagatcctgagcgacgagaacagaaacctgagacaggagctggagggctgctacgagaaggtggccagactgcagaaggtggagaccgagatccagagagtgagcgaggcctacgagaacctggtgaagagcagcagcaagagagaggccctggagaaggccatgagaaacaagctggagggcgagatcagaagaatgcacgacttcaacagagacctgagagagagactggagaccgccaacaagcagctggccgagaaggagtacgagggcagcgaggacaccagaaagaccatcagccagctgttcgccaagaacaaggagagccagagagagaaggagaagctggaggccgagctggccaccgccagaagcaccaacgaggaccagagaagacacatcgagatcagagaccaggccctgagcaacgcccaggccaaggtggtgaagctggaggaggagctgaagaagaagcaggtgtacgtggacaaggtggagaagatgcagcaggccctggtgcagctgcaggccgcctgcgagaagagagagcagctggagcacagactgagaaccagactggagagagagctggagagcctgagaatccagcagagacagggcaactgccagcccaccaacgtgagcgagtacaacgccgccgccctgatggagctgctgagagagaaggaggagagaatcctggccctggaggccgacatgaccaagtgggagcagaagtacctggaggagaacgtgatgagacacttcgccctggacgccgccgccaccgtggccgcccagagagacaccaccgtgatcagccacagccccaacaccagctacgacaccgccctggaggccagaatccagaaggaggaggaggagatcctgatggccaacaagagatgcctggacatggagggcagaatcaagaccctgcacgcccagatcatcgagaaggacgccatgatcaaggtgctgcagcagagaagcagaaaggagcccagcaagaccgagcagctgagctgcatgagacccgccaagagcctgatgagcatcagcaacgccggcagcggcctgctgagccacagcagcaccctgaccggcagccccatcatggaggagaagagagacgacaagagctggaagggcagcctgggcatcctgctgggcggcgactacagagccgagtacgtgcccagcacccccagccccgtgccccccagcacccccctgctgagcgcccacagcaagaccggcagcagagactgcagcacccagaccgagagaggcaccgagagcaacaagaccgccgccgtggcccccatcagcgtgcccgcccccgtggccgccgccgccaccgccgccgccatcaccgccaccgccgccaccatcaccaccaccatggtggccgccgcccccgtggccgtggccgccgccgccgcccccgccgccgccgccgcccccagccccgccaccgccgccgccaccgccgccgccgtgagccccgccgccgccggccagatccccgccgccgccagcgtggccagcgccgccgccgtggcccccagcgccgccgccgccgccgccgtgcaggtggcccccgccgcccccgcccccgtgcccgcccccgccctggtgcccgtgcccgcccccgccgccgcccaggccagcgcccccgcccagacccaggcccccaccagcgcccccgccgtggcccccacccccgcccccacccccacccccgccgtggcccaggccgaggtgcccgccagccccgccaccggccccggcccccacagactgagcatccccagcctgacctgcaaccccgacaagaccgacggccccgtgttccacagcaacaccctggagagaaagacccccatccagatcctgggccaggagcccgacgccgagatggtggagtacctgatctag

SEQ ID NO: 72776 - DNA, 549 bp, synthetic construct
  misc_feature 1..549: note = Description of Artificial Sequence: Synthetic coding sequence
  source 1..549: mol_type = other DNA
atgatcaaggtgctgcagcagagaagcagaaaggagcccagcaagaccgagcagctgagctgcatgagacccgccaagagcctgatgagcatcagcaacgccggcagcggcctgctgagccacagcagcaccctgaccggcagccccatcatggaggagaagagagacgacaagagctggaagggcagcctgggcatcctgctgggcggcgactacagagccgagtacgtgcccagcacccccagccccgtgccccccagcacccccctgctgagcgcccacagcaagaccggcagcagagactgcagcacccagaccgagagaggcaccgagagcaacaagaccgccgccgtggcccccatcagcgtgcccgcccccgtggccgccgccgccaccgccgccgccatcaccgccaccgccgccaccatcaccaccaccatggccgccgccgccgcccccagccccgccaccgccgccgccaccgccgccgccgtgagccccgccgccgccggccagatccccgccgccgccagcgtggccagcgcctag

SEQ ID NO: 72777 - DNA, 3255 bp, synthetic construct; identical to SEQ ID NO: 72774
  misc_feature 1..3255: note = Description of Artificial Sequence: Synthetic coding sequence
  source 1..3255: mol_type = other DNA

SEQ ID NO: 72778 - DNA, 1512 bp, synthetic construct
  misc_feature 1..1512: note = Description of Artificial Sequence: Synthetic coding sequence
  source 1..1512: mol_type = other DNA
atgctgagccagctggccatgctgcagggcagcctgctgctggtggtggccaccatgagcgtggcccagcagaccagacaggaggccgacagaggctgcgagaccctggtggtgcagcacggccactgcagctacaccttcctgctgcccaagagcgagccctgcccccccggccccgaggtgagcagagacagcaacaccctgcagagagagagcctggccaaccccctgcacctgggcaagctgcccacccagcaggtgaagcagctggagcaggccctgcagaacaacacccagtggctgaagaagctggagagagccatcaagaccatcctgagaagcaagctggagcaggtgcagcagcagatggcccagaaccagaccgcccccatgctggagctgggcaccagcctgctgaaccagaccaccgcccagatcagaaagctgaccgacatggaggcccagctgctgaaccagaccagcagaatggacgcccagatgcccgagaccttcctgagcaccaacaagctggagaaccagctgctgctgcagagacagaagctgcagcagctgcagggccagaacagcgccctggagaagagactgcaggccctggagaccaagcagcaggaggagctggccagcatcctgagcaagaaggccaagctgctgaacaccctgagcagacagagcgccgccctgaccaacatcgagagaggcctgagaggcgtgagacacaacagcagcctgctgcaggaccagcagcacagcctgagacagctgctggtgctgctgagacacctggtgcaggagagagccaacgccagcgcccccgccttcatcatggccggcgagcaggtgttccaggactgcgccgagatccagagaagcggcgccagcgccagcggcgtgtacaccatccaggtgagcaacgccaccaagcccagaaaggtgttctgcgacctgcagagcagcggcggcagatggaccctgatccagagaagagagaacggcaccgtgaacttccagagaaactggaaggactacaagcagggcttcggcgaccccgccggcgagcactggctgggcaacgaggtggtgcaccagctgaccagaagagccgcctacagcctgagagtggagctgcaggactgggagggccacgaggcctacgcccagtacgagcacttccacctgggcagcgagaaccagctgtacagactgagcgtggtgggctacagcggcagcgccggcagacagagcagcctggtgctgcagaacaccagcttcagcaccctggacagcgacaacgaccactgcctgtgcaagtgcgcccaggtgatgagcggcggctggtggttcgacgcctgcggcctgagcaacctgaacggcgtgtactaccacgcccccgacaacaagtacaagatggacggcatcagatggcactacttcaagggccccagctacagcctgagagccagcagaatgatgatcagacccctggacatctag

SEQ ID NO: 72779 - DNA, 1233 bp, synthetic construct
  misc_feature 1..1233: note = Description of Artificial Sequence: Synthetic coding sequence
  source 1..1233: mol_type = other DNA
atgctgagccagctggccatgctgcagggcagcctgctgctggtggtggccaccatgagcgtggcccagcagaccagacaggaggccgacagaggctgcgagaccctggtggtgcagcacggccactgcagctacaccttcctgctgcccaagagcgagccctgcccccccggccccgaggtgagcagagacagcaacaccctgcagagagagagcctggccaaccccctgcacctgggcaagctgcccacccagcaggtgaagcagctggagcaggccctgcagaacaacacccagtggctgaagaagctggagagagccatcaagaccatcctgagaagcaagctggagcaggtgcagcagcagatggcccagaaccagaccgcccccatgctggagctgggcaccagcctgctgaaccagaccaccgcccagatcagaaagctgaccgacatggaggcccagctgctgaaccagaccagcagaatggacgcccagatgcccgagaccttcctgagcaccaacaagctggagaaccagctgctgctgcagagacagaagctgcagcagctgcagggccagaacagcgccctggagaagagactgcaggccctggagaccaagcagcaggaggagctggccagcatcctgagcaagaaggccaagctgctgaacaccctgagcagacagagcgccgccctgaccaacatcgagagaggcctgagaggcgtgagacacaacagcagcctgctgcaggaccagcagcacagcctgagacagctgctggtgctgctgagacacctggtgcaggagagagccaacgccagcgcccccgccttcatcatggccggcgagcaggtgttccaggactgcgccgagatccagagaagcggcgccagcgccagcggcgtgtacaccatccaggtgagcaacgccaccaagcccagaaaggtgttctgcgacctgcagagcagcggcggcagatggaccctgatccagagaagagagaacggcaccgtgaacttccagagaaactggaaggactacaagcagggcttcggcgaccccgccggcgagcactggctgggcaacgaggtggtgcaccagctgaccagaagagccgcctacagcctgagagtggagctgcaggactgggagggccacgaggcctacgcccagtacgagcacttccacctgggcagcgagaaccagctgtacagagtggtggtgtag

SEQ ID NO: 72780 - DNA, 1383 bp, synthetic construct
  misc_feature 1..1383: note = Description of Artificial Sequence: Synthetic coding sequence
  source 1..1383: mol_type = other DNA
atgttcaccatcaagctgctgctgttcatcgtgcccctggtgatcagcagcagaatcgaccaggacaacagcagcttcgacagcctgagccccgagcccaagagcagattcgccatgctggacgacgtgaagatcctggccaacggcctgctgcagctgggccacggcctgaaggacttcgtgcacaagaccaagggccagatcaacgacatcttccagaagctgaacatcttcgaccagagcttctacgacctgagcctgcagaccagcgagatcaaggaggaggagaaggagctgagaagaaccacctacaagctgcaggtgaagaacgaggaggtgaagaacatgagcctggagctgaacagcaagctggagagcctgctggaggagaagatcctgctgcagcagaaggtgaagtacctggaggagcagctgaccaacctgatccagaaccagcccgagacccccgagcaccccgaggtgaccagcctgaagaccttcgtggagaagcaggacaacagcatcaaggacctgctgcagaccgtggaggaccagtacaagcagctgaaccagcagcacagccagatcaaggagatcgagaaccagctgagaagaaccagcatccaggagcccaccgagatcagcctgagcagcaagcccagagcccccagaaccacccccttcctgcagctgaacgagatcagaaacgtgaagcacgacggcatccccgccgagtgcaccaccatctacaacagaggcgagcacaccagcggcatgtacgccatcagacccagcaacagccaggtgttccacgtgtactgcgacgtgatcagcggcagcccctggaccctgatccagcacagaatcgacggcagccagaacttcaacgagacctgggagaactacaagtacggcttcggcagactggacggcgagttctggctgggcctggagaagatctacagcatcgtgaagcagagcaactacgtgctgagaatcgagctggaggactggaaggacaacaagcactacatcgagtacagcttctacctgggcaaccacgagaccaactacaccctgcacctggtggccatcaccggcaacgtgcccaacgccatccccgagaacaaggacctggtgttcagcacctgggaccacaaggccaagggccacttcaactgccccgagggctacagcggcggctggtggtggcacgacgagtgcggcgagaacaacctgaacggcaagtacaacaagcccagagccaagagcaagcccgagagaagaagaggcctgagctggaagagccagaacggcagactgtacagcatcaagagcaccaagatgctgatccaccccaccgacagcgagagcttcgagtag

SEQ ID NO: 72781 - DNA, 1167 bp, synthetic construct
  misc_feature 1..1167: note = Description of Artificial Sequence: Synthetic coding sequence
  source 1..1167: mol_type = other DNA
atgatgagccccagccaggccagcctgctgttcctgaacgtgtgcatcttcatctgcggcgaggccgtgcagggcaactgcgtgcaccacagcaccgacagcagcgtggtgaacatcgtggaggacggcagcaacgccaaggacgagagcaagagcaacgacaccgtgtgcaaggaggactgcgaggagagctgcgacgtgaagaccaagatcaccagagaggagaagcacttcatgtgcagaaacctgcagaacagcatcgtgagctacaccagaagcaccaagaagctgctgagaaacatgatggacgagcagcaggccagcctggactacctgagcaaccaggtgaacgagctgatgaacagagtgctgctgctgaccaccgaggtgttcagaaagcagctggaccccttcccccacagacccgtgcagagccacggcctggactgcaccgacatcaaggacaccatcggcagcgtgaccaagacccccagcggcctgtacatcatccaccccgagggcagcagctaccccttcgaggtgatgtgcgacatggactacagaggcggcggcagaaccgtgatccagaagagaatcgacggcatcatcgacttccagagactgtggtgcgactacctggacggcttcggcgacctgctgggcgagttctggctgggcctgaagaagatcttctacatcgtgaaccagaagaacaccagcttcatgctgtacgtggccctggagagcgaggacgacaccctggcctacgccagctacgacaacttctggctggaggacgagaccagattcttcaagatgcacctgggcagatacagcggcaacgccggcgacgccttcagaggcctgaagaaggaggacaaccagaacgccatgcccttcagcaccagcgacgtggacaacgacggctgcagacccgcctgcctggtgaacggccagagcgtgaagagctgcagccacctgcacaacaagaccggctggtggttcaacgagtgcggcctggccaacctgaacggcatccaccacttcagcggcaagctgctggccaccggcatccagtggggcacctggaccaagaacaacagccccgtgaagatcaagagcgtgagcatgaagatcagaagaatgtacaacccctacttcaagtag

SEQ ID NO: 72782 - DNA, 1413 bp, synthetic construct
  misc_feature 1..1413: note = Description of Artificial Sequence: Synthetic coding sequence
  source 1..1413: mol_type = other DNA
atgggcaagccctggctgagagccctgcagctgctgctgctgctgggcgccagctgggccagagccggcgcccccagatgcacctacaccttcgtgctgcccccccagaagttcaccggcgccgtgtgctggagcggccccgccagcaccagagccacccccgaggccgccaacgccagcgagctggccgccctgagaatgagagtgggcagacacgaggagctgctgagagagctgcagagactggccgccgccgacggcgccgtggccggcgaggtgagagccctgagaaaggagagcagaggcctgagcgccagactgggccagctgagagcccagctgcagcacgaggccggccccggcgccggccccggcgccgacctgggcgccgagcccgccgccgccctggccctgctgggcgagagagtgctgaacgccagcgccgaggcccagagagccgccgccagattccaccagctggacgtgaagttcagagagctggcccagctggtgacccagcagagcagcctgatcgccagactggagagactgtgccccggcggcgccggcggccagcagcaggtgctgccccccccccccctggtgcccgtggtgcccgtgagactggtgggcagcaccagcgacaccagcagaatgctggaccccgcccccgagccccagagagaccagacccagagacagcaggagcccatggccagccccatgcccgccggccaccccgccgtgcccaccaagcccgtgggcccctggcaggactgcgccgaggccagacaggccggccacgagcagagcggcgtgtacgagctgagagtgggcagacacgtggtgagcgtgtggtgcgagcagcagctggagggcggcggctggaccgtgatccagagaagacaggacggcagcgtgaacttcttcaccacctggcagcactacaaggccggcttcggcagacccgacggcgagtactggctgggcctggagcccgtgtaccagctgaccagcagaggcgaccacgagctgctggtgctgctggaggactggggcggcagaggcgccagagcccactacgacggcttcagcctggagcccgagagcgaccactacagactgagactgggccagtaccacggcgacgccggcgacagcctgagctggcacaacgacaagcccttcagcaccgtggacagagacagagacagctacagcggcaactgcgccctgtaccagagaggcggctggtggtaccacgcctgcgcccacagcaacctgaacggcgtgtggcaccacggcggccactacagaagcagataccaggacggcgtgtactgggccgagttcagaggcggcgcctacagcctgagaaaggccgccatgctgatcagacccctgaagctgtag

SEQ ID NO: 72783 - DNA, 2199 bp, synthetic construct
  misc_feature 1..2199: note = Description of Artificial Sequence: Synthetic coding sequence
  source 1..2199: mol_type = other DNA
atgggccagggctgggccaccgccggcctgcccagcctgctgttcctgctgctgtgctacggccaccccctgctggtgcccagccaggaggccagccagcaggtgaccgtgacccacggcaccagcagccaggccaccaccagcagccagaccaccacccaccaggccaccgcccaccagaccagcgcccagagccccaacctggtgaccgacgaggccgaggccagcaagttcgtggaggagtacgacagaaccagccaggtggtgtggaacgagtacgccgaggccaactggaactacaacaccaacatcaccaccgagaccagcaagatcctgctgcagaagaacatgcagatcgccaaccacaccctgaagtacggcacccaggccagaaagttcgacgtgaaccagctgcagaacaccaccatcaagagaatcatcaagaaggtgcaggacctggagagagccgccctgcccgcccaggagctggaggagtacaacaagatcctgctggacatggagaccacctacagcgtggccaccgtgtgccaccccaacggcagctgcctgcagctggagcccgacctgaccaacgtgatggccaccagcagaaagtacgaggacctgctgtgggcctgggagggctggagagacaaggccggcagagccatcctgcagttctaccccaagtacgtggagctgatcaaccaggccgccagactgaacggctacgtggacgccggcgacagctggagaagcatgtacgagacccccagcctggagcaggacctggagagactgttccaggagctgcagcccctgtacctgaacctgcacgcctacgtgagaagagccctgcacagacactacggcgcccagcacatcaacctggagggccccatccccgcccacctgctgggcaacatgtgggcccagacctggagcaacatctacgacctggtggtgcccttccccagcgcccccagcatggacaccaccgaggccatgctgaagcagggctggacccccagaagaatgttcaaggaggccgacgacttcttcaccagcctgggcctgctgcccgtgccccccgagttctggaacaagagcatgctggagaagcccaccgacggcagagaggtggtgtgccacgccagcgcctgggacttctacaacggcaaggacttcagaatcaagcagtgcaccaccgtgaacctggaggacctggtggtggcccaccacgagatgggccacatccagtacttcatgcagtacaaggacctgcccgtggccctgagagagggcgccaaccccggcttccacgaggccatcggcgacgtgctggccctgagcgtgagcacccccaagcacctgcacagcctgaacctgctgagcagcgagggcggcagcgacgagcacgacatcaacttcctgatgaagatggccctggacaagatcgccttcatccccttcagctacctggtggaccagtggagatggagagtgttcgacggcagcatcaccaaggagaactacaaccaggagtggtggagcctgagactgaagtaccagggcctgtgcccccccgtgcccagaacccagggcgacttcgaccccggcgccaagttccacatccccagcagcgtgccctacatcagatacttcgtgagcttcatcatccagttccagttccacgaggccctgtgccaggccgccggccacaccggccccctgcacaagtgcgacatctaccagagcaaggaggccggccagagactggccaccgccatgaagctgggcttcagcagaccctggcccgaggccatgcagctgatcaccggccagcccaacatgagcgccagcgccatgctgagctacttcaagcccctgctggactggctgagaaccgagaacgagctgcacggcgagaagctgggctggccccagtacaactggacccccaacagcgccagaagcgagggccccctgcccgacagcggcagagtgagcttcctgggcctggacctggacgcccagcaggccagagtgggccagtggctgctgctgttcctgggcatcgccctgctggtggccaccctgggcctgagccagagactgttcagcatcagacacagaagcctgcacagacacagccacggcccccagttcggcagcgaggtggagctgagacacagctag

SEQ ID NO: 72784 - DNA, 3921 bp, synthetic construct
  misc_feature 1..3921: note = Description of Artificial Sequence: Synthetic coding sequence
  source 1..3921: mol_type = other DNA
atgggcgccgccagcggcagaagaggccccggcctgctgctgcccctgcccctgctgctgctgctgcccccccagcccgccctggccctggaccccggcctgcagcccggcaacttcagcgccgacgaggccggcgcccagctgttcgcccagagctacaacagcagcgccgagcaggtgctgttccagagcgtggccgccagctgggcccacgacaccaacatcaccgccgagaacgccagaagacaggaggaggccgccctgctgagccaggagttcgccgaggcctggggccagaaggccaaggagctgtacgagcccatctggcagaacttcaccgacccccagctgagaagaatcatcggcgccgtgagaaccctgggcagcgccaacctgcccctggccaagagacagcagtacaacgccctgctgagcaacatgagcagaatctacagcaccgccaaggtgtgcctgcccaacaagaccgccacctgctggagcctggaccccgacctgaccaacatcctggccagcagcagaagctacgccatgctgctgttcgcctgggagggctggcacaacgccgccggcatccccctgaagcccctgtacgaggacttcaccgccctgagcaacgaggcctacaagcaggacggcttcaccgacaccggcgcctactggagaagctggtacaacagccccaccttcgaggacgacctggagcacctgtaccagcagctggagcccctgtacctgaacctgcacgccttcgtgagaagagccctgcacagaagatacggcgacagatacatcaacctgagaggccccatccccgcccacctgctgggcgacatgtgggcccagagctgggagaacatctacgacatggtggtgcccttccccgacaagcccaacctggacgtgaccagcaccatgctgcagcagggctggaacgccacccacatgttcagagtggccgaggagttcttcaccagcctggagctgagccccatgccccccgagttctgggagggcagcatgctggagaagcccgccgacggcagagaggtggtgtgccacgccagcgcctgggacttctacaacagaaaggacttcagaatcaagcagtgcaccagagtgaccatggaccagctgagcaccgtgcaccacgagatgggccacatccagtactacctgcagtacaaggacctgcccgtgagcctgagaagaggcgccaaccccggcttccacgaggccatcggcgacgtgctggccctgagcgtgagcacccccgagcacctgcacaagatcggcctgctggacagagtgaccaacgacaccgagagcgacatcaactacctgctgaagatggccctggagaagatcgccttcctgcccttcggctacctggtggaccagtggagatggggcgtgttcagcggcagaaccccccccagcagatacaacttcgactggtggtacctgagaaccaagtaccagggcatctgcccccccgtgaccagaaacgagacccacttcgacgccggcgccaagttccacgtgcccaacgtgaccccctacatcagatacttcgtgagcttcgtgctgcagttccagttccacgaggccctgtgcaaggaggccggctacgagggccccctgcaccagtgcgacatctacagaagcaccaaggccggcgccaagctgagaaaggtgctgcaggccggcagcagcagaccctggcaggaggtgctgaaggacatggtgggcctggacgccctggacgcccagcccctgctgaagtacttccagcccgtgacccagtggctgcaggagcagaaccagcagaacggcgaggtgctgggctggcccgagtaccagtggcacccccccctgcccgacaactaccccgagggcatcgacctggtgaccgacgaggccgaggccagcaagttcgtggaggagtacgacagaaccagccaggtggtgtggaacgagtacgccgaggccaactggaactacaacaccaacatcaccaccgagaccagcaagatcctgctgcagaagaacatgcagatcgccaaccacaccctgaagtacggcacccaggccagaaagttcgacgtgaaccagctgcagaacaccaccatcaagagaatcatcaagaaggtgcaggacctggagagagccgccctgcccgcccaggagctggaggagtacaacaagatcctgctggacatggagaccacctacagcgtggccaccgtgtgccaccccaacggcagctgcctgcagctggagcccgacctgaccaacgtgatggccaccagcagaaagtacgaggacctgctgtgggcctgggagggctggagagacaaggccggcagagccatcctgcagttctaccccaagtacgtggagctgatcaaccaggccgccagactgaacggctacgtggacgccggcgacagctggagaagcatgtacgagacccccagcctggagcaggacctggagagactgttccaggagctgcagcccctgtacctgaacctgcacgcctacgtgagaagagccctgcacagacactacggcgcccagcacatcaacctggagggccccatccccgcccacctgctgggcaacatgtgggcccagacctggagcaacatctacgacctggtggtgcccttccccagcgcccccagcatggacaccaccgaggccatgctgaagcagggctggacccccagaagaatgttcaaggaggccgacgacttcttcaccagcctgggcctgctgcccgtgccccccgagttctggaacaagagcatgctggagaagcccaccgacggcagagaggtggtgtgccacgccagcgcctgggacttctacaacggcaaggacttcagaatcaagcagtgcaccaccgtgaacctggaggacctggtggtggcccaccacgagatgggccacatccagtacttcatgcagtacaaggacctgcccgtggccctgagagagggcgccaaccccggcttccacgaggccatcggcgacgtgctggccctgagcgtgagcacccccaagcacctgcacagcctgaacctgctgagcagcgagggcggcagcgacgagcacgacatcaacttcctgatgaagatggccctggacaagatcgccttcatccccttcagctacctggtggaccagtggagatggagagtgttcgacggcagcatcaccaaggagaactacaaccaggagtggtggagcctgagactgaagtaccagggcctgtgcccccccgtgcccagaacccagggcgacttcgaccccggcgccaagttccacatccccagcagcgtgccctacatcagatacttcgtgagcttcatcatccagttccagttccacgaggccctgtgccaggccgccggccacaccggccccctgcacaagtgcgacatctaccagagcaaggaggccggccagagactggccaccgccatgaagctgggcttcagcagaccctggcccgaggccatgcagctgatcaccggccagcccaacatgagcgccagcgccatgctgagctacttcaagcccctgctggactggctgagaaccgagaacgagctgcacggcgagaagctgggctggccccagtacaactggacccccaacagcgccagaagcgagggccccctgcccgacagcggcagagtgagcttcctgggcctggacctggacgcccagcaggccagagtgggccagtggctgctgctgttcctgggcatcgccctgctggtggccaccctgggcctgagccagagactgttcagcatcagacacagaagcctgcacagacacagccacggcccccagttcggcagcgaggtggagctgagacacagctag

SEQ ID NO: 72785 - DNA, 2076 bp, synthetic construct
  misc_feature 1..2076: note = Description of Artificial Sequence: Synthetic coding sequence
  source 1..2076: mol_type = other DNA
atgggccagggctgggccaccgccggcctgcccagcctgctgttcctgctgctgtgctacggccaccccctgctggtgcccagccaggaggccagccagcaggtgaccgtgacccacggcaccagcagccaggccaccaccagcagccagaccaccacccaccaggccaccgcccaccagaccagcgcccagagccccaacctggtgaccgacgaggccgaggccagcaagttcgtggaggagtacgacagaaccagccaggtggtgtggaacgagtacgccgaggccaactggaactacaacaccaacatcaccaccgagaccagcaagatcctgctgcagaagaacatgcagatcgccaaccacaccctgaagtacggcacccaggccagaaagttcgacgtgaaccagctgcagaacaccaccatcaagagaatcatcaagaaggtgcaggacctggagagagccgccctgcccgcccaggagctggaggagtacaacaagatcctgctggacatggagaccacctacagcgtggccaccgtgtgccaccccaacggcagctgcctgcagctggagcccgacctgaccaacgtgatggccaccagcagaaagtacgaggacctgctgtgggcctgggagggctggagagacaaggccggcagagccatcctgcagttctaccccaagtacgtggagctgatcaaccaggccgccagactgaacggctacgtggacgccggcgacagctggagaagcatgtacgagacccccagcctggagcaggacctggagagactgttccaggagctgcagcccctgtacctgaacctgcacgcctacgtgagaagagccctgcacagacactacggcgcccagcacatcaacctggagggccccatccccgcccacctgctgggcaacatgtgggcccagacctggagcaacatctacgacctggtggtgcccttccccagcgcccccagcatggacaccaccgaggccatgctgaagcagggctggacccccagaagaatgttcaaggaggccgacgacttcttcaccagcctgggcctgctgcccgtgccccccgagttctggaacaagagcatgctggagaagcccaccgacggcagagaggtggtgtgccacgccagcgcctgggacttctacaacggcaaggacttcagaatcaagcagtgcaccaccgtgaacctggaggacctggtggtggcccaccacgagatgggccacatccagtacttcatgcagtacaaggacctgcccgtggccctgagagagggcgccaaccccggcttccacgaggccatcggcgacgtgctggccctgagcgtgagcacccccaagcacctgcacagcctgaacctgctgagcagcgagggcggcagcgacgagcacgacatcaacttcctgatgaagatggccctggacaagatcgccttcatccccttcagctacctggtggaccagtggagatggagagtgttcgacggcagcatcaccaaggagaactacaaccaggagtggtggagcctgagactgaagtaccagggcctgtgcccccccgtgcccagaacccagggcgacttcgaccccggcgccaagttccacatccccagcagcgtgccctacatcagaaccgccatgaagctgggcttcagcagaccctggcccgaggccatgcagctgatcaccggccagcccaacatgagcgccagcgccatgctgagctacttcaagcccctgctggactggctgagaaccgagaacgagctgcacggcgagaagctgggctggccccagtacaactggacccccaacagcgccagaagcgagggccccctgcccgacagcggcagagtgagcttcctgggcctggacctggacgcccagcaggccagagtgggccagtggctgctgctgttcctgggcatcgccctgctggtggccaccctgggcctgagccagagactgttcagcatcagacacagaagcctgcacagacacagccacggcccccagttcggcagcgaggtggagctgagacacagctag

SEQ ID NO: 72786 - DNA, 1536 bp, synthetic construct
  misc_feature 1..1536: note = Description of Artificial Sequence: Synthetic coding sequence
  source 1..1536: mol_type = other DNA
atgcagatcgccaaccacaccctgaagtacggcacccaggccagaaagttcgacgtgaaccagctgcagaacaccaccatcaagagaatcatcaagaaggtgcaggacctggagagagccgccctgcccgcccaggagctggaggagtacaacaagatcctgctggacatggagaccacctacagcgtggccaccgtgtgccaccccaacggcagctgcctgcagctggagcccgacctgaccaacgtgatggccaccagcagaaagtacgaggacctgctgtgggcctgggagggctggagagacaaggccggcagagccatcctgcagttctaccccaagtacgtggagctgatcaaccaggccgccagactgaacggcaacatgtgggcccagacctggagcaacatctacgacctggtggtgcccttccccagcgcccccagcatggacaccaccgaggccatgctgaagcagggctggacccccagaagaatgttcaaggaggccgacgacttcttcaccagcctgggcctgctgcccgtgccccccgagttctggaacaagagcatgctggagaagcccaccgacggcagagaggtggtgtgccacgccagcgcctgggacttctacaacggcaaggacttcagaatcaagcagtgcaccaccgtgaacctggaggacctggtggtggcccaccacgagatgggccacatccagtacttcatgcagtacaaggacctgcccgtggccctgagagagggcgccaaccccggcttccacgaggccatcggcgacgtgctggccctgagcgtgagcacccccaagcacctgcacagcctgaacctgctgagcagcgagggcggcagcgacgagcacgacatcaacttcctgatgaagatggccctggacaagatcgccttcatccccttcagctacctggtggaccagtggagatggagagtgttcgacggcagcatcaccaaggagaactacaaccaggagtggtggagcctgagactgaagtaccagggcctgtgcccccccgtgcccagaacccagggcgacttcgaccccggcgccaagttccacatccccagcagcgtgccctacatcagaaccgccatgaagctgggcttcagcagaccctggcccgaggccatgcagctgatcaccggccagcccaacatgagcgccagcgccatgctgagctacttcaagcccctgctggactggctgagaaccgagaacgagctgcacggcgagaagctgggctggccccagtacaactggacccccaacagcgccagaagcgagggccccctgcccgacagcggcagagtgagcttcctgggcctggacctggacgcccagcaggccagagtgggccagtggctgctgctgttcctgggcatcgccctgctggtggccaccctgggcctgagccagagactgttcagcatcagacacagaagcctgcacagacacagccacggcccccagttcggcagcgaggtggagctgagacacagctag

SEQ ID NO: 72787 - DNA, 3438 bp, synthetic construct
  misc_feature 1..3438: note = Description of Artificial Sequence: Synthetic coding sequence
  source 1..3438: mol_type = other DNA
atgggcgccgccagcggcagaagaggccccggcctgctgctgcccctgcccctgctgctgctgctgcccccccagcccgccctggccctggaccccggcctgcagcccggcaacttcagcgccgacgaggccggcgcccagctgttcgcccagagctacaacagcagcgccgagcaggtgctgttccagagcgtggccgccagctgggcccacgacaccaacatcaccgccgagaacgccagaagacaggaggaggccgccctgctgagccaggagttcgccgaggcctggggccagaaggccaaggagctgtacgagcccatctggcagaacttcaccgacccccagctgagaagaatcatcggcgccgtgagaaccctgggcagcgccaacctgcccctggccaagagacagcagtacaacgccctgctgagcaacatgagcagaatctacagcaccgccaaggtgtgcctgcccaacaagaccgccacctgctggagcctggaccccgacctgaccaacatcctggccagcagcagaagctacgccatgctgctgttcgcctgggagggctggcacaacgccgccggcatccccctgaagcccctgtacgaggacttcaccgccctgagcaacgaggcctacaagcaggacggcttcaccgacaccggcgcctactggagaagctggtacaacagccccaccttcgaggacgacctggagcacctgtaccagcagctggagcccctgtacctgaacctgcacgccttcgtgagaagagccctgcacagaagatacggcgacagatacatcaacctgagaggccccatccccgcccacctgctgggcgacatgtgggcccagagctgggagaacatctacgacatggtggtgcccttccccgacaagcccaacctggacgtgaccagcaccatgctgcagcagggctggaacgccacccacatgttcagagtggccgaggagttcttcaccagcctggagctgagccccatgccccccgagttctgggagggcagcatgctggagaagcccgccgacggcagagaggtggtgtgccacgccagcgcctgggacttctacaacagaaaggacttcagaatcaagcagtgcaccagagtgaccatggaccagctgagcaccgtgcaccacgagatgggccacatccagtactacctgcagtacaaggacctgcccgtgagcctgagaagaggcgccaaccccggcttccacgaggccatcggcgacgtgctggccctgagcgtgagcacccccgagcacctgcacaagatcggcctgctggacagagtgaccaacgacaccgagagcgacatcaactacctgctgaagatggccctggagaagatcgccttcctgcccttcggctacctggtggaccagtggagatggggcgtgttcagcggcagaaccccccccagcagatacaacttcgactggtggtacctgagaaccaagtaccagggcatctgcccccccgtgaccagaaacgagacccacttcgacgccggcgccaagttccacgtgcccaacgtgaccccctacatcagatacttcgtgagcttcgtgctgcagttccagttccacgaggccctgtgcaaggaggccggctacgagggccccctgcaccagtgcgacatctacagaagcaccaaggccggcgccaagctgagaaaggtgctgcaggccggcagcagcagaccctggcaggaggtgctgaaggacatggtgggcctggacgccctggacgcccagcccctgctgaagtacttccagcccgtgacccagtggctgcaggagcagaaccagcagaacggcgaggtgctgggctggcccgagtaccagtggcacccccccctgcccgacaactaccccgagggcatcgacctggtgaccgacgaggccgaggccagcaagttcgtggaggagtacgacagaaccagccaggtggtgtggaacgagtacgccgaggccaactggaactacaacaccaacatcaccaccgagaccagcaagatcctgctgcagaagaacatgcagatcgccaaccacaccctgaagtacggcacccaggccagaaagttcgacgtgaaccagctgcagaacaccaccatcaagagaatcatcaagaaggtgcaggacctggagagagccgccctgcccgcccaggagctggaggagtacaacaagatcctgctggacatggagaccacctacagcgtggccaccgtgtgccaccccaacggcagctgcctgcagctggagcccgacctgaccaacgtgatggccaccagcagaaagtacgaggacctgctgtgggcctgggagggctggagagacaaggccggcagagccatcctgcagttctaccccaagtacgtggagctgatcaaccaggccgccagactgaacggctacgtggacgccggcgacagctggagaagcatgtacgagacccccagcctggagcaggacctggagagactgttccaggagctgcagcccctgtacctgaacctgcacgcctacgtgagaagagccctgcacagacactacggcgcccagcacatcaacctggagggccccatccccgcccacctgctgggcaacatgtgggcccagacctggagcaacatctacgacctggtggtgcccttccccagcgcccccagcatggacaccaccgaggccatgctgaagcagggctggacccccagaagaatgttcaaggaggccgacgacttcttcaccagcctgggcctgctgcccgtgccccccgagttctggaacaagagcatgctggagaagcccaccgacggcagagaggtggtgtgccacgccagcgcctgggacttctacaacggcaaggacttcagaatcaagcagtgcaccaccgtgaacctggaggacctggtggtggcccaccacgagatgggccacatccagtacttcatgcagtacaaggacctgcccgtggccctgagagagggcgccaaccccggcttccacgaggccatcggcgacgtgctggccctgagcgtgagcacccccaagcacctgcacagcctgaacctgctgagcagcgagggcggcagcgacgagcacgacatcaacttcctgatgaagatggccctggacaagatcgccttcatccccttcagctacctggtggaccagtggagatggagagtgttcgacggcagcatcaccaaggagaactacaaccaggagtggtggagcctgagactgaagtaccagggcctgtgcccccccgtgcccagaacccagggcgacttcgaccccggcgccaagttccacatccccagcagcgtgccctacatcagatacttcgtgagcttcatcatccagttccaccccttcagccagcacaccgccgcctag

SEQ ID NO: 72788 - DNA, 1428 bp, synthetic construct
  misc_feature 1..1428: note = Description of Artificial Sequence: Synthetic coding sequence
  source 1..1428: mol_type = other DNA
atgggcgccgccagcggcagaagaggccccggcctgctgctgcccctgcccctgctgctgctgctgcccccccagcccgccctggccctggaccccggcctgcagcccggcaacttcagcgccgacgaggccggcgcccagctgttcgcccagagctacaacagcagcgccgagcaggtgctgttccagagcgtggccgccagctgggcccacgacaccaacatcaccgccgagaacgccagaagacaggaggaggccgccctgctgagccaggagttcgccgaggcctggggccagaaggccaaggagctgtacgagcccatctggcagaacttcaccgacccccagctgagaagaatcatcggcgccgtgagaaccctgggcagcgccaacctgcccctggccaagagacagcagtacaacgccctgctgagcaacatgagcagaatctacagcaccgccaaggtgtgcctgcccaacaagaccgccacctgctggagcctggaccccgacctgaccaacatcctggccagcagcagaagctacgccatgctgctgttcgcctgggagggctggcacaacgccgccggcatccccctgaagcccctgtacgaggacttcaccgccctgagcaacgaggcctacaagcaggacggcttcaccgacaccggcgcctactggagaagctggtacaacagccccaccttcgaggacgacctggagcacctgtaccagcagctggagcccctgtacctgaacctgcacgccttcgtgagaagagccctgcacagaagatacggcgacagatacatcaacctgagaggccccatccccgcccacctgctgggcgacatgtgggcccagagctgggagaacatctacgacatggtggtgcccttccccgacaagcccaacctggacgtgaccagcaccatgctgcagcagggctggaacgccacccacatgttcagagtggccgaggagttcttcaccagcctggagctgagccccatgccccccgagttctgggagggcagcatgctggagaagcccgccgacggcagagaggtggtgtgccacgccagcgcctgggacttctacaacagaaaggacttcagaatcaagcagtgcaccagagtgaccatggaccagctgagcaccgtgcaccacgagatgggccacatccagtactacctgcagtacaaggacctgcccgtgagcctgagaagaggcgccaaccccggcttccacgaggccatcggcgacgtgctggccctgagcgtgagcacccccgagcacctgcacaagatcggcctgctggacagagtgaccaacgacaccgagcccagcatcagaggcagcgtgctgctgctgcccgagaccaagcccaccctgatgctggagctgagcttcatgttccagatgtag

SEQ ID NO: 72789 - DNA, 1080 bp, synthetic construct
  misc_feature 1..1080: note = Description of Artificial Sequence: Synthetic coding sequence
  source 1..1080: mol_type = other DNA
atgatcctgaacagcagcaccgaggacggcatcaagagaatccaggacgactgccccaaggccggcagacacaactacatcttcgtgatgatccccaccctgtacagcatcatcttcgtggtgggcatcttcggcaacagcctggtggtgatcgtgatctacttctacatgaagctgaagaccgtggccagcgtgttcctgctgaacctggccctggccgacctgtgcttcctgctgaccctgcccctgtgggccgtgtacaccgccatggagtacagatggcccttcggcaactacctgtgcaagatcgccagcgccagcgtgagcttcaacctgtacgccagcgtgttcctgctgacctgcctgagcatcgacagatacctggccatcgtgcaccccatgaagagcagactgagaagaaccatgctggtggccaaggtgacctgcatcatcatctggctgctggccggcctggccagcctgcccgccatcatccacagaaacgtgttcttcatcgagaacaccaacatcaccgtgtgcgccttccactacgagagccagaacagcaccctgcccatcggcctgggcctgaccaagaacatcctgggcttcctgttccccttcctgatcatcctgaccagctacaccctgatctggaaggccctgaagaaggcctacgagatccagaagaacaagcccagaaacgacgacatcttcaagatcatcatggccatcgtgctgttcttcttcttcagctggatcccccaccagatcttcaccttcctggacgtgctgatccagctgggcatcatcagagactgcagaatcgccgacatcgtggacaccgccatgcccatcaccatctgcatcgcctacttcaacaactgcctgaaccccctgttctacggcttcctgggcaagaagttcaagagatacttcctgcagctgctgaagtacatcccccccaaggccaagagccacagcaacctgagcaccaagatgagcaccctgagctacagacccagcgacaacgtgagcagcagcaccaagaagcccgccccctgcttcgaggtggagtag

SEQ ID NO: 72790 - DNA, 1080 bp, synthetic construct; identical to SEQ ID NO: 72789
  misc_feature 1..1080: note = Description of Artificial Sequence: Synthetic coding sequence
  source 1..1080: mol_type = other DNA

SEQ ID NO: 72791 - DNA, 1080 bp, synthetic construct; identical to SEQ ID NO: 72789
  misc_feature 1..1080: note = Description of Artificial Sequence: Synthetic coding sequence
  source 1..1080: mol_type = other DNA

SEQ ID NO: 72792 - DNA, 1080 bp, synthetic construct; identical to SEQ ID NO: 72789
  misc_feature 1..1080: note = Description of Artificial Sequence: Synthetic coding sequence
  source 1..1080: mol_type = other DNA

SEQ ID NO: 72793 - DNA, 1080 bp, synthetic construct; identical to SEQ ID NO: 72789
  misc_feature 1..1080: note = Description of Artificial Sequence: Synthetic coding sequence
  source 1..1080: mol_type = other DNA

SEQ ID NO: 72794 - DNA, 1080 bp, synthetic construct; identical to SEQ ID NO: 72789
  misc_feature 1..1080: note = Description of Artificial Sequence: Synthetic coding sequence
  source 1..1080: mol_type = other DNA

SEQ ID NO: 72795 - DNA, 1080 bp, synthetic construct; identical to SEQ ID NO: 72789
  misc_feature 1..1080: note = Description of Artificial Sequence: Synthetic coding sequence
  source 1..1080: mol_type = other DNA

SEQ ID NO: 72796 - DNA, 1080 bp, synthetic construct; identical to SEQ ID NO: 72789
  misc_feature 1..1080: note = Description of Artificial Sequence: Synthetic coding sequence
  source 1..1080: mol_type = other DNA

SEQ ID NO: 72797 - DNA, 1080 bp, synthetic construct; identical to SEQ ID NO: 72789
  misc_feature 1..1080: note = Description of Artificial Sequence: Synthetic coding sequence
  source 1..1080: mol_type = other DNA

SEQ ID NO: 72798 - DNA, 1092 bp, synthetic construct
  misc_feature 1..1092: note = Description of Artificial Sequence: Synthetic coding sequence
  source 1..1092: mol_type = other DNA
atgaagggcaacagcaccctggccaccaccagcaagaacatcaccagcggcctgcacttcggcctggtgaacatcagcggcaacaacgagagcaccctgaactgcagccagaagcccagcgacaagcacctggacgccatccccatcctgtactacatcatcttcgtgatcggcttcctggtgaacatcgtggtggtgaccctgttctgctgccagaagggccccaagaaggtgagcagcatctacatcttcaacctggccgtggccgacctgctgctgctggccaccctgcccctgtgggccacctactacagctacagatacgactggctgttcggccccgtgatgtgcaaggtgttcggcagcttcctgaccctgaacatgttcgccagcatcttcttcatcacctgcatgagcgtggacagataccagagcgtgatctaccccttcctgagccagagaagaaacccctggcaggccagctacatcgtgcccctggtgtggtgcatggcctgcctgagcagcctgcccaccttctacttcagagacgtgagaaccatcgagtacctgggcgtgaacgcctgcatcatggccttcccccccgagaagtacgcccagtggagcgccggcatcgccctgatgaagaacatcctgggcttcatcatccccctgatcttcatcgccacctgctacttcggcatcagaaagcacctgctgaagaccaacagctacggcaagaacagaatcaccagagaccaggtgctgaagatggccgccgccgtggtgctggccttcatcatctgctggctgcccttccacgtgctgaccttcctggacgccctggcctggatgggcgtgatcaacagctgcgaggtgatcgccgtgatcgacctggccctgcccttcgccatcctgctgggcttcaccaacagctgcgtgaaccccttcctgtactgcttcgtgggcaacagattccagcagaagctgagaagcgtgttcagagtgcccatcacctggctgcagggcaagagagagagcatgagctgcagaaagagcagcagcctgagagagatggagaccttcgtgagctag

SEQ ID NO: 72799 - DNA, 1458 bp, synthetic construct
  misc_feature 1..1458: note = Description of Artificial Sequence: Synthetic coding sequence
  source 1..1458: mol_type = other DNA
atgagaaagagagccccccagagcgagatggcccccgccggcgtgagcctgagagccaccatcctgtgcctgctggcctgggccggcctggccgccggcgacagagtgtacatccaccccttccacctggtgatccacaacgagagcacctgcgagcagctggccaaggccaacgccggcaagcccaaggaccccaccttcatccccgcccccatccaggccaagaccagccccgtggacgagaaggccctgcaggaccagctggtgctggtggccgccaagctggacaccgaggacaagctgagagccgccatggtgggcatgctggccaacttcctgggcttcagaatctacggcatgcacagcgagctgtggggcgtggtgcacggcgccaccgtgctgagccccaccgccgtgttcggcaccctggccagcctgtacctgggcgccctggaccacaccgccgacagactgcaggccatcctgggcgtgccctggaaggacaagaactgcaccagcagactggacgcccacaaggtgctgagcgccctgcaggccgtgcagggcctgctggtggcccagggcagagccgacagccaggcccagctgctgctgagcaccgtggtgggcgtgttcaccgcccccggcctgcacctgaagcagcccttcgtgcagggcctggccctgtacacccccgtggtgctgcccagaagcctggacttcaccgagctggacgtggccgccgagaagatcgacagattcatgcaggccgtgaccggctggaagaccggctgcagcctgatgggcgccagcgtggacagcaccctggccttcaacacctacgtgcacttccagggcaagatgaagggcttcagcctgctggccgagccccaggagttctgggtggacaacagcaccagcgtgagcgtgcccatgctgagcggcatgggcaccttccagcactggagcgacatccaggacaacttcagcgtgacccaggtgcccttcaccgagagcgcctgcctgctgctgatccagccccactacgccagcgacctggacaaggtggagggcctgaccttccagcagaacagcctgaactggatgaagaagctgagccccagaaccatccacctgaccatgccccagctggtgctgcagggcagctacgacctgcaggacctgctggcccaggccgagctgcccgccatcctgcacaccgagctgaacctgcagaagctgagcaacgacagaatcagagtgggcgaggtgctgaacagcatcttcttcgagctggaggccgacgagagagagcccaccgagagcacccagcagctgaacaagcccgaggtgctggaggtgaccctgaacagacccttcctgttcgccgtgtacgaccagagcgccaccgccctgcacttcctgggcagagtggccaaccccctgagcaccgcctag

SEQ ID NO: 72800 - DNA, 1212 bp, synthetic construct
  misc_feature 1..1212: note = Description of Artificial Sequence: Synthetic coding sequence
  source 1..1212: mol_type = other DNA
atgagaaagagagccccccagagcgagatggcccccgccggcgtgagcctgagagccaccatcctgtgcctgctggcctgggccggcctggccgccggcgacagagtgtacatccaccccttccacctggtgatccacaacgagagcacctgcgagcagctggccaaggccaacgccggcaagcccaaggaccccaccttcatccccgcccccatccaggccaagaccagccccgtggacgagaaggccctgcaggaccagctggtgctggtggccgccaagctggacaccgaggacaagctgagagccgccatggtgggcatgctggccaacttcctgggcttcagaatctacggcatgcacagcgagctgtggggcgtggtgcacggcgccaccgtgctgagccccaccgccgtgttcggcaccctggccagcctgtacctgggcgccctggaccacaccgccgacagactgcaggccatcctggacgtggccgccgagaagatcgacagattcatgcaggccgtgaccggctggaagaccggctgcagcctgatgggcgccagcgtggacagcaccctggccttcaacacctacgtgcacttccagggcaagatgaagggcttcagcctgctggccgagccccaggagttctgggtggacaacagcaccagcgtgagcgtgcccatgctgagcggcatgggcaccttccagcactggagcgacatccaggacaacttcagcgtgacccaggtgcccttcaccgagagcgcctgcctgctgctgatccagccccactacgccagcgacctggacaaggtggagggcctgaccttccagcagaacagcctgaactggatgaagaagctgagccccagaaccatccacctgaccatgccccagctggtgctgcagggcagctacgacctgcaggacctgctggcccaggccgagctgcccgccatcctgcacaccgagctgaacctgcagaagctgagcaacgacagaatcagagtgggcgaggtgctgaacagcatcttcttcgagctggaggccgacgagagagagcccaccgagagcacccagcagctgaacaagcccgaggtgctggaggtgaccctgaacagacccttcctgttcgccgtgtacgaccagagcgccaccgccctgcacttcctgggcagagtggccaaccccctgagcaccgcctag

SEQ ID NO: 72801 - DNA, 1479 bp, synthetic construct
  misc_feature 1..1479: note = Description of Artificial Sequence: Synthetic coding sequence
  source 1..1479: mol_type = other DNA
atggtgaagttccccgccctgacccactactggcccctgatcagattcctggtgcccctgggcatcaccaacatcgccatcgacttcggcgagcaggccctgaacagaggcatcgccgccgtgaaggaggacgccgtggagatgctggccagctacggcctggcctacagcctgatgaagttcttcaccggccccatgagcgacttcaagaacgtgggcctggtgttcgtgaacagcaagagagacagaaccaaggccgtgctgtgcatggtggtggccggcgccatcgccgccgtgttccacaccctgatcgcctacagcgacctgggctactacatcatcaacaagctgcaccacgtggacgagagcgtgggcagcaagaccagaagagccttcctgtacctggccgccttccccttcatggacgccatggcctggacccacgccggcatcctgctgaagcacaagtacagcttcctggtgggctgcgccagcatcagcgacgtgatcgcccaggtggtgttcgtggccatcctgctgcacagccacctggagtgcagagagcccctgctgatccccatcctgagcctgtacatgggcgccctggtgagatgcaccaccctgtgcctgggctactacaagaacatccacgacatcatccccgacagaagcggccccgagctgggcggcgacgccaccatcagaaagatgctgagcttctggtggcccctggccctgatcctggccacccagagaatcagcagacccatcgtgaacctgttcgtgagcagagacctgggcggcagcagcgccgccaccgaggccgtggccatcctgaccgccacctaccccgtgggccacatgccctacggctggctgaccgagatcagagccgtgtaccccgccttcgacaagaacaaccccagcaacaagctggtgagcaccagcaacaccgtgaccgccgcccacatcaagaagttcaccttcgtgtgcatggccctgagcctgaccctgtgcttcgtgatgttctggacccccaacgtgagcgagaagatcctgatcgacatcatcggcgtggacttcgccttcgccgagctgtgcgtggtgcccctgagaatcttcagcttcttccccgtgcccgtgaccgtgagagcccacctgaccggctggctgatgaccctgaagaagaccttcgtgctggcccccagcagcgtgctgagaatcatcgtgctgatcgccagcctggtggtgctgccctacctgggcgtgcacggcgccaccctgggcgtgggcagcctgctggccggcttcgtgggcgagagcaccatggtggccatcgccgcctgctacgtgtacagaaagcagaagaagaagatggagaacgagagcgccaccgagggcgaggacagcgccatgaccgacatgccccccaccgaggaggtgaccgacatcgtggagatgagagaggagaacgagtag

SEQ ID NO: 72802 - DNA, 885 bp, synthetic construct
  misc_feature 1..885: note = Description of Artificial Sequence: Synthetic coding sequence
  source 1..885: mol_type = other DNA
atgggcgccctggtgagatgcaccaccctgtgcctgggctactacaagaacatccacgacatcatccccgacagaagcggccccgagctgggcggcgacgccaccatcagaaagatgctgagcttctggtggcccctggccctgatcctggccacccagagaatcagcagacccatcgtgaacctgttcgtgagcagagacctgggcggcagcagcgccgccaccgaggccgtggccatcctgaccgccacctaccccgtgggccacatgccctacggctggctgaccgagatcagagccgtgtaccccgccttcgacaagaacaaccccagcaacaagctggtgagcaccagcaacaccgtgaccgccgcccacatcaagaagttcaccttcgtgtgcatggccctgagcctgaccctgtgcttcgtgatgttctggacccccaacgtgagcgagaagatcctgatcgacatcatcggcgtggacttcgccttcgccgagctgtgcgtggtgcccctgagaatcttcagcttcttccccgtgcccgtgaccgtgagagcccacctgaccggctggctgatgaccctgaagaagaccttcgtgctggcccccagcagcgtgctgagaatcatcgtgctgatcgccagcctggtggtgctgccctacctgggcgtgcacggcgccaccctgggcgtgggcagcctgctggccggcttcgtgggcgagagcaccatggtggccatcgccgcctgctacgtgtacagaaagcagaagaagaagatggagaacgagagcgccaccgagggcgaggacagcgccatgaccgacatgccccccaccgaggaggtgaccgacatcgtggagatgagagaggagaacgagtag

SEQ ID NO: 72803 - DNA, 471 bp, synthetic construct
  misc_feature 1..471: note = Description of Artificial Sequence: Synthetic coding sequence
  source 1..471: mol_type = other DNA
atgtggaccttcgtgacccagctgctggtgaccctggtgctgctgagcttcttcctggtgagctgccagaacgtgatgcacatcgtgagaggcagcctgtgcttcgtgctgaagcacatccaccaggagctggacaaggagctgggcgagagcgagggcctgagcgacgacgaggagaccatcagcaccagagtggtgagaagaagagtgttcctgaagggcaacgagttccagaacatccccggcgagcaggtgaccgaggagcagttcaccgacgagcagggcaacatcgtgaccaagaagatcatcagaaaggtggtgagacagatcgacctgagcagcgccgacgccgcccaggagcacgaggaggtgaccgtggagggccccctggaggaccccagcgagctggaggtggacatcgactacttcatgaagcacagcaaggaccacaccagcacccccaacccctag

SEQ ID NO: 72804 - DNA, 5694 bp, synthetic construct
  misc_feature 1..5694: note = Description of Artificial Sequence: Synthetic coding sequence
  source 1..5694: mol_type = other DNA
atggcccaggccgccaagcagctgaagaagatcaaggacatcgaggcccaggccctgcaggagcagaaggagaaggaggagagcaacagaaagagaagaaacagaagcagagacagaaagaagaaggccgacgccgccaccagcttcctgagagccgccagaagcggcaacctggacaaggccctggaccacctgagaaacggcgtggacatcaacacctgcaaccagaacggcctgaacggcctgcacctggccagcaaggagggccacgtgaagatggtggtggagctgctgcacaaggagatcatcctggagaccaccaccaagaagggcaacaccgccctgcacatcgccgccctggccggccaggacgaggtggtgagagagctggtgaactacggcgccaacgtgaacgcccagagccagaagggcttcacccccctgtacatggccgcccaggagaaccacctggaggtggtgaagttcctgctggagaacggcgccaaccagaacgtggccaccgaggacggcttcacccccctggccgtggccctgcagcagggccacgagaacgtggtggcccacctgatcaactacggcaccaagggcaaggtgagactgcccgccctgcacatcgccgccagaaacgacgacaccagaaccgccgccgtgctgctgcagaacgaccccaaccccgacgtgctgagcaagaccggcttcacccccctgcacatcgccgcccactacgagaacctgaacgtggcccagctgctgctgaacagaggcgccagcgtgaacttcaccccccagaacggcatcacccccctgcacatcgccagcagaagaggcaacgtgatcatggtgagactgctgctggacagaggcgcccagatcgagaccaagaccaaggacgagctgacccccctgcactgcgccgccagaaacggccacgtgagaatcagcgagatcctgctggaccacggcgcccccatccaggccaagaccaagaacggcctgagccccatccacatggccgcccagggcgaccacctggactgcgtgagactgctgctgcagtacgacgccgagatcgacgacatcaccctggaccacctgacccccctgcacgtggccgcccactgcggccaccacagagtggccaaggtgctgctggacaagggcgccaagcccaacagcagagccctgaacggcttcacccccctgcacatcgcctgcaagaagaaccacgtgagagtgatggagctgctgctgaagaccggcgccagcatcgacgccgtgaccgagagcggcctgacccccctgcacgtggccagcttcatgggccacctgcccatcgtgaagaacctgctgcagagaggcgccagccccaacgtgagcaacgtgaaggtggagacccccctgcacatggccgccagagccggccacaccgaggtggccaagtacctgctgcagaacaaggccaaggtgaacgccaaggccaaggacgaccagacccccctgcactgcgccgccagaatcggccacaccaacatggtgaagctgctgctggagaacaacgccaaccccaacctggccaccaccgccggccacacccccctgcacatcgccgccagagagggccacgtggagaccgtgctggccctgctggagaaggaggccagccaggcctgcatgaccaagaagggcttcacccccctgcacgtggccgccaagtacggcaaggtgagagtggccgagctgctgctggagagagacgcccaccccaacgccgccggcaagaacggcctgacccccctgcacgtggccgtgcaccacaacaacctggacatcgtgaagctgctgctgcccagaggcggcagcccccacagccccgcctggaacggctacacccccctgcacatcgccgccaagcagaaccaggtggaggtggccagaagcctgctgcagtacggcggcagcgccaacgccgagagcgtgcagggcgtgacccccctgcacctggccgcccaggagggccacgccgagatggtggccctgctgctgagcaagcaggccaacggcaacctgggcaacaagagcggcctgacccccctgcacctggtggcccaggagggccacgtgcccgtggccgacgtgctgatcaagcacggcgtgatggtggacgccaccaccagaatgggctacacccccctgcacgtggccagccactacggcaacatcaagctggtgaagttcctgctgcagcaccaggccgacgtgaacgccaagaccaagctgggctacagccccctgcaccaggccgcccagcagggccacaccgacatcgtgaccctgctgctgaagaacggcgccagccccaacgaggtgagcagcgacggcaccacccccctggccatcgccaagagactgggctacatcagcgtgaccgacgtgctgaaggtggtgaccgacgagaccagcttcgtgctggtgagcgacaagcacagaatgagcttccccgagaccgtggacgagatcctggacgtgagcgaggacgagggcaccgcccacatcaccatcatgggcgaggagctgatcagcttcaaggccgagagaagagacagcagagacgtggacgaggagaaggagctgctggacttcgtgcccaagctggaccaggtggtggagagccccgccatccccagaatcccctgcgccatgcccgagaccgtggtgatcagaagcgaggagcaggagcaggccagcaaggagtacgacgaggacagcctgatccccagcagccccgccaccgagaccagcgacaacatcagccccgtggccagccccgtgcacaccggcttcctggtgagcttcatggtggacgccagaggcggcagcatgagaggcagcagacacaacggcctgagagtggtgatcccccccagaacctgcgccgcccccaccagaatcacctgcagactggtgaagccccagaagctgagcacccccccccccctggccgaggaggagggcctggccagcagaatcatcgccctgggccccaccggcgcccagttcctgagccccgtgatcgtggagatcccccacttcgccagccacggcagaggcgacagagagctggtggtgctgagaagcgagaacggcagcgtgtggaaggagcacagaagcagatacggcgagagctacctggaccagatcctgaacggcatggacgaggagctgggcagcctggaggagctggagaagaagagagtgtgcagaatcatcaccaccgacttccccctgtacttcgtgatcatgagcagactgtgccaggactacgacaccatcggccccgagggcggcagcctgaagagcaagctggtgcccctggtgcaggccaccttccccgagaacgccgtgaccaagagagtgaagctggccctgcaggcccagcccgtgcccgacgagctggtgaccaagctgctgggcaaccaggccaccttcagccccatcgtgaccgtggagcccagaagaagaaagttccacagacccatcggcctgagaatccccctgccccccagctggaccgacaaccccagagacagcggcgagggcgacaccaccagcctgagactgctgtgcagcgtgatcggcggcaccgaccaggcccagtgggaggacatcaccggcaccaccaagctggtgtacgccaacgagtgcgccaacttcaccaccaacgtgagcgccagattctggctgagcgactgccccagaaccgccgaggccgtgaacttcgccaccctgctgtacaaggagctgaccgccgtgccctacatggccaagttcgtgatcttcgccaagatgaacgaccccagagagggcagactgagatgctactgcatgaccgacgacaaggtggacaagaccctggagcagcacgagaacttcgtggaggtggccagaagcagagacatcgaggtgctggagggcatgagcctgttcgccgagctgagcggcaacctggtgcccgtgaagaaggccgcccagcagagaagcttccacttccagagcttcagagagaacagactggccatgcccgtgaaggtgagagacagcagcagagagcccggcggcagcctgagcttcctgagaaaggccatgaagtacgaggacacccagcacatcctgtgccacctgaacatcaccatgcccccctgcgccaagggcagcggcgccgaggacagaagaagaacccccacccccctggccctgagatacagcatcctgagcgagagcacccccggcagcctgagcggcaccgagcaggccgagatgaagatggccgtgatcagcgagcacctgggcctgagctgggccgagctggccagagagctgcagttcagcgtggaggacatcaacagaatcagagtggagaaccccaacagcctgctggagcagagcgtggccctgctgaacctgtgggtgatcagagagggccagaacgccaacatggagaacctgtacaccgccctgcagagcatcgacagaggcgagatcgtgaacatgctggagggcagcggcagacagagcagaaacctgaagcccgacagaagacacaccgacagagactacagcctgagccccagccagatgaacggctacagcagcctgcaggacgagctgctgagccccgccagcctgggctgcgccctgagcagccccctgagagccgaccagtactggaacgaggtggccgtgctggacgccatccccctggccgccaccgagcacgacaccatgctggagatgagcgacatgcaggtgtggagcgccggcctgacccccagcctggtgaccgccgaggacagcagcctggagtgcagcaaggccgaggacagcgacgccaccggccacgagtggaagctggagggcgccctgagcgaggagcccagaggccccgagctgggcagcctggagctggtggaggacgacaccgtggacagcgacgccaccaacggcctgatcgacctgctggagcaggaggagggccagagaagcgaggagaagctgcccggcagcaagagacaggacgacgccaccggcgccggccaggacagcgagaacgaggtgagcctggtgagcggccaccagagaggccaggccagaatcacccacagccccaccgtgagccaggtgaccgagagaagccaggacagactgcaggactgggacgccgacggcagcatcgtgagctacctgcaggacgccgcccagggcagctggcaggaggaggtgacccagggcccccacagcttccagggcaccagcaccatgaccgagggcctggagcccggcggcagccaggagtacgagaaggtgctggtgagcgtgagcgagcacacctggaccgagcagcccgaggccgagagcagccaggccgacagagacagaagacagcagggccaggaggagcaggtgcaggaggccaagaacaccttcacccaggtggtgcagggcaacgagttccagaacatccccggcgagcaggtgaccgaggagcagttcaccgacgagcagggcaacatcgtgaccaagaagatcatcagaaaggtggtgagacagatcgacctgagcagcgccgacgccgcccaggagcacgaggaggaccacaccagcacccccaacccctag

SEQ ID NO: 72805 - DNA, 5643 bp, synthetic construct
  misc_feature 1..5643: note = Description of Artificial Sequence: Synthetic coding sequence
  source 1..5643: mol_type = other DNA
atgccctacagcgtgggcttcagagaggccgacgccgccaccagcttcctgagagccgccagaagcggcaacctggacaaggccctggaccacctgagaaacggcgtggacatcaacacctgcaaccagaacggcctgaacggcctgcacctggccagcaaggagggccacgtgaagatggtggtggagctgctgcacaaggagatcatcctggagaccaccaccaagaagggcaacaccgccctgcacatcgccgccctggccggccaggacgaggtggtgagagagctggtgaactacggcgccaacgtgaacgcccagagccagaagggcttcacccccctgtacatggccgcccaggagaaccacctggaggtggtgaagttcctgctggagaacggcgccaaccagaacgtggccaccgaggacggcttcacccccctggccgtggccctgcagcagggccacgagaacgtggtggcccacctgatcaactacggcaccaagggcaaggtgagactgcccgccctgcacatcgccgccagaaacgacgacaccagaaccgccgccgtgctgctgcagaacgaccccaaccccgacgtgctgagcaagaccggcttcacccccctgcacatcgccgcccactacgagaacctgaacgtggcccagctgctgctgaacagaggcgccagcgtgaacttcaccccccagaacggcatcacccccctgcacatcgccagcagaagaggcaacgtgatcatggtgagactgctgctggacagaggcgcccagatcgagaccaagaccaaggacgagctgacccccctgcactgcgccgccagaaacggccacgtgagaatcagcgagatcctgctggaccacggcgcccccatccaggccaagaccaagaacggcctgagccccatccacatggccgcccagggcgaccacctggactgcgtgagactgctgctgcagtacgacgccgagatcgacgacatcaccctggaccacctgacccccctgcacgtggccgcccactgcggccaccacagagtggccaaggtgctgctggacaagggcgccaagcccaacagcagagccctgaacggcttcacccccctgcacatcgcctgcaagaagaaccacgtgagagtgatggagctgctgctgaagaccggcgccagcatcgacgccgtgaccgagagcggcctgacccccctgcacgtggccagcttcatgggccacctgcccatcgtgaagaacctgctgcagagaggcgccagccccaacgtgagcaacgtgaaggtggagacccccctgcacatggccgccagagccggccacaccgaggtggccaagtacctgctgcagaacaaggccaaggtgaacgccaaggccaaggacgaccagacccccctgcactgcgccgccagaatcggccacaccaacatggtgaagctgctgctggagaacaacgccaaccccaacctggccaccaccgccggccacacccccctgcacatcgccgccagagagggccacgtggagaccgtgctggccctgctggagaaggaggccagccaggcctgcatgaccaagaagggcttcacccccctgcacgtggccgccaagtacggcaaggtgagagtggccgagctgctgctggagagagacgcccaccccaacgccgccggcaagaacggcctgacccccctgcacgtggccgtgcaccacaacaacctggacatcgtgaagctgctgctgcccagaggcggcagcccccacagccccgcctggaacggctacacccccctgcacatcgccgccaagcagaaccaggtggaggtggccagaagcctgctgcagtacggcggcagcgccaacgccgagagcgtgcagggcgtgacccccctgcacctggccgcccaggagggccacgccgagatggtggccctgctgctgagcaagcaggccaacggcaacctgggcaacaagagcggcctgacccccctgcacctggtggcccaggagggccacgtgcccgtggccgacgtgctgatcaagcacggcgtgatggtggacgccaccaccagaatgggctacacccccctgcacgtggccagccactacggcaacatcaagctggtgaagttcctgctgcagcaccaggccgacgtgaacgccaagaccaagctgggctacagccccctgcaccaggccgcccagcagggccacaccgacatcgtgaccctgctgctgaagaacggcgccagccccaacgaggtgagcagcgacggcaccacccccctggccatcgccaagagactgggctacatcagcgtgaccgacgtgctgaaggtggtgaccgacgagaccagcttcgtgctggtgagcgacaagcacagaatgagcttccccgagaccgtggacgagatcctggacgtgagcgaggacgagggcgaggagctgatcagcttcaaggccgagagaagagacagcagagacgtggacgaggagaaggagctgctggacttcgtgcccaagctggaccaggtggtggagagccccgccatccccagaatcccctgcgccatgcccgagaccgtggtgatcagaagcgaggagcaggagcaggccagcaaggagtacgacgaggacagcctgatccccagcagccccgccaccgagaccagcgacaacatcagccccgtggccagccccgtgcacaccggcttcctggtgagcttcatggtggacgccagaggcggcagcatgagaggcagcagacacaacggcctgagagtggtgatcccccccagaacctgcgccgcccccaccagaatcacctgcagactggtgaagccccagaagctgagcacccccccccccctggccgaggaggagggcctggccagcagaatcatcgccctgggccccaccggcgcccagttcctgagccccgtgatcgtggagatcccccacttcgccagccacggcagaggcgacagagagctggtggtgctgagaagcgagaacggcagcgtgtggaaggagcacagaagcagatacggcgagagctacctggaccagatcctgaacggcatggacgaggagctgggcagcctggaggagctggagaagaagagagtgtgcagaatcatcaccaccgacttccccctgtacttcgtgatcatgagcagactgtgccaggactacgacaccatcggccccgagggcggcagcctgaagagcaagctggtgcccctggtgcaggccaccttccccgagaacgccgtgaccaagagagtgaagctggccctgcaggcccagcccgtgcccgacgagctggtgaccaagctgctgggcaaccaggccaccttcagccccatcgtgaccgtggagcccagaagaagaaagttccacagacccatcggcctgagaatccccctgccccccagctggaccgacaaccccagagacagcggcgagggcgacaccaccagcctgagactgctgtgcagcgtgatcggcggcaccgaccaggcccagtgggaggacatcaccggcaccaccaagctggtgtacgccaacgagtgcgccaacttcaccaccaacgtgagcgccagattctggctgagcgactgccccagaaccgccgaggccgtgaacttcgccaccctgctgtacaaggagctgaccgccgtgccctacatggccaagttcgtgatcttcgccaagatgaacgaccccagagagggcagactgagatgctactgcatgaccgacgacaaggtggacaagaccctggagcagcacgagaacttcgtggaggtggccagaagcagagacatcgaggtgctggagggcatgagcctgttcgccgagctgagcggcaacctggtgcccgtgaagaaggccgcccagcagagaagcttccacttccagagcttcagagagaacagactggccatgcccgtgaaggtgagagacagcagcagagagcccggcggcagcctgagcttcctgagaaaggccatgaagtacgaggacacccagcacatcctgtgccacctgaacatcaccatgcccccctgcgccaagggcagcggcgccgaggacagaagaagaacccccacccccctggccctgagatacagcatcctgagcgagagcacccccggcagcctgagcggcaccgagcaggccgagatgaagatggccgtgatcagcgagcacctgggcctgagctgggccgagctggccagagagctgcagttcagcgtggaggacatcaacagaatcagagtggagaaccccaacagcctgctggagcagagcgtggccctgctgaacctgtgggtgatcagagagggccagaacgccaacatggagaacctgtacaccgccctgcagagcatcgacagaggcgagatcgtgaacatgctggagggcagcggcagacagagcagaaacctgaagcccgacagaagacacaccgacagagactacagcctgagccccagccagatgaacggctacagcagcctgcaggacgagctgctgagccccgccagcctgggctgcgccctgagcagccccctgagagccgaccagtactggaacgaggtggccgtgctggacgccatccccctggccgccaccgagcacgacaccatgctggagatgagcgacatgcaggtgtggagcgccggcctgacccccagcctggtgaccgccgaggacagcagcctggagtgcagcaaggccgaggacagcgacgccaccggccacgagtggaagctggagggcgccctgagcgaggagcccagaggccccgagctgggcagcctggagctggtggaggacgacaccgtggacagcgacgccaccaacggcctgatcgacctgctggagcaggaggagggccagagaagcgaggagaagctgcccggcagcaagagacaggacgacgccaccggcgccggccaggacagcgagaacgaggtgagcctggtgagcggccaccagagaggccaggccagaatcacccacagccccaccgtgagccaggtgaccgagagaagccaggacagactgcaggactgggacgccgacggcagcatcgtgagctacctgcaggacgccgcccagggcagctggcaggaggaggtgacccagggcccccacagcttccagggcaccagcaccatgaccgagggcctggagcccggcggcagccaggagtacgagaaggtgctggtgagcgtgagcgagcacacctggaccgagcagcccgaggccgagagcagccaggccgacagagacagaagacagcagggccaggaggagcaggtgcaggaggccaagaacaccttcacccaggtggtgcagggcaacgagttccagaacatccccggcgagcaggtgaccgaggagcagttcaccgacgagcagggcaacatcgtgaccaagaagatcatcagaaaggtggtgagacagatcgacctgagcagcgccgacgccgcccaggagcacgaggaggtggagctgagaggcagcggcctgcagcccgacctgatcgagggcagaaagggcgcccagatcgtgaagagagccagcctgaagagaggcaagcagtag

SEQ ID NO: 72806 - DNA, 468 bp, synthetic construct
  misc_feature 1..468: note = Description of Artificial Sequence: Synthetic coding sequence
  source 1..468: mol_type = other DNA
atgtggaccttcgtgacccagctgctggtgaccctggtgctgctgagcttcttcctggtgagctgccagaacgtgatgcacatcgtgagaggcagcctgtgcttcgtgctgaagcacatccaccaggagctggacaaggagctgggcgagagcgagggcctgagcgacgacgaggagaccatcagcaccagagtggtgagaagaagagtgttcctgaagggcaacgagttccagaacatccccggcgagcaggtgaccgaggagcagttcaccgacgagcagggcaacatcgtgaccaagaagatcatcagaaaggtggtgagacagatcgacctgagcagcgccgacgccgcccaggagcacgaggaggtggagctgagaggcagcggcctgcagcccgacctgatcgagggcagaaagggcgcccagatcgtgaagagagccagcctgaagagaggcaagcagtag

SEQ ID NO: 72807 - DNA, 5646 bp, synthetic construct
  misc_feature 1..5646: note = Description of Artificial Sequence: Synthetic coding sequence
  source 1..5646: mol_type = other DNA
atgccctacagcgtgggcttcagagaggccgacgccgccaccagcttcctgagagccgccagaagcggcaacctggacaaggccctggaccacctgagaaacggcgtggacatcaacacctgcaaccagaacggcctgaacggcctgcacctggccagcaaggagggccacgtgaagatggtggtggagctgctgcacaaggagatcatcctggagaccaccaccaagaagggcaacaccgccctgcacatcgccgccctggccggccaggacgaggtggtgagagagctggtgaactacggcgccaacgtgaacgcccagagccagaagggcttcacccccctgtacatggccgcccaggagaaccacctggaggtggtgaagttcctgctggagaacggcgccaaccagaacgtggccaccgaggacggcttcacccccctggccgtggccctgcagcagggccacgagaacgtggtggcccacctgatcaactacggcaccaagggcaaggtgagactgcccgccctgcacatcgccgccagaaacgacgacaccagaaccgccgccgtgctgctgcagaacgaccccaaccccgacgtgctgagcaagaccggcttcacccccctgcacatcgccgcccactacgagaacctgaacgtggcccagctgctgctgaacagaggcgccagcgtgaacttcaccccccagaacggcatcacccccctgcacatcgccagcagaagaggcaacgtgatcatggtgagactgctgctggacagaggcgcccagatcgagaccaagaccaaggacgagctgacccccctgcactgcgccgccagaaacggccacgtgagaatcagcgagatcctgctggaccacggcgcccccatccaggccaagaccaagaacggcctgagccccatccacatggccgcccagggcgaccacctggactgcgtgagactgctgctgcagtacgacgccgagatcgacgacatcaccctggaccacctgacccccctgcacgtggccgcccactgcggccaccacagagtggccaaggtgctgctggacaagggcgccaagcccaacagcagagccctgaacggcttcacccccctgcacatcgcctgcaagaagaaccacgtgagagtgatggagctgctgctgaagaccggcgccagcatcgacgccgtgaccgagagcggcctgacccccctgcacgtggccagcttcatgggccacctgcccatcgtgaagaacctgctgcagagaggcgccagccccaacgtgagcaacgtgaaggtggagacccccctgcacatggccgccagagccggccacaccgaggtggccaagtacctgctgcagaacaaggccaaggtgaacgccaaggccaaggacgaccagacccccctgcactgcgccgccagaatcggccacaccaacatggtgaagctgctgctggagaacaacgccaaccccaacctggccaccaccgccggccacacccccctgcacatcgccgccagagagggccacgtggagaccgtgctggccctgctggagaaggaggccagccaggcctgcatgaccaagaagggcttcacccccctgcacgtggccgccaagtacggcaaggtgagagtggccgagctgctgctggagagagacgcccaccccaacgccgccggcaagaacggcctgacccccctgcacgtggccgtgcaccacaacaacctggacatcgtgaagctgctgctgcccagaggcggcagcccccacagccccgcctggaacggctacacccccctgcacatcgccgccaagcagaaccaggtggaggtggccagaagcctgctgcagtacggcggcagcgccaacgccgagagcgtgcagggcgtgacccccctgcacctggccgcccaggagggccacgccgagatggtggccctgctgctgagcaagcaggccaacggcaacctgggcaacaagagcggcctgacccccctgcacctggtggcccaggagggccacgtgcccgtggccgacgtgctgatcaagcacggcgtgatggtggacgccaccaccagaatgggctacacccccctgcacgtggccagccactacggcaacatcaagctggtgaagttcctgctgcagcaccaggccgacgtgaacgccaagaccaagctgggctacagccccctgcaccaggccgcccagcagggccacaccgacatcgtgaccctgctgctgaagaacggcgccagccccaacgaggtgagcagcgacggcaccacccccctggccatcgccaagagactgggctacatcagcgtgaccgacgtgctgaaggtggtgaccgacgagaccagcttcgtgctggtgagcgacaagcacagaatgagcttccccgagaccgtggacgagatcctggacgtgagcgaggacgagggcgaggagctgatcagcttcaaggccgagagaagagacagcagagacgtggacgaggagaaggagctgctggacttcgtgcccaagctggaccaggtggtggagagccccgccatccccagaatcccctgcgccatgcccgagaccgtggtgatcagaagcgaggagcaggagcaggccagcaaggagtacgacgaggacagcctgatccccagcagccccgccaccgagaccagcgacaacatcagccccgtggccagccccgtgcacaccggcttcctggtgagcttcatggtggacgccagaggcggcagcatgagaggcagcagacacaacggcctgagagtggtgatcccccccagaacctgcgccgcccccaccagaatcacctgcagactggtgaagccccagaagctgagcacccccccccccctggccgaggaggagggcctggccagcagaatcatcgccctgggccccaccggcgcccagttcctgagccccgtgatcgtggagatcccccacttcgccagccacggcagaggcgacagagagctggtggtgctgagaagcgagaacggcagcgtgtggaaggagcacagaagcagatacggcgagagctacctggaccagatcctgaacggcatggacgaggagctgggcagcctggaggagctggagaagaagagagtgtgcagaatcatcaccaccgacttccccctgtacttcgtgatcatgagcagactgtgccaggactacgacaccatcggccccgagggcggcagcctgaagagcaagctggtgcccctggtgcaggccaccttccccgagaacgccgtgaccaagagagtgaagctggccctgcaggcccagcccgtgcccgacgagctggtgaccaagctgctgggcaaccaggccaccttcagccccatcgtgaccgtggagcccagaagaagaaagttccacagacccatcggcctgagaatccccctgccccccagctggaccgacaaccccagagacagcggcgagggcgacaccaccagcctgagactgctgtgcagcgtgatcggcggcaccgaccaggcccagtgggaggacatcaccggcaccaccaagctggtgtacgccaacgagtgcgccaacttcaccaccaacgtgagcgccagattctggctgagcgactgccccagaaccgccgaggccgtgaacttcgccaccctgctgtacaaggagctgaccgccgtgccctacatggccaagttcgtgatcttcgccaagatgaacgaccccagagagggcagactgagatgctactgcatgaccgacgacaaggtggacaagaccctggagcagcacgagaacttcgtggaggtggccagaagcagagacatcgaggtgctggagggcatgagcctgttcgccgagctgagcggcaacctggtgcccgtgaagaaggccgcccagcagagaagcttccacttccagagcttcagagagaacagactggccatgcccgtgaaggtgagagacagcagcagagagcccggcggcagcctgagcttcctgagaaaggccatgaagtacgaggacacccagcacatcctgtgccacctgaacatcaccatgcccccctgcgccaagggcagcggcgccgaggacagaagaagaacccccacccccctggccctgagatacagcatcctgagcgagagcacccccggcagcctgagcggcaccgagcaggccgagatgaagatggccgtgatcagcgagcacctgggcctgagctgggccgagctggccagagagctgcagttcagcgtggaggacatcaacagaatcagagtggagaaccccaacagcctgctggagcagagcgtggccctgctgaacctgtgggtgatcagagagggccagaacgccaacatggagaacctgtacaccgccctgcagagcatcgacagaggcgagatcgtgaacatgctggagggcagcggcagacagagcagaaacctgaagcccgacagaagacacaccgacagagactacagcctgagccccagccagatgaacggctacagcagcctgcaggacgagctgctgagccccgccagcctgggctgcgccctgagcagccccctgagagccgaccagtactggaacgaggtggccgtgctggacgccatccccctggccgccaccgagcacgacaccatgctggagatgagcgacatgcaggtgtggagcgccggcctgacccccagcctggtgaccgccgaggacagcagcctggagtgcagcaaggccgaggacagcgacgccaccggccacgagtggaagctggagggcgccctgagcgaggagcccagaggccccgagctgggcagcctggagctggtggaggacgacaccgtggacagcgacgccaccaacggcctgatcgacctgctggagcaggaggagggccagagaagcgaggagaagctgcccggcagcaagagacaggacgacgccaccggcgccggccaggacagcgagaacgaggtgagcctggtgagcggccaccagagaggccaggccagaatcacccacagccccaccgtgagccaggtgaccgagagaagccaggacagactgcaggactgggacgccgacggcagcatcgtgagctacctgcaggacgccgcccagggcagctggcaggaggaggtgacccagggcccccacagcttccagggcaccagcaccatgaccgagggcctggagcccggcggcagccaggagtacgagaaggtgctggtgagcgtgagcgagcacacctggaccgagcagcccgaggccgagagcagccaggccgacagagacagaagacagcagggccaggaggagcaggtgcaggaggccaagaacaccttcacccaggtggtgcagggcaacgagttccagaacatccccggcgagcaggtgaccgaggagcagttcaccgacgagcagggcaacatcgtgaccaagaagatcatcagaaaggtggtgagacagatcgacctgagcagcgccgacgccgcccaggagcacgaggaggtgaccgtggagggccccctggaggaccccagcgagctggaggtggacatcgactacttcatgaagcacagcaaggaccacaccagcacccccaacccctag

SEQ ID NO: 72808 - DNA, 330 bp, synthetic construct
  misc_feature 1..330: note = Description of Artificial Sequence: Synthetic coding sequence
  source 1..330: mol_type = other DNA
atgtggaccttcgtgacccagctgctggtgaccctggtgctgctgagcttcttcctggtgagctgccagaacgtgatgcacatcgtgagaggcagcctgtgcttcgtgctgaagcacatccaccaggagctggacaaggagctgggcgagagcgagggcctgagcgacgacgaggagaccatcagcaccagagtggtgagaagaagagtgttcctgaagggcaacgagttccagaacatccccggcgagcaggtgaccgaggagcagttcaccgacgagcagggcaacatcgtgaccaagaaggaccacaccagcacccccaacccctag

SEQ ID NO: 72809 - DNA, 5577 bp, synthetic construct
  misc_feature 1..5577: note = Description of Artificial Sequence: Synthetic coding sequence
  source 1..5577: mol_type = other DNA
atgccctacagcgtgggcttcagagaggccgacgccgccaccagcttcctgagagccgccagaagcggcaacctggacaaggccctggaccacctgagaaacggcgtggacatcaacacctgcaaccagaacggcctgaacggcctgcacctggccagcaaggagggccacgtgaagatggtggtggagctgctgcacaaggagatcatcctggagaccaccaccaagaagggcaacaccgccctgcacatcgccgccctggccggccaggacgaggtggtgagagagctggtgaactacggcgccaacgtgaacgcccagagccagaagggcttcacccccctgtacatggccgcccaggagaaccacctggaggtggtgaagttcctgctggagaacggcgccaaccagaacgtggccaccgaggacggcttcacccccctggccgtggccctgcagcagggccacgagaacgtggtggcccacctgatcaactacggcaccaagggcaaggtgagactgcccgccctgcacatcgccgccagaaacgacgacaccagaaccgccgccgtgctgctgcagaacgaccccaaccccgacgtgctgagcaagaccggcttcacccccctgcacatcgccgcccactacgagaacctgaacgtggcccagctgctgctgaacagaggcgccagcgtgaacttcaccccccagaacggcatcacccccctgcacatcgccagcagaagaggcaacgtgatcatggtgagactgctgctggacagaggcgcccagatcgagaccaagaccaaggacgagctgacccccctgcactgcgccgccagaaacggccacgtgagaatcagcgagatcctgctggaccacggcgcccccatccaggccaagaccaagaacggcctgagccccatccacatggccgcccagggcgaccacctggactgcgtgagactgctgctgcagtacgacgccgagatcgacgacatcaccctggaccacctgacccccctgcacgtggccgcccactgcggccaccacagagtggccaaggtgctgctggacaagggcgccaagcccaacagcagagccctgaacggcttcacccccctgcacatcgcctgcaagaagaaccacgtgagagtgatggagctgctgctgaagaccggcgccagcatcgacgccgtgaccgagagcggcctgacccccctgcacgtggccagcttcatgggccacctgcccatcgtgaagaacctgctgcagagaggcgccagccccaacgtgagcaacgtgaaggtggagacccccctgcacatggccgccagagccggccacaccgaggtggccaagtacctgctgcagaacaaggccaaggtgaacgccaaggccaaggacgaccagacccccctgcactgcgccgccagaatcggccacaccaacatggtgaagctgctgctggagaacaacgccaaccccaacctggccaccaccgccggccacacccccctgcacatcgccgccagagagggccacgtggagaccgtgctggccctgctggagaaggaggccagccaggcctgcatgaccaagaagggcttcacccccctgcacgtggccgccaagtacggcaaggtgagagtggccgagctgctgctggagagagacgcccaccccaacgccgccggcaagaacggcctgacccccctgcacgtggccgtgcaccacaacaacctggacatcgtgaagctgctgctgcccagaggcggcagcccccacagccccgcctggaacggctacacccccctgcacatcgccgccaagcagaaccaggtggaggtggccagaagcctgctgcagtacggcggcagcgccaacgccgagagcgtgcagggcgtgacccccctgcacctggccgcccaggagggccacgccgagatggtggccctgctgctgagcaagcaggccaacggcaacctgggcaacaagagcggcctgacccccctgcacctggtggcccaggagggccacgtgcccgtggccgacgtgctgatcaagcacggcgtgatggtggacgccaccaccagaatgggctacacccccctgcacgtggccagccactacggcaacatcaagctggtgaagttcctgctgcagcaccaggccgacgtgaacgccaagaccaagctgggctacagccccctgcaccaggccgcccagcagggccacaccgacatcgtgaccctgctgctgaagaacggcgccagccccaacgaggtgagcagcgacggcaccacccccctggccatcgccaagagactgggctacatcagcgtgaccgacgtgctgaaggtggtgaccgacgagaccagcttcgtgctggtgagcgacaagcacagaatgagcttccccgagaccgtggacgagatcctggacgtgagcgaggacgagggcgaggagctgatcagcttcaaggccgagagaagagacagcagagacgtggacgaggagaaggagctgctggacttcgtgcccaagctggaccaggtggtggagagccccgccatccccagaatcccctgcgccatgcccgagaccgtggtgatcagaagcgaggagcaggagcaggccagcaaggagtacgacgaggacagcctgatccccagcagccccgccaccgagaccagcgacaacatcagccccgtggccagccccgtgcacaccggcttcctggtgagcttcatggtggacgccagaggcggcagcatgagaggcagcagacacaacggcctgagagtggtgatcccccccagaacctgcgccgcccccaccagaatcacctgcagactggtgaagccccagaagctgagcacccccccccccctggccgaggaggagggcctggccagcagaatcatcgccctgggccccaccggcgcccagttcctgagccccgtgatcgtggagatcccccacttcgccagccacggcagaggcgacagagagctggtggtgctgagaagcgagaacggcagcgtgtggaaggagcacagaagcagatacggcgagagctacctggaccagatcctgaacggcatggacgaggagctgggcagcctggaggagctggagaagaagagagtgtgcagaatcatcaccaccgacttccccctgtacttcgtgatcatgagcagactgtgccaggactacgacaccatcggccccgagggcggcagcctgaagagcaagctggtgcccctggtgcaggccaccttccccgagaacgccgtgaccaagagagtgaagctggccctgcaggcccagcccgtgcccgacgagctggtgaccaagctgctgggcaaccaggccaccttcagccccatcgtgaccgtggagcccagaagaagaaagttccacagacccatcggcctgagaatccccctgccccccagctggaccgacaaccccagagacagcggcgagggcgacaccaccagcctgagactgctgtgcagcgtgatcggcggcaccgaccaggcccagtgggaggacatcaccggcaccaccaagctggtgtacgccaacgagtgcgccaacttcaccaccaacgtgagcgccagattctggctgagcgactgccccagaaccgccgaggccgtgaacttcgccaccctgctgtacaaggagctgaccgccgtgccctacatggccaagttcgtgatcttcgccaagatgaacgaccccagagagggcagactgagatgctactgcatgaccgacgacaaggtggacaagaccctggagcagcacgagaacttcgtggaggtggccagaagcagagacatcgaggtgctggagggcatgagcctgttcgccgagctgagcggcaacctggtgcccgtgaagaaggccgcccagcagagaagcttccacttccagagcttcagagagaacagactggccatgcccgtgaaggtgagagacagcagcagagagcccggcggcagcctgagcttcctgagaaaggccatgaagtacgaggacacccagcacatcctgtgccacctgaacatcaccatgcccccctgcgccaagggcagcggcgccgaggacagaagaagaacccccacccccctggccctgagatacagcatcctgagcgagagcacccccggcagcctgagcggcaccgagcaggccgagatgaagatggccgtgatcagcgagcacctgggcctgagctgggccgagctggccagagagctgcagttcagcgtggaggacatcaacagaatcagagtggagaaccccaacagcctgctggagcagagcgtggccctgctgaacctgtgggtgatcagagagggccagaacgccaacatggagaacctgtacaccgccctgcagagcatcgacagaggcgagatcgtgaacatgctggagggcagcggcagacagagcagaaacctgaagcccgacagaagacacaccgacagagactacagcctgagccccagccagatgaacggctacagcagcctgcaggacgagctgctgagccccgccagcctgggctgcgccctgagcagccccctgagagccgaccagtactggaacgaggtggccgtgctggacgccatccccctggccgccaccgagcacgacaccatgctggagatgagcgacatgcaggtgtggagcgccggcctgacccccagcctggtgaccgccgaggacagcagcctggagtgcagcaaggccgaggacagcgacgccaccggccacgagtggaagctggagggcgccctgagcgaggagcccagaggccccgagctgggcagcctggagctggtggaggacgacaccgtggacagcgacgccaccaacggcctgatcgacctgctggagcaggaggagggccagagaagcgaggagaagctgcccggcagcaagagacaggacgacgccaccggcgccggccaggacagcgagaacgaggtgagcctggtgagcggccaccagagaggccaggccagaatcacccacagccccaccgtgagccaggtgaccgagagaagccaggacagactgcaggactgggacgccgacggcagcatcgtgagctacctgcaggacgccgcccagggcagctggcaggaggaggtgacccagggcccccacagcttccagggcaccagcaccatgaccgagggcctggagcccggcggcagccaggagtacgagaaggtgctggtgagcgtgagcgagcacacctggaccgagcagcccgaggccgagagcagccaggccgacagagacagaagacagcagggccaggaggagcaggtgcaggaggccaagaacaccttcacccaggtggtgcagggcaacgagttccagaacatccccggcgagcaggtgaccgaggagcagttcaccgacgagcagggcaacatcgtgaccaagaaggtggagctgagaggcagcggcctgcagcccgacctgatcgagggcagaaagggcgcccagatcgtgaagagagccagcctgaagagaggcaagcagtag

SEQ ID NO: 72810 - DNA, 4560 bp, synthetic construct
  misc_feature 1..4560: note = Description of Artificial Sequence: Synthetic coding sequence
  source 1..4560: mol_type = other DNA
atgccctacagcgtgggcttcagagaggccgacgccgccaccagcttcctgagagccgccagaagcggcaacctggacaaggccctggaccacctgagaaacggcgtggacatcaacacctgcaaccagaacggcctgaacggcctgcacctggccagcaaggagggccacgtgaagatggtggtggagctgctgcacaaggagatcatcctggagaccaccaccaagaagggcaacaccgccctgcacatcgccgccctggccggccaggacgaggtggtgagagagctggtgaactacggcgccaacgtgaacgcccagagccagaagggcttcacccccctgtacatggccgcccaggagaaccacctggaggtggtgaagttcctgctggagaacggcgccaaccagaacgtggccaccgaggacggcttcacccccctggccgtggccctgcagcagggccacgagaacgtggtggcccacctgatcaactacggcaccaagggcaaggtgagactgcccgccctgcacatcgccgccagaaacgacgacaccagaaccgccgccgtgctgctgcagaacgaccccaaccccgacgtgctgagcaagaccggcttcacccccctgcacatcgccgcccactacgagaacctgaacgtggcccagctgctgctgaacagaggcgccagcgtgaacttcaccccccagaacggcatcacccccctgcacatcgccagcagaagaggcaacgtgatcatggtgagactgctgctggacagaggcgcccagatcgagaccaagaccaaggacgagctgacccccctgcactgcgccgccagaaacggccacgtgagaatcagcgagatcctgctggaccacggcgcccccatccaggccaagaccaagaacggcctgagccccatccacatggccgcccagggcgaccacctggactgcgtgagactgctgctgcagtacgacgccgagatcgacgacatcaccctggaccacctgacccccctgcacgtggccgcccactgcggccaccacagagtggccaaggtgctgctggacaagggcgccaagcccaacagcagagccctgaacggcttcacccccctgcacatcgcctgcaagaagaaccacgtgagagtgatggagctgctgctgaagaccggcgccagcatcgacgccgtgaccgagagcggcctgacccccctgcacgtggccagcttcatgggccacctgcccatcgtgaagaacctgctgcagagaggcgccagccccaacgtgagcaacgtgaaggtggagacccccctgcacatggccgccagagccggccacaccgaggtggccaagtacctgctgcagaacaaggccaaggtgaacgccaaggccaaggacgaccagacccccctgcactgcgccgccagaatcggccacaccaacatggtgaagctgctgctggagaacaacgccaaccccaacctggccaccaccgccggccacacccccctgcacatcgccgccagagagggccacgtggagaccgtgctggccctgctggagaaggaggccagccaggcctgcatgaccaagaagggcttcacccccctgcacgtggccgccaagtacggcaaggtgagagtggccgagctgctgctggagagagacgcccaccccaacgccgccggcaagaacggcctgacccccctgcacgtggccgtgcaccacaacaacctggacatcgtgaagctgctgctgcccagaggcggcagcccccacagccccgcctggaacggctacacccccctgcacatcgccgccaagcagaaccaggtggaggtggccagaagcctgctgcagtacggcggcagcgccaacgccgagagcgtgcagggcgtgacccccctgcacctggccgcccaggagggccacgccgagatggtggccctgctgctgagcaagcaggccaacggcaacctgggcaacaagagcggcctgacccccctgcacctggtggcccaggagggccacgtgcccgtggccgacgtgctgatcaagcacggcgtgatggtggacgccaccaccagaatgggctacacccccctgcacgtggccagccactacggcaacatcaagctggtgaagttcctgctgcagcaccaggccgacgtgaacgccaagaccaagctgggctacagccccctgcaccaggccgcccagcagggccacaccgacatcgtgaccctgctgctgaagaacggcgccagccccaacgaggtgagcagcgacggcaccacccccctggccatcgccaagagactgggctacatcagcgtgaccgacgtgctgaaggtggtgaccgacgagaccagcttcgtgctggtgagcgacaagcacagaatgagcttccccgagaccgtggacgagatcctggacgtgagcgaggacgagggcgaggagctgatcagcttcaaggccgagagaagagacagcagagacgtggacgaggagaaggagctgctggacttcgtgcccaagctggaccaggtggtggagagccccgccatccccagaatcccctgcgccatgcccgagaccgtggtgatcagaagcgaggagcaggagcaggccagcaaggagtacgacgaggacagcctgatccccagcagccccgccaccgagaccagcgacaacatcagccccgtggccagccccgtgcacaccggcttcctggtgagcttcatggtggacgccagaggcggcagcatgagaggcagcagacacaacggcctgagagtggtgatcccccccagaacctgcgccgcccccaccagaatcacctgcagactggtgaagccccagaagctgagcacccccccccccctggccgaggaggagggcctggccagcagaatcatcgccctgggccccaccggcgcccagttcctgagccccgtgatcgtggagatcccccacttcgccagccacggcagaggcgacagagagctggtggtgctgagaagcgagaacggcagcgtgtggaaggagcacagaagcagatacggcgagagctacctggaccagatcctgaacggcatggacgaggagctgggcagcctggaggagctggagaagaagagagtgtgcagaatcatcaccaccgacttccccctgtacttcgtgatcatgagcagactgtgccaggactacgacaccatcggccccgagggcggcagcctgaagagcaagctggtgcccctggtgcaggccaccttccccgagaacgccgtgaccaagagagtgaagctggccctgcaggcccagcccgtgcccgacgagctggtgaccaagctgctgggcaaccaggccaccttcagccccatcgtgaccgtggagcccagaagaagaaagttccacagacccatcggcctgagaatccccctgccccccagctggaccgacaaccccagagacagcggcgagggcgacaccaccagcctgagactgctgtgcagcgtgatcggcggcaccgaccaggcccagtgggaggacatcaccggcaccaccaagctggtgtacgccaacgagtgcgccaacttcaccaccaacgtgagcgccagattctggctgagcgactgccccagaaccgccgaggccgtgaacttcgccaccctgctgtacaaggagctgaccgccgtgccctacatggccaagttcgtgatcttcgccaagatgaacgaccccagagagggcagactgagatgctactgcatgaccgacgacaaggtggacaagaccctggagcagcacgagaacttcgtggaggtggccagaagcagagacatcgaggtgctggagggcatgagcctgttcgccgagctgagcggcaacctggtgcccgtgaagaaggccgcccagcagagaagcttccacttccagagcttcagagagaacagactggccatgcccgtgaaggtgagagacagcagcagagagcccggcggcagcctgagcttcctgagaaaggccatgaagtacgaggacacccagcacatcctgtgccacctgaacatcaccatgcccccctgcgccaagggcagcggcgccgaggacagaagaagaacccccacccccctggccctgagatacagcatcctgagcgagagcacccccggcagcctgagcggcaccgagcaggccgagatgaagatggccgtgatcagcgagcacctgggcctgagctgggccgagctggccagagagctgcagttcagcgtggaggacatcaacagaatcagagtggagaaccccaacagcctgctggagcagagcgtggccctgctgaacctgtgggtgatcagagagggccagaacgccaacatggagaacctgtacaccgccctgcagagcatcgacagaggcgagatcgtgaacatgctggagggcagcggcagacagagcagaaacctgaagcccgacagaagacacaccgacagagactacagcctgagccccagccagatgaacggcatcagcaccaacaacccctag

SEQ ID NO: 72811 - DNA, 5505 bp, synthetic construct
  misc_feature 1..5505: note = Description of Artificial Sequence: Synthetic coding sequence
  source 1..5505: mol_type = other DNA
atgccctacagcgtgggcttcagagaggccgacgccgccaccagcttcctgagagccgccagaagcggcaacctggacaaggccctggaccacctgagaaacggcgtggacatcaacacctgcaaccagaacggcctgaacggcctgcacctggccagcaaggagggccacgtgaagatggtggtggagctgctgcacaaggagatcatcctggagaccaccaccaagaagggcaacaccgccctgcacatcgccgccctggccggccaggacgaggtggtgagagagctggtgaactacggcgccaacgtgaacgcccagagccagaagggcttcacccccctgtacatggccgcccaggagaaccacctggaggtggtgaagttcctgctggagaacggcgccaaccagaacgtggccaccgaggacggcttcacccccctggccgtggccctgcagcagggccacgagaacgtggtggcccacctgatcaactacggcaccaagggcaaggtgagactgcccgccctgcacatcgccgccagaaacgacgacaccagaaccgccgccgtgctgctgcagaacgaccccaaccccgacgtgctgagcaagaccggcttcacccccctgcacatcgccgcccactacgagaacctgaacgtggcccagctgctgctgaacagaggcgccagcgtgaacttcaccccccagaacggcatcacccccctgcacatcgccagcagaagaggcaacgtgatcatggtgagactgctgctggacagaggcgcccagatcgagaccaagaccaaggacgagctgacccccctgcactgcgccgccagaaacggccacgtgagaatcagcgagatcctgctggaccacggcgcccccatccaggccaagaccaagaacggcctgagccccatccacatggccgcccagggcgaccacctggactgcgtgagactgctgctgcagtacgacgccgagatcgacgacatcaccctggaccacctgacccccctgcacgtggccgcccactgcggccaccacagagtggccaaggtgctgctggacaagggcgccaagcccaacagcagagccctgaacggcttcacccccctgcacatcgcctgcaagaagaaccacgtgagagtgatggagctgctgctgaagaccggcgccagcatcgacgccgtgaccgagagcggcctgacccccctgcacgtggccagcttcatgggccacctgcccatcgtgaagaacctgctgcagagaggcgccagccccaacgtgagcaacgtgaaggtggagacccccctgcacatggccgccagagccggccacaccgaggtggccaagtacctgctgcagaacaaggccaaggtgaacgccaaggccaaggacgaccagacccccctgcactgcgccgccagaatcggccacaccaacatggtgaagctgctgctggagaacaacgccaaccccaacctggccaccaccgccggccacacccccctgcacatcgccgccagagagggccacgtggagaccgtgctggccctgctggagaaggaggccagccaggcctgcatgaccaagaagggcttcacccccctgcacgtggccgccaagtacggcaaggtgagagtggccgagctgctgctggagagagacgcccaccccaacgccgccggcaagaacggcctgacccccctgcacgtggccgtgcaccacaacaacctggacatcgtgaagctgctgctgcccagaggcggcagcccccacagccccgcctggaacggctacacccccctgcacatcgccgccaagcagaaccaggtggaggtggccagaagcctgctgcagtacggcggcagcgccaacgccgagagcgtgcagggcgtgacccccctgcacctggccgcccaggagggccacgccgagatggtggccctgctgctgagcaagcaggccaacggcaacctgggcaacaagagcggcctgacccccctgcacctggtggcccaggagggccacgtgcccgtggccgacgtgctgatcaagcacggcgtgatggtggacgccaccaccagaatgggctacacccccctgcacgtggccagccactacggcaacatcaagctggtgaagttcctgctgcagcaccaggccgacgtgaacgccaagaccaagctgggctacagccccctgcaccaggccgcccagcagggccacaccgacatcgtgaccctgctgctgaagaacggcgccagccccaacgaggtgagcagcgacggcaccacccccctggccatcgccaagagactgggctacatcagcgtgaccgacgtgctgaaggtggtgaccgacgagaccagcttcgtgctggtgagcgacaagcacagaatgagcttccccgagaccgtggacgagatcctggacgtgagcgaggacgagggcgaggagctgatcagcttcaaggccgagagaagagacagcagagacgtggacgaggagaaggagctgctggacttcgtgcccaagctggaccaggtggtggagagccccgccatccccagaatcccctgcgccatgcccgagaccgtggtgatcagaagcgaggagcaggagcaggccagcaaggagtacgacgaggacagcctgatccccagcagccccgccaccgagaccagcgacaacatcagccccgtggccagccccgtgcacaccggcttcctggtgagcttcatggtggacgccagaggcggcagcatgagaggcagcagacacaacggcctgagagtggtgatcccccccagaacctgcgccgcccccaccagaatcacctgcagactggtgaagccccagaagctgagcacccccccccccctggccgaggaggagggcctggccagcagaatcatcgccctgggccccaccggcgcccagttcctgagccccgtgatcgtggagatcccccacttcgccagccacggcagaggcgacagagagctggtggtgctgagaagcgagaacggcagcgtgtggaaggagcacagaagcagatacggcgagagctacctggaccagatcctgaacggcatggacgaggagctgggcagcctggaggagctggagaagaagagagtgtgcagaatcatcaccaccgacttccccctgtacttcgtgatcatgagcagactgtgccaggactacgacaccatcggccccgagggcggcagcctgaagagcaagctggtgcccctggtgcaggccaccttccccgagaacgccgtgaccaagagagtgaagctggccctgcaggcccagcccgtgcccgacgagctggtgaccaagctgctgggcaaccaggccaccttcagccccatcgtgaccgtggagcccagaagaagaaagttccacagacccatcggcctgagaatccccctgccccccagctggaccgacaaccccagagacagcggcgagggcgacaccaccagcctgagactgctgtgcagcgtgatcggcggcaccgaccaggcccagtgggaggacatcaccggcaccaccaagctggtgtacgccaacgagtgcgccaacttcaccaccaacgtgagcgccagattctggctgagcgactgccccagaaccgccgaggccgtgaacttcgccaccctgctgtacaaggagctgaccgccgtgccctacatggccaagttcgtgatcttcgccaagatgaacgaccccagagagggcagactgagatgctactgcatgaccgacgacaaggtggacaagaccctggagcagcacgagaacttcgtggaggtggccagaagcagagacatcgaggtgctggagggcatgagcctgttcgccgagctgagcggcaacctggtgcccgtgaagaaggccgcccagcagagaagcttccacttccagagcttcagagagaacagactggccatgcccgtgaaggtgagagacagcagcagagagcccggcggcagcctgagcttcctgagaaaggccatgaagtacgaggacacccagcacatcctgtgccacctgaacatcaccatgcccccctgcgccaagggcagcggcgccgaggacagaagaagaacccccacccccctggccctgagatacagcatcctgagcgagagcacccccggcagcctgagcggcaccgagcaggccgagatgaagatggccgtgatcagcgagcacctgggcctgagctgggccgagctggccagagagctgcagttcagcgtggaggacatcaacagaatcagagtggagaaccccaacagcctgctggagcagagcgtggccctgctgaacctgtgggtgatcagagagggccagaacgccaacatggagaacctgtacaccgccctgcagagcatcgacagaggcgagatcgtgaacatgctggagggcagcggcagacagagcagaaacctgaagcccgacagaagacacaccgacagagactacagcctgagccccagccagatgaacggctacagcagcctgcaggacgagctgctgagccccgccagcctgggctgcgccctgagcagccccctgagagccgaccagtactggaacgaggtggccgtgctggacgccatccccctggccgccaccgagcacgacaccatgctggagatgagcgacatgcaggtgtggagcgccggcctgacccccagcctggtgaccgccgaggacagcagcctggagtgcagcaaggccgaggacagcgacgccaccggccacgagtggaagctggagggcgccctgagcgaggagcccagaggccccgagctgggcagcctggagctggtggaggacgacaccgtggacagcgacgccaccaacggcctgatcgacctgctggagcaggaggagggccagagaagcgaggagaagctgcccggcagcaagagacaggacgacgccaccggcgccggccaggacagcgagaacgaggtgagcctggtgagcggccaccagagaggccaggccagaatcacccacagccccaccgtgagccaggtgaccgagagaagccaggacagactgcaggactgggacgccgacggcagcatcgtgagctacctgcaggacgccgcccagggcagctggcaggaggaggtgacccagggcccccacagcttccagggcaccagcaccatgaccgagggcctggagcccggcggcagccaggagtacgagaaggtgctggtgagcgtgagcgagcacacctggaccgagcagcccgaggccgagagcagccaggccgacagagacagaagacagcagggccaggaggagcaggtgcaggaggccaagaacaccttcacccaggtggtgcagggcaacgagttccagaacatccccggcgagcaggtgaccgaggagcagttcaccgacgagcagggcaacatcgtgaccaagaaggaccacaccagcacccccaacccctag

SEQ ID NO: 72812 - DNA, 5718 bp, synthetic construct
  misc_feature 1..5718: note = Description of Artificial Sequence: Synthetic coding sequence
  source 1..5718: mol_type = other DNA
atgccctacagcgtgggcttcagagaggccgacgccgccaccagcttcctgagagccgccagaagcggcaacctggacaaggccctggaccacctgagaaacggcgtggacatcaacacctgcaaccagaacggcctgaacggcctgcacctggccagcaaggagggccacgtgaagatggtggtggagctgctgcacaaggagatcatcctggagaccaccaccaagaagggcaacaccgccctgcacatcgccgccctggccggccaggacgaggtggtgagagagctggtgaactacggcgccaacgtgaacgcccagagccagaagggcttcacccccctgtacatggccgcccaggagaaccacctggaggtggtgaagttcctgctggagaacggcgccaaccagaacgtggccaccgaggacggcttcacccccctggccgtggccctgcagcagggccacgagaacgtggtggcccacctgatcaactacggcaccaagggcaaggtgagactgcccgccctgcacatcgccgccagaaacgacgacaccagaaccgccgccgtgctgctgcagaacgaccccaaccccgacgtgctgagcaagaccggcttcacccccctgcacatcgccgcccactacgagaacctgaacgtggcccagctgctgctgaacagaggcgccagcgtgaacttcaccccccagaacggcatcacccccctgcacatcgccagcagaagaggcaacgtgatcatggtgagactgctgctggacagaggcgcccagatcgagaccaagaccaaggacgagctgacccccctgcactgcgccgccagaaacggccacgtgagaatcagcgagatcctgctggaccacggcgcccccatccaggccaagaccaagaacggcctgagccccatccacatggccgcccagggcgaccacctggactgcgtgagactgctgctgcagtacgacgccgagatcgacgacatcaccctggaccacctgacccccctgcacgtggccgcccactgcggccaccacagagtggccaaggtgctgctggacaagggcgccaagcccaacagcagagccctgaacggcttcacccccctgcacatcgcctgcaagaagaaccacgtgagagtgatggagctgctgctgaagaccggcgccagcatcgacgccgtgaccgagagcggcctgacccccctgcacgtggccagcttcatgggccacctgcccatcgtgaagaacctgctgcagagaggcgccagccccaacgtgagcaacgtgaaggtggagacccccctgcacatggccgccagagccggccacaccgaggtggccaagtacctgctgcagaacaaggccaaggtgaacgccaaggccaaggacgaccagacccccctgcactgcgccgccagaatcggccacaccaacatggtgaagctgctgctggagaacaacgccaaccccaacctggccaccaccgccggccacacccccctgcacatcgccgccagagagggccacgtggagaccgtgctggccctgctggagaaggaggccagccaggcctgcatgaccaagaagggcttcacccccctgcacgtggccgccaagtacggcaaggtgagagtggccgagctgctgctggagagagacgcccaccccaacgccgccggcaagaacggcctgacccccctgcacgtggccgtgcaccacaacaacctggacatcgtgaagctgctgctgcccagaggcggcagcccccacagccccgcctggaacggctacacccccctgcacatcgccgccaagcagaaccaggtggaggtggccagaagcctgctgcagtacggcggcagcgccaacgccgagagcgtgcagggcgtgacccccctgcacctggccgcccaggagggccacgccgagatggtggccctgctgctgagcaagcaggccaacggcaacctgggcaacaagagcggcctgacccccctgcacctggtggcccaggagggccacgtgcccgtggccgacgtgctgatcaagcacggcgtgatggtggacgccaccaccagaatgggctacacccccctgcacgtggccagccactacggcaacatcaagctggtgaagttcctgctgcagcaccaggccgacgtgaacgccaagaccaagctgggctacagccccctgcaccaggccgcccagcagggccacaccgacatcgtgaccctgctgctgaagaacggcgccagccccaacgaggtgagcagcgacggcaccacccccctggccatcgccaagagactgggctacatcagcgtgaccgacgtgctgaaggtggtgaccgacgagaccagcttcgtgctggtgagcgacaagcacagaatgagcttccccgagaccgtggacgagatcctggacgtgagcgaggacgagggcgaggagctgatcagcttcaaggccgagagaagagacagcagagacgtggacgaggagaaggagctgctggacttcgtgcccaagctggaccaggtggtggagagccccgccatccccagaatcccctgcgccatgcccgagaccgtggtgatcagaagcgaggagcaggagcaggccagcaaggagtacgacgaggacagcctgatccccagcagccccgccaccgagaccagcgacaacatcagccccgtggccagccccgtgcacaccggcttcctggtgagcttcatggtggacgccagaggcggcagcatgagaggcagcagacacaacggcctgagagtggtgatcccccccagaacctgcgccgcccccaccagaatcacctgcagactggtgaagccccagaagctgagcacccccccccccctggccgaggaggagggcctggccagcagaatcatcgccctgggccccaccggcgcccagttcctgagccccgtgatcgtggagatcccccacttcgccagccacggcagaggcgacagagagctggtggtgctgagaagcgagaacggcagcgtgtggaaggagcacagaagcagatacggcgagagctacctggaccagatcctgaacggcatggacgaggagctgggcagcctggaggagctggagaagaagagagtgtgcagaatcatcaccaccgacttccccctgtacttcgtgatcatgagcagactgtgccaggactacgacaccatcggccccgagggcggcagcctgaagagcaagctggtgcccctggtgcaggccaccttccccgagaacgccgtgaccaagagagtgaagctggccctgcaggcccagcccgtgcccgacgagctggtgaccaagctgctgggcaaccaggccaccttcagccccatcgtgaccgtggagcccagaagaagaaagttccacagacccatcggcctgagaatccccctgccccccagctggaccgacaaccccagagacagcggcgagggcgacaccaccagcctgagactgctgtgcagcgtgatcggcggcaccgaccaggcccagtgggaggacatcaccggcaccaccaagctggtgtacgccaacgagtgcgccaacttcaccaccaacgtgagcgccagattctggctgagcgactgccccagaaccgccgaggccgtgaacttcgccaccctgctgtacaaggagctgaccgccgtgccctacatggccaagttcgtgatcttcgccaagatgaacgaccccagagagggcagactgagatgctactgcatgaccgacgacaaggtggacaagaccctggagcagcacgagaacttcgtggaggtggccagaagcagagacatcgaggtgctggagggcatgagcctgttcgccgagctgagcggcaacctggtgcccgtgaagaaggccgcccagcagagaagcttccacttccagagcttcagagagaacagactggccatgcccgtgaaggtgagagacagcagcagagagcccggcggcagcctgagcttcctgagaaaggccatgaagtacgaggacacccagcacatcctgtgccacctgaacatcaccatgcccccctgcgccaagggcagcggcgccgaggacagaagaagaacccccacccccctggccctgagatacagcatcctgagcgagagcacccccggcagcctgagcggcaccgagcaggccgagatgaagatggccgtgatcagcgagcacctgggcctgagctgggccgagctggccagagagctgcagttcagcgtggaggacatcaacagaatcagagtggagaaccccaacagcctgctggagcagagcgtggccctgctgaacctgtgggtgatcagagagggccagaacgccaacatggagaacctgtacaccgccctgcagagcatcgacagaggcgagatcgtgaacatgctggagggcagcggcagacagagcagaaacctgaagcccgacagaagacacaccgacagagactacagcctgagccccagccagatgaacggctacagcagcctgcaggacgagctgctgagccccgccagcctgggctgcgccctgagcagccccctgagagccgaccagtactggaacgaggtggccgtgctggacgccatccccctggccgccaccgagcacgacaccatgctggagatgagcgacatgcaggtgtggagcgccggcctgacccccagcctggtgaccgccgaggacagcagcctggagtgcagcaaggccgaggacagcgacgccaccggccacgagtggaagctggagggcgccctgagcgaggagcccagaggccccgagctgggcagcctggagctggtggaggacgacaccgtggacagcgacgccaccaacggcctgatcgacctgctggagcaggaggagggccagagaagcgaggagaagctgcccggcagcaagagacaggacgacgccaccggcgccggccaggacagcgagaacgaggtgagcctggtgagcggccaccagagaggccaggccagaatcacccacagccccaccgtgagccaggtgaccgagagaagccaggacagactgcaggactgggacgccgacggcagcatcgtgagctacctgcaggacgccgcccagggcagctggcaggaggaggtgacccagggcccccacagcttccagggcaccagcaccatgaccgagggcctggagcccggcggcagccaggagtacgagaaggtgctggtgagcgtgagcgagcacacctggaccgagcagcccgaggccgagagcagccaggccgacagagacagaagacagcagggccaggaggagcaggtgcaggaggccaagaacaccttcacccaggtggtgcagggcaacgagttccagaacatccccggcgagcaggtgaccgaggagcagttcaccgacgagcagggcaacatcgtgaccaagaagatcatcagaaaggtggtgagacagatcgacctgagcagcgccgacgccgcccaggagcacgaggaggtgaccgtggagggccccctggaggaccccagcgagctggaggtggacatcgactacttcatgaagcacagcaaggtggagctgagaggcagcggcctgcagcccgacctgatcgagggcagaaagggcgcccagatcgtgaagagagccagcctgaagagaggcaagcagtag

SEQ ID NO: 72813 - DNA, 5421 bp, synthetic construct
  misc_feature 1..5421: note = Description of Artificial Sequence: Synthetic coding sequence
  source 1..5421: mol_type = other DNA
atgccctacagcgtgggcttcagagaggccgacgccgccaccagcttcctgagagccgccagaagcggcaacctggacaaggccctggaccacctgagaaacggcgtggacatcaacacctgcaaccagaacggcctgaacggcctgcacctggccagcaaggagggccacgtgaagatggtggtggagctgctgcacaaggagatcatcctggagaccaccaccaagaagggcaacaccgccctgcacatcgccgccctggccggccaggacgaggtggtgagagagctggtgaactacggcgccaacgtgaacgcccagagccagaagggcttcacccccctgtacatggccgcccaggagaaccacctggaggtggtgaagttcctgctggagaacggcgccaaccagaacgtggccaccgaggacggcttcacccccctggccgtggccctgcagcagggccacgagaacgtggtggcccacctgatcaactacggcaccaagggcaaggtgagactgcccgccctgcacatcgccgccagaaacgacgacaccagaaccgccgccgtgctgctgcagaacgaccccaaccccgacgtgctgagcaagaccggcttcacccccctgcacatcgccgcccactacgagaacctgaacgtggcccagctgctgctgaacagaggcgccagcgtgaacttcaccccccagaacggcatcacccccctgcacatcgccagcagaagaggcaacgtgatcatggtgagactgctgctggacagaggcgcccagatcgagaccaagaccaaggacgagctgacccccctgcactgcgccgccagaaacggccacgtgagaatcagcgagatcctgctggaccacggcgcccccatccaggccaagaccaagaacggcctgagccccatccacatggccgcccagggcgaccacctggactgcgtgagactgctgctgcagtacgacgccgagatcgacgacatcaccctggaccacctgacccccctgcacgtggccgcccactgcggccaccacagagtggccaaggtgctgctggacaagggcgccaagcccaacagcagagccctgaacggcttcacccccctgcacatcgcctgcaagaagaaccacgtgagagtgatggagctgctgctgaagaccggcgccagcatcgacgccgtgaccgagagcggcctgacccccctgcacgtggccagcttcatgggccacctgcccatcgtgaagaacctgctgcagagaggcgccagccccaacgtgagcaacgtgaaggtggagacccccctgcacatggccgccagagccggccacaccgaggtggccaagtacctgctgcagaacaaggccaaggtgaacgccaaggccaaggacgaccagacccccctgcactgcgccgccagaatcggccacaccaacatggtgaagctgctgctggagaacaacgccaaccccaacctggccaccaccgccggccacacccccctgcacatcgccgccagagagggccacgtggagaccgtgctggccctgctggagaaggaggccagccaggcctgcatgaccaagaagggcttcacccccctgcacgtggccgccaagtacggcaaggtgagagtggccgagctgctgctggagagagacgcccaccccaacgccgccggcaagaacggcctgacccccctgcacgtggccgtgcaccacaacaacctggacatcgtgaagctgctgctgcccagaggcggcagcccccacagccccgcctggaacggctacacccccctgcacatcgccgccaagcagaaccaggtggaggtggccagaagcctgctgcagtacggcggcagcgccaacgccgagagcgtgcagggcgtgacccccctgcacctggccgcccaggagggccacgccgagatggtggccctgctgctgagcaagcaggccaacggcaacctgggcaacaagagcggcctgacccccctgcacctggtggcccaggagggccacgtgcccgtggccgacgtgctgatcaagcacggcgtgatggtggacgccaccaccagaatgggctacacccccctgcacgtggccagccactacggcaacatcaagctggtgaagttcctgctgcagcaccaggccgacgtgaacgccaagaccaagctgggctacagccccctgcaccaggccgcccagcagggccacaccgacatcgtgaccctgctgctgaagaacggcgccagccccaacgaggtgagcagcgacggcaccacccccctggccatcgccaagagactgggctacatcagcgtgaccgacgtgctgaaggtggtgaccgacgagaccagcttcgtgctggtgagcgacaagcacagaatgagcttccccgagaccgtggacgagatcctggacgtgagcgaggacgagggcgaggagctgatcagcttcaaggccgagagaagagacagcagagacgtggacgaggagaaggagctgctggacttcgtgcccaagctggaccaggtggtggagagccccgccatccccagaatcccctgcgccatgcccgagaccgtggtgatcagaagcgaggagcaggagcaggccagcaaggagtacgacgaggacagcctgatccccagcagccccgccaccgagaccagcgacaacatcagccccgtggccagccccgtgcacaccggcttcctggtgagcttcatggtggacgccagaggcggcagcatgagaggcagcagacacaacggcctgagagtggtgatcccccccagaacctgcgccgcccccaccagaatcacctgcagactggtgaagccccagaagctgagcacccccccccccctggccgaggaggagggcctggccagcagaatcatcgccctgggccccaccggcgcccagttcctgagccccgtgatcgtggagatcccccacttcgccagccacggcagaggcgacagagagctggtggtgctgagaagcgagaacggcagcgtgtggaaggagcacagaagcagatacggcgagagctacctggaccagatcctgaacggcatggacgaggagctgggcagcctggaggagctggagaagaagagagtgtgcagaatcatcaccaccgacttccccctgtacttcgtgatcatgagcagactgtgccaggactacgacaccatcggccccgagggcggcagcctgaagagcaagctggtgcccctggtgcaggccaccttccccgagaacgccgtgaccaagagagtgaagctggccctgcaggcccagcccgtgcccgacgagctggtgaccaagctgctgggcaaccaggccaccttcagccccatcgtgaccgtggagcccagaagaagaaagttccacagacccatcggcctgagaatccccctgccccccagctggaccgacaaccccagagacagcggcgagggcgacaccaccagcctgagactgctgtgcagcgtgatcggcggcaccgaccaggcccagtgggaggacatcaccggcaccaccaagctggtgtacgccaacgagtgcgccaacttcaccaccaacgtgagcgccagattctggctgagcgactgccccagaaccgccgaggccgtgaacttcgccaccctgctgtacaaggagctgaccgccgtgccctacatggccaagttcgtgatcttcgccaagatgaacgaccccagagagggcagactgagatgctactgcatgaccgacgacaaggtggacaagaccctggagcagcacgagaacttcgtggaggtggccagaagcagagacatcgaggtgctggagggcatgagcctgttcgccgagctgagcggcaacctggtgcccgtgaagaaggccgcccagcagagaagcttccacttccagagcttcagagagaacagactggccatgcccgtgaaggtgagagacagcagcagagagcccggcggcagcctgagcttcctgagaaaggccatgaagtacgaggacacccagcacatcctgtgccacctgaacatcaccatgcccccctgcgccaagggcagcggcgccgaggacagaagaagaacccccacccccctggccctgagatacagcatcctgagcgagagcacccccggcagcctgagcggcaccgagcaggccgagatgaagatggccgtgatcagcgagcacctgggcctgagctgggccgagctggccagagagctgcagttcagcgtggaggacatcaacagaatcagagtggagaaccccaacagcctgctggagcagagcgtggccctgctgaacctgtgggtgatcagagagggccagaacgccaacatggagaacctgtacaccgccctgcagagcatcgacagaggcgagatcgtgaacatgctggagggcagcggcagacagagcagaaacctgaagcccgacagaagacacaccgacagagactacagcctgagccccagccagatgaacggctacagcagcctgcaggacgagctgctgagccccgccagcctgggctgcgccctgagcagccccctgagagccgaccagtactggaacgaggtggccgtgctggacgccatccccctggccgccaccgagcacgacaccatgctggagatgagcgacatgcaggtgtggagcgccggcctgacccccagcctggtgaccgccgaggacagcagcctggagtgcagcaaggccgaggacagcgacgccaccggccacgagtggaagctggagggcgccctgagcgaggagcccagaggccccgagctgggcagcctggagctggtggaggacgacaccgtggacagcgacgccaccaacggcctgatcgacctgctggagcaggaggagggccagagaagcgaggagaagctgcccggcagcaagagacaggacgacgccaccggcgccggccaggacagcgagaacgaggtgagcctggtgagcggccaccagagaggccaggccagaatcacccacagccccaccgtgagccaggtgaccgagagaagccaggacagactgcaggactgggacgccgacggcagcatcgtgagctacctgcaggacgccgcccagggcagctggcaggaggaggtgacccagggcccccacagcttccagggcaccagcaccatgaccgagggcctggagcccggcggcagccaggagtacgagaaggtgctggtgagcgtgagcgagcacacctggaccgagcagcccgaggccgagagcagccaggccgacagagacagaagacagcagggccaggaggagcaggtgcaggaggccaagaacaccttcacccaggtggtgcaggaccacaccagcacccccaacccctag

SEQ ID NO: 72814 - DNA, 330 bp, synthetic construct; identical to SEQ ID NO: 72808
  misc_feature 1..330: note = Description of Artificial Sequence: Synthetic coding sequence
  source 1..330: mol_type = other DNA

SEQ ID NO: 72815 - DNA, 11775 bp, synthetic construct
  misc_feature 1..11775: note = Description of Artificial Sequence: Synthetic coding sequence
  source 1..11775: mol_type = other DNA
atgatgaacgaggacgccgcccagaagagcgacagcggcgagaagttcaacggcagcagccagagaagaaagagacccaagaagagcgacagcaacgccagcttcctgagagccgccagagccggcaacctggacaaggtggtggagtacctgaagggcggcatcgacatcaacacctgcaaccagaacggcctgaacgccctgcacctggccgccaaggagggccacgtgggcctggtgcaggagctgctgggcagaggcagcagcgtggacagcgccaccaagaagggcaacaccgccctgcacatcgccagcctggccggccaggccgaggtggtgaaggtgctggtgaaggagggcgccaacatcaacgcccagagccagaacggcttcacccccctgtacatggccgcccaggagaaccacatcgacgtggtgaagtacctgctggagaacggcgccaaccagagcaccgccaccgaggacggcttcacccccctggccgtggccctgcagcagggccacaaccaggccgtggccatcctgctggagaacgacaccaagggcaaggtgagactgcccgccctgcacatcgccgccagaaaggacgacaccaagagcgccgccctgctgctgcagaacgaccacaacgccgacgtgcagagcaagatgatggtgaacagaaccaccgagagcggcttcacccccctgcacatcgccgcccactacggcaacgtgaacgtggccaccctgctgctgaacagaggcgccgccgtggacttcaccgccagaaacggcatcacccccctgcacgtggccagcaagagaggcaacaccaacatggtgaagctgctgctggacagaggcggccagatcgacgccaagaccagagacggcctgacccccctgcactgcgccgccagaagcggccacgaccaggtggtggagctgctgctggagagaggcgcccccctgctggccagaaccaagaacggcctgagccccctgcacatggccgcccagggcgaccacgtggagtgcgtgaagcacctgctgcagcacaaggcccccgtggacgacgtgaccctggactacctgaccgccctgcacgtggccgcccactgcggccactacagagtgaccaagctgctgctggacaagagagccaaccccaacgccagagccctgaacggcttcacccccctgcacatcgcctgcaagaagaacagaatcaaggtgatggagctgctggtgaagtacggcgccagcatccaggccatcaccgagagcggcctgacccccatccacgtggccgccttcatgggccacctgaacatcgtgctgctgctgctgcagaacggcgccagccccgacgtgaccaacatcagaggcgagaccgccctgcacatggccgccagagccggccaggtggaggtggtgagatgcctgctgagaaacggcgccctggtggacgccagagccagagaggagcagacccccctgcacatcgccagcagactgggcaagaccgagatcgtgcagctgctgctgcagcacatggcccaccccgacgccgccaccaccaacggctacacccccctgcacatcagcgccagagagggccaggtggacgtggccagcgtgctgctggaggccggcgccgcccacagcctggccaccaagaagggcttcacccccctgcacgtggccgccaagtacggcagcctggacgtggccaagctgctgctgcagagaagagccgccgccgacagcgccggcaagaacggcctgacccccctgcacgtggccgcccactacgacaaccagaaggtggccctgctgctgctggagaagggcgccagcccccacgccaccgccaagaacggctacacccccctgcacatcgccgccaagaagaaccagatgcagatcgccagcaccctgctgaactacggcgccgagaccaacatcgtgaccaagcagggcgtgacccccctgcacctggccagccaggagggccacaccgacatggtgaccctgctgctggacaagggcgccaacatccacatgagcaccaagagcggcctgaccagcctgcacctggccgcccaggaggacaaggtgaacgtggccgacatcctgaccaagcacggcgccgaccaggacgcccacaccaagctgggctacacccccctgatcgtggcctgccactacggcaacgtgaagatggtgaacttcctgctgaagcagggcgccaacgtgaacgccaagaccaagaacggctacacccccctgcaccaggccgcccagcagggccacacccacatcatcaacgtgctgctgcagcacggcgccaagcccaacgccaccaccgccaacggcaacaccgccctggccatcgccaagagactgggctacatcagcgtggtggacaccctgaaggtggtgaccgaggaggtgaccaccaccaccaccaccatcaccgagaagcacaagctgaacgtgcccgagaccatgaccgaggtgctggacgtgagcgacgaggagggcgacgacaccatgaccggcgacggcggcgagtacctgagacccgaggacctgaaggagctgggcgacgacagcctgcccagcagccagttcctggacggcatgaactacctgagatacagcctggagggcggcagaagcgacagcctgagaagcttcagcagcgacagaagccacaccctgagccacgccagctacctgagagacagcgccgtgatggacgacagcgtggtgatccccagccaccaggtgagcaccctggccaaggaggccgagagaaacagctacagactgagctggggcaccgagaacctggacaacgtggccctgagcagcagccccatccacagcggcttcctggtgagcttcatggtggacgccagaggcggcgccatgagaggctgcagacacaacggcctgagaatcatcatcccccccagaaagtgcaccgcccccaccagagtgacctgcagactggtgaagagacacagactggccaccatgccccccatggtggagggcgagggcctggccagcagactgatcgaggtgggccccagcggcgcccagttcctgggccccgtgatcgtggagatcccccacttcgccgccctgagaggcaaggagagagagctggtggtgctgagaagcgagaacggcgacagctggaaggagcacttctgcgactacaccgaggacgagctgaacgagatcctgaacggcatggacgaggtgctggacagccccgaggacctggagaagaagagaatctgcagaatcatcaccagagacttcccccagtacttcgccgtggtgagcagaatcaagcaggacagcaacctgatcggccccgagggcggcgtgctgagcagcaccgtggtgccccaggtgcaggccgtgttccccgagggcgccctgaccaagagaatcagagtgggcctgcaggcccagcccatgcacagcgagctggtgaagaagatcctgggcaacaaggccaccttcagccccatcgtgaccctggagcccagaagaagaaagttccacaagcccatcaccatgaccatccccgtgcccaaggccagcagcgacgtgatgctgaacggcttcggcggcgacgcccccaccctgagactgctgtgcagcatcaccggcggcaccacccccgcccagtgggaggacatcaccggcaccacccccctgaccttcgtgaacgagtgcgtgagcttcaccaccaacgtgagcgccagattctggctgatcgactgcagacagatccaggagagcgtgaccttcgccagccaggtgtacagagagatcatctgcgtgccctacatggccaagttcgtggtgttcgccaagagccacgaccccatcgaggccagactgagatgcttctgcatgaccgacgacaaggtggacaagaccctggagcagcaggagaacttcgccgaggtggccagaagcagagacgtggaggtgctggagggcaagcccatctacgtggactgcttcggcaacctggtgcccctgaccaagagcggccagcaccacatcttcagcttcttcgccttcaaggagaacagactgcccctgttcgtgaaggtgagagacaccacccaggagccctgcggcagactgagcttcatgaaggagcccaagagcaccagaggcctggtgcaccaggccatctgcaacctgaacatcaccctgcccatctacaccaaggagagcgagagcgaccaggagcaggaggaggagatcgacatgaccagcgagaagaacgacgagaccgagagcaccgagaccagcgtgctgaagagccacctggtgaacgaggtgcccgtgctggccagccccgacctgctgagcgaggtgagcgagatgaagcaggacctgatcaagatgaccgccatcctgaccaccgacgtgagcgacaaggccggcagcatcaaggtgaaggagctggtgaaggccgccgaggaggagcccggcgagcccttcgagatcgtggagagagtgaaggaggacctggagaaggtgaacgagatcctgagaagcggcacctgcaccagagacgagagcagcgtgcagagcagcagaagcgagagaggcctggtggaggaggagtgggtgatcgtgagcgacgaggagatcgaggaggccagacagaaggcccccctggagatcaccgagtacccctgcgtggaggtgagaatcgacaaggagatcaagggcaaggtggagaaggacagcaccggcctggtgaactacctgaccgacgacctgaacacctgcgtgcccctgcccaaggagcagctgcagaccgtgcaggacaaggccggcaagaagtgcgaggccctggccgtgggcagaagcagcgagaaggagggcaaggacatcccccccgacgagacccagagcacccagaagcagcacaagcccagcctgggcatcaagaagcccgtgagaagaaagctgaaggagaagcagaagcagaaggaggagggcctgcaggccagcgccgagaaggccgagctgaagaagggcagcagcgaggagagcctgggcgaggaccccggcctggcccccgagcccctgcccaccgtgaaggccaccagccccctgatcgaggagacccccatcggcagcatcaaggacaaggtgaaggccctgcagaagagagtggaggacgagcagaagggcagaagcaagctgcccatcagagtgaagggcaaggaggacgtgcccaagaagaccacccacagaccccaccccgccgccagccccagcctgaagagcgagagacacgcccccggcagccccagccccaagaccgagagacacagcaccctgagcagcagcgccaagaccgagagacacccccccgtgagccccagcagcaagaccgagaagcacagccccgtgagccccagcgccaagaccgagagacacagccccgccagcagcagcagcaagaccgagaagcacagccccgtgagccccagcaccaagaccgagagacacagccccgtgagcagcaccaagaccgagagacacccccccgtgagccccagcggcaagaccgacaagagaccccccgtgagccccagcggcagaaccgagaagcacccccccgtgagccccggcagaaccgagaagagactgcccgtgagccccagcggcagaaccgacaagcaccagcccgtgagcaccgccggcaagaccgagaagcacctgcccgtgagccccagcggcaagaccgagaagcagccccccgtgagccccaccagcaagaccgagagaatcgaggagaccatgagcgtgagagagctgatgaaggccttccagagcggccaggaccccagcaagcacaagaccggcctgttcgagcacaagagcgccaagcagaagcagccccaggagaagggcaaggtgagagtggagaaggagaagggccccatcctgacccagagagaggcccagaagaccgagaaccagaccatcaagagaggccagagactgcccgtgaccggcaccgccgagagcaagagaggcgtgagagtgagcagcatcggcgtgaagaaggaggacgccgccggcggcaaggagaaggtgctgagccacaagatccccgagcccgtgcagagcgtgcccgaggaggagagccacagagagagcgaggtgcccaaggagaagatggccgacgagcagggcgacatggacctgcagatcagccccgacagaaagaccagcaccgacttcagcgaggtgatcaagcaggagctggaggacaacgacaagtaccagcagttcagactgagcgaggagaccgagaaggcccagctgcacctggaccaggtgctgaccagccccttcaacaccaccttccccctggactacatgaaggacgagttcctgcccgccctgagcctgcagagcggcgccctggacggcagcagcgagagcctgaagaacgagggcgtggccggcagcccctgcggcagcctgatggagggcaccccccagatcagcagcgaggagagctacaagcacgagggcctggccgagacccccgagaccagccccgagagcctgagcttcagccccaagaagagcgaggagcagaccggcgagaccaaggagagcaccaagaccgagaccaccaccgagatcagaagcgagaaggagcaccccaccaccaaggacatcaccggcggcagcgaggagagaggcgccaccgtgaccgaggacagcgagaccagcaccgagagcttccagaaggaggccaccctgggcagccccaaggacaccagccccaagagacaggacgactgcaccggcagctgcagcgtggccctggccaaggagacccccaccggcctgaccgaggaggccgcctgcgacgagggccagagaaccttcggcagcagcgcccacaagacccagaccgacagcgaggtgcaggagagcaccgccaccagcgacgagaccaaggccctgcccctgcccgaggccagcgtgaagaccgacaccggcaccgagagcaagccccagggcgtgatcagaagcccccagggcctggagctggccctgcccagcagagacagcgaggtgctgagcgccgtggccgacgacagcctggccgtgagccacaaggacagcctggaggccagccccgtgctggaggacaacagcagccacaagacccccgacagcctggagcccagccccctgaaggagagcccctgcagagacagcctggagagcagccccgtggagcccaagatgaaggccggcatcttccccagccacttccccctgcccgccgccgtggccaagaccgagctgctgaccgaggtggccagcgtgagaagcagactgctgagagaccccgacggcagcgccgaggacgacagcctggagcagaccagcctgatggagagcagcggcaagagccccctgagccccgacacccccagcagcgaggaggtgagctacgaggtgacccccaagaccaccgacgtgagcacccccaagcccgccgtgatccacgagtgcgccgaggaggacgacagcgagaacggcgagaagaagagattcacccccgaggaggagatgttcaagatggtgaccaagatcaagatgttcgacgagctggagcaggaggccaagcagaagagagactacaagaaggagcccaagcaggaggagagcagcagcagcagcgaccccgacgccgactgcagcgtggacgtggacgagcccaagcacaccggcagcggcgaggacgagagcggcgtgcccgtgctggtgaccagcgagagcagaaaggtgagcagcagcagcgagagcgagcccgagctggcccagctgaagaagggcgccgacagcggcctgctgcccgagcccgtgatcagagtgcagccccccagccccctgcccagcagcatggacagcaacagcagccccgaggaggtgcagttccagcccgtggtgagcaagcagtacaccttcaagatgaacgaggacacccaggaggagcccggcaagagcgaggaggagaaggacagcgagagccacctggccgaggacagacacgccgtgagcaccgaggccgaggacagaagctacgacaagctgaacagagacaccgaccagcccaagatctgcgacggccacggctgcgaggccatgagccccagcagcagcgccgcccccgtgagcagcggcctgcagagccccaccggcgacgacgtggacgagcagcccgtgatctacaaggagagcctggccctgcagggcacccacgagaaggacaccgagggcgaggagctggacgtgagcagagccgagagcccccaggccgactgccccagcgagagcttcagcagcagcagcagcctgccccactgcctggtgagcgagggcaaggagctggacgaggacatcagcgccaccagcagcatccagaagaccgaggtgaccaagaccgacgagaccttcgagaacctgcccaaggactgccccagccaggacagcagcatcaccacccagaccgacagattcagcatggacgtgcccgtgagcgacctggccgagaacgacgagatctacgacccccagatcaccagcccctacgagaacgtgcccagccagagcttcttcagcagcgaggagagcaagacccagaccgacgccaaccacaccaccagcttccacagcagcgaggtgtacagcgtgaccatcaccagccccgtggaggacgtggtggtggccagcagcagcagcggcaccgtgctgagcaaggagagcaacttcgagggccaggacatcaagatggagagccagcaggagagcaccctgtgggagatgcagagcgacagcgtgagcagcagcttcgagcccaccatgagcgccaccaccaccgtggtgggcgagcagatcagcaaggtgatcatcaccaagaccgacgtggacagcgacagctggagcgagatcagagaggacgacgaggccttcgaggccagagtgaaggaggaggagcagaagatcttcggcctgatggtggacagacagagccagggcaccacccccgacaccacccccgccagaacccccaccgaggagggcacccccaccagcgagcagaaccccttcctgttccaggagggcaagctgttcgagatgaccagaagcggcgccatcgacatgaccaagagaagctacgccgacgagagcttccacttcttccagatcggccaggagagcagagaggagaccctgagcgaggacgtgaaggagggcgccaccggcgccgaccccctgcccctggagaccagcgccgagagcctggccctgagcgagagcaaggagaccgtggacgacgaggccgacctgctgcccgacgacgtgagcgaggaggtggaggagatccccgccagcgacgcccagctgaacagccagatgggcatcagcgccagcaccgagacccccaccaaggaggccgtgagcgtgggcaccaaggacctgcccaccgtgcagaccggcgacatcccccccctgagcggcgtgaagcagatcagctgccccgacagcagcgagcccgccgtgcaggtgcagctggacttcagcaccctgaccagaagcgtgtacagcgacagaggcgacgacagccccgacagcagccccgaggagcagaagagcgtgatcgagatccccaccgcccccatggagaacgtgcccttcaccgagagcaagagcaagatccccgtgagaaccatgcccaccagcacccccgccccccccagcgccgagtacgagagcagcgtgagcgaggacttcctgagcagcgtggacgaggagaacaaggccgacgaggccaagcccaagagcaagctgcccgtgaaggtgcccctgcagagagtggagcagcagctgagcgacctggacaccagcgtgcagaagaccgtggccccccagggccaggacatggccagcatcgcccccgacaacagaagcaagagcgagagcgacgccagcagcctggacagcaagaccaagtgccccgtgaagaccagaagctacaccgagaccgagaccgagagcagagagagagccgaggagctggagctggagagcgaggagggcgccaccagacccaagatcctgaccagcagactgcccgtgaagagcagaagcaccaccagcagctgcagaggcggcaccagccccaccaaggagagcaaggagcacttcttcgacctgtacagaaacagcatcgagttcttcgaggagatcagcgacgaggccagcaagctggtggacagactgacccagagcgagagagagcaggagatcgtgagcgacgacgagagcagcagcgccctggaggtgagcgtgatcgagaacctgccccccgtggagaccgagcacagcgtgcccgaggacatcttcgacaccagacccatctgggacgagagcatcgagaccctgatcgagagaatccccgacgagaacggccacgaccacgccgaggacccccaggacgagcaggagagaatcgaggagagactggcctacatcgccgaccacctgggcttcagctggaccgagctggccagagagctggacttcaccgaggagcagatccaccagatcagaatcgagaaccccaacagcctgcaggaccagagccacgccctgctgaagtactggctggagagagacggcaagcacgccaccgacaccaacctggtggagtgcctgaccaagatcaacagaatggacatcgtgcacctgatggagaccaacaccgagcccctgcaggagagaatcagccacagctacgccgagatcgagcagaccatcaccctggaccacagcgagggcttcagcgtgctgcaggaggagctgtgcaccgcccagcacaagcagaaggaggagcaggccgtgagcaaggagagcgagacctgcgaccacccccccatcgtgagcgaggaggacatcagcgtgggctacagcaccttccaggacggcgtgcccaagaccgagggcgacagcagcgccaccgccctgttcccccagacccacaaggagcaggtgcagcaggacttcagcggcaagatgcaggacctgcccgaggagagcagcctggagtaccagcaggagtacttcgtgaccacccccggcaccgagaccagcgagacccagaaggccatgatcgtgcccagcagccccagcaagacccccgaggaggtgagcacccccgccgaggaggagaagctgtacctgcagacccccaccagcagcgagagaggcggcagccccatcatccaggagcccgaggagcccagcgagcacagagaggagagcagccccagaaagaccagcctggtgatcgtggagagcgccgacaaccagcccgagacctgcgagagactggacgaggacgccgccttcgagaagggcgacgacatgcccgagatcccccccgagaccgtgaccgaggaggagtacatcgacgagcacggccacaccgtggtgaagaaggtgaccagaaagatcatcagaagatacgtgagcagcgagggcaccgagaaggaggagatcatggtgcagggcatgccccaggagcccgtgaacatcgaggagggcgacggctacagcaaggtgatcaagagagtggtgctgaagagcgacaccgagcagagcgaggacaacaacgagtag

SEQ ID NO: 72816 - DNA, 5592 bp, synthetic construct
  misc_feature 1..5592: note = Description of Artificial Sequence: Synthetic coding sequence
  source 1..5592: mol_type = other DNA
atgagccaccacatccagagaagcgacagcaacgccagcttcctgagagccgccagagccggcaacctggacaaggtggtggagtacctgaagggcggcatcgacatcaacacctgcaaccagaacggcctgaacgccctgcacctggccgccaaggagggccacgtgggcctggtgcaggagctgctgggcagaggcagcagcgtggacagcgccaccaagaagggcaacaccgccctgcacatcgccagcctggccggccaggccgaggtggtgaaggtgctggtgaaggagggcgccaacatcaacgcccagagccagaacggcttcacccccctgtacatggccgcccaggagaaccacatcgacgtggtgaagtacctgctggagaacggcgccaaccagagcaccgccaccgaggacggcttcacccccctggccgtggccctgcagcagggccacaaccaggccgtggccatcctgctggagaacgacaccaagggcaaggtgagactgcccgccctgcacatcgccgccagaaaggacgacaccaagagcgccgccctgctgctgcagaacgaccacaacgccgacgtgcagagcaagatgatggtgaacagaaccaccgagagcggcttcacccccctgcacatcgccgcccactacggcaacgtgaacgtggccaccctgctgctgaacagaggcgccgccgtggacttcaccgccagaaacggcatcacccccctgcacgtggccagcaagagaggcaacaccaacatggtgaagctgctgctggacagaggcggccagatcgacgccaagaccagagacggcctgacccccctgcactgcgccgccagaagcggccacgaccaggtggtggagctgctgctggagagaggcgcccccctgctggccagaaccaagaacggcctgagccccctgcacatggccgcccagggcgaccacgtggagtgcgtgaagcacctgctgcagcacaaggcccccgtggacgacgtgaccctggactacctgaccgccctgcacgtggccgcccactgcggccactacagagtgaccaagctgctgctggacaagagagccaaccccaacgccagagccctgaacggcttcacccccctgcacatcgcctgcaagaagaacagaatcaaggtgatggagctgctggtgaagtacggcgccagcatccaggccatcaccgagagcggcctgacccccatccacgtggccgccttcatgggccacctgaacatcgtgctgctgctgctgcagaacggcgccagccccgacgtgaccaacatcagaggcgagaccgccctgcacatggccgccagagccggccaggtggaggtggtgagatgcctgctgagaaacggcgccctggtggacgccagagccagagaggagcagacccccctgcacatcgccagcagactgggcaagaccgagatcgtgcagctgctgctgcagcacatggcccaccccgacgccgccaccaccaacggctacacccccctgcacatcagcgccagagagggccaggtggacgtggccagcgtgctgctggaggccggcgccgcccacagcctggccaccaagaagggcttcacccccctgcacgtggccgccaagtacggcagcctggacgtggccaagctgctgctgcagagaagagccgccgccgacagcgccggcaagaacggcctgacccccctgcacgtggccgcccactacgacaaccagaaggtggccctgctgctgctggagaagggcgccagcccccacgccaccgccaagaacggctacacccccctgcacatcgccgccaagaagaaccagatgcagatcgccagcaccctgctgaactacggcgccgagaccaacatcgtgaccaagcagggcgtgacccccctgcacctggccagccaggagggccacaccgacatggtgaccctgctgctggacaagggcgccaacatccacatgagcaccaagagcggcctgaccagcctgcacctggccgcccaggaggacaaggtgaacgtggccgacatcctgaccaagcacggcgccgaccaggacgcccacaccaagctgggctacacccccctgatcgtggcctgccactacggcaacgtgaagatggtgaacttcctgctgaagcagggcgccaacgtgaacgccaagaccaagaacggctacacccccctgcaccaggccgcccagcagggccacacccacatcatcaacgtgctgctgcagcacggcgccaagcccaacgccaccaccgccaacggcaacaccgccctggccatcgccaagagactgggctacatcagcgtggtggacaccctgaaggtggtgaccgaggaggtgaccaccaccaccaccaccatcaccgagaagcacaagctgaacgtgcccgagaccatgaccgaggtgctggacgtgagcgacgaggagggcgacgacaccatgaccggcgacggcggcgagtacctgagacccgaggacctgaaggagctgggcgacgacagcctgcccagcagccagttcctggacggcatgaactacctgagatacagcctggagggcggcagaagcgacagcctgagaagcttcagcagcgacagaagccacaccctgagccacgccagctacctgagagacagcgccgtgatggacgacagcgtggtgatccccagccaccaggtgagcaccctggccaaggaggccgagagaaacagctacagactgagctggggcaccgagaacctggacaacgtggccctgagcagcagccccatccacagcggcagagccagcccctgcctggagagagacaacagcagcttcctggtgagcttcatggtggacgccagaggcggcgccatgagaggctgcagacacaacggcctgagaatcatcatcccccccagaaagtgcaccgcccccaccagagtgacctgcagactggtgaagagacacagactggccaccatgccccccatggtggagggcgagggcctggccagcagactgatcgaggtgggccccagcggcgcccagttcctgggcaagctgcacctgcccaccgcccccccccccctgaacgagggcgagagcctggtgagcagaatcctgcagctgggcccccccggcaccaagttcctgggccccgtgatcgtggagatcccccacttcgccgccctgagaggcaaggagagagagctggtggtgctgagaagcgagaacggcgacagctggaaggagcacttctgcgactacaccgaggacgagctgaacgagatcctgaacggcatggacgaggtgctggacagccccgaggacctggagaagaagagaatctgcagaatcatcaccagagacttcccccagtacttcgccgtggtgagcagaatcaagcaggacagcaacctgatcggccccgagggcggcgtgctgagcagcaccgtggtgccccaggtgcaggccgtgttccccgagggcgccctgaccaagagaatcagagtgggcctgcaggcccagcccatgcacagcgagctggtgaagaagatcctgggcaacaaggccaccttcagccccatcgtgaccctggagcccagaagaagaaagttccacaagcccatcaccatgaccatccccgtgcccaaggccagcagcgacgtgatgctgaacggcttcggcggcgacgcccccaccctgagactgctgtgcagcatcaccggcggcaccacccccgcccagtgggaggacatcaccggcaccacccccctgaccttcgtgaacgagtgcgtgagcttcaccaccaacgtgagcgccagattctggctgatcgactgcagacagatccaggagagcgtgaccttcgccagccaggtgtacagagagatcatctgcgtgccctacatggccaagttcgtggtgttcgccaagagccacgaccccatcgaggccagactgagatgcttctgcatgaccgacgacaaggtggacaagaccctggagcagcaggagaacttcgccgaggtggccagaagcagagacgtggaggtgctggagggcaagcccatctacgtggactgcttcggcaacctggtgcccctgaccaagagcggccagcaccacatcttcagcttcttcgccttcaaggagaacagactgcccctgttcgtgaaggtgagagacaccacccaggagccctgcggcagactgagcttcatgaaggagcccaagagcaccagaggcctggtgcaccaggccatctgcaacctgaacatcaccctgcccatctacaccaaggagagcgagagcgaccaggagcaggaggaggagatcggccaggagagcagaagatacccccaggacgagcaggagagaatcgaggagagactggcctacatcgccgaccacctgggcttcagctggaccgagctggccagagagctggacttcaccgaggagcagatccaccagatcagaatcgagaaccccaacagcctgcaggaccagagccacgccctgctgaagtactggctggagagagacggcaagcacgccaccgacaccaacctggtggagtgcctgaccaagatcaacagaatggacatcgtgcacctgatggagaccaacaccgagcccctgcaggagagaatcagccacagctacgccgagatcgagcagaccatcaccctggaccacagcgagggcttcagcgtgctgcaggaggagctgtgcaccgcccagcacaagcagaaggaggagcaggccgtgagcaaggagagcgagacctgcgaccacccccccatcgtgagcgaggaggacatcagcgtgggctacagcaccttccaggacggcgtgcccaagaccgagggcgacagcagcgccaccgccctgttcccccagacccacaaggagcaggtgcagcaggacttcagcggcaagatgcaggacctgcccgaggagagcagcctggagtaccagcaggagtacttcgtgaccacccccggcaccgagaccagcgagacccagaaggccatgatcgtgcccagcagccccagcaagacccccgaggaggtgagcacccccgccgaggaggagaagctgtacctgcagacccccaccagcagcgagagaggcggcagccccatcatccaggagcccgaggagcccagcgagcacagagaggagagcagccccagaaagaccagcctggtgatcgtggagagcgccgacaaccagcccgagacctgcgagagactggacgaggacgccgccttcgagaagggcgacgacatgcccgagatcccccccgagaccgtgaccgaggaggagtacatcgacgagcacggccacaccgtggtgaagaaggtgaccagaaagatcatcagaagatacgtgagcagcgagggcaccgagaaggaggagatcatggtgcagggcatgccccaggagcccgtgaacatcgaggagggcgacggctacagcaaggtgatcaagagagtggtgctgaagagcgacaccgagcagagcgaggacagcatggagtag

SEQ ID NO: 72817 - DNA, 11874 bp, synthetic construct
  misc_feature 1..11874: note = Description of Artificial Sequence: Synthetic coding sequence
  source 1..11874: mol_type = other DNA
atgatgaacgaggacgccgcccagaagagcgacagcggcgagaagttcaacggcagcagccagagaagaaagagacccaagaagagcgacagcaacgccagcttcctgagagccgccagagccggcaacctggacaaggtggtggagtacctgaagggcggcatcgacatcaacacctgcaaccagaacggcctgaacgccctgcacctggccgccaaggagggccacgtgggcctggtgcaggagctgctgggcagaggcagcagcgtggacagcgccaccaagaagggcaacaccgccctgcacatcgccagcctggccggccaggccgaggtggtgaaggtgctggtgaaggagggcgccaacatcaacgcccagagccagaacggcttcacccccctgtacatggccgcccaggagaaccacatcgacgtggtgaagtacctgctggagaacggcgccaaccagagcaccgccaccgaggacggcttcacccccctggccgtggccctgcagcagggccacaaccaggccgtggccatcctgctggagaacgacaccaagggcaaggtgagactgcccgccctgcacatcgccgccagaaaggacgacaccaagagcgccgccctgctgctgcagaacgaccacaacgccgacgtgcagagcaagatgatggtgaacagaaccaccgagagcggcttcacccccctgcacatcgccgcccactacggcaacgtgaacgtggccaccctgctgctgaacagaggcgccgccgtggacttcaccgccagaaacggcatcacccccctgcacgtggccagcaagagaggcaacaccaacatggtgaagctgctgctggacagaggcggccagatcgacgccaagaccagagacggcctgacccccctgcactgcgccgccagaagcggccacgaccaggtggtggagctgctgctggagagaggcgcccccctgctggccagaaccaagaacggcctgagccccctgcacatggccgcccagggcgaccacgtggagtgcgtgaagcacctgctgcagcacaaggcccccgtggacgacgtgaccctggactacctgaccgccctgcacgtggccgcccactgcggccactacagagtgaccaagctgctgctggacaagagagccaaccccaacgccagagccctgaacggcttcacccccctgcacatcgcctgcaagaagaacagaatcaaggtgatggagctgctggtgaagtacggcgccagcatccaggccatcaccgagagcggcctgacccccatccacgtggccgccttcatgggccacctgaacatcgtgctgctgctgctgcagaacggcgccagccccgacgtgaccaacatcagaggcgagaccgccctgcacatggccgccagagccggccaggtggaggtggtgagatgcctgctgagaaacggcgccctggtggacgccagagccagagaggagcagacccccctgcacatcgccagcagactgggcaagaccgagatcgtgcagctgctgctgcagcacatggcccaccccgacgccgccaccaccaacggctacacccccctgcacatcagcgccagagagggccaggtggacgtggccagcgtgctgctggaggccggcgccgcccacagcctggccaccaagaagggcttcacccccctgcacgtggccgccaagtacggcagcctggacgtggccaagctgctgctgcagagaagagccgccgccgacagcgccggcaagaacggcctgacccccctgcacgtggccgcccactacgacaaccagaaggtggccctgctgctgctggagaagggcgccagcccccacgccaccgccaagaacggctacacccccctgcacatcgccgccaagaagaaccagatgcagatcgccagcaccctgctgaactacggcgccgagaccaacatcgtgaccaagcagggcgtgacccccctgcacctggccagccaggagggccacaccgacatggtgaccctgctgctggacaagggcgccaacatccacatgagcaccaagagcggcctgaccagcctgcacctggccgcccaggaggacaaggtgaacgtggccgacatcctgaccaagcacggcgccgaccaggacgcccacaccaagctgggctacacccccctgatcgtggcctgccactacggcaacgtgaagatggtgaacttcctgctgaagcagggcgccaacgtgaacgccaagaccaagaacggctacacccccctgcaccaggccgcccagcagggccacacccacatcatcaacgtgctgctgcagcacggcgccaagcccaacgccaccaccgccaacggcaacaccgccctggccatcgccaagagactgggctacatcagcgtggtggacaccctgaaggtggtgaccgaggaggtgaccaccaccaccaccaccatcaccgagaagcacaagctgaacgtgcccgagaccatgaccgaggtgctggacgtgagcgacgaggagggcgacgacaccatgaccggcgacggcggcgagtacctgagacccgaggacctgaaggagctgggcgacgacagcctgcccagcagccagttcctggacggcatgaactacctgagatacagcctggagggcggcagaagcgacagcctgagaagcttcagcagcgacagaagccacaccctgagccacgccagctacctgagagacagcgccgtgatggacgacagcgtggtgatccccagccaccaggtgagcaccctggccaaggaggccgagagaaacagctacagactgagctggggcaccgagaacctggacaacgtggccctgagcagcagccccatccacagcggcttcctggtgagcttcatggtggacgccagaggcggcgccatgagaggctgcagacacaacggcctgagaatcatcatcccccccagaaagtgcaccgcccccaccagagtgacctgcagactggtgaagagacacagactggccaccatgccccccatggtggagggcgagggcctggccagcagactgatcgaggtgggccccagcggcgcccagttcctgggcaagctgcacctgcccaccgcccccccccccctgaacgagggcgagagcctggtgagcagaatcctgcagctgggcccccccggcaccaagttcctgggccccgtgatcgtggagatcccccacttcgccgccctgagaggcaaggagagagagctggtggtgctgagaagcgagaacggcgacagctggaaggagcacttctgcgactacaccgaggacgagctgaacgagatcctgaacggcatggacgaggtgctggacagccccgaggacctggagaagaagagaatctgcagaatcatcaccagagacttcccccagtacttcgccgtggtgagcagaatcaagcaggacagcaacctgatcggccccgagggcggcgtgctgagcagcaccgtggtgccccaggtgcaggccgtgttccccgagggcgccctgaccaagagaatcagagtgggcctgcaggcccagcccatgcacagcgagctggtgaagaagatcctgggcaacaaggccaccttcagccccatcgtgaccctggagcccagaagaagaaagttccacaagcccatcaccatgaccatccccgtgcccaaggccagcagcgacgtgatgctgaacggcttcggcggcgacgcccccaccctgagactgctgtgcagcatcaccggcggcaccacccccgcccagtgggaggacatcaccggcaccacccccctgaccttcgtgaacgagtgcgtgagcttcaccaccaacgtgagcgccagattctggctgatcgactgcagacagatccaggagagcgtgaccttcgccagccaggtgtacagagagatcatctgcgtgccctacatggccaagttcgtggtgttcgccaagagccacgaccccatcgaggccagactgagatgcttctgcatgaccgacgacaaggtggacaagaccctggagcagcaggagaacttcgccgaggtggccagaagcagagacgtggaggtgctggagggcaagcccatctacgtggactgcttcggcaacctggtgcccctgaccaagagcggccagcaccacatcttcagcttcttcgccttcaaggagaacagactgcccctgttcgtgaaggtgagagacaccacccaggagccctgcggcagactgagcttcatgaaggagcccaagagcaccagaggcctggtgcaccaggccatctgcaacctgaacatcaccctgcccatctacaccaaggagagcgagagcgaccaggagcaggaggaggagatcgacatgaccagcgagaagaacgacgagaccgagagcaccgagaccagcgtgctgaagagccacctggtgaacgaggtgcccgtgctggccagccccgacctgctgagcgaggtgagcgagatgaagcaggacctgatcaagatgaccgccatcctgaccaccgacgtgagcgacaaggccggcagcatcaaggtgaaggagctggtgaaggccgccgaggaggagcccggcgagcccttcgagatcgtggagagagtgaaggaggacctggagaaggtgaacgagatcctgagaagcggcacctgcaccagagacgagagcagcgtgcagagcagcagaagcgagagaggcctggtggaggaggagtgggtgatcgtgagcgacgaggagatcgaggaggccagacagaaggcccccctggagatcaccgagtacccctgcgtggaggtgagaatcgacaaggagatcaagggcaaggtggagaaggacagcaccggcctggtgaactacctgaccgacgacctgaacacctgcgtgcccctgcccaaggagcagctgcagaccgtgcaggacaaggccggcaagaagtgcgaggccctggccgtgggcagaagcagcgagaaggagggcaaggacatcccccccgacgagacccagagcacccagaagcagcacaagcccagcctgggcatcaagaagcccgtgagaagaaagctgaaggagaagcagaagcagaaggaggagggcctgcaggccagcgccgagaaggccgagctgaagaagggcagcagcgaggagagcctgggcgaggaccccggcctggcccccgagcccctgcccaccgtgaaggccaccagccccctgatcgaggagacccccatcggcagcatcaaggacaaggtgaaggccctgcagaagagagtggaggacgagcagaagggcagaagcaagctgcccatcagagtgaagggcaaggaggacgtgcccaagaagaccacccacagaccccaccccgccgccagccccagcctgaagagcgagagacacgcccccggcagccccagccccaagaccgagagacacagcaccctgagcagcagcgccaagaccgagagacacccccccgtgagccccagcagcaagaccgagaagcacagccccgtgagccccagcgccaagaccgagagacacagccccgccagcagcagcagcaagaccgagaagcacagccccgtgagccccagcaccaagaccgagagacacagccccgtgagcagcaccaagaccgagagacacccccccgtgagccccagcggcaagaccgacaagagaccccccgtgagccccagcggcagaaccgagaagcacccccccgtgagccccggcagaaccgagaagagactgcccgtgagccccagcggcagaaccgacaagcaccagcccgtgagcaccgccggcaagaccgagaagcacctgcccgtgagccccagcggcaagaccgagaagcagccccccgtgagccccaccagcaagaccgagagaatcgaggagaccatgagcgtgagagagctgatgaaggccttccagagcggccaggaccccagcaagcacaagaccggcctgttcgagcacaagagcgccaagcagaagcagccccaggagaagggcaaggtgagagtggagaaggagaagggccccatcctgacccagagagaggcccagaagaccgagaaccagaccatcaagagaggccagagactgcccgtgaccggcaccgccgagagcaagagaggcgtgagagtgagcagcatcggcgtgaagaaggaggacgccgccggcggcaaggagaaggtgctgagccacaagatccccgagcccgtgcagagcgtgcccgaggaggagagccacagagagagcgaggtgcccaaggagaagatggccgacgagcagggcgacatggacctgcagatcagccccgacagaaagaccagcaccgacttcagcgaggtgatcaagcaggagctggaggacaacgacaagtaccagcagttcagactgagcgaggagaccgagaaggcccagctgcacctggaccaggtgctgaccagccccttcaacaccaccttccccctggactacatgaaggacgagttcctgcccgccctgagcctgcagagcggcgccctggacggcagcagcgagagcctgaagaacgagggcgtggccggcagcccctgcggcagcctgatggagggcaccccccagatcagcagcgaggagagctacaagcacgagggcctggccgagacccccgagaccagccccgagagcctgagcttcagccccaagaagagcgaggagcagaccggcgagaccaaggagagcaccaagaccgagaccaccaccgagatcagaagcgagaaggagcaccccaccaccaaggacatcaccggcggcagcgaggagagaggcgccaccgtgaccgaggacagcgagaccagcaccgagagcttccagaaggaggccaccctgggcagccccaaggacaccagccccaagagacaggacgactgcaccggcagctgcagcgtggccctggccaaggagacccccaccggcctgaccgaggaggccgcctgcgacgagggccagagaaccttcggcagcagcgcccacaagacccagaccgacagcgaggtgcaggagagcaccgccaccagcgacgagaccaaggccctgcccctgcccgaggccagcgtgaagaccgacaccggcaccgagagcaagccccagggcgtgatcagaagcccccagggcctggagctggccctgcccagcagagacagcgaggtgctgagcgccgtggccgacgacagcctggccgtgagccacaaggacagcctggaggccagccccgtgctggaggacaacagcagccacaagacccccgacagcctggagcccagccccctgaaggagagcccctgcagagacagcctggagagcagccccgtggagcccaagatgaaggccggcatcttccccagccacttccccctgcccgccgccgtggccaagaccgagctgctgaccgaggtggccagcgtgagaagcagactgctgagagaccccgacggcagcgccgaggacgacagcctggagcagaccagcctgatggagagcagcggcaagagccccctgagccccgacacccccagcagcgaggaggtgagctacgaggtgacccccaagaccaccgacgtgagcacccccaagcccgccgtgatccacgagtgcgccgaggaggacgacagcgagaacggcgagaagaagagattcacccccgaggaggagatgttcaagatggtgaccaagatcaagatgttcgacgagctggagcaggaggccaagcagaagagagactacaagaaggagcccaagcaggaggagagcagcagcagcagcgaccccgacgccgactgcagcgtggacgtggacgagcccaagcacaccggcagcggcgaggacgagagcggcgtgcccgtgctggtgaccagcgagagcagaaaggtgagcagcagcagcgagagcgagcccgagctggcccagctgaagaagggcgccgacagcggcctgctgcccgagcccgtgatcagagtgcagccccccagccccctgcccagcagcatggacagcaacagcagccccgaggaggtgcagttccagcccgtggtgagcaagcagtacaccttcaagatgaacgaggacacccaggaggagcccggcaagagcgaggaggagaaggacagcgagagccacctggccgaggacagacacgccgtgagcaccgaggccgaggacagaagctacgacaagctgaacagagacaccgaccagcccaagatctgcgacggccacggctgcgaggccatgagccccagcagcagcgccgcccccgtgagcagcggcctgcagagccccaccggcgacgacgtggacgagcagcccgtgatctacaaggagagcctggccctgcagggcacccacgagaaggacaccgagggcgaggagctggacgtgagcagagccgagagcccccaggccgactgccccagcgagagcttcagcagcagcagcagcctgccccactgcctggtgagcgagggcaaggagctggacgaggacatcagcgccaccagcagcatccagaagaccgaggtgaccaagaccgacgagaccttcgagaacctgcccaaggactgccccagccaggacagcagcatcaccacccagaccgacagattcagcatggacgtgcccgtgagcgacctggccgagaacgacgagatctacgacccccagatcaccagcccctacgagaacgtgcccagccagagcttcttcagcagcgaggagagcaagacccagaccgacgccaaccacaccaccagcttccacagcagcgaggtgtacagcgtgaccatcaccagccccgtggaggacgtggtggtggccagcagcagcagcggcaccgtgctgagcaaggagagcaacttcgagggccaggacatcaagatggagagccagcaggagagcaccctgtgggagatgcagagcgacagcgtgagcagcagcttcgagcccaccatgagcgccaccaccaccgtggtgggcgagcagatcagcaaggtgatcatcaccaagaccgacgtggacagcgacagctggagcgagatcagagaggacgacgaggccttcgaggccagagtgaaggaggaggagcagaagatcttcggcctgatggtggacagacagagccagggcaccacccccgacaccacccccgccagaacccccaccgaggagggcacccccaccagcgagcagaaccccttcctgttccaggagggcaagctgttcgagatgaccagaagcggcgccatcgacatgaccaagagaagctacgccgacgagagcttccacttcttccagatcggccaggagagcagagaggagaccctgagcgaggacgtgaaggagggcgccaccggcgccgaccccctgcccctggagaccagcgccgagagcctggccctgagcgagagcaaggagaccgtggacgacgaggccgacctgctgcccgacgacgtgagcgaggaggtggaggagatccccgccagcgacgcccagctgaacagccagatgggcatcagcgccagcaccgagacccccaccaaggaggccgtgagcgtgggcaccaaggacctgcccaccgtgcagaccggcgacatcccccccctgagcggcgtgaagcagatcagctgccccgacagcagcgagcccgccgtgcaggtgcagctggacttcagcaccctgaccagaagcgtgtacagcgacagaggcgacgacagccccgacagcagccccgaggagcagaagagcgtgatcgagatccccaccgcccccatggagaacgtgcccttcaccgagagcaagagcaagatccccgtgagaaccatgcccaccagcacccccgccccccccagcgccgagtacgagagcagcgtgagcgaggacttcctgagcagcgtggacgaggagaacaaggccgacgaggccaagcccaagagcaagctgcccgtgaaggtgcccctgcagagagtggagcagcagctgagcgacctggacaccagcgtgcagaagaccgtggccccccagggccaggacatggccagcatcgcccccgacaacagaagcaagagcgagagcgacgccagcagcctggacagcaagaccaagtgccccgtgaagaccagaagctacaccgagaccgagaccgagagcagagagagagccgaggagctggagctggagagcgaggagggcgccaccagacccaagatcctgaccagcagactgcccgtgaagagcagaagcaccaccagcagctgcagaggcggcaccagccccaccaaggagagcaaggagcacttcttcgacctgtacagaaacagcatcgagttcttcgaggagatcagcgacgaggccagcaagctggtggacagactgacccagagcgagagagagcaggagatcgtgagcgacgacgagagcagcagcgccctggaggtgagcgtgatcgagaacctgccccccgtggagaccgagcacagcgtgcccgaggacatcttcgacaccagacccatctgggacgagagcatcgagaccctgatcgagagaatccccgacgagaacggccacgaccacgccgaggacccccaggacgagcaggagagaatcgaggagagactggcctacatcgccgaccacctgggcttcagctggaccgagctggccagagagctggacttcaccgaggagcagatccaccagatcagaatcgagaaccccaacagcctgcaggaccagagccacgccctgctgaagtactggctggagagagacggcaagcacgccaccgacaccaacctggtggagtgcctgaccaagatcaacagaatggacatcgtgcacctgatggagaccaacaccgagcccctgcaggagagaatcagccacagctacgccgagatcgagcagaccatcaccctggaccacagcgagggcttcagcgtgctgcaggaggagctgtgcaccgcccagcacaagcagaaggaggagcaggccgtgagcaaggagagcgagacctgcgaccacccccccatcgtgagcgaggaggacatcagcgtgggctacagcaccttccaggacggcgtgcccaagaccgagggcgacagcagcgccaccgccctgttcccccagacccacaaggagcaggtgcagcaggacttcagcggcaagatgcaggacctgcccgaggagagcagcctggagtaccagcaggagtacttcgtgaccacccccggcaccgagaccagcgagacccagaaggccatgatcgtgcccagcagccccagcaagacccccgaggaggtgagcacccccgccgaggaggagaagctgtacctgcagacccccaccagcagcgagagaggcggcagccccatcatccaggagcccgaggagcccagcgagcacagagaggagagcagccccagaaagaccagcctggtgatcgtggagagcgccgacaaccagcccgagacctgcgagagactggacgaggacgccgccttcgagaagggcgacgacatgcccgagatcccccccgagaccgtgaccgaggaggagtacatcgacgagcacggccacaccgtggtgaagaaggtgaccagaaagatcatcagaagatacgtgagcagcgagggcaccgagaaggaggagatcatggtgcagggcatgccccaggagcccgtgaacatcgaggagggcgacggctacagcaaggtgatcaagagagtggtgctgaagagcgacaccgagcagagcgaggacaacaacgagtag

SEQ ID NO: 72818 - DNA, 5619 bp, synthetic construct
  misc_feature 1..5619: note = Description of Artificial Sequence: Synthetic coding sequence
  source 1..5619: mol_type = other DNA
atgatgaacgaggacgccgcccagaagagcgacagcggcgagaagttcaacggcagcagccagagaagaaagagacccaagaagagcgacagcaacgccagcttcctgagagccgccagagccggcaacctggacaaggtggtggagtacctgaagggcggcatcgacatcaacacctgcaaccagaacggcctgaacgccctgcacctggccgccaaggagggccacgtgggcctggtgcaggagctgctgggcagaggcagcagcgtggacagcgccaccaagaagggcaacaccgccctgcacatcgccagcctggccggccaggccgaggtggtgaaggtgctggtgaaggagggcgccaacatcaacgcccagagccagaacggcttcacccccctgtacatggccgcccaggagaaccacatcgacgtggtgaagtacctgctggagaacggcgccaaccagagcaccgccaccgaggacggcttcacccccctggccgtggccctgcagcagggccacaaccaggccgtggccatcctgctggagaacgacaccaagggcaaggtgagactgcccgccctgcacatcgccgccagaaaggacgacaccaagagcgccgccctgctgctgcagaacgaccacaacgccgacgtgcagagcaagatgatggtgaacagaaccaccgagagcggcttcacccccctgcacatcgccgcccactacggcaacgtgaacgtggccaccctgctgctgaacagaggcgccgccgtggacttcaccgccagaaacggcatcacccccctgcacgtggccagcaagagaggcaacaccaacatggtgaagctgctgctggacagaggcggccagatcgacgccaagaccagagacggcctgacccccctgcactgcgccgccagaagcggccacgaccaggtggtggagctgctgctggagagaggcgcccccctgctggccagaaccaagaacggcctgagccccctgcacatggccgcccagggcgaccacgtggagtgcgtgaagcacctgctgcagcacaaggcccccgtggacgacgtgaccctggactacctgaccgccctgcacgtggccgcccactgcggccactacagagtgaccaagctgctgctggacaagagagccaaccccaacgccagagccctgaacggcttcacccccctgcacatcgcctgcaagaagaacagaatcaaggtgatggagctgctggtgaagtacggcgccagcatccaggccatcaccgagagcggcctgacccccatccacgtggccgccttcatgggccacctgaacatcgtgctgctgctgctgcagaacggcgccagccccgacgtgaccaacatcagaggcgagaccgccctgcacatggccgccagagccggccaggtggaggtggtgagatgcctgctgagaaacggcgccctggtggacgccagagccagagaggagcagacccccctgcacatcgccagcagactgggcaagaccgagatcgtgcagctgctgctgcagcacatggcccaccccgacgccgccaccaccaacggctacacccccctgcacatcagcgccagagagggccaggtggacgtggccagcgtgctgctggaggccggcgccgcccacagcctggccaccaagaagggcttcacccccctgcacgtggccgccaagtacggcagcctggacgtggccaagctgctgctgcagagaagagccgccgccgacagcgccggcaagaacggcctgacccccctgcacgtggccgcccactacgacaaccagaaggtggccctgctgctgctggagaagggcgccagcccccacgccaccgccaagaacggctacacccccctgcacatcgccgccaagaagaaccagatgcagatcgccagcaccctgctgaactacggcgccgagaccaacatcgtgaccaagcagggcgtgacccccctgcacctggccagccaggagggccacaccgacatggtgaccctgctgctggacaagggcgccaacatccacatgagcaccaagagcggcctgaccagcctgcacctggccgcccaggaggacaaggtgaacgtggccgacatcctgaccaagcacggcgccgaccaggacgcccacaccaagctgggctacacccccctgatcgtggcctgccactacggcaacgtgaagatggtgaacttcctgctgaagcagggcgccaacgtgaacgccaagaccaagaacggctacacccccctgcaccaggccgcccagcagggccacacccacatcatcaacgtgctgctgcagcacggcgccaagcccaacgccaccaccgccaacggcaacaccgccctggccatcgccaagagactgggctacatcagcgtggtggacaccctgaaggtggtgaccgaggaggtgaccaccaccaccaccaccatcaccgagaagcacaagctgaacgtgcccgagaccatgaccgaggtgctggacgtgagcgacgaggagggcgacgacaccatgaccggcgacggcggcgagtacctgagacccgaggacctgaaggagctgggcgacgacagcctgcccagcagccagttcctggacggcatgaactacctgagatacagcctggagggcggcagaagcgacagcctgagaagcttcagcagcgacagaagccacaccctgagccacgccagctacctgagagacagcgccgtgatggacgacagcgtggtgatccccagccaccaggtgagcaccctggccaaggaggccgagagaaacagctacagactgagctggggcaccgagaacctggacaacgtggccctgagcagcagccccatccacagcggcttcctggtgagcttcatggtggacgccagaggcggcgccatgagaggctgcagacacaacggcctgagaatcatcatcccccccagaaagtgcaccgcccccaccagagtgacctgcagactggtgaagagacacagactggccaccatgccccccatggtggagggcgagggcctggccagcagactgatcgaggtgggccccagcggcgcccagttcctgggcaagctgcacctgcccaccgcccccccccccctgaacgagggcgagagcctggtgagcagaatcctgcagctgggcccccccggcaccaagttcctgggccccgtgatcgtggagatcccccacttcgccgccctgagaggcaaggagagagagctggtggtgctgagaagcgagaacggcgacagctggaaggagcacttctgcgactacaccgaggacgagctgaacgagatcctgaacggcatggacgaggtgctggacagccccgaggacctggagaagaagagaatctgcagaatcatcaccagagacttcccccagtacttcgccgtggtgagcagaatcaagcaggacagcaacctgatcggccccgagggcggcgtgctgagcagcaccgtggtgccccaggtgcaggccgtgttccccgagggcgccctgaccaagagaatcagagtgggcctgcaggcccagcccatgcacagcgagctggtgaagaagatcctgggcaacaaggccaccttcagccccatcgtgaccctggagcccagaagaagaaagttccacaagcccatcaccatgaccatccccgtgcccaaggccagcagcgacgtgatgctgaacggcttcggcggcgacgcccccaccctgagactgctgtgcagcatcaccggcggcaccacccccgcccagtgggaggacatcaccggcaccacccccctgaccttcgtgaacgagtgcgtgagcttcaccaccaacgtgagcgccagattctggctgatcgactgcagacagatccaggagagcgtgaccttcgccagccaggtgtacagagagatcatctgcgtgccctacatggccaagttcgtggtgttcgccaagagccacgaccccatcgaggccagactgagatgcttctgcatgaccgacgacaaggtggacaagaccctggagcagcaggagaacttcgccgaggtggccagaagcagagacgtggaggtgctggagggcaagcccatctacgtggactgcttcggcaacctggtgcccctgaccaagagcggccagcaccacatcttcagcttcttcgccttcaaggagaacagactgcccctgttcgtgaaggtgagagacaccacccaggagccctgcggcagactgagcttcatgaaggagcccaagagcaccagaggcctggtgcaccaggccatctgcaacctgaacatcaccctgcccatctacaccaaggagagcgagagcgaccaggagcaggaggaggagatcgacatgaccagcgagaagaacccccaggacgagcaggagagaatcgaggagagactggcctacatcgccgaccacctgggcttcagctggaccgagctggccagagagctggacttcaccgaggagcagatccaccagatcagaatcgagaaccccaacagcctgcaggaccagagccacgccctgctgaagtactggctggagagagacggcaagcacgccaccgacaccaacctggtggagtgcctgaccaagatcaacagaatggacatcgtgcacctgatggagaccaacaccgagcccctgcaggagagaatcagccacagctacgccgagatcgagcagaccatcaccctggaccacagcgagggcttcagcgtgctgcaggaggagctgtgcaccgcccagcacaagcagaaggaggagcaggccgtgagcaaggagagcgagacctgcgaccacccccccatcgtgagcgaggaggacatcagcgtgggctacagcaccttccaggacggcgtgcccaagaccgagggcgacagcagcgccaccgccctgttcccccagacccacaaggagcaggtgcagcaggacttcagcggcaagatgcaggacctgcccgaggagagcagcctggagtaccagcaggagtacttcgtgaccacccccggcaccgagaccagcgagacccagaaggccatgatcgtgcccagcagccccagcaagacccccgaggaggtgagcacccccgccgaggaggagaagctgtacctgcagacccccaccagcagcgagagaggcggcagccccatcatccaggagcccgaggagcccagcgagcacagagaggagagcagccccagaaagaccagcctggtgatcgtggagagcgccgacaaccagcccgagacctgcgagagactggacgaggacgccgccttcgagaagggcgacgacatgcccgagatcccccccgagaccgtgaccgaggaggagtacatcgacgagcacggccacaccgtggtgaagaaggtgaccagaaagatcatcagaagatacgtgagcagcgagggcaccgagaaggaggagatcatggtgcagggcatgccccaggagcccgtgaacatcgaggagggcgacggctacagcaaggtgatcaagagagtggtgctgaagagcgacaccgagcagagcgaggacaacaacgagtag

SEQ ID NO: 72819 - DNA, 2988 bp, synthetic construct
  misc_feature 1..2988: note = Description of Artificial Sequence: Synthetic coding sequence
  source 1..2988: mol_type = other DNA
atggacgacagcgtggtgatccccagccaccaggtgagcaccctggccaaggaggccgagagaaacagctacagactgagctggggcaccgagaacctggacaacgtggccctgagcagcagccccatccacagcggcttcctggtgagcttcatggtggacgccagaggcggcgccatgagaggctgcagacacaacggcctgagaatcatcatcccccccagaaagtgcaccgcccccaccagagtgacctgcagactggtgaagagacacagactggccaccatgccccccatggtggagggcgagggcctggccagcagactgatcgaggtgggccccagcggcgcccagttcctgggccccgtgatcgtggagatcccccacttcgccgccctgagaggcaaggagagagagctggtggtgctgagaagcgagaacggcgacagctggaaggagcacttctgcgactacaccgaggacgagctgaacgagatcctgaacggcatggacgaggtgctggacagccccgaggacctggagaagaagagaatctgcagaatcatcaccagagacttcccccagtacttcgccgtggtgagcagaatcaagcaggacagcaacctgatcggccccgagggcggcgtgctgagcagcaccgtggtgccccaggtgcaggccgtgttccccgagggcgccctgaccaagagaatcagagtgggcctgcaggcccagcccatgcacagcgagctggtgaagaagatcctgggcaacaaggccaccttcagccccatcgtgaccctggagcccagaagaagaaagttccacaagcccatcaccatgaccatccccgtgcccaaggccagcagcgacgtgatgctgaacggcttcggcggcgacgcccccaccctgagactgctgtgcagcatcaccggcggcaccacccccgcccagtgggaggacatcaccggcaccacccccctgaccttcgtgaacgagtgcgtgagcttcaccaccaacgtgagcgccagattctggctgatcgactgcagacagatccaggagagcgtgaccttcgccagccaggtgtacagagagatcatctgcgtgccctacatggccaagttcgtggtgttcgccaagagccacgaccccatcgaggccagactgagatgcttctgcatgaccgacgacaaggtggacaagaccctggagcagcaggagaacttcgccgaggtggccagaagcagagacgtggaggtgctggagggcaagcccatctacgtggactgcttcggcaacctggtgcccctgaccaagagcggccagcaccacatcttcagcttcttcgccttcaaggagaacagactgcccctgttcgtgaaggtgagagacaccacccaggagccctgcggcagactgagcttcatgaaggagcccaagagcaccagaggcctggtgcaccaggccatctgcaacctgaacatcaccctgcccatctacaccaagaccgagaccaccaccgagatccacccccaggacgagcaggagagaatcgaggagagactggcctacatcgccgaccacctgggcttcagctggaccgagctggccagagagctggacttcaccgaggagcagatccaccagatcagaatcgagaaccccaacagcctgcaggaccagagccacgccctgctgaagtactggctggagagagacggcaagcacgccaccgacaccaacctggtggagtgcctgaccaagatcaacagaatggacatcgtgcacctgatggagaccaacaccgagcccctgcaggagagaatcagccacagctacgccgagatcgagcagaccatcaccctggaccacagcgagggcttcagcgtgctgcaggaggagctgtgcaccgcccagcacaagcagaaggaggagcaggccgtgagcaaggagagcgagacctgcgaccacccccccatcgtgagcgaggaggacatcagcgtgggctacagcaccttccaggacggcgtgcccaagaccgagggcgacagcagcgccaccgccctgttcccccagacccacaaggagcaggtgcagcaggacttcagcggcaagatgcaggacctgcccgaggagagcagcctggagtaccagcaggagtacttcgtgaccacccccggcaccgagaccagcgagacccagaaggccatgatcgtgcccagcagccccagcaagacccccgaggaggtgagcacccccgccgaggaggagaagctgtacctgcagacccccaccagcagcgagagaggcggcagccccatcatccaggagcccgaggagcccagcgagcacagagaggagagcagccccagaaagaccagcctggtgatcgtggagagcgccgacaaccagcccgagacctgcgagagactggacgaggacgccgccttcgagaaggagctgaccgaggagctgggcgagctggaggccagcagcgacgaggaggccatggtgaccaccagagtggtgagaagaagagtgatcatccagggcgacgacatgcccgagatcccccccgagaccgtgaccgaggaggagtacatcgacgagcacggccacaccgtggtgaagaaggtgaccagaaagatcatcagaagatacgtgagcagcgagggcaccgagaaggaggagatcatggtgcagggcatgccccaggagcccgtgaacatcgaggagggcgacggctacagcaaggtgatcaagagagtggtgctgaagagcgacaccgagcagagcgaggtgaccctgtgcgagcccagcatcctgagcagcaccagccagttccaggccgagcccgtggagggcagaagagtgagcaaggtggtgaagaccaccgtggtgctgggcgagagaatggagaagcacctgggcgacagcagcctggccaccgacctgcccagcgccaaggacgacttcgaggagtag

SEQ ID NO: 72820 - DNA, 3345 bp, synthetic construct
  misc_feature 1..3345: note = Description of Artificial Sequence: Synthetic coding sequence
  source 1..3345: mol_type = other DNA
atgaccaccatgctgcagaagagcgacagcaacgccagcttcctgagagccgccagagccggcaacctggacaaggtggtggagtacctgaagggcggcatcgacatcaacacctgcaaccagaacggcctgaacgccctgcacctggccgccaaggagggccacgtgggcctggtgcaggagctgctgggcagaggcagcagcgtggacagcgccaccaagaagggcaacaccgccctgcacatcgccagcctggccggccaggccgaggtggtgaaggtgctggtgaaggagggcgccaacatcaacgcccagagccagaacggcttcacccccctgtacatggccgcccaggagaaccacatcgacgtggtgaagtacctgctggagaacggcgccaaccagagcaccgccaccgaggacggcttcacccccctggccgtggccctgcagcagggccacaaccaggccgtggccatcctgctggagaacgacaccaagggcaaggtgagactgcccgccctgcacatcgccgccagaaaggacgacaccaagagcgccgccctgctgctgcagaacgaccacaacgccgacgtgcagagcaagatgatggtgaacagaaccaccgagagcggcttcacccccctgcacatcgccgcccactacggcaacgtgaacgtggccaccctgctgctgaacagaggcgccgccgtggacttcaccgccagaaacggcatcacccccctgcacgtggccagcaagagaggcaacaccaacatggtgaagctgctgctggacagaggcggccagatcgacgccaagaccagagacggcctgacccccctgcactgcgccgccagaagcggccacgaccaggtggtggagctgctgctggagagaggcgcccccctgctggccagaaccaagaacggcctgagccccctgcacatggccgcccagggcgaccacgtggagtgcgtgaagcacctgctgcagcacaaggcccccgtggacgacgtgaccctggactacctgaccgccctgcacgtggccgcccactgcggccactacagagtgaccaagctgctgctggacaagagagccaaccccaacgccagagccctgaacggcttcacccccctgcacatcgcctgcaagaagaacagaatcaaggtgatggagctgctggtgaagtacggcgccagcatccaggccatcaccgagagcggcctgacccccatccacgtggccgccttcatgggccacctgaacatcgtgctgctgctgctgcagaacggcgccagccccgacgtgaccaacatcagaggcgagaccgccctgcacatggccgccagagccggccaggtggaggtggtgagatgcctgctgagaaacggcgccctggtggacgccagagccagagaggagcagacccccctgcacatcgccagcagactgggcaagaccgagatcgtgcagctgctgctgcagcacatggcccaccccgacgccgccaccaccaacggctacacccccctgcacatcagcgccagagagggccaggtggacgtggccagcgtgctgctggaggccggcgccgcccacagcctggccaccaagaagggcttcacccccctgcacgtggccgccaagtacggcagcctggacgtggccaagctgctgctgcagagaagagccgccgccgacagcgccggcaagaacggcctgacccccctgcacgtggccgcccactacgacaaccagaaggtggccctgctgctgctggagaagggcgccagcccccacgccaccgccaagaacggctacacccccctgcacatcgccgccaagaagaaccagatgcagatcgccagcaccctgctgaactacggcgccgagaccaacatcgtgaccaagcagggcgtgacccccctgcacctggccagccaggagggccacaccgacatggtgaccctgctgctggacaagggcgccaacatccacatgagcaccaagagcggcctgaccagcctgcacctggccgcccaggaggacaaggtgaacgtggccgacatcctgaccaagcacggcgccgaccaggacgcccacaccaagctgggctacacccccctgatcgtggcctgccactacggcaacgtgaagatggtgaacttcctgctgaagcagggcgccaacgtgaacgccaagaccaagaacggctacacccccctgcaccaggccgcccagcagggccacacccacatcatcaacgtgctgctgcagcacggcgccaagcccaacgccaccaccgccaacggcaacaccgccctggccatcgccaagagactgggctacatcagcgtggtggacaccctgaaggtggtgaccgaggaggtgaccaccaccaccaccaccatcaccgagaagcacaagctgaacgtgcccgagaccatgaccgaggtgctggacgtgagcgacgaggagggcgacgacaccatgaccggcgacggcggcgagtacctgagacccgaggacctgaaggagctgggcgacgacagcctgcccagcagccagttcctggacggcatgaactacctgagatacagcctggagggcggcagaagcgacagcctgagaagcttcagcagcgacagaagccacaccctgagccacgccagctacctgagagacagcgccgtgatggacgacagcgtggtgatccccagccaccaggtgagcaccctggccaaggaggccgagagaaacagctacagactgagctggggcaccgagaacctggacaacgtggccctgagcagcagccccatccacagcggcttcctggtgagcttcatggtggacgccagaggcggcgccatgagaggctgcagacacaacggcctgagaatcatcatcccccccagaaagtgcaccgcccccaccagagtgacctgcagactggtgaagagacacagactggccaccatgccccccatggtggagggcgagggcctggccagcagactgatcgaggtgggccccagcggcgcccagttcctgggcaagctgcacctgcccaccgcccccccccccctgaacgagggcgagagcctggtgagcagaatcctgcagctgggcccccccggcaccaagttcctgggccccgtgatcgtggagatcccccacttcgccgccctgagaggcaaggagagagagctggtggtgctgagaagcgagaacggcgacagctggaaggagcacttctgcgactacaccgaggacgagctgaacgagatcctgaacggcatggacgaggtgctggacagccccgaggacctggagtag

SEQ ID NO: 72821 - DNA, 5193 bp, synthetic construct
  misc_feature 1..5193: note = Description of Artificial Sequence: Synthetic coding sequence
  source 1..5193: mol_type = other DNA
atgatgaacgaggacgccgcccagaagagcgacagcggcgagaagttcaacggcagcagccagagaagaaagagacccaagaaggtgacctgcccccagatgaagcccgaggccgccaacatcgagaagagcgacagcaacgccagcttcctgagagccgccagagccggcaacctggacaaggtggtggagtacctgaagggcggcatcgacatcaacacctgcaaccagaacggcctgaacgccctgcacctggccgccaaggagggccacgtgggcctggtgcaggagctgctgggcagaggcagcagcgtggacagcgccaccaagaagggcaacaccgccctgcacatcgccagcctggccggccaggccgaggtggtgaaggtgctggtgaaggagggcgccaacatcaacgcccagagccagaacggcttcacccccctgtacatggccgcccaggagaaccacatcgacgtggtgaagtacctgctggagaacggcgccaaccagagcaccgccaccgaggacggcttcacccccctggccgtggccctgcagcagggccacaaccaggccgtggccatcctgctggagaacgacaccaagggcaaggtgagactgcccgccctgcacatcgccgccagaaaggacgacaccaagagcgccgccctgctgctgcagaacgaccacaacgccgacgtgcagagcaagatgatggtgaacagaaccaccgagagcggcttcacccccctgcacatcgccgcccactacggcaacgtgaacgtggccaccctgctgctgaacagaggcgccgccgtggacttcaccgccagaaacggcatcacccccctgcacgtggccagcaagagaggcaacaccaacatggtgaagctgctgctggacagaggcggccagatcgacgccaagaccagagacggcctgacccccctgcactgcgccgccagaagcggccacgaccaggtggtggagctgctgctggagagaggcgcccccctgctggccagaaccaagaacggcctgagccccctgcacatggccgcccagggcgaccacgtggagtgcgtgaagcacctgctgcagcacaaggcccccgtggacgacgtgaccctggactacctgaccgccctgcacgtggccgcccactgcggccactacagagtgaccaagctgctgctggacaagagagccaaccccaacgccagagccctgaacggcttcacccccctgcacatcgcctgcaagaagaacagaatcaaggtgatggagctgctggtgaagtacggcgccagcatccaggccatcaccgagagcggcctgacccccatccacgtggccgccttcatgggccacctgaacatcgtgctgctgctgctgcagaacggcgccagccccgacgtgaccaacatcagaggcgagaccgccctgcacatggccgccagagccggccaggtggaggtggtgagatgcctgctgagaaacggcgccctggtggacgccagagccagagaggagcagacccccctgcacatcgccagcagactgggcaagaccgagatcgtgcagctgctgctgcagcacatggcccaccccgacgccgccaccaccaacggctacacccccctgcacatcagcgccagagagggccaggtggacgtggccagcgtgctgctggaggccggcgccgcccacagcctggccaccaagaagggcttcacccccctgcacgtggccgccaagtacggcagcctggacgtggccaagctgctgctgcagagaagagccgccgccgacagcgccggcaagaacggcctgacccccctgcacgtggccgcccactacgacaaccagaaggtggccctgctgctgctggagaagggcgccagcccccacgccaccgccaagaacggctacacccccctgcacatcgccgccaagaagaaccagatgcagatcgccagcaccctgctgaactacggcgccgagaccaacatcgtgaccaagcagggcgtgacccccctgcacctggccagccaggagggccacaccgacatggtgaccctgctgctggacaagggcgccaacatccacatgagcaccaagagcggcctgaccagcctgcacctggccgcccaggaggacaaggtgaacgtggccgacatcctgaccaagcacggcgccgaccaggacgcccacaccaagctgggctacacccccctgatcgtggcctgccactacggcaacgtgaagatggtgaacttcctgctgaagcagggcgccaacgtgaacgccaagaccaagaacggctacacccccctgcaccaggccgcccagcagggccacacccacatcatcaacgtgctgctgcagcacggcgccaagcccaacgccaccaccgccaacggcaacaccgccctggccatcgccaagagactgggctacatcagcgtggtggacaccctgaaggtggtgaccgaggaggtgaccaccaccaccaccaccatcaccgagaagcacaagctgaacgtgcccgagaccatgaccgaggtgctggacgtgagcgacgaggagggcgacgacaccatgaccggcgacggcggcgagtacctgagacccgaggacctgaaggagctgggcgacgacagcctgcccagcagccagttcctggacggcatgaactacctgagatacagcctggagggcggcagaagcgacagcctgagaagcttcagcagcgacagaagccacaccctgagccacgccagctacctgagagacagcgccgtgatggacgacagcgtggtgatccccagccaccaggtgagcaccctggccaaggaggccgagagaaacagctacagactgagctggggcaccgagaacctggacaacgtggccctgagcagcagccccatccacagcggcttcctggtgagcttcatggtggacgccagaggcggcgccatgagaggctgcagacacaacggcctgagaatcatcatcccccccagaaagtgcaccgcccccaccagagtgacctgcagactggtgaagagacacagactggccaccatgccccccatggtggagggcgagggcctggccagcagactgatcgaggtgggccccagcggcgcccagttcctgggcaagctgcacctgcccaccgcccccccccccctgaacgagggcgagagcctggtgagcagaatcctgcagctgggcccccccggcaccaagttcctgggccccgtgatcgtggagatcccccacttcgccgccctgagaggcaaggagagagagctggtggtgctgagaagcgagaacggcgacagctggaaggagcacttctgcgactacaccgaggacgagctgaacgagatcctgaacggcatggacgaggtgctggacagccccgaggacctggagaagaagagaatctgcagaatcatcaccagagacttcccccagtacttcgccgtggtgagcagaatcaagcaggacagcaacctgatcggccccgagggcggcgtgctgagcagcaccgtggtgccccaggtgcaggccgtgttccccgagggcgccctgaccaagagaatcagagtgggcctgcaggcccagcccatgcacagcgagctggtgaagaagatcctgggcaacaaggccaccttcagccccatcgtgaccctggagcccagaagaagaaagttccacaagcccatcaccatgaccatccccgtgcccaaggccagcagcgacgtgatgctgaacggcttcggcggcgacgcccccaccctgagactgctgtgcagcatcaccggcggcaccacccccgcccagtgggaggacatcaccggcaccacccccctgaccttcgtgaacgagtgcgtgagcttcaccaccaacgtgagcgccagattctggctgatcgactgcagacagatccaggagagcgtgaccttcgccagccaggtgtacagagagatcatctgcgtgccctacatggccaagttcgtggtgttcgccaagagccacgaccccatcgaggccagactgagatgcttctgcatgaccgacgacaaggtggacaagaccctggagcagcaggagaacttcgccgaggtggccagaagcagagacgtggaggtgctggagggcaagcccatctacgtggactgcttcggcaacctggtgcccctgaccaagagcggccagcaccacatcttcagcttcttcgccttcaaggagaacagactgcccctgttcgtgaaggtgagagacaccacccaggagccctgcggcagactgagcttcatgaaggagcccaagagcaccagaggcctggtgcaccaggccatctgcaacctgaacatcaccctgcccatctacaccaaggagagcgagagcgaccaggagcaggaggaggagatcgacatgaccagcgagaagaacgacgagaccgagagcaccgagaccagcgtgctgaagagccacctggtgaacgaggtgcccgtgctggccagccccgacctgctgagcgaggtgagcgagatgaagcaggacctgatcaagatgaccgccatcctgaccaccgacgtgagcgacaaggccggcagcatcaaggtgaaggagctggtgaaggccgccgaggaggagcccggcgagcccttcgagatcgtggagagagtgaaggaggacctggagaaggtgaacgagatcctgagaagcggcacctgcaccagagacgagagcagcgtgcagagcagcagaagcgagagaggcctggtggaggaggagtgggtgatcgtgagcgacgaggagatcgaggaggccagacagaaggcccccctggagatcaccgagtacccctgcgtggaggtgagaatcgacaaggagatcaagggcaaggtggagaaggacagcaccggcctggtgaactacctgaccgacgacctgaacacctgcgtgcccctgcccaaggagcagctgcagaccgtgcaggacaaggccggcaagaagtgcgaggccctggccgtgggcagaagcagcgagaaggagggcaaggacatcccccccgacgagacccagagcacccagaagcagcacaagcccagcctgggcatcaagaagcccgtgagaagaaagctgaaggagaagcagaagcagaagtag

SEQ ID NO: 72822 - DNA, 5592 bp, synthetic construct
  misc_feature 1..5592: note = Description of Artificial Sequence: Synthetic coding sequence
  source 1..5592: mol_type = other DNA
atgaccaccatgctgcagaagagcgacagcaacgccagcttcctgagagccgccagagccggcaacctggacaaggtggtggagtacctgaagggcggcatcgacatcaacacctgcaaccagaacggcctgaacgccctgcacctggccgccaaggagggccacgtgggcctggtgcaggagctgctgggcagaggcagcagcgtggacagcgccaccaagaagggcaacaccgccctgcacatcgccagcctggccggccaggccgaggtggtgaaggtgctggtgaaggagggcgccaacatcaacgcccagagccagaacggcttcacccccctgtacatggccgcccaggagaaccacatcgacgtggtgaagtacctgctggagaacggcgccaaccagagcaccgccaccgaggacggcttcacccccctggccgtggccctgcagcagggccacaaccaggccgtggccatcctgctggagaacgacaccaagggcaaggtgagactgcccgccctgcacatcgccgccagaaaggacgacaccaagagcgccgccctgctgctgcagaacgaccacaacgccgacgtgcagagcaagatgatggtgaacagaaccaccgagagcggcttcacccccctgcacatcgccgcccactacggcaacgtgaacgtggccaccctgctgctgaacagaggcgccgccgtggacttcaccgccagaaacggcatcacccccctgcacgtggccagcaagagaggcaacaccaacatggtgaagctgctgctggacagaggcggccagatcgacgccaagaccagagacggcctgacccccctgcactgcgccgccagaagcggccacgaccaggtggtggagctgctgctggagagaggcgcccccctgctggccagaaccaagaacggcctgagccccctgcacatggccgcccagggcgaccacgtggagtgcgtgaagcacctgctgcagcacaaggcccccgtggacgacgtgaccctggactacctgaccgccctgcacgtggccgcccactgcggccactacagagtgaccaagctgctgctggacaagagagccaaccccaacgccagagccctgaacggcttcacccccctgcacatcgcctgcaagaagaacagaatcaaggtgatggagctgctggtgaagtacggcgccagcatccaggccatcaccgagagcggcctgacccccatccacgtggccgccttcatgggccacctgaacatcgtgctgctgctgctgcagaacggcgccagccccgacgtgaccaacatcagaggcgagaccgccctgcacatggccgccagagccggccaggtggaggtggtgagatgcctgctgagaaacggcgccctggtggacgccagagccagagaggagcagacccccctgcacatcgccagcagactgggcaagaccgagatcgtgcagctgctgctgcagcacatggcccaccccgacgccgccaccaccaacggctacacccccctgcacatcagcgccagagagggccaggtggacgtggccagcgtgctgctggaggccggcgccgcccacagcctggccaccaagaagggcttcacccccctgcacgtggccgccaagtacggcagcctggacgtggccaagctgctgctgcagagaagagccgccgccgacagcgccggcaagaacggcctgacccccctgcacgtggccgcccactacgacaaccagaaggtggccctgctgctgctggagaagggcgccagcccccacgccaccgccaagaacggctacacccccctgcacatcgccgccaagaagaaccagatgcagatcgccagcaccctgctgaactacggcgccgagaccaacatcgtgaccaagcagggcgtgacccccctgcacctggccagccaggagggccacaccgacatggtgaccctgctgctggacaagggcgccaacatccacatgagcaccaagagcggcctgaccagcctgcacctggccgcccaggaggacaaggtgaacgtggccgacatcctgaccaagcacggcgccgaccaggacgcccacaccaagctgggctacacccccctgatcgtggcctgccactacggcaacgtgaagatggtgaacttcctgctgaagcagggcgccaacgtgaacgccaagaccaagaacggctacacccccctgcaccaggccgcccagcagggccacacccacatcatcaacgtgctgctgcagcacggcgccaagcccaacgccaccaccgccaacggcaacaccgccctggccatcgccaagagactgggctacatcagcgtggtggacaccctgaaggtggtgaccgaggaggtgaccaccaccaccaccaccatcaccgagaagcacaagctgaacgtgcccgagaccatgaccgaggtgctggacgtgagcgacgaggagggcgacgacaccatgaccggcgacggcggcgagtacctgagacccgaggacctgaaggagctgggcgacgacagcctgcccagcagccagttcctggacggcatgaactacctgagatacagcctggagggcggcagaagcgacagcctgagaagcttcagcagcgacagaagccacaccctgagccacgccagctacctgagagacagcgccgtgatggacgacagcgtggtgatccccagccaccaggtgagcaccctggccaaggaggccgagagaaacagctacagactgagctggggcaccgagaacctggacaacgtggccctgagcagcagccccatccacagcggcagagccagcccctgcctggagagagacaacagcagcttcctggtgagcttcatggtggacgccagaggcggcgccatgagaggctgcagacacaacggcctgagaatcatcatcccccccagaaagtgcaccgcccccaccagagtgacctgcagactggtgaagagacacagactggccaccatgccccccatggtggagggcgagggcctggccagcagactgatcgaggtgggccccagcggcgcccagttcctgggcaagctgcacctgcccaccgcccccccccccctgaacgagggcgagagcctggtgagcagaatcctgcagctgggcccccccggcaccaagttcctgggccccgtgatcgtggagatcccccacttcgccgccctgagaggcaaggagagagagctggtggtgctgagaagcgagaacggcgacagctggaaggagcacttctgcgactacaccgaggacgagctgaacgagatcctgaacggcatggacgaggtgctggacagccccgaggacctggagaagaagagaatctgcagaatcatcaccagagacttcccccagtacttcgccgtggtgagcagaatcaagcaggacagcaacctgatcggccccgagggcggcgtgctgagcagcaccgtggtgccccaggtgcaggccgtgttccccgagggcgccctgaccaagagaatcagagtgggcctgcaggcccagcccatgcacagcgagctggtgaagaagatcctgggcaacaaggccaccttcagccccatcgtgaccctggagcccagaagaagaaagttccacaagcccatcaccatgaccatccccgtgcccaaggccagcagcgacgtgatgctgaacggcttcggcggcgacgcccccaccctgagactgctgtgcagcatcaccggcggcaccacccccgcccagtgggaggacatcaccggcaccacccccctgaccttcgtgaacgagtgcgtgagcttcaccaccaacgtgagcgccagattctggctgatcgactgcagacagatccaggagagcgtgaccttcgccagccaggtgtacagagagatcatctgcgtgccctacatggccaagttcgtggtgttcgccaagagccacgaccccatcgaggccagactgagatgcttctgcatgaccgacgacaaggtggacaagaccctggagcagcaggagaacttcgccgaggtggccagaagcagagacgtggaggtgctggagggcaagcccatctacgtggactgcttcggcaacctggtgcccctgaccaagagcggccagcaccacatcttcagcttcttcgccttcaaggagaacagactgcccctgttcgtgaaggtgagagacaccacccaggagccctgcggcagactgagcttcatgaaggagcccaagagcaccagaggcctggtgcaccaggccatctgcaacctgaacatcaccctgcccatctacaccaaggagagcgagagcgaccaggagcaggaggaggagatcgacatgaccagcgagaagaacccccaggacgagcaggagagaatcgaggagagactggcctacatcgccgaccacctgggcttcagctggaccgagctggccagagagctggacttcaccgaggagcagatccaccagatcagaatcgagaaccccaacagcctgcaggaccagagccacgccctgctgaagtactggctggagagagacggcaagcacgccaccgacaccaacctggtggagtgcctgaccaagatcaacagaatggacatcgtgcacctgatggagaccaacaccgagcccctgcaggagagaatcagccacagctacgccgagatcgagcagaccatcaccctggaccacagcgagggcttcagcgtgctgcaggaggagctgtgcaccgcccagcacaagcagaaggaggagcaggccgtgagcaaggagagcgagacctgcgaccacccccccatcgtgagcgaggaggacatcagcgtgggctacagcaccttccaggacggcgtgcccaagaccgagggcgacagcagcgccaccgccctgttcccccagacccacaaggagcaggtgcagcaggacttcagcggcaagatgcaggacctgcccgaggagagcagcctggagtaccagcaggagtacttcgtgaccacccccggcaccgagaccagcgagacccagaaggccatgatcgtgcccagcagccccagcaagacccccgaggaggtgagcacccccgccgaggaggagaagctgtacctgcagacccccaccagcagcgagagaggcggcagccccatcatccaggagcccgaggagcccagcgagcacagagaggagagcagccccagaaagaccagcctggtgatcgtggagagcgccgacaaccagcccgagacctgcgagagactggacgaggacgccgccttcgagaagggcgacgacatgcccgagatcccccccgagaccgtgaccgaggaggagtacatcgacgagcacggccacaccgtggtgaagaaggtgaccagaaagatcatcagaagatacgtgagcagcgagggcaccgagaaggaggagatcatggtgcagggcatgccccaggagcccgtgaacatcgaggagggcgacggctacagcaaggtgatcaagagagtggtgctgaagagcgacaccgagcagagcgaggacaacaacgagtag

SEQ ID NO: 72823 - DNA, 5586 bp, synthetic construct
  misc_feature 1..5586: note = Description of Artificial Sequence: Synthetic coding sequence
  source 1..5586: mol_type = other DNA
atggccagcagcgccagcagcagccccgccggcaccgaggacagcgcccccgcccagggcggcttcggcagcgactacagcagaagcagcagaaagagcgacgccaacgccagctacctgagagccgccagagccggccacctggagaaggccctggactacatcaagaacggcgtggacatcaacatctgcaaccagaacggcctgaacgccctgcacctggccagcaaggagggccacgtggaggtggtgagcgagctgctgcagagagaggccaacgtggacgccgccaccaagaagggcaacaccgccctgcacatcgccagcctggccggccaggccgaggtggtgaaggtgctggtgaccaacggcgccaacgtgaacgcccagagccagaacggcttcacccccctgtacatggccgcccaggagaaccacctggaggtggtgaagttcctgctggacaacggcgccagccagagcctggccaccgaggacggcttcacccccctggccgtggccctgcagcagggccacgaccaggtggtgagcctgctgctggagaacgacaccaagggcaaggtgagactgcccgccctgcacatcgccgccagaaaggacgacaccaaggccgccgccctgctgctgcagaacgacaacaacgccgacgtggagagcaagagcggcttcacccccctgcacatcgccgcccactacggcaacatcaacgtggccaccctgctgctgaacagagccgccgccgtggacttcaccgccagaaacgacatcacccccctgcacgtggccagcaagagaggcaacgccaacatggtgaagctgctgctggacagaggcgccaagatcgacgccaagaccagagacggcctgacccccctgcactgcggcgccagaagcggccacgagcaggtggtggagatgctgctggacagagccgcccccatcctgagcaagaccaagaacggcctgagccccctgcacatggccacccagggcgaccacctgaactgcgtgcagctgctgctgcagcacaacgtgcccgtggacgacgtgaccaacgactacctgaccgccctgcacgtggccgcccactgcggccactacaaggtggccaaggtgctgctggacaagaaggccaaccccaacgccaaggccctgaacggcttcacccccctgcacatcgcctgcaagaagaacagaatcaaggtgatggagctgctgctgaagcacggcgccagcatccaggccgtgaccgagagcggcctgacccccatccacgtggccgccttcatgggccacgtgaacatcgtgagccagctgatgcaccacggcgccagccccaacaccaccaacgtgagaggcgagaccgccctgcacatggccgccagaagcggccaggccgaggtggtgagatacctggtgcaggacggcgcccaggtggaggccaaggccaaggacgaccagacccccctgcacatcagcgccagactgggcaaggccgacatcgtgcagcagctgctgcagcagggcgccagccccaacgccgccaccaccagcggctacacccccctgcacctgagcgccagagagggccacgaggacgtggccgccttcctgctggaccacggcgccagcctgagcatcaccaccaagaagggcttcacccccctgcacgtggccgccaagtacggcaagctggaggtggccaacctgctgctgcagaagagcgccagccccgacgccgccggcaagagcggcctgacccccctgcacgtggccgcccactacgacaaccagaaggtggccctgctgctgctggaccagggcgccagcccccacgccgccgccaagaacggctacacccccctgcacatcgccgccaagaagaaccagatggacatcgccaccaccctgctggagtacggcgccgacgccaacgccgtgaccagacagggcatcgccagcgtgcacctggccgcccaggagggccacgtggacatggtgagcctgctgctgggcagaaacgccaacgtgaacctgagcaacaagagcggcctgacccccctgcacctggccgcccaggaggacagagtgaacgtggccgaggtgctggtgaaccagggcgcccacgtggacgcccagaccaagatgggctacacccccctgcacgtgggctgccactacggcaacatcaagatcgtgaacttcctgctgcagcacagcgccaaggtgaacgccaagaccaagaacggctacacccccctgcaccaggccgcccagcagggccacacccacatcatcaacgtgctgctgcagaacaacgccagccccaacgagctgaccgtgaacggcaacaccgccctgggcatcgccagaagactgggctacatcagcgtggtggacaccctgaagatcgtgaccgaggagaccatgaccaccaccaccgtgaccgagaagcacaagatgaacgtgcccgagaccatgaacgaggtgctggacatgagcgacgacgaggtgagaaaggccaacgcccccgagatgctgagcgacggcgagtacatcagcgacgtggaggagggcgaggacgccatgaccggcgacaccgacaagtacctgggcccccaggacctgaaggagctgggcgacgacagcctgcccgccgagggctacatgggcttcagcctgggcgccagaagcgccagcctgagaagcttcagcagcgacagaagctacaccctgaacagaagcagctacgccagagacagcatgatgatcgaggagctgctggtgcccagcaaggagcagcacctgaccttcaccagagagttcgacagcgacagcctgagacactacagctgggccgccgacaccctggacaacgtgaacctggtgagcagccccatccacagcggcttcctggtgagcttcatggtggacgccagaggcggcagcatgagaggcagcagacaccacggcatgagaatcatcatcccccccagaaagtgcaccgcccccaccagaatcacctgcagactggtgaagagacacaagctggccaaccccccccccatggtggagggcgagggcctggccagcagactggtggagatgggccccgccggcgcccagttcctgggccccgtgatcgtggagatcccccacttcggcagcatgagaggcaaggagagagagctgatcgtgctgagaagcgagaacggcgagacctggaaggagcaccagttcgacagcaagaacgaggacctgaccgagctgctgaacggcatggacgaggagctggacagccccgaggagctgggcaagaagagaatctgcagaatcatcaccaaggacttcccccagtacttcgccgtggtgagcagaatcaagcaggagagcaaccagatcggccccgagggcggcatcctgagcagcaccaccgtgcccctggtgcaggccagcttccccgagggcgccctgaccaagagaatcagagtgggcctgcaggcccagcccgtgcccgacgagatcgtgaagaagatcctgggcaacaaggccaccttcagccccatcgtgaccgtggagcccagaagaagaaagttccacaagcccatcaccatgaccatccccgtgcccccccccagcggcgagggcgtgagcaacggctacaagggcgacaccacccccaacctgagactgctgtgcagcatcaccggcggcaccagccccgcccagtgggaggacatcaccggcaccacccccctgaccttcatcaaggactgcgtgagcttcaccaccaacgtgagcgccagattctggctggccgactgccaccaggtgctggagaccgtgggcctggccacccagctgtacagagagctgatctgcgtgccctacatggccaagttcgtggtgttcgccaagatgaacgaccccgtggagagcagcctgagatgcttctgcatgaccgacgacaaggtggacaagaccctggagcagcaggagaacttcgaggaggtggccagaagcaaggacatcgaggtgctggagggcaagcccatctacgtggactgctacggcaacctggcccccctgaccaagggcggccagcagctggtgttcaacttctacagcttcaaggagaacagactgcccttcagcatcaagatcagagacaccagccaggagccctgcggcagactgagcttcctgaaggagcccaagaccaccaagggcctgccccagaccgccgtgtgcaacctgaacatcaccctgcccgcccacaagaagatcgagaagaccgacagaagacagagcttcgccagcctggccctgagaaagagatacagctacctgaccgagcccggcatgagcccccagagcccctgcgagagaaccgacatcagaatggccatcgtggccgaccacctgggcctgagctggaccgagctggccagagagctgaacttcagcgtggacgagatcaaccagatcagagtggagaaccccaacagcctgatcagccagagcttcatgctgctgaagaagtgggtgaccagagacggcaagaacgccaccaccgacgccctgaccagcgtgctgaccaagatcaacagaatcgacatcgtgaccctgctggagggccccatcttcgactacggcaacatcagcggcaccagaagcttcgccgacgagaacaacgtgttccacgaccccgtggacggctaccccagcctgcaggtggagctggagacccccaccggcctgcactacaccccccccacccccttccagcaggacgactacttcagcgacatcagcagcatcgagagccccctgagaacccccagcagactgagcgacggcctggtgcccagccagggcaacatcgagcacagcgccgacggcccccccgtggtgaccgccgaggacgccagcctggaggacagcaagctggaggacagcgtgcccctgaccgagatgcccgaggccgtggacgtggacgagagccagctggagaacgtgtgcctgagctggcagaacgagaccagcagcggcaacctggagagctgcgcccaggccagaagagtgaccggcggcctgctggacagactggacgacagccccgaccagtgcagagacagcatcaccagctacctgaagggcgaggccggcaagttcgaggccaacggcagccacaccgagatcacccccgaggccaagaccaagagctacttccccgagagccagaacgacgtgggcaagcagagcaccaaggagaccctgaagcccaagatccacggcagcggccacgtggaggagcccgccagccccctggccgcctaccagaagagcctggaggagaccagcaagctgatcatcgaggagaccaagccctgcgtgcccgtgagcatgaagaagatgagcagaaccagccccgccgacggcaagcccagactgagcctgcacgaggaggagggcagcagcggcagcgagcagaagcagggcgagggcttcaaggtgaagaccaagaaggagatcagacacgtggagaagaagagccacagctag

SEQ ID NO: 72824 - DNA, 5607 bp, synthetic construct
  misc_feature 1..5607: note = Description of Artificial Sequence: Synthetic coding sequence
  source 1..5607: mol_type = other DNA
atgagcgaggagcccaaggagaagaacgccaagcccgcccacagaaagagaaagggcaagaagagcgacgccaacgccagctacctgagagccgccagagccggccacctggagaaggccctggactacatcaagaacggcgtggacatcaacatctgcaaccagaacggcctgaacgccctgcacctggccagcaaggagggccacgtggaggtggtgagcgagctgctgcagagagaggccaacgtggacgccgccaccaagaagggcaacaccgccctgcacatcgccagcctggccggccaggccgaggtggtgaaggtgctggtgaccaacggcgccaacgtgaacgcccagagccagaacggcttcacccccctgtacatggccgcccaggagaaccacctggaggtggtgaagttcctgctggacaacggcgccagccagagcctggccaccgaggacggcttcacccccctggccgtggccctgcagcagggccacgaccaggtggtgagcctgctgctggagaacgacaccaagggcaaggtgagactgcccgccctgcacatcgccgccagaaaggacgacaccaaggccgccgccctgctgctgcagaacgacaacaacgccgacgtggagagcaagagcggcttcacccccctgcacatcgccgcccactacggcaacatcaacgtggccaccctgctgctgaacagagccgccgccgtggacttcaccgccagaaacgacatcacccccctgcacgtggccagcaagagaggcaacgccaacatggtgaagctgctgctggacagaggcgccaagatcgacgccaagaccagagacggcctgacccccctgcactgcggcgccagaagcggccacgagcaggtggtggagatgctgctggacagagccgcccccatcctgagcaagaccaagaacggcctgagccccctgcacatggccacccagggcgaccacctgaactgcgtgcagctgctgctgcagcacaacgtgcccgtggacgacgtgaccaacgactacctgaccgccctgcacgtggccgcccactgcggccactacaaggtggccaaggtgctgctggacaagaaggccaaccccaacgccaaggccctgaacggcttcacccccctgcacatcgcctgcaagaagaacagaatcaaggtgatggagctgctgctgaagcacggcgccagcatccaggccgtgaccgagagcggcctgacccccatccacgtggccgccttcatgggccacgtgaacatcgtgagccagctgatgcaccacggcgccagccccaacaccaccaacgtgagaggcgagaccgccctgcacatggccgccagaagcggccaggccgaggtggtgagatacctggtgcaggacggcgcccaggtggaggccaaggccaaggacgaccagacccccctgcacatcagcgccagactgggcaaggccgacatcgtgcagcagctgctgcagcagggcgccagccccaacgccgccaccaccagcggctacacccccctgcacctgagcgccagagagggccacgaggacgtggccgccttcctgctggaccacggcgccagcctgagcatcaccaccaagaagggcttcacccccctgcacgtggccgccaagtacggcaagctggaggtggccaacctgctgctgcagaagagcgccagccccgacgccgccggcaagagcggcctgacccccctgcacgtggccgcccactacgacaaccagaaggtggccctgctgctgctggaccagggcgccagcccccacgccgccgccaagaacggctacacccccctgcacatcgccgccaagaagaaccagatggacatcgccaccaccctgctggagtacggcgccgacgccaacgccgtgaccagacagggcatcgccagcgtgcacctggccgcccaggagggccacgtggacatggtgagcctgctgctgggcagaaacgccaacgtgaacctgagcaacaagagcggcctgacccccctgcacctggccgcccaggaggacagagtgaacgtggccgaggtgctggtgaaccagggcgcccacgtggacgcccagaccaagatgggctacacccccctgcacgtgggctgccactacggcaacatcaagatcgtgaacttcctgctgcagcacagcgccaaggtgaacgccaagaccaagaacggctacacccccctgcaccaggccgcccagcagggccacacccacatcatcaacgtgctgctgcagaacaacgccagccccaacgagctgaccgtgaacggcaacaccgccctgggcatcgccagaagactgggctacatcagcgtggtggacaccctgaagatcgtgaccgaggagaccatgaccaccaccaccgtgaccgagaagcacaagatgaacgtgcccgagaccatgaacgaggtgctggacatgagcgacgacgaggtgagaaaggccaacgcccccgagatgctgagcgacggcgagtacatcagcgacgtggaggagggcaacagatgcacctggtacaagatccccaaggtgcaggagttcaccgtgaagagcgaggacgccatgaccggcgacaccgacaagtacctgggcccccaggacctgaaggagctgggcgacgacagcctgcccgccgagggctacatgggcttcagcctgggcgccagaagcgccagcctgagaagcttcagcagcgacagaagctacaccctgaacagaagcagctacgccagagacagcatgatgatcgaggagctgctggtgcccagcaaggagcagcacctgaccttcaccagagagttcgacagcgacagcctgagacactacagctgggccgccgacaccctggacaacgtgaacctggtgagcagccccatccacagcggcttcctggtgagcttcatggtggacgccagaggcggcagcatgagaggcagcagacaccacggcatgagaatcatcatcccccccagaaagtgcaccgcccccaccagaatcacctgcagactggtgaagagacacaagctggccaaccccccccccatggtggagggcgagggcctggccagcagactggtggagatgggccccgccggcgcccagttcctgggccccgtgatcgtggagatcccccacttcggcagcatgagaggcaaggagagagagctgatcgtgctgagaagcgagaacggcgagacctggaaggagcaccagttcgacagcaagaacgaggacctgaccgagctgctgaacggcatggacgaggagctggacagccccgaggagctgggcaagaagagaatctgcagaatcatcaccaaggacttcccccagtacttcgccgtggtgagcagaatcaagcaggagagcaaccagatcggccccgagggcggcatcctgagcagcaccaccgtgcccctggtgcaggccagcttccccgagggcgccctgaccaagagaatcagagtgggcctgcaggcccagcccgtgcccgacgagatcgtgaagaagatcctgggcaacaaggccaccttcagccccatcgtgaccgtggagcccagaagaagaaagttccacaagcccatcaccatgaccatccccgtgcccccccccagcggcgagggcgtgagcaacggctacaagggcgacaccacccccaacctgagactgctgtgcagcatcaccggcggcaccagccccgcccagtgggaggacatcaccggcaccacccccctgaccttcatcaaggactgcgtgagcttcaccaccaacgtgagcgccagattctggctggccgactgccaccaggtgctggagaccgtgggcctggccacccagctgtacagagagctgatctgcgtgccctacatggccaagttcgtggtgttcgccaagatgaacgaccccgtggagagcagcctgagatgcttctgcatgaccgacgacaaggtggacaagaccctggagcagcaggagaacttcgaggaggtggccagaagcaaggacatcgaggtgctggagggcaagcccatctacgtggactgctacggcaacctggcccccctgaccaagggcggccagcagctggtgttcaacttctacagcttcaaggagaacagactgcccttcagcatcaagatcagagacaccagccaggagccctgcggcagactgagcttcctgaaggagcccaagaccaccaagggcctgccccagaccgccgtgtgcaacctgaacatcaccctgcccgcccacaagaagatcgagaagaccgacagaagacagagcttcgccagcctggccctgagaaagagatacagctacctgaccgagcccggcatgagcccccagagcccctgcgagagaaccgacatcagaatggccatcgtggccgaccacctgggcctgagctggaccgagctggccagagagctgaacttcagcgtggacgagatcaaccagatcagagtggagaaccccaacagcctgatcagccagagcttcatgctgctgaagaagtgggtgaccagagacggcaagaacgccaccaccgacgccctgaccagcgtgctgaccaagatcaacagaatcgacatcgtgaccctgctggagggccccatcttcgactacggcaacatcagcggcaccagaagcttcgccgacgagaacaacgtgttccacgaccccgtggacggctaccccagcctgcaggtggagctggagacccccaccggcctgcactacaccccccccacccccttccagcaggacgactacttcagcgacatcagcagcatcgagagccccctgagaacccccagcagactgagcgacggcctggtgcccagccagggcaacatcgagcacagcgccgacggcccccccgtggtgaccgccgaggacgccagcctggaggacagcaagctggaggacagcgtgcccctgaccgagatgcccgaggccgtggacgtggacgagagccagctggagaacgtgtgcctgagctggcagaacgagaccagcagcggcaacctggagagctgcgcccaggccagaagagtgaccggcggcctgctggacagactggacgacagccccgaccagtgcagagacagcatcaccagctacctgaagggcgaggccggcaagttcgaggccaacggcagccacaccgagatcacccccgaggccaagaccaagagctacttccccgagagccagaacgacgtgggcaagcagagcaccaaggagaccctgaagcccaagatccacggcagcggccacgtggaggagcccgccagccccctggccgcctaccagaagagcctggaggagaccagcaagctgatcatcgaggagaccaagccctgcgtgcccgtgagcatgaagaagatgagcagaaccagccccgccgacggcaagcccagactgagcctgcacgaggaggagggcagcagcggcagcgagcagaagcagggcgagggcttcaaggtgaagaccaagaaggagatcagacacgtggagaagaagagccacagctag

SEQ ID NO: 72825 - DNA, 13134 bp, synthetic construct
  misc_feature 1..13134: note = Description of Artificial Sequence: Synthetic coding sequence
  source 1..13134: mol_type = other DNA
atggcccacgccgccagccagctgaagaagaacagagacctggagatcaacgccgaggaggagcccgagaagaagagaaagcacagaaagagaagcagagacagaaagaagaagagcgacgccaacgccagctacctgagagccgccagagccggccacctggagaaggccctggactacatcaagaacggcgtggacatcaacatctgcaaccagaacggcctgaacgccctgcacctggccagcaaggagggccacgtggaggtggtgagcgagctgctgcagagagaggccaacgtggacgccgccaccaagaagggcaacaccgccctgcacatcgccagcctggccggccaggccgaggtggtgaaggtgctggtgaccaacggcgccaacgtgaacgcccagagccagaacggcttcacccccctgtacatggccgcccaggagaaccacctggaggtggtgaagttcctgctggacaacggcgccagccagagcctggccaccgaggacggcttcacccccctggccgtggccctgcagcagggccacgaccaggtggtgagcctgctgctggagaacgacaccaagggcaaggtgagactgcccgccctgcacatcgccgccagaaaggacgacaccaaggccgccgccctgctgctgcagaacgacaacaacgccgacgtggagagcaagagcggcttcacccccctgcacatcgccgcccactacggcaacatcaacgtggccaccctgctgctgaacagagccgccgccgtggacttcaccgccagaaacgacatcacccccctgcacgtggccagcaagagaggcaacgccaacatggtgaagctgctgctggacagaggcgccaagatcgacgccaagaccagagacggcctgacccccctgcactgcggcgccagaagcggccacgagcaggtggtggagatgctgctggacagagccgcccccatcctgagcaagaccaagaacggcctgagccccctgcacatggccacccagggcgaccacctgaactgcgtgcagctgctgctgcagcacaacgtgcccgtggacgacgtgaccaacgactacctgaccgccctgcacgtggccgcccactgcggccactacaaggtggccaaggtgctgctggacaagaaggccaaccccaacgccaaggccctgaacggcttcacccccctgcacatcgcctgcaagaagaacagaatcaaggtgatggagctgctgctgaagcacggcgccagcatccaggccgtgaccgagagcggcctgacccccatccacgtggccgccttcatgggccacgtgaacatcgtgagccagctgatgcaccacggcgccagccccaacaccaccaacgtgagaggcgagaccgccctgcacatggccgccagaagcggccaggccgaggtggtgagatacctggtgcaggacggcgcccaggtggaggccaaggccaaggacgaccagacccccctgcacatcagcgccagactgggcaaggccgacatcgtgcagcagctgctgcagcagggcgccagccccaacgccgccaccaccagcggctacacccccctgcacctgagcgccagagagggccacgaggacgtggccgccttcctgctggaccacggcgccagcctgagcatcaccaccaagaagggcttcacccccctgcacgtggccgccaagtacggcaagctggaggtggccaacctgctgctgcagaagagcgccagccccgacgccgccggcaagagcggcctgacccccctgcacgtggccgcccactacgacaaccagaaggtggccctgctgctgctggaccagggcgccagcccccacgccgccgccaagaacggctacacccccctgcacatcgccgccaagaagaaccagatggacatcgccaccaccctgctggagtacggcgccgacgccaacgccgtgaccagacagggcatcgccagcgtgcacctggccgcccaggagggccacgtggacatggtgagcctgctgctgggcagaaacgccaacgtgaacctgagcaacaagagcggcctgacccccctgcacctggccgcccaggaggacagagtgaacgtggccgaggtgctggtgaaccagggcgcccacgtggacgcccagaccaagatgggctacacccccctgcacgtgggctgccactacggcaacatcaagatcgtgaacttcctgctgcagcacagcgccaaggtgaacgccaagaccaagaacggctacacccccctgcaccaggccgcccagcagggccacacccacatcatcaacgtgctgctgcagaacaacgccagccccaacgagctgaccgtgaacggcaacaccgccctgggcatcgccagaagactgggctacatcagcgtggtggacaccctgaagatcgtgaccgaggagaccatgaccaccaccaccgtgaccgagaagcacaagatgaacgtgcccgagaccatgaacgaggtgctggacatgagcgacgacgaggtgagaaaggccaacgcccccgagatgctgagcgacggcgagtacatcagcgacgtggaggagggcgaggacgccatgaccggcgacaccgacaagtacctgggcccccaggacctgaaggagctgggcgacgacagcctgcccgccgagggctacatgggcttcagcctgggcgccagaagcgccagcctgagaagcttcagcagcgacagaagctacaccctgaacagaagcagctacgccagagacagcatgatgatcgaggagctgctggtgcccagcaaggagcagcacctgaccttcaccagagagttcgacagcgacagcctgagacactacagctgggccgccgacaccctggacaacgtgaacctggtgagcagccccatccacagcggcttcctggtgagcttcatggtggacgccagaggcggcagcatgagaggcagcagacaccacggcatgagaatcatcatcccccccagaaagtgcaccgcccccaccagaatcacctgcagactggtgaagagacacaagctggccaaccccccccccatggtggagggcgagggcctggccagcagactggtggagatgggccccgccggcgcccagttcctgggccccgtgatcgtggagatcccccacttcggcagcatgagaggcaaggagagagagctgatcgtgctgagaagcgagaacggcgagacctggaaggagcaccagttcgacagcaagaacgaggacctgaccgagctgctgaacggcatggacgaggagctggacagccccgaggagctgggcaagaagagaatctgcagaatcatcaccaaggacttcccccagtacttcgccgtggtgagcagaatcaagcaggagagcaaccagatcggccccgagggcggcatcctgagcagcaccaccgtgcccctggtgcaggccagcttccccgagggcgccctgaccaagagaatcagagtgggcctgcaggcccagcccgtgcccgacgagatcgtgaagaagatcctgggcaacaaggccaccttcagccccatcgtgaccgtggagcccagaagaagaaagttccacaagcccatcaccatgaccatccccgtgcccccccccagcggcgagggcgtgagcaacggctacaagggcgacaccacccccaacctgagactgctgtgcagcatcaccggcggcaccagccccgcccagtgggaggacatcaccggcaccacccccctgaccttcatcaaggactgcgtgagcttcaccaccaacgtgagcgccagattctggctggccgactgccaccaggtgctggagaccgtgggcctggccacccagctgtacagagagctgatctgcgtgccctacatggccaagttcgtggtgttcgccaagatgaacgaccccgtggagagcagcctgagatgcttctgcatgaccgacgacaaggtggacaagaccctggagcagcaggagaacttcgaggaggtggccagaagcaaggacatcgaggtgctggagggcaagcccatctacgtggactgctacggcaacctggcccccctgaccaagggcggccagcagctggtgttcaacttctacagcttcaaggagaacagactgcccttcagcatcaagatcagagacaccagccaggagccctgcggcagactgagcttcctgaaggagcccaagaccaccaagggcctgccccagaccgccgtgtgcaacctgaacatcaccctgcccgcccacaagaaggagaccgagagcgaccaggacgacgagatcgagaagaccgacagaagacagagcttcgccagcctggccctgagaaagagatacagctacctgaccgagcccggcatgatcgagagaagcaccggcgccaccagaagcctgcccaccacctacagctacaagcccttcttcagcaccagaccctaccagagctggaccaccgcccccatcaccgtgcccggccccgccaagagcggcttcaccagcctgagcagcagcagcagcaacacccccagcgccagccccctgaagagcatctggagcgtgagcacccccagccccatcaagagcaccctgggcgccagcaccaccagcagcgtgaagagcatcagcgacgtggccagccccatcagaagcttcagaaccatgagcagccccatcaagaccgtggtgagccagagcccctacaacatccaggtgagcagcggcaccctggccagagcccccgccgtgaccgaggccacccccctgaagggcctggccagcaacagcaccttcagcagcagaaccagccccgtgaccaccgccggcagcctgctggagagaagcagcatcaccatgaccccccccgccagccccaagagcaacatcaacatgtacagcagcagcctgcccttcaagagcatcatcaccagcgccgcccccctgatcagcagccccctgaagagcgtggtgagccccgtgaagagcgccgtggacgtgatcagcagcgccaagatcaccatggccagcagcctgagcagccccgtgaagcagatgcccggccacgccgaggtggccctggtgaacggcagcatcagccccctgaagtaccccagcagcagcaccctgatcaacggctgcaaggccaccgccaccctgcaggagaagatcagcagcgccaccaacagcgtgagcagcgtggtgagcgccgccaccgacaccgtggagaaggtgttcagcaccaccaccgccatgcccttcagccccctgagaagctacgtgagcgccgcccccagcgccttccagagcctgagaacccccagcgccagcgccctgtacaccagcctgggcagcagcatcagcgccaccaccagcagcgtgaccagcagcatcatcaccgtgcccgtgtacagcgtggtgaacgtgctgcccgagcccgccctgaagaagctgcccgacagcaacagcttcaccaagagcgccgccgccctgctgagccccatcaagaccctgaccaccgagacccacccccagccccacttcagcagaaccagcagccccgtgaagagcagcctgttcctggcccccagcgccctgaagctgagcacccccagcagcctgagcagcagccaggagatcctgaaggacgtggccgagatgaaggaggacctgatgagaatgaccgccatcctgcagaccgacgtgcccgaggagaagcccttccagcccgagctgcccaaggagggcagaatcgacgacgaggagcccttcaagatcgtggagaaggtgaaggaggacctggtgaaggtgagcgagatcctgaagaaggacgtgtgcgtggacaacaagggcagccccaagagccccaagagcgacaagggccacagccccgaggacgactggatcgagttcagcagcgaggagatcagagaggccagacagcaggccgccgccagccagagccccagcctgcccgagagagtgcaggtgaaggccaaggccgccagcgagaaggactacaacctgaccaaggtgatcgactacctgaccaacgacatcggcagcagcagcctgaccaacctgaagtacaagttcgaggacgccaagaaggacggcgaggagagacagaagagagtgctgaagcccgccatcgccctgcaggagcacaagctgaagatgccccccgccagcatgagaaccagcaccagcgagaaggagctgtgcaagatggccgacagcttcttcggcaccgacaccatcctggagagccccgacgacttcagccagcacgaccaggacaagagccccctgagcgacagcggcttcgagaccagaagcgagaagacccccagcgccccccagagcgccgagagcaccggccccaagcccctgttccacgaggtgcccatcccccccgtgatcaccgagaccagaaccgaggtggtgcacgtgatcagaagctacgaccccagcgccggcgacgtgccccagacccagcccgaggagcccgtgagccccaagcccagccccaccttcatggagctggagcccaagcccaccaccagcagcatcaaggagaaggtgaaggccttccagatgaaggccagcagcgaggaggacgaccacaacagagtgctgagcaagggcatgagagtgaaggaggagacccacatcaccaccaccaccagaatggtgtaccacagcccccccggcggcgagggcgccagcgagagaatcgaggagaccatgagcgtgcacgacatcatgaaggccttccagagcggcagagaccccagcaaggagctggccggcctgttcgagcacaagagcgccgtgagccccgacgtgcacaagagcgccgccgagaccagcgcccagcacgccgagaaggacaaccagatgaagcccaagctggagagaatcatcgaggtgcacatcgagaagggcaaccaggccgagcccaccgaggtgatcatcagagagaccaagaagcaccccgagaaggagatgtacgtgtaccagaaggacctgagcagaggcgacatcaacctgaaggacttcctgcccgagaagcacgacgccttcccctgcagcgaggagcagggccagcaggaggaggaggagctgaccgccgaggagagcctgcccagctacctggagagcagcagagtgaacacccccgtgagccaggaggaggacagcagacccagcagcgcccagctgatcagcgacgacagctacaagaccctgaagctgctgagccagcacagcatcgagtaccacgacgacgagctgagcgagctgagaggcgagagctacagattcgccgagaagatgctgctgagcgagaagctggacgtgagccacagcgacaccgaggagagcgtgaccgaccacgccggcccccccagcagcgagctgcagggcagcgacaagagaagcagagagaagatcgccaccgcccccaagaaggagatcctgagcaagatctacaaggacgtgagcgagaacggcgtgggcaaggtgagcaaggacgagcacttcgacaaggtgaccgtgctgcactacagcggcaacgtgagcagccccaagcacgccatgtggatgagattcaccgaggacagactggacagaggcagagagaagctgatctacgaggacagagtggacagaaccgtgaaggaggccgaggagaagctgaccgaggtgagccagttcttcagagacaagaccgagaagctgaacgacgagctgcagagccccgagaagaaggccagacccaagaacggcaaggagtacagcagccagagccccaccagcagcagccccgagaaggtgctgctgaccgagctgctggccagcaacgacgagtgggtgaaggccagacagcacggccccgacggccagggcttccccaaggccgaggagaaggcccccagcctgcccagcagccccgagaagatggtgctgagccagcagaccgaggacagcaagagcaccgtggaggccaagggcagcatcagccagagcaaggcccccgacggcccccagagcggcttccagctgaagcagagcaagctgagcagcatcagactgaagttcgagcagggcacccacgccaagagcaaggacatgagccaggaggacagaaagagcgacggccagagcagaatccccgtgaagaagatccaggagagcaagctgcccgtgtaccaggtgttcgccagagagaagcagcagaaggccatcgacctgcccgacgagagcgtgagcgtgcagaaggacttcatggtgctgaagaccaaggacgagcacgcccagagcaacgagatcgtggtgaacgacagcggcagcgacaacgtgaagaagcagagaaccgagatgagcagcaaggccatgcccgacagcttcagcgagcagcaggccaaggacctggcctgccacatcaccagcgacctggccaccagaggcccctgggacaagaaggtgttcagaacctgggagagcagcggcgccaccaacaacaagagccagaaggagaagctgagccacgtgctggtgcacgacgtgagagagaaccacatcggccaccccgagagcaagagcgtggaccagaagaacgagttcatgagcgtgaccgagagagagagaaagctgctgaccaacggcagcctgagcgagatcaaggagatgaccgtgaagagccccagcaagaaggtgctgtacagagagtacgtggtgaaggagggcgaccaccccggcggcctgctggaccagcccagcagaagaagcgagagcagcgccgtgagccacatccccgtgagagtggccgacgagagaagaatgctgagcagcaacatccccgacggcttctgcgagcagagcgccttccccaagcacgagctgagccagaagctgagccagagcagcatgagcaaggagaccgtggagacccagcacttcaacagcatcgaggacgagaaggtgacctacagcgagatcagcaaggtgagcaagcaccagagctacgtgggcctgtgcccccccctggaggagaccgagaccagccccaccaagagccccgacagcctggagttcagccccggcaaggagagccccagcagcgacgtgttcgaccacagccccatcgacggcctggagaagctggcccccctggcccagaccgagggcggcaaggagatcaagaccctgcccgtgtacgtgagcttcgtgcaggtgggcaagcagtacgagaaggagatccagcagggcggcgtgaagaagatcatcagccaggagtgcaagaccgtgcaggagaccagaggcaccttctacaccaccagacagcagaagcagccccccagcccccagggcagccccgaggacgacaccctggagcaggtgagcttcctggacagcagcggcaagagccccctgacccccgagacccccagcagcgaggaggtgagctacgagttcaccagcaagacccccgacagcctgatcgcctacatccccggcaagcccagccccatccccgaggtgagcgaggagagcgaggaggaggagcaggccaagagcaccagcctgaagcagaccaccgtggaggagaccgccgtggagagagagatgcccaacgacgtgagcaaggacagcaaccagagacccaagaacaacagagtggcctacatcgagttccccccccccccccccctggacgccgaccagatcgagagcgacaagaagcaccactacctgcccgagaaggaggtggacatgatcgaggtgaacctgcaggacgagcacgacaagtaccagctggccgagcccgtgatcagagtgcagccccccagccccgtgccccccggcgccgacgtgagcgacagcagcgacgacgagagcatctaccagcccgtgcccgtgaagaagtacaccttcaagctgaaggaggtggacgacgagcagaaggagaagcccaaggccagcgccgagaaggccagcaaccagaaggagctggagagcaacggcagcggcaaggacaacgagttcggcctgggcctggacagcccccagaacgagatcgcccagaacggcaacaacgaccagagcatcaccgagtgcagcatcgccaccaccgccgagttcagccacgacaccgacgccaccgagatcgacagcctggacggctacgacctgcaggacgaggacgacggcctgaccgagagcgacagcaagctgcccatccaggccatggagatcaagaaggacatctggaacaccgagggcatcctgaagcccgccgacagaagcttcagccagagcaagctggaggtgatcgaggaggagggcaaggtgggccccgacgaggacaagccccccagcaagagcagcagcagcgagaagacccccgacaagaccgaccagaagagcggcgcccagttcttcaccctggagggcagacaccccgacagaagcgtgttccccgacacctacttcagctacaaggtggacgaggagttcgccacccccttcaagaccgtggccaccaagggcctggacttcgacccctggagcaacaacagaggcgacgacgaggtgttcgacagcaagagcagagaggacgagaccaagcccttcggcctggccgtggaggacagaagccccgccaccacccccgacaccacccccgccagaacccccaccgacgagagcacccccaccagcgagcccaaccccttccccttccacgagggcaagatgttcgagatgaccagaagcggcgccatcgacatgagcaagagagacttcgtggaggagagactgcagttcttccagatcggcgagcacaccagcgagggcaagagcggcgaccagggcgagggcgacaagagcatggtgaccgccaccccccagccccagagcggcgacaccaccgtggagaccaacctggagagaaacgtggagacccccaccgtggagcccaaccccagcatccccaccagcggcgagtgccaggagggcaccagcagcagcggcagcctggagaagagcgccgccgccaccaacaccagcaaggtggaccccaagctgagaacccccatcaagatgggcatcagcgccagcaccatgaccatgaagaaggagggccccggcgagatcaccgacaagatcgaggccgtgatgaccagctgccagggcctggagaacgagaccatcaccatgatcagcaacaccgccaacagccagatgggcgtgagaccccacgagaagcacgacttccagaaggacaacttcaacaacaacaacaacctggacagcagcaccatccagaccgacaacatcatgagcaacatcgtgctgaccgagcacagcgcccccacctgcaccaccgagaaggacaaccccgtgaaggtgagcagcggcaagaagaccggcgtgctgcagggccactgcgtgagagacaagcagaaggtgctgggcgagcagcagaagaccaaggagctgatcggcatcagacagaagagcaagctgcccatcaaggccaccagccccaaggacaccttcccccccaaccacatgagcaacaccaaggccagcaagatgaagcaggtgagccagagcgagaagaccaaggccctgaccaccagcagctgcgtggacgtgaagagcagaatccccgtgaagaacacccacagagacaacatcatcgccgtgagaaaggcctgcgccacccagaagcagggccagcccgagaagggcaaggccaagcagctgcccagcaagctgcccgtgaaggtgagaagcacctgcgtgaccaccaccaccaccaccgccaccaccaccaccaccaccaccaccaccaccaccaccagctgcaccgtgaaggtgagaaagagccagctgaaggaggtgtgcaagcacagcatcgagtacttcaagggcatcagcggcgagaccctgaagctggtggacagactgagcgaggaggagaagaagatgcagagcgagctgagcgacgaggaggagagcaccagcagaaacaccagcctgagcgagaccagcagaggcggccagcccagcgtgaccaccaagagcgccagagacaagaagaccgaggccgcccccctgaagagcaagagcgagaaggccggcagcgagaagagaagcagcagaagaaccggcccccagagcccctgcgagagaaccgacatcagaatggccatcgtggccgaccacctgggcctgagctggaccgagctggccagagagctgaacttcagcgtggacgagatcaaccagatcagagtggagaaccccaacagcctgatcagccagagcttcatgctgctgaagaagtgggtgaccagagacggcaagaacgccaccaccgacgccctgaccagcgtgctgaccaagatcaacagaatcgacatcgtgaccctgctggagggccccatcttcgactacggcaacatcagcggcaccagaagcttcgccgacgagaacaacgtgttccacgaccccgtggacggctggcagaacgagaccagcagcggcaacctggagagctgcgcccaggccagaagagtgaccggcggcctgctggacagactggacgacagccccgaccagtgcagagacagcatcaccagctacctgaagggcgaggccggcaagttcgaggccaacggcagccacaccgagatcacccccgaggccaagaccaagagctacttccccgagagccagaacgacgtgggcaagcagagcaccaaggagaccctgaagcccaagatccacggcagcggccacgtggaggagcccgccagccccctggccgcctaccagaagagcctggaggagaccagcaagctgatcatcgaggagaccaagccctgcgtgcccgtgagcatgaagaagatgagcagaaccagccccgccgacggcaagcccagactgagcctgcacgaggaggagggcagcagcggcagcgagcagaagcagggcgagggcttcaaggtgaagaccaagaaggagatcagacacgtggagaagaagagccacagctag

SEQ ID NO: 72826 - DNA, 3006 bp, synthetic construct
  misc_feature 1..3006: note = Description of Artificial Sequence: Synthetic coding sequence
  source 1..3006: mol_type = other DNA
atggccctgccccagagcgaggacgccatgaccggcgacaccgacaagtacctgggcccccaggacctgaaggagctgggcgacgacagcctgcccgccgagggctacatgggcttcagcctgggcgccagaagcgccagcctgagaagcttcagcagcgacagaagctacaccctgaacagaagcagctacgccagagacagcatgatgatcgaggagctgctggtgcccagcaaggagcagcacctgaccttcaccagagagttcgacagcgacagcctgagacactacagctgggccgccgacaccctggacaacgtgaacctggtgagcagccccatccacagcggcttcctggtgagcttcatggtggacgccagaggcggcagcatgagaggcagcagacaccacggcatgagaatcatcatcccccccagaaagtgcaccgcccccaccagaatcacctgcagactggtgaagagacacaagctggccaaccccccccccatggtggagggcgagggcctggccagcagactggtggagatgggccccgccggcgcccagttcctgggccccgtgatcgtggagatcccccacttcggcagcatgagaggcaaggagagagagctgatcgtgctgagaagcgagaacggcgagacctggaaggagcaccagttcgacagcaagaacgaggacctgaccgagctgctgaacggcatggacgaggagctggacagccccgaggagctgggcaagaagagaatctgcagaatcatcaccaaggacttcccccagtacttcgccgtggtgagcagaatcaagcaggagagcaaccagatcggccccgagggcggcatcctgagcagcaccaccgtgcccctggtgcaggccagcttccccgagggcgccctgaccaagagaatcagagtgggcctgcaggcccagcccgtgcccgacgagatcgtgaagaagatcctgggcaacaaggccaccttcagccccatcgtgaccgtggagcccagaagaagaaagttccacaagcccatcaccatgaccatccccgtgcccccccccagcggcgagggcgtgagcaacggctacaagggcgacaccacccccaacctgagactgctgtgcagcatcaccggcggcaccagccccgcccagtgggaggacatcaccggcaccacccccctgaccttcatcaaggactgcgtgagcttcaccaccaacgtgagcgccagattctggctggccgactgccaccaggtgctggagaccgtgggcctggccacccagctgtacagagagctgatctgcgtgccctacatggccaagttcgtggtgttcgccaagatgaacgaccccgtggagagcagcctgagatgcttctgcatgaccgacgacaaggtggacaagaccctggagcagcaggagaacttcgaggaggtggccagaagcaaggacatcgaggtgctggagggcaagcccatctacgtggactgctacggcaacctggcccccctgaccaagggcggccagcagctggtgttcaacttctacagcttcaaggagaacagactgcccttcagcatcaagatcagagacaccagccaggagccctgcggcagactgagcttcctgaaggagcccaagaccaccaagggcctgccccagaccgccgtgtgcaacctgaacatcaccctgcccgcccacaagaagatcgagaagaccgacagaagacagagcttcgccagcctggccctgagaaagagatacagctacctgaccgagcccggcatgagcccccagagcccctgcgagagaaccgacatcagaatggccatcgtggccgaccacctgggcctgagctggaccgagctggccagagagctgaacttcagcgtggacgagatcaaccagatcagagtggagaaccccaacagcctgatcagccagagcttcatgctgctgaagaagtgggtgaccagagacggcaagaacgccaccaccgacgccctgaccagcgtgctgaccaagatcaacagaatcgacatcgtgaccctgctggagggccccatcttcgactacggcaacatcagcggcaccagaagcttcgccgacgagaacaacgtgttccacgaccccgtggacggctaccccagcctgcaggtggagctggagacccccaccggcctgcactacaccccccccacccccttccagcaggacgactacttcagcgacatcagcagcatcgagagccccctgagaacccccagcagactgagcgacggcctggtgcccagccagggcaacatcgagcacagcgccgacggcccccccgtggtgaccgccgaggacgccagcctggaggacagcaagctggaggacagcgtgcccctgaccgagatgcccgaggccgtggacgtggacgagagccagctggagaacgtgtgcctgagctggcagaacgagaccagcagcggcaacctggagagctgcgcccaggccagaagagtgaccggcggcctgctggacagactggacgacagccccgaccagtgcagagacagcatcaccagctacctgaagggcgaggccggcaagttcgaggccaacggcagccacaccgagatcacccccgaggccaagaccaagagctacttccccgagagccagaacgacgtgggcaagcagagcaccaaggagaccctgaagcccaagatccacggcagcggccacgtggaggagcccgccagccccctggccgcctaccagaagagcctggaggagaccagcaagctgatcatcgaggagaccaagccctgcgtgcccgtgagcatgaagaagatgagcagaaccagccccgccgacggcaagcccagactgagcctgcacgaggaggagggcagcagcggcagcgagcagaagcagggcgagggcttcaaggtgaagaccaagaaggagatcagacacgtggagaagaagagccacagctag

SEQ ID NO: 72827 - DNA, 3306 bp, synthetic construct
  misc_feature 1..3306: note = Description of Artificial Sequence: Synthetic coding sequence
  source 1..3306: mol_type = other DNA
atgagcgaggagcccaaggagaagaacgccaagcccgcccacagaaagagaaagggcaagaagagcgacgccaacgccagctacctgagagccgccagagccggccacctggagaaggccctggactacatcagcgtggtggacaccctgaagatcgtgaccgaggagaccatgaccaccaccaccgtgaccgagaagcacaagatgaacgtgcccgagaccatgaacgaggtgctggacatgagcgacgacgaggtgagaaaggccaacgcccccgagatgctgagcgacggcgagtacatcagcgacgtggaggagggcgaggacgccatgaccggcgacaccgacaagtacctgggcccccaggacctgaaggagctgggcgacgacagcctgcccgccgagggctacatgggcttcagcctgggcgccagaagcgccagcctgagaagcttcagcagcgacagaagctacaccctgaacagaagcagctacgccagagacagcatgatgatcgaggagctgctggtgcccagcaaggagcagcacctgaccttcaccagagagttcgacagcgacagcctgagacactacagctgggccgccgacaccctggacaacgtgaacctggtgagcagccccatccacagcggcttcctggtgagcttcatggtggacgccagaggcggcagcatgagaggcagcagacaccacggcatgagaatcatcatcccccccagaaagtgcaccgcccccaccagaatcacctgcagactggtgaagagacacaagctggccaaccccccccccatggtggagggcgagggcctggccagcagactggtggagatgggccccgccggcgcccagttcctgggccccgtgatcgtggagatcccccacttcggcagcatgagaggcaaggagagagagctgatcgtgctgagaagcgagaacggcgagacctggaaggagcaccagttcgacagcaagaacgaggacctgaccgagctgctgaacggcatggacgaggagctggacagccccgaggagctgggcaagaagagaatctgcagaatcatcaccaaggacttcccccagtacttcgccgtggtgagcagaatcaagcaggagagcaaccagatcggccccgagggcggcatcctgagcagcaccaccgtgcccctggtgcaggccagcttccccgagggcgccctgaccaagagaatcagagtgggcctgcaggcccagcccgtgcccgacgagatcgtgaagaagatcctgggcaacaaggccaccttcagccccatcgtgaccgtggagcccagaagaagaaagttccacaagcccatcaccatgaccatccccgtgcccccccccagcggcgagggcgtgagcaacggctacaagggcgacaccacccccaacctgagactgctgtgcagcatcaccggcggcaccagccccgcccagtgggaggacatcaccggcaccacccccctgaccttcatcaaggactgcgtgagcttcaccaccaacgtgagcgccagattctggctggccgactgccaccaggtgctggagaccgtgggcctggccacccagctgtacagagagctgatctgcgtgccctacatggccaagttcgtggtgttcgccaagatgaacgaccccgtggagagcagcctgagatgcttctgcatgaccgacgacaaggtggacaagaccctggagcagcaggagaacttcgaggaggtggccagaagcaaggacatcgaggtgctggagggcaagcccatctacgtggactgctacggcaacctggcccccctgaccaagggcggccagcagctggtgttcaacttctacagcttcaaggagaacagactgcccttcagcatcaagatcagagacaccagccaggagccctgcggcagactgagcttcctgaaggagcccaagaccaccaagggcctgccccagaccgccgtgtgcaacctgaacatcaccctgcccgcccacaagaagatcgagaagaccgacagaagacagagcttcgccagcctggccctgagaaagagatacagctacctgaccgagcccggcatgagcccccagagcccctgcgagagaaccgacatcagaatggccatcgtggccgaccacctgggcctgagctggaccgagctggccagagagctgaacttcagcgtggacgagatcaaccagatcagagtggagaaccccaacagcctgatcagccagagcttcatgctgctgaagaagtgggtgaccagagacggcaagaacgccaccaccgacgccctgaccagcgtgctgaccaagatcaacagaatcgacatcgtgaccctgctggagggccccatcttcgactacggcaacatcagcggcaccagaagcttcgccgacgagaacaacgtgttccacgaccccgtggacggctaccccagcctgcaggtggagctggagacccccaccggcctgcactacaccccccccacccccttccagcaggacgactacttcagcgacatcagcagcatcgagagccccctgagaacccccagcagactgagcgacggcctggtgcccagccagggcaacatcgagcacagcgccgacggcccccccgtggtgaccgccgaggacgccagcctggaggacagcaagctggaggacagcgtgcccctgaccgagatgcccgaggccgtggacgtggacgagagccagctggagaacgtgtgcctgagctggcagaacgagaccagcagcggcaacctggagagctgcgcccaggccagaagagtgaccggcggcctgctggacagactggacgacagccccgaccagtgcagagacagcatcaccagctacctgaagggcgaggccggcaagttcgaggccaacggcagccacaccgagatcacccccgaggccaagaccaagagctacttccccgagagccagaacgacgtgggcaagcagagcaccaaggagaccctgaagcccaagatccacggcagcggccacgtggaggagcccgccagccccctggccgcctaccagaagagcctggaggagaccagcaagctgatcatcgaggagaccaagccctgcgtgcccgtgagcatgaagaagatgagcagaaccagccccgccgacggcaagcccagactgagcctgcacgaggaggagggcagcagcggcagcgagcagaagggcgagggcttcaaggtgaagaccaagaaggagatcagacacgtggagaagaagagccacagctag

SEQ ID NO: 72828 - DNA, 3387 bp, synthetic construct
  misc_feature 1..3387: note = Description of Artificial Sequence: Synthetic coding sequence
  source 1..3387: mol_type = other DNA
atggccacccagggcgaccacctgaactgcgtgcagctgctgctgcagcacaacgtgcccgtggacgacgtgaccaacgactacctgaccgccctgcacgtggccgcccactgcggccactacaaggtggccaaggtgctgctggacaagaaggccaaccccaacgccaaggccctgaacggcttcacccccctgcacatcgcctgcaagaagaacagaatcaaggtgatggagctgctgctgaagcacggcgccagcatccaggccgtgaccgagagcggcctgacccccatccacgtggccgccttcatgggccacgtgaacatcgtgagccagctgatgcaccacggcgccagccccaacaccaccaacgtgagaggcgagaccgccctgcacatggccgccagaagcggccaggccgaggtggtgagatacctggtgcaggacggcgcccaggtggaggccaaggccaaggacgaccagacccccctgcacatcagcgccagactgggcaaggccgacatcgtgcagcagctgctgcagcagggcgccagccccaacgccgccaccaccagcggctacacccccctgcacctgagcgccagagagggccacgaggacgtggccgccttcctgctggaccacggcgccagcctgagcatcaccaccaagaagggcttcacccccctgcacgtggccgccaagtacggcaagctggaggtggccaacctgctgctgcagaagagcgccagccccgacgccgccggcaagagcggcctgacccccctgcacgtggccgcccactacgacaaccagaaggtggccctgctgctgctggaccagggcgccagcccccacgccgccgccaagaacggctacacccccctgcacatcgccgccaagaagaaccagatggacatcgccaccaccctgctggagtacggcgccgacgccaacgccgtgaccagacagggcatcgccagcgtgcacctggccgcccaggagggccacgtggacatggtgagcctgctgctgggcagaaacgccaacgtgaacctgagcaacaagagcggcctgacccccctgcacctggccgcccaggaggacagagtgaacgtggccgaggtgctggtgaaccagggcgcccacgtggacgcccagaccaagatgggctacacccccctgcacgtgggctgccactacggcaacatcaagatcgtgaacttcctgctgcagcacagcgccaaggtgaacgccaagaccaagaacggctacacccccctgcaccaggccgcccagcagggccacacccacatcatcaacgtgctgctgcagaacaacgccagccccaacgagctgaccgtgaacggcaacaccgccctgggcatcgccagaagactgggctacatcagcgtggtggacaccctgaagatcgtgaccgaggagaccatgaccaccaccaccgtgaccgagaagcacaagatgaacgtgcccgagaccatgaacgaggtgctggacatgagcgacgacgagggcgaggacgccatgaccggcgacaccgacaagtacctgggcccccaggacctgaaggagctgggcgacgacagcctgcccgccgagggctacatgggcttcagcctgggcgccagaagcgccagcagcgacagaagctacaccctgaacagaagcagctacgccagagacagcatgatgatcgaggagctgctggtgcccagcaaggagcagcacctgaccttcaccagagagttcgacagcgacagcctgagacactacagctgggccgccgacaccctggacaacgtgaacctggtgagcagccccatccacagcggcttcctggtgagcttcatggtggacgccagaggcggcagcatgagaggcagcagacaccacggcatgagaatcatcatcccccccagaaagtgcaccgcccccaccagaatcacctgcagactggtgaagagacacaagctggccaaccccccccccatggtggagggcgagggcctggccagcagactggtggagatgggccccgccggcgcccagttcctgggccccgtgatcgtggagatcccccacttcggcagcatgagaggcaaggagagagagctgatcgtgctgagaagcgagaacggcgagacctggaaggagcaccagttcgacagcaagaacgaggacctgaccgagctgctgaacggcatggacgaggagctggacagccccgaggagctgggcaagaagagaatctgcagaatcatcaccaaggacttcccccagtacttcgccgtggtgagcagaatcaagcaggagagcaaccagatcggccccgagggcggcatcctgagcagcaccaccgtgcccctggtgcaggccagcttccccgagggcgccctgaccaagagaatcagagtgggcctgcaggcccagcccgtgcccgacgagatcgtgaagaagatcctgggcaacaaggccaccttcagccccatcgtgaccgtggagcccagaagaagaaagttccacaagcccatcaccatgaccatccccgtgcccccccccagcggcgagggcgtgagcaacggctacaagggcgacaccacccccaacctgagactgctgtgcagcatcaccggcggcaccagccccgcccagtgggaggacatcaccggcaccacccccctgaccttcatcaaggactgcgtgagcttcaccaccaacgtgagcgccagattctggctggccgactgccaccaggtgctggagaccgtgggcctggccacccagctgtacagagagctgatctgcgtgccctacatggccaagttcgtggtgttcgccaagatgaacgaccccgtggagagcagcctgagatgcttctgcatgaccgacgacaaggtggacaagaccctggagcagcaggagaacttcgaggaggtggccagaagcaaggacatcgaggtgctggagggcaagcccatctacgtggactgctacggcaacctggcccccctgaccaagggcggccagcagctggtgttcaacttctacagcttcaaggagaacagactgcccttcagcatcaagatcagagacaccagccaggagccctgcggcagactgagcttcctgaaggagcccaagaccaccaagggcctgccccagaccgccgtgtgcaacctgaacatcaccctgcccgcccacaagaagatcgagaagaccgacagaagacagagcttcgccagcctggccctgagaaagagatacagctacctgaccgagcccggcatgagcgagttccccaacaccttcaccaacacctggatcttcatcagaagagacatcttcagcatccagaccaagttctag

SEQ ID NO: 72829 - DNA, 5544 bp, synthetic construct
  misc_feature 1..5544: note = Description of Artificial Sequence: Synthetic coding sequence
  source 1..5544: mol_type = other DNA
agcgacgccaacgccagctacctgagagccgccagagccggccacctggagaaggccctggactacatcaagaacggcgtggacatcaacatctgcaaccagaacggcctgaacgccctgcacctggccagcaaggagggccacgtggaggtggtgagcgagctgctgcagagagaggccaacgtggacgccgccaccaagaagggcaacaccgccctgcacatcgccagcctggccggccaggccgaggtggtgaaggtgctggtgaccaacggcgccaacgtgaacgcccagagccagaacggcttcacccccctgtacatggccgcccaggagaaccacctggaggtggtgaagttcctgctggacaacggcgccagccagagcctggccaccgaggacggcttcacccccctggccgtggccctgcagcagggccacgaccaggtggtgagcctgctgctggagaacgacaccaagggcaaggtgagactgcccgccctgcacatcgccgccagaaaggacgacaccaaggccgccgccctgctgctgcagaacgacaacaacgccgacgtggagagcaagagcggcttcacccccctgcacatcgccgcccactacggcaacatcaacgtggccaccctgctgctgaacagagccgccgccgtggacttcaccgccagaaacgacatcacccccctgcacgtggccagcaagagaggcaacgccaacatggtgaagctgctgctggacagaggcgccaagatcgacgccaagaccagagacggcctgacccccctgcactgcggcgccagaagcggccacgagcaggtggtggagatgctgctggacagagccgcccccatcctgagcaagaccaagaacggcctgagccccctgcacatggccacccagggcgaccacctgaactgcgtgcagctgctgctgcagcacaacgtgcccgtggacgacgtgaccaacgactacctgaccgccctgcacgtggccgcccactgcggccactacaaggtggccaaggtgctgctggacaagaaggccaaccccaacgccaaggccctgaacggcttcacccccctgcacatcgcctgcaagaagaacagaatcaaggtgatggagctgctgctgaagcacggcgccagcatccaggccgtgaccgagagcggcctgacccccatccacgtggccgccttcatgggccacgtgaacatcgtgagccagctgatgcaccacggcgccagccccaacaccaccaacgtgagaggcgagaccgccctgcacatggccgccagaagcggccaggccgaggtggtgagatacctggtgcaggacggcgcccaggtggaggccaaggccaaggacgaccagacccccctgcacatcagcgccagactgggcaaggccgacatcgtgcagcagctgctgcagcagggcgccagccccaacgccgccaccaccagcggctacacccccctgcacctgagcgccagagagggccacgaggacgtggccgccttcctgctggaccacggcgccagcctgagcatcaccaccaagaagggcttcacccccctgcacgtggccgccaagtacggcaagctggaggtggccaacctgctgctgcagaagagcgccagccccgacgccgccggcaagagcggcctgacccccctgcacgtggccgcccactacgacaaccagaaggtggccctgctgctgctggaccagggcgccagcccccacgccgccgccaagaacggctacacccccctgcacatcgccgccaagaagaaccagatggacatcgccaccaccctgctggagtacggcgccgacgccaacgccgtgaccagacagggcatcgccagcgtgcacctggccgcccaggagggccacgtggacatggtgagcctgctgctgggcagaaacgccaacgtgaacctgagcaacaagagcggcctgacccccctgcacctggccgcccaggaggacagagtgaacgtggccgaggtgctggtgaaccagggcgcccacgtggacgcccagaccaagatgggctacacccccctgcacgtgggctgccactacggcaacatcaagatcgtgaacttcctgctgcagcacagcgccaaggtgaacgccaagaccaagaacggctacacccccctgcaccaggccgcccagcagggccacacccacatcatcaacgtgctgctgcagaacaacgccagccccaacgagctgaccgtgaacggcaacaccgccctgggcatcgccagaagactgggctacatcagcgtggtggacaccctgaagatcgtgaccgaggagaccatgaccaccaccaccgtgaccgagaagcacaagatgaacgtgcccgagaccatgaacgaggtgctggacatgagcgacgacgaggtgagaaaggccaacgcccccgagatgctgagcgacggcgagtacatcagcgacgtggaggagggcaacagatgcacctggtacaagatccccaaggtgcaggagttcaccgtgaagagcgaggacgccatgaccggcgacaccgacaagtacctgggcccccaggacctgaaggagctgggcgacgacagcctgcccgccgagggctacatgggcttcagcctgggcgccagaagcgccagcctgagaagcttcagcagcgacagaagctacaccctgaacagaagcagctacgccagagacagcatgatgatcgaggagctgctggtgcccagcaaggagcagcacctgaccttcaccagagagttcgacagcgacagcctgagacactacagctgggccgccgacaccctggacaacgtgaacctggtgagcagccccatccacagcggcttcctggtgagcttcatggtggacgccagaggcggcagcatgagaggcagcagacaccacggcatgagaatcatcatcccccccagaaagtgcaccgcccccaccagaatcacctgcagactggtgaagagacacaagctggccaaccccccccccatggtggagggcgagggcctggccagcagactggtggagatgggccccgccggcgcccagttcctgggccccgtgatcgtggagatcccccacttcggcagcatgagaggcaaggagagagagctgatcgtgctgagaagcgagaacggcgagacctggaaggagcaccagttcgacagcaagaacgaggacctgaccgagctgctgaacggcatggacgaggagctggacagccccgaggagctgggcaagaagagaatctgcagaatcatcaccaaggacttcccccagtacttcgccgtggtgagcagaatcaagcaggagagcaaccagatcggccccgagggcggcatcctgagcagcaccaccgtgcccctggtgcaggccagcttccccgagggcgccctgaccaagagaatcagagtgggcctgcaggcccagcccgtgcccgacgagatcgtgaagaagatcctgggcaacaaggccaccttcagccccatcgtgaccgtggagcccagaagaagaaagttccacaagcccatcaccatgaccatccccgtgcccccccccagcggcgagggcgtgagcaacggctacaagggcgacaccacccccaacctgagactgctgtgcagcatcaccggcggcaccagccccgcccagtgggaggacatcaccggcaccacccccctgaccttcatcaaggactgcgtgagcttcaccaccaacgtgagcgccagattctggctggccgactgccaccaggtgctggagaccgtgggcctggccacccagctgtacagagagctgatctgcgtgccctacatggccaagttcgtggtgttcgccaagatgaacgaccccgtggagagcagcctgagatgcttctgcatgaccgacgacaaggtggacaagaccctggagcagcaggagaacttcgaggaggtggccagaagcaaggacatcgaggtgctggagggcaagcccatctacgtggactgctacggcaacctggcccccctgaccaagggcggccagcagctggtgttcaacttctacagcttcaaggagaacagactgcccttcagcatcaagatcagagacaccagccaggagccctgcggcagactgagcttcctgaaggagcccaagaccaccaagggcctgccccagaccgccgtgtgcaacctgaacatcaccctgcccgcccacaagaagatcgagaagaccgacagaagacagagcttcgccagcctggccctgagaaagagatacagctacctgaccgagcccggcatgagcccccagagcccctgcgagagaaccgacatcagaatggccatcgtggccgaccacctgggcctgagctggaccgagctggccagagagctgaacttcagcgtggacgagatcaaccagatcagagtggagaaccccaacagcctgatcagccagagcttcatgctgctgaagaagtgggtgaccagagacggcaagaacgccaccaccgacgccctgaccagcgtgctgaccaagatcaacagaatcgacatcgtgaccctgctggagggccccatcttcgactacggcaacatcagcggcaccagaagcttcgccgacgagaacaacgtgttccacgaccccgtggacggctaccccagcctgcaggtggagctggagacccccaccggcctgcactacaccccccccacccccttccagcaggacgactacttcagcgacatcagcagcatcgagagccccctgagaacccccagcagactgagcgacggcctggtgcccagccagggcaacatcgagcacagcgccgacggcccccccgtggtgaccgccgaggacgccagcctggaggacagcaagctggaggacagcgtgcccctgaccgagatgcccgaggccgtggacgtggacgagagccagctggagaacgtgtgcctgagctggcagaacgagaccagcagcggcaacctggagagctgcgcccaggccagaagagtgaccggcggcctgctggacagactggacgacagccccgaccagtgcagagacagcatcaccagctacctgaagggcgaggccggcaagttcgaggccaacggcagccacaccgagatcacccccgaggccaagaccaagagctacttccccgagagccagaacgacgtgggcaagcagagcaccaaggagaccctgaagcccaagatccacggcagcggccacgtggaggagcccgccagccccctggccgcctaccagaagagcctggaggagaccagcaagctgatcatcgaggagaccaagccctgcgtgcccgtgagcatgaagaagatgagcagaaccagccccgccgacggcaagcccagactgagcctgcacgaggaggagggcagcagcggcagcgagcagaagcagggcgagggcttcaaggtgaagaccaagaaggagatcagacacgtggagaagaagagccacagctag

SEQ ID NO: 72830 - DNA, 3354 bp, synthetic construct
  misc_feature 1..3354: note = Description of Artificial Sequence: Synthetic coding sequence
  source 1..3354: mol_type = other DNA
atggccacccagggcgaccacctgaactgcgtgcagctgctgctgcagcacaacgtgcccgtggacgacgtgaccaacgactacctgaccgccctgcacgtggccgcccactgcggccactacaaggtggccaaggtgctgctggacaagaaggccaaccccaacgccaaggccctgaacggcttcacccccctgcacatcgcctgcaagaagaacagaatcaaggtgatggagctgctgctgaagcacggcgccagcatccaggccgtgaccgagagcggcctgacccccatccacgtggccgccttcatgggccacgtgaacatcgtgagccagctgatgcaccacggcgccagccccaacaccaccaacgtgagaggcgagaccgccctgcacatggccgccagaagcggccaggccgaggtggtgagatacctggtgcaggacggcgcccaggtggaggccaaggccaaggacgaccagacccccctgcacatcagcgccagactgggcaaggccgacatcgtgcagcagctgctgcagcagggcgccagccccaacgccgccaccaccagcggctacacccccctgcacctgagcgccagagagggccacgaggacgtggccgccttcctgctggaccacggcgccagcctgagcatcaccaccaagaagggcttcacccccctgcacgtggccgccaagtacggcaagctggaggtggccaacctgctgctgcagaagagcgccagccccgacgccgccggcaagagcggcctgacccccctgcacgtggccgcccactacgacaaccagaaggtggccctgctgctgctggaccagggcgccagcccccacgccgccgccaagaacggctacacccccctgcacatcgccgccaagaagaaccagatggacatcgccaccaccctgctggagtacggcgccgacgccaacgccgtgaccagacagggcatcgccagcgtgcacctggccgcccaggagggccacgtggacatggtgagcctgctgctgggcagaaacgccaacgacagcggcctgacccccctgcacctggccgcccaggaggacagagtgaacgtggccgaggtgctggtgaaccagggcgcccacgtggacgcccagaccaagatgggctacacccccctgcacgtgggctgccactacggcaacatcaagatcgtgaacttcctgctgcagcacagcgccaaggtgaacgccaagaccaagaacggctacacccccctgcaccaggccgcccagcagggccacacccacatcatcaacgtgctgctgcagaacaacgccagccccaacgagctgaccgtgaacggcaacaccgccctgggcatcgccagaagactgggctacatcagcgtggtggacaccctgaagatcgtgaccgaggagaccatgaccaccaccaccgtgaccgagaagcacaagatgaacgtgcccgagaccatgaacgaggtgctggacatgagcgacgacgagggcgaggacgccatgaccggcgacaccgacaagtacctgggcccccaggacctgaaggagctgggcgacgacagcctgcccgccgagggctacatgggcttcagcctgggcgccagaagcgccagcctgagaagcttcagcagcgacagaagctacaccctgaacagaagcagctacgccagagacagcatgatgatcgaggagctgctggtgcccagcaaggagcagcacctgaccttcaccagagagttcgacagcgacagcctgagacactacagctgggccgccgacaccctggacaacgtgaacctggtgagcagccccatccacagcggcttcctggtgagcttcatggtggacgccagaggcggcagcatgagaggcagcagacaccacggcatgagaatcatcatcccccccagaaagtgcaccgcccccaccagaatcacctgcagactggtgaagagacacaagctggccaaccccccccccatggtggagggcgagggcctggccagcagactggtggagatgggccccgccggcgcccagttcctgggccccgtgatcgtggagatcccccacttcggcagcatgagaggcaaggagagagagctgatcgtgctgagaagcgagaacggcgagacctggaaggagcaccagttcgacagcaagaacgaggacctgaccgagctgctgaacggcatggacgaggagctggacagccccgaggagctgggcaagaagagaatctgcagaatcatcaccaaggacttcccccagtacttcgccgtggtgagcagaatcaagcaggagagcaaccagatcggccccgagggcggcatcctgagcagcaccaccgtgcccctggtgcaggccagcttccccgagggcgccctgaccaagagaatcagagtgggcctgcaggcccagcccgtgcccgacgagatcgtgaagaagatcctgggcaacaaggccaccttcagccccatcgtgaccgtggagcccagaagaagaaagttccacaagcccatcaccatgaccatccccgtgcccccccccagcggcgagggcgtgagcaacggctacaagggcgacaccacccccaacctgagactgctgtgcagcatcaccggcggcaccagccccgcccagtgggaggacatcaccggcaccacccccctgaccttcatcaaggactgcgtgagcttcaccaccaacgtgagcgccagattctggctggccgactgccaccaggtgctggagaccgtgggcctggccacccagctgtacagagagctgatctgcgtgccctacatggccaagttcgtggtgttcgccaagatgaacgaccccgtggagagcagcctgagatgcttctgcatgaccgacgacaaggtggacaagaccctggagcagcaggagaacttcgaggaggtggccagaagcaaggacatcgaggtgctggagggcaagcccatctacgtggactgctacggcaacctggcccccctgaccaagggcggccagcagctggtgttcaacttctacagcttcaaggagaacagactgcccttcagcatcaagatcagagacaccagccaggagccctgcggcagactgagcttcctgaaggagcccaagaccaccaagggcctgccccagaccgccgtgtgcaacctgaacatcaccctgcccgcccacaagaagatcgagaagaccgacagaagacagagcttcgccagcctggccctgagaaagagatacagctacctgaccgagcccggcatgagcgagttccccaacaccttcaccaacctgagaggcttcagctag

SEQ ID NO: 72831 - DNA, 2436 bp, synthetic construct
  misc_feature 1..2436: note = Description of Artificial Sequence: Synthetic coding sequence
  source 1..2436: mol_type = other DNA
atggccctgccccagagcgaggacgccatgaccggcgacaccgacaagtacctgggcccccaggacctgaaggagctgggcgacgacagcctgcccgccgagggctacatgggcttcagcctgggcgccagaagcgccagcctgagaagcttcagcagcgacagaagctacaccctgaacagaagcagctacgccagagacagcatgatgatcgaggagctgctggtgcccagcaaggagcagcacctgaccttcaccagagagttcgacagcgacagcctgagacactacagctgggccgccgacaccctggacaacgtgaacctggtgagcagccccatccacagcggcttcctggtgagcttcatggtggacgccagaggcggcagcatgagaggcagcagacaccacggcatgagaatcatcatcccccccagaaagtgcaccgcccccaccagaatcacctgcagactggtgaagagacacaagctggccaaccccccccccatggtggagggcgagggcctggccagcagactggtggagatgggccccgccggcgcccagttcctgggccccgtgatcgtggagatcccccacttcggcagcatgagaggcaaggagagagagctgatcgtgctgagaagcgagaacggcgagacctggaaggagcaccagttcgacagcaagaacgaggacctgaccgagctgctgaacggcatggacgaggagctggacagccccgaggagctgggcaagaagagaatctgcagaatcatcaccaaggacttcccccagtacttcgccgtggtgagcagaatcaagcaggagagcaaccagatcggccccgagggcggcatcctgagcagcaccaccgtgcccctggtgcaggccagcttccccgagggcgccctgaccaagagaatcagagtgggcctgcaggcccagcccgtgcccgacgagatcgtgaagaagatcctgggcaacaaggccaccttcagccccatcgtgaccgtggagcccagaagaagaaagttccacaagcccatcaccatgaccatccccgtgcccccccccagcggcgagggcgtgagcaacggctacaagggcgacaccacccccaacctgagactgctgtgcagcatcaccggcggcaccagccccgcccagtgggaggacatcaccggcaccacccccctgaccttcatcaaggactgcgtgagcttcaccaccaacgtgagcgccagattctggctggccgactgccaccaggtgctggagaccgtgggcctggccacccagctgtacagagagctgatctgcgtgccctacatggccaagttcgtggtgttcgccaagatgaacgaccccgtggagagcagcctgagatgcttctgcatgaccgacgacaaggtggacaagaccctggagcagcaggagaacttcgaggaggtggccagaagcaaggacatcgaggtgctggagggcaagcccatctacgtggactgctacggcaacctggcccccctgaccaagggcggccagcagctggtgttcaacttctacagcttcaaggagaacagactgcccttcagcatcaagatcagagacaccagccaggagccctgcggcagactgagcttcctgaaggagcccaagaccaccaagggcctgccccagaccgccgtgtgcaacctgaacatcaccctgcccgcccacaagaagatcgagaagaccgacagaagacagagcttcgccagcctggccctgagaaagagatacagctacctgaccgagcccggcatgagcccccagagcccctgcgagagaaccgacatcagaatggccatcgtggccgaccacctgggcctgagctggaccgagctggccagagagctgaacttcagcgtggacgagatcaaccagatcagagtggagaaccccaacagcctgatcagccagagcttcatgctgctgaagaagtgggtgaccagagacggcaagaacgccaccaccgacgccctgaccagcgtgctgaccaagatcaacagaatcgacatcgtgaccctgctggagggccccatcttcgactacggcaacatcagcggcaccagaagcttcgccgacgagaacaacgtgttccacgaccccgtggacggctaccccagcctgcaggtggagctggagacccccaccggcctgcactacaccccccccacccccttccagcaggacgactacttcagcgacatcagcagcatcgagagccccctgagaacccccagcagactgagcgacggcctggtgcccagccagggcaacatcgagcacagcgccgacggcccccccgtggtgaccgccgaggacgccagcctggaggacagcaagctggaggacagcgtgcccctgaccgagatgcccgaggccgtgatgtag

SEQ ID NO: 72832 - DNA, 2796 bp, synthetic construct
  misc_feature 1..2796: note = Description of Artificial Sequence: Synthetic coding sequence
  source 1..2796: mol_type = other DNA
ttcaccctggcccacgtgccccagagaggcgagaccgccctgcacatggccgccagaagcggccaggccgaggtggtgagatacctggtgcaggacggcgcccaggtggaggccaaggccaaggacgaccagacccccctgcacatcagcgccagactgggcaaggccgacatcgtgcagcagctgctgcagcagggcgccagccccaacgccgccaccaccagcggctacacccccctgcacctgagcgccagagagggccacgaggacgtggccgccttcctgctggaccacggcgccagcctgagcatcaccaccaagaagggcttcacccccctgcacgtggccgccaagtacggcaagctggaggtggccaacctgctgctgcagaagagcgccagccccgacgccgccggcaagagcggcctgacccccctgcacgtggccgcccactacgacaaccagaaggtggccctgctgctgctggaccagggcgccagcccccacgccgccgccaagaacggctacacccccctgcacatcgccgccaagaagaaccagatggacatcgccaccaccctgctggagtacggcgccgacgccaacgccgtgaccagacagggcatcgccagcgtgcacctggccgcccaggagggccacgtggacatggtgagcctgctgctgggcagaaacgccaacgtgaacctgagcaacaagagcggcctgacccccctgcacctggccgcccaggaggacagagtgaacgtggccgaggtgctggtgaaccagggcgcccacgtggacgcccagaccaagatgggctacacccccctgcacgtgggctgccactacggcaacatcaagatcgtgaacttcctgctgcagcacagcgccaaggtgaacgccaagaccaagaacggctacacccccctgcaccaggccgcccagcagggccacacccacatcatcaacgtgctgctgcagaacaacgccagccccaacgagctgaccgtgaacggcaacaccgccctgggcatcgccagaagactgggctacatcagcgtggtggacaccctgaagatcgtgaccgaggagaccatgaccaccaccaccgtgaccgagaagcacaagatgaacgtgcccgagaccatgaacgaggtgctggacatgagcgacgacgagggcgaggacgccatgaccggcgacaccgacaagtacctgggcccccaggacctgaaggagctgggcgacgacagcctgcccgccgagggctacatgggcttcagcctgggcgccagaagcgccagcagaagcttcagcagcgacagaagctacaccctgaacagaagcagctacgccagagacagcatgatgatcgaggagctgctggtgcccagcaaggagcagcacctgaccttcaccagagagttcgacagcgacagcctgagacactacagctgggccgccgacaccctggacaacgtgaacctggtgagcagccccatccacagcggctacagcagccccctgccccagtacgacagcagattcctggtgagcttcatggtggacgccagaggcggcagcatgagaggcagcagacaccacggcatgagaatcatcatcccccccagaaagtgcaccgcccccaccagaatcacctgcagactggtgaagagacacaagctggccaaccccccccccatggtggagggcgagggcctggccagcagactggtggagatgggccccgccggcgcccagttcctgggccccgtgatcgtggagatcccccacttcggcagcatgagaggcaaggagagagagctgatcgtgctgagaagcgagaacggcgagacctggaaggagcaccagttcgacagcaagaacgaggacctgaccgagctgctgaacggcatggacgaggagctggacagccccgaggagctgggcaagaagagaatctgcagaatcatcaccaaggacttcccccagtacttcgccgtggtgagcagaatcaagcaggagagcaaccagatcggccccgagggcggcatcctgagcagcaccaccgtgcccctggtgcaggccagcttccccgagggcgccctgaccaagagaatcagagtgggcctgcaggcccagcccgtgcccgacgagatcgtgaagaagatcctgggcaacaaggccaccttcagccccatcgtgaccgtggagcccagaagaagaaagttccacaagcccatcaccatgaccatccccgtgcccccccccagcggcgagggcgtgagcaacggctacaagggcgacaccacccccaacctgagactgctgtgcagcatcaccggcggcaccagccccgcccagtgggaggacatcaccggcaccacccccctgaccttcatcaaggactgcgtgagcttcaccaccaacgtgagcgccagattctggctggccgactgccaccaggtgctggagaccgtgggcctggccacccagctgtacagagagctgatctgcgtgccctacatggccaagttcgtggtgttcgccaagatgaacgaccccgtggagagcagcctgagatgcttctgcatgaccgacgacaaggtggacaagaccctggagcagcaggagaacttcgaggaggtggccagaagcaaggacatcgaggtgccctgcagccagaagcaggtgcacttcatcacctacagcagatacgaggtgctgttctgcggcctgaacagcacccactacaagatccccagcgccctgctgatcctgctgctgctgtag

SEQ ID NO: 72833 - DNA, 1647 bp, synthetic construct
  misc_feature 1..1647: note = Description of Artificial Sequence: Synthetic coding sequence
  source 1..1647: mol_type = other DNA
agcctgcccgagagcgaggacgccatgaccggcgacaccgacaagtacctgggcccccaggacctgaaggagctgggcgacgacagcctgcccgccgagggctacatgggcttcagcctgggcgccagaagcgccagcctgagaagcttcagcagcgacagaagctacaccctgaacagaagcagctacgccagagacagcatgatgatcgaggagctgctggtgcccagcaaggagcagcacctgaccttcaccagagagttcgacagcgacagcctgagacactacagctgggccgccgacaccctggacaacgtgaacctggtgagcagccccatccacagcggcttcctggtgagcttcatggtggacgccagaggcggcagcatgagaggcagcagacaccacggcatgagaatcatcatcccccccagaaagtgcaccgcccccaccagaatcacctgcagactggtgaagagacacaagctggccaaccccccccccatggtggagggcgagggcctggccagcagactggtggagatgggccccgccggcgcccagttcctgggccccgtgatcgtggagatcccccacttcggcagcatgagaggcaaggagagagagctgatcgtgctgagaagcgagaacggcgagacctggaaggagcaccagttcgacagcaagaacgaggacctgaccgagctgctgaacggcatggacgaggagctggacagccccgaggagctgggcaagaagagaatctgcagaatcatcaccaaggacttcccccagtacttcgccgtggtgagcagaatcaagcaggagagcaaccagatcggccccgagggcggcatcctgagcagcaccaccgtgcccctggtgcaggccagcttccccgagggcgccctgaccaagagaatcagagtgggcctgcaggcccagcccgtgcccgacgagatcgtgaagaagatcctgggcaacaaggccaccttcagccccatcgtgaccgtggagcccagaagaagaaagttccacaagcccatcaccatgaccatccccgtgcccccccccagcggcgagggcgtgagcaacggctacaagggcgacaccacccccaacctgagactgctgtgcagcatcaccggcggcaccagccccgcccagtgggaggacatcaccggcaccacccccctgaccttcatcaaggactgcgtgagcttcaccaccaacgtgagcgccagattctggctggccgactgccaccaggtgctggagaccgtgggcctggccacccagctgtacagagagctgatctgcgtgccctacatggccaagttcgtggtgttcgccaagatgaacgaccccgtggagagcagcctgagatgcttctgcatgaccgacgacaaggtggacaagaccctggagcagcaggagaacttcgaggaggtggccagaagcaaggacatcgaggtgctggagggcaagcccatctacgtggactgctacggcaacctggcccccctgaccaagggcggccagcagctggtgttcaacttctacagcttcaaggagaacagactgcccttcagcatcaagatcagagacaccagccagaacatcgtgcagctgagctgcctgctgtag

SEQ ID NO: 72834 - DNA, 1443 bp, synthetic construct
  misc_feature 1..1443: note = Description of Artificial Sequence: Synthetic coding sequence
  source 1..1443: mol_type = other DNA
atggccgtggccagagccgccctgggccccctggtgaccggcctgtacgacgtgcaggccttcaagttcggcgacttcgtgctgaagagcggcctgagcagccccatctacatcgacctgagaggcatcgtgagcagacccagactgctgagccaggtggccgacatcctgttccagaccgcccagaacgccggcatcagcttcgacaccgtgtgcggcgtgccctacaccgccctgcccctggccaccgtgatctgcagcaccaaccagatccccatgctgatcagaagaaaggagaccaaggactacggcaccaagagactggtggagggcaccatcaaccccggcgagacctgcctgatcatcgaggacgtggtgaccagcggcagcagcgtgctggagaccgtggaggtgctgcagaaggagggcctgaaggtgaccgacgccatcgtgctgctggacagagagcagggcggcaaggacaagctgcaggcccacggcatcagactgcacagcgtgtgcaccctgagcaagatgctggagatcctggagcagcagaagaaggtggacgccgagaccgtgggcagagtgaagagattcatccaggagaacgtgttcgtggccgccaaccacaacggcagccccctgagcatcaaggaggcccccaaggagctgagcttcggcgccagagccgagctgcccagaatccaccccgtggccagcaagctgctgagactgatgcagaagaaggagaccaacctgtgcctgagcgccgacgtgagcctggccagagagctgctgcagctggccgacgccctgggccccagcatctgcatgctgaagacccacgtggacatcctgaacgacttcaccctggacgtgatgaaggagctgatcaccctggccaagtgccacgagttcctgatcttcgaggacagaaagttcgccgacatcggcaacaccgtgaagaagcagtacgagggcggcatcttcaagatcgccagctgggccgacctggtgaacgcccacgtggtgcccggcagcggcgtggtgaagggcctgcaggaggtgggcctgcccctgcacagaggctgcctgctgatcgccgagatgagcagcaccggcagcctggccaccggcgactacaccagagccgccgtgagaatggccgaggagcacagcgagttcgtggtgggcttcatcagcggcagcagagtgagcatgaagcccgagttcctgcacctgacccccggcgtgcagctggaggccggcggcgacaacctgggccagcagtacaacagcccccaggaggtgatcggcaagagaggcagcgacatcatcatcgtgggcagaggcatcatcagcgccgccgacagactggaggccgccgagatgtacagaaaggccgcctgggaggcctacctgagcagactgggcgtgtag

SEQ ID NO: 72835 - DNA, 1218 bp, synthetic construct
  misc_feature 1..1218: note = Description of Artificial Sequence: Synthetic coding sequence
  source 1..1218: mol_type = other DNA
atggacaccagcgacctgttcgccagctgcagaaagggcgacgtgggcagagtgagatacctgctggagcaggtgctgtacctgctggccaacggcgccagatgcgaggccaacaccttcgacggcgagagatgcctgtacggcgccctgagcgaccccatcagaagagccctgagagactacaagcaccccctgctgtgggacctgctgagcgacctggaggccaagtgcgagaaggtgagcgagttcgtggccagcaagcccggcacctgcgtgaaggtgctgaccatcgagcccccccccgccgaccccagactgagagaggacatggccctgctggccgactgcgccctgccccccgagctgagagccttcttctgcggcagaagcgactacttcagagccctgctggacgaccacttcagagagagcgaggagcccgccaccagcggcggcccccccgccgtgaccctgcacggcatcagccccgacgtgttcacccacgtgctgtactacatgtacagcgaccacaccgagctgagccccgaggccgcctacgacgtgctgagcgtggccgacatgtacctgctgcccggcctgaagagactgtgcggcagaagcctggcccagatgctggacgaggacaccgtggtgggcgtgtggagagtggccaagctgttcagactggccagactggaggaccagtgcaccgagtacatggccaaggtgatcgagaagctggtggagagagaggacttcgtggaggccgtgaaggaggaggccgccgccgtggccgccagacaggagaccgacagcatccccctggtggacgacatcagattccacgtggccagcaccgtgcagacctacagcgccatcgaggaggcccagcagagactgagagccctggaggacaccagcatgtgcatgagactgtgcgccgccctgctgcccgccccctgcaccctgagagccagctggggcgtgagaggcgcccagtggggcttcagcagcctgcacgagcccggcgaccccagaggcggcagcatctgggacgagccccccccccccaacgcccaggccagcccccaggaccccggcggcggccaccacagcggcaagcccggcgtgggcgtgggcttcggcctgagcaccttcctgctgcagatcccccccacccaccccagccccaagagcagccccctggccctggcctag

SEQ ID NO: 72836 - DNA, 1011 bp, synthetic construct
  misc_feature 1..1011: note = Description of Artificial Sequence: Synthetic coding sequence
  source 1..1011: mol_type = other DNA
atgctggacaccaagtggaagggcaagagcgtggtggtgctgagacaccccctgatcaaccccgtggccttcggcgccctgctgcagtacctgtacaccggcagactggacatcggcgtggagcacgtgagcgactgcgagagactggccaagcagtgccagctgtgggacctgctgagcgacctggaggccaagtgcgagaaggtgagcgagttcgtggccagcaagcccggcacctgcgtgaaggtgctgaccatcgagcccccccccgccgaccccagactgagagaggacatggccctgctggccgactgcgccctgccccccgagctgagaggcgacctgtgggagctgcccttcccctgccccgacggcttcaacagctgccccgacatctgcttcagagtggccggctgcagcttcctgtgccacaaggccttcttctgcggcagaagcgactacttcagagccctgctggacgaccacttcagagagagcgaggagcccgccaccagcggcggcccccccgccgtgaccctgcacggcatcagccccgacgtgttcacccacgtgctgtactacatgtacagcgaccacaccgagctgagccccgaggccgcctacgacgtgctgagcgtggccgacatgtacctgctgcccggcctgaagagactgtgcggcagaagcctggcccagatgctggacgaggacaccgtggtgggcgtgtggagagtggccaagctgttcagactggccagactggaggaccagtgcaccgagtacatggccaaggtgatcgagaagctggtggagagagaggacttcgtggaggccgtgaaggaggaggccgccgccgtggccgccagacaggagaccgacagcatccccctggtggacgacatcagattccacgtggccagcaccgtgcagacctacagcgccatcgaggaggcccagcagagactgagagccctggaggacctgctggtgagcatcggcctggactgctag

SEQ ID NO: 72837 - DNA, 1011 bp, synthetic construct; identical to SEQ ID NO: 72836
  misc_feature 1..1011: note = Description of Artificial Sequence: Synthetic coding sequence
  source 1..1011: mol_type = other DNA

SEQ ID NO: 72838 - DNA, 1011 bp, synthetic construct; identical to SEQ ID NO: 72836
  misc_feature 1..1011: note = Description of Artificial Sequence: Synthetic coding sequence
  source 1..1011: mol_type = other DNA

SEQ ID NO: 72839 - DNA, 2061 bp, synthetic construct
  misc_feature 1..2061: note = Description of Artificial Sequence: Synthetic coding sequence
  source 1..2061: mol_type = other DNA
atggaggccagccaggagggccacctggagctggtgaagtacctgctggccagcggcgccaacgtgcacgccaccaccgccaccggcgacaccgccctgacctacgcctgcgagaacggccacaccgacgtggccgacgtgctgctgcaggccggcgccgacctggacaagcaggaggacatgaagaccatcctggagggcatcgaccccgccaagcaccaggagcacgagagcgagggcggcagaacccccctgatgaaggccgccagagccggccacctgtgcaccgtgcagttcctgatcagcaagggcgccaacgtgaacagagccaccgccaacaacgaccacaccgtggtgagcctggcctgcgccggcggccacctggccgtggtggagctgctgctggcccacggcgccgaccccacccacagactgaaggacggcagcaccatgctgatcgaggccgccaagggcggccacaccaacgtggtgagctacctgctggactaccccaacaacgtgctgagcgtgcccaccaccgacgtgagccagctgcccccccccagccaggaccagagccaggagcccgacagaaccagccaggagaacagccccgccctgctgggcgtgcagaaggccgtgagcaccagagtgcccaccggcagcaacagcagcagccagaccaccgagtgcctgacccccgagagctgcagccagaccaccagcaacgtggccagccagagcatgccccccgtgtaccccagcgtggacatcgacgcccacaccgagagcaaccacgacaccgccctgaccctggcctgcgccggcggccacgaggagctggtgagcgtgctgatcgccagagacgccaagatcgagcacagagacaagaagggcttcacccccctgatcctggccgccaccgccggccacgtgggcgtggtggagatcctgctggacaagggcggcgacatcgaggcccagagcgagagaaccaaggacacccccctgagcctggcctgcagcggcggcagacaggaggtggtggacctgctgctggccagaggcgccaacaaggagcacagaaacgtgagcgactacacccccctgagcctggccgccagcggcggctacgtgaacatcatcaagatcctgctgaacgccggcgccgagatcaacagcagaaccggcagcaagctgggcatcagccccctgatgctggccgccatgaacggccacgtgcccgccgtgaagctgctgctggacatgggcagcgacatcaacgcccagatcgagaccaacagaaacaccgccctgaccctggcctgcttccagggcagagccgaggtggtgagcctgctgctggacagaaaggccaacgtggagcacagagccaagaccggcctgacccccctgatggaggccgccagcggcggctacgccgaggtgggcagagtgctgctggacaagggcgccgacgtgaacgccccccccgtgcccagcagcagagacaccgccctgaccatcgccgccgacaagggccactacaagttctgcgagctgctgatccacagaggcgcccacatcgacgtgagaaacaagaagggcaacacccccctgtggctggccagcaacggcggccacttcgacgtggtgcagctgctggtgcaggccggcgccgacgtggacgccgccgacaacagaaagatcacccccctgatgagcgccttcagaaagggccacgtgaaggtggtgcagtacctggtgaaggaggtgaaccagttccccagcgacatcgagtgcatgagatacatcgccaccatcaccgacaaggagctgctgaagaagtgccaccagtgcgtggagaccatcgtgaaggccaaggaccagcaggccgccgaggccaacaagaacgccagcatcctgctgaaggagctggacctggagaagagcagagaggagagcagaaagcaggccctggccgccaagagagagaagagaaaggagaagagaaagaagaagaaggaggagcagaagagaaagcaggaggaggacgagtag

SEQ ID NO: 72840 - DNA, 7623 bp, synthetic construct
  misc_feature 1..7623: note = Description of Artificial Sequence: Synthetic coding sequence
  source 1..7623: mol_type = other DNA
atgctgaccgacagcggcggcggcggcaccagcttcgaggaggacctggacagcgtggcccccagaagcgcccccgccggcgccagcgagccccccccccccggcggcgtgggcctgggcatcagaaccgtgagactgttcggcgaggccggccccgccagcggcgtgggcagcagcggcggcggcggcagcggcagcggcaccggcggcggcgacgccgccctggacttcaagctggccgccgccgtgctgagaaccggcggcggcggcggcgccagcggcagcgacgaggacgaggtgagcgaggtggagagcttcatcctggaccaggaggacctggacaaccccgtgctgaagaccaccagcgagatcttcctgagcagcaccgccgagggcgccgacctgagaaccgtggaccccgagacccaggccagactggaggccctgctggaggccgccggcatcggcaagctgagcaccgccgacggcaaggccttcgccgaccccgaggtgctgagaagactgaccagcagcgtgagctgcgccctggacgaggccgccgccgccctgaccagaatgaaggccgagaacagccacaacgccggccaggtggacaccagaagcctggccgaggcctgcagcgacggcgacgtgaacgccgtgagaaagctgctggacgagggcagaagcgtgaacgagcacaccgaggagggcgagagcctgctgtgcctggcctgcagcgccggctactacgagctggcccaggtgctgctggccatgcacgccaacgtggaggacagaggcaacaagggcgacatcacccccctgatggccgccagcagcggcggctacctggacatcgtgaagctgctgctgctgcacgacgccgacgtgaacagccagagcgccaccggcaacaccgccctgacctacgcctgcgccggcggcttcgtggacatcgtgaaggtgctgctgaacgagggcgccaacatcgaggaccacaacgagaacggccacacccccctgatggaggccgccagcgccggccacgtggaggtggccagagtgctgctggaccacggcgccggcatcaacacccacagcaacgagttcaaggagagcgccctgaccctggcctgctacaagggccacctggacatggtgagattcctgctggaggccggcgccgaccaggagcacaagaccgacgagatgcacaccgccctgatggaggcctgcatggacggccacgtggaggtggccagactgctgctggacagcggcgcccaggtgaacatgcccgccgacagcttcgagagccccctgaccctggccgcctgcggcggccacgtggagctggccgccctgctgatcgagagaggcgccaacctggaggaggtgaacgacgagggctacacccccctgatggaggccgccagagagggccacgaggagatggtggccctgctgctggcccagggcgccaacatcaacgcccagaccgaggagacccaggagaccgccctgaccctggcctgctgcggcggcttcagcgaggtggccgacttcctgatcaaggccggcgccgacatcgagctgggctgcagcacccccctgatggaggccagccaggagggccacctggagctggtgaagtacctgctggccagcggcgccaacgtgcacgccaccaccgccaccggcgacaccgccctgacctacgcctgcgagaacggccacaccgacgtggccgacgtgctgctgcaggccggcgccgacctggagcacgagagcgagggcggcagaacccccctgatgaaggccgccagagccggccacctgtgcaccgtgcagttcctgatcagcaagggcgccaacgtgaacagagccaccgccaacaacgaccacaccgtggtgagcctggcctgcgccggcggccacctggccgtggtggagctgctgctggcccacggcgccgaccccacccacagactgaaggacggcagcaccatgctgatcgaggccgccaagggcggccacaccaacgtggtgagctacctgctggactaccccaacaacgtgctgagcgtgcccaccaccgacgtgagccagctgcccccccccagccaggaccagagccaggtgcccagagtgcccacccacaccctggccatggtggtgcccccccaggagcccgacagaaccagccaggagaacagccccgccctgctgggcgtgcagaagggcaccagcaagcagaagagcagcagcctgcaggtggccgaccaggacctgctgcccagcttccacccctaccagcccctggagtgcatcgtggaggagaccgagggcaagctgaacgagctgggccagagaatcagcgccatcgagaaggcccagctgaagagcctggagctgatccagggcgagcccctgaacaaggacaagatcgaggagctgaagaagaacagagaggagcaggtgcagaagaagaagaagatcctgaaggagctgcagaaggtggagagacagctgcagatgaagacccagcagcagttcaccaaggagtacctggagaccaagggccagaaggacaccgtgagcctgcaccagcagtgcagccacagaggcgtgttccccgagggcgagggcgacggcagcctgcccgaggaccacttcagcgagctgccccaggtggacaccatcctgttcaaggacaacgacgtggacgacgagcagcagagcccccccagcgccgagcagatcgacttcgtgcccgtgcagcccctgagcagcccccagtgcaacttcagcagcgacctgggcagcaacggcaccaacagcctggagctgcagaaggtgagcggcaaccagcagatcgtgggccagccccagatcgccatcaccggccacgaccagggcctgctggtgcaggagcccgacggcctgatggtggccacccccgcccagaccctgaccgacaccctggacgacctgatcgccgccgtgagcaccagagtgcccaccggcagcaacagcagcagccagaccaccgagtgcctgacccccgagagctgcagccagaccaccagcaacgtggccagccagagcatgccccccgtgtaccccagcgtggacatcgacgcccacaccgagagcaaccacgacaccgccctgaccctggcctgcgccggcggccacgaggagctggtgagcgtgctgatcgccagagacgccaagatcgagcacagagacaagaagggcttcacccccctgatcctggccgccaccgccggccacgtgggcgtggtggagatcctgctggacaagggcggcgacatcgaggcccagagcgagagaaccaaggacacccccctgagcctggcctgcagcggcggcagacaggaggtggtggacctgctgctggccagaggcgccaacaaggagcacagaaacgtgagcgactacacccccctgagcctggccgccagcggcggctacgtgaacatcatcaagatcctgctgaacgccggcgccgagatcaacagcagaaccggcagcaagctgggcatcagccccctgatgctggccgccatgaacggccacgtgcccgccgtgaagctgctgctggacatgggcagcgacatcaacgcccagatcgagaccaacagaaacaccgccctgaccctggcctgcttccagggcagagccgaggtggtgagcctgctgctggacagaaaggccaacgtggagcacagagccaagaccggcctgacccccctgatggaggccgccagcggcggctacgccgaggtgggcagagtgctgctggacaagggcgccgacgtgaacgccccccccgtgcccagcagcagagacaccgccctgaccatcgccgccgacaagggccactacaagttctgcgagctgctgatccacagaggcgcccacatcgacgtgagaaacaagaagggcaacacccccctgtggctggccagcaacggcggccacttcgacgtggtgcagctgctggtgcaggccggcgccgacgtggacgccgccgacaacagaaagatcacccccctgatgagcgccttcagaaagggccacgtgaaggtggtgcagtacctggtgaaggaggtgaaccagttccccagcgacatcgagtgcatgagatacatcgccaccatcaccgacaaggagctgctgaagaagtgccaccagtgcgtggagaccatcgtgaaggccaaggaccagcaggccgccgaggccaacaagaacgccagcatcctgctgaaggagctggacctggagaagagcagagaggagagcagaaagcaggccctggccgccaagagagagaagagaaaggagaagagaaagaagaagaaggaggagcagaagagaaagcaggaggaggacgaggagaacaagcccaaggagaacagcgagctgcccgaggacgaggacgaggaggagaacgacgaggacgtggagcaggaggtgcccatcgagccccccagcgccaccaccaccaccaccatcggcatcagcgccaccagcgccaccttcaccaacgtgttcggcaagaagagagccaacgtggtgaccacccccagcaccaacagaaagaacaagaagaacaagaccaaggagaccccccccaccgcccacctgatcctgcccgagcagcacatgagcctggcccagcagaaggccgacaagaacaagatcaacggcgagcccagaggcggcggcgccggcggcaacagcgacagcgacaacctggacagcaccgactgcaacagcgagagcagcagcggcggcaagagccaggagctgaacttcgtgatggacgtgaacagcagcaagtaccccagcctgctgctgcacagccaggaggagaagaccagcaccgccaccagcaagacccagaccagactggagggcgaggtgacccccaacagcctgagcaccagctacaagaccgtgagcctgcccctgagcagccccaacatcaagctgaacctgaccagccccaagagaggccagaagagagaggagggctggaaggaggtggtgagaagaagcaagaagctgagcgtgcccgccagcgtggtgagcagaatcatgggcagaggcggctgcaacatcaccgccatccaggacgtgaccggcgcccacatcgacgtggacaagcagaaggacaagaacggcgagagaatgatcaccatcagaggcggcaccgagagcaccagatacgccgtgcagctgatcaacgccctgatccaggaccccgccaaggagctggaggacctgatccccaagaaccacatcagaacccccgccagcaccaagagcatccacgccaacttcagcagcggcgtgggcaccaccgccgccagcagcaagaacgccttccccctgggcgcccccaccctggtgaccagccaggccaccaccctgagcaccttccagcccgccaacaagctgaacaagaacgtgcccaccaacgtgagaagcagcttccccgtgagcctgcccctggcctacccccacccccacttcgccctgctggccgcccagaccatgcagcagatcagacaccccagactgcccatggcccagttcggcggcaccttcagccccagccccaacacctggggccccttccccgtgagacccgtgaaccccggcaacaccaacagcagccccaagcacaacaacaccagcagactgcccaaccagaacggcaccgtgctgcccagcgagagcgccggcctggccaccgccagctgccccatcaccgtgagcagcgtggtggccgccagccagcagctgtgcgtgaccaacaccagaacccccagcagcgtgagaaagcagctgttcgcctgcgtgcccaagaccagcccccccgccaccgtgatcagcagcgtgaccagcacctgcagcagcctgcccagcgtgagcagcgcccccatcaccagcggccaggcccccaccaccttcctgcccgccagcaccagccaggcccagctgagcagccagaagatggagagcttcagcgccgtgccccccaccaaggagaaggtgagcacccaggaccagcccatggccaacctgtgcacccccagcagcaccgccaacagctgcagcagcagcgccagcaacacccccggcgcccccgagacccaccccagcagcagccccacccccaccagcagcaacacccaggaggaggcccagcccagcagcgtgagcgacctgagccccatgagcatgcccttcgccagcaacagcgagcccgcccccctgaccctgaccagccccagaatggtggccgccgacaaccaggacaccagcaacctgccccagctggccgtgcccgcccccagagtgagccacagaatgcagcccagaggcagcttctacagcatggtgcccaacgccaccatccaccaggacccccagagcatcttcgtgaccaaccccgtgaccctgacccccccccagggcccccccgccgccgtgcagctgagcagcgccgtgaacatcatgaacggcagccagatgcacatcaaccccgccaacaagagcctgccccccaccttcggccccgccaccctgttcaaccacttcagcagcctgttcgacagcagccaggtgcccgccaaccagggctggggcgacggccccctgagcagcagagtggccaccgacgccagcttcaccgtgcagagcgccttcctgggcaacagcgtgctgggccacctggagaacatgcaccccgacaacagcaaggcccccggcttcagaccccccagccagagagtgagcaccagccccgtgggcctgcccagcatcgaccccagcggcagcagccccagcagcagcagcgcccccctggccagcttcagcggcatccccggcaccagagtgttcctgcagggccccgcccccgtgggcacccccagcttcaacagacagcacttcagcccccacccctggaccagcgccagcaacagctgcgacagccccatccccagcgtgagcagcggcagcagcagccccctgagcgccaccagcgccccccccaccctgggccagcccaagggcgtgagcgccagccaggacagaaagatccccccccccatcggcaccgagagactggccagaatcagacagggcggcagcgtggcccaggcccccgccggcaccagcttcgtggcccccgtgggccacagcggcatctggagcttcggcgtgaacgccgtgagcgagggcctgagcggctggagccagagcgtgatgggcaaccaccccatgcaccagcagctgagcgaccccagcaccttcagccagcaccagcccatggagagagacgacagcggcatggtggcccccagcaacatcttccaccagcccatggccagcggcttcgtggacttcagcaagggcctgcccatcagcatgtacggcggcaccatcatccccagccacccccagctggccgacgtgcccggcggccccctgttcaacggcctgcacaaccccgaccccgcctggaaccccatgatcaaggtgatccagaacagcaccgagtgcaccgacgcccagcagtag

SEQ ID NO: 72841 - DNA, 7854 bp, synthetic construct
  misc_feature 1..7854: note = Description of Artificial Sequence: Synthetic coding sequence
  source 1..7854: mol_type = other DNA
atgctgaccgacagcggcggcggcggcaccagcttcgaggaggacctggacagcgtggcccccagaagcgcccccgccggcgccagcgagccccccccccccggcggcgtgggcctgggcatcagaaccgtgagactgttcggcgaggccggccccgccagcggcgtgggcagcagcggcggcggcggcagcggcagcggcaccggcggcggcgacgccgccctggacttcaagctggccgccgccgtgctgagaaccggcggcggcggcggcgccagcggcagcgacgaggacgaggtgagcgaggtggagagcttcatcctggaccaggaggacctggacaaccccgtgctgaagaccaccagcgagatcttcctgagcagcaccgccgagggcgccgacctgagaaccgtggaccccgagacccaggccagactggaggccctgctggaggccgccggcatcggcaagctgagcaccgccgacggcaaggccttcgccgaccccgaggtgctgagaagactgaccagcagcgtgagctgcgccctggacgaggccgccgccgccctgaccagaatgaaggccgagaacagccacaacgccggccaggtggacaccagaagcctggccgaggcctgcagcgacggcgacgtgaacgccgtgagaaagctgctggacgagggcagaagcgtgaacgagcacaccgaggagggcgagagcctgctgtgcctggcctgcagcgccggctactacgagctggcccaggtgctgctggccatgcacgccaacgtggaggacagaggcaacaagggcgacatcacccccctgatggccgccagcagcggcggctacctggacatcgtgaagctgctgctgctgcacgacgccgacgtgaacagccagagcgccaccggcaacaccgccctgacctacgcctgcgccggcggcttcgtggacatcgtgaaggtgctgctgaacgagggcgccaacatcgaggaccacaacgagaacggccacacccccctgatggaggccgccagcgccggccacgtggaggtggccagagtgctgctggaccacggcgccggcatcaacacccacagcaacgagttcaaggagagcgccctgaccctggcctgctacaagggccacctggacatggtgagattcctgctggaggccggcgccgaccaggagcacaagaccgacgagatgcacaccgccctgatggaggcctgcatggacggccacgtggaggtggccagactgctgctggacagcggcgcccaggtgaacatgcccgccgacagcttcgagagccccctgaccctggccgcctgcggcggccacgtggagctggccgccctgctgatcgagagaggcgccaacctggaggaggtgaacgacgagggctacacccccctgatggaggccgccagagagggccacgaggagatggtggccctgctgctggcccagggcgccaacatcaacgcccagaccgaggagacccaggagaccgccctgaccctggcctgctgcggcggcttcagcgaggtggccgacttcctgatcaaggccggcgccgacatcgagctgggctgcagcacccccctgatggaggccagccaggagggccacctggagctggtgaagtacctgctggccagcggcgccaacgtgcacgccaccaccgccaccggcgacaccgccctgacctacgcctgcgagaacggccacaccgacgtggccgacgtgctgctgcaggccggcgccgacctggagcacgagagcgagggcggcagaacccccctgatgaaggccgccagagccggccacctgtgcaccgtgcagttcctgatcagcaagggcgccaacgtgaacagagccaccgccaacaacgaccacaccgtggtgagcctggcctgcgccggcggccacctggccgtggtggagctgctgctggcccacggcgccgaccccacccacagactgaaggacggcagcaccatgctgatcgaggccgccaagggcggccacaccaacgtggtgagctacctgctggactaccccaacaacgtgctgagcgtgcccaccaccgacgtgagccagctgcccccccccagccaggaccagagccaggtgcccagagtgcccacccacaccctggccatggtggtgcccccccaggagcccgacagaaccagccaggagaacagccccgccctgctgggcgtgcagaagggcaccagcaagcagaagagcagcagcctgcaggtggccgaccaggacctgctgcccagcttccacccctaccagcccctggagtgcatcgtggaggagaccgagggcaagctgaacgagctgggccagagaatcagcgccatcgagaaggcccagctgaagagcctggagctgatccagggcgagcccctgaacaaggacaagatcgaggagctgaagaagaacagagaggagcaggtgcagaagaagaagaagatcctgaaggagctgcagaaggtggagagacagctgcagatgaagacccagcagcagttcaccaaggagtacctggagaccaagggccagaaggacaccgtgagcctgcaccagcagtgcagccacagaggcgtgttccccgagggcgagggcgacggcagcctgcccgaggaccacttcagcgagctgccccaggtggacaccatcctgttcaaggacaacgacgtggacgacgagcagcagagcccccccagcgccgagcagatcgacttcgtgcccgtgcagcccctgagcagcccccagtgcaacttcagcagcgacctgggcagcaacggcaccaacagcctggagctgcagaaggtgagcggcaaccagcagatcgtgggccagccccagatcgccatcaccggccacgaccagggcctgctggtgcaggagcccgacggcctgatggtggccacccccgcccagaccctgaccgacaccctggacgacctgatcgccgccgtgagcaccagagtgcccaccggcagcaacagcagcagccagaccaccgagtgcctgacccccgagagctgcagccagaccaccagcaacgtggccagccagagcatgccccccgtgtaccccagcgtggacatcgacgcccacaccgagagcaaccacgacaccgccctgaccctggcctgcgccggcggccacgaggagctggtgagcgtgctgatcgccagagacgccaagatcgagcacagagacaagaagggcttcacccccctgatcctggccgccaccgccggccacgtgggcgtggtggagatcctgctggacaagggcggcgacatcgaggcccagagcgagagaaccaaggacacccccctgagcctggcctgcagcggcggcagacaggaggtggtggacctgctgctggccagaggcgccaacaaggagcacagaaacgtgagcgactacacccccctgagcctggccgccagcggcggctacgtgaacatcatcaagatcctgctgaacgccggcgccgagatcaacagcagaaccggcagcaagctgggcatcagccccctgatgctggccgccatgaacggccacgtgcccgccgtgaagctgctgctggacatgggcagcgacatcaacgcccagatcgagaccaacagaaacaccgccctgaccctggcctgcttccagggcagagccgaggtggtgagcctgctgctggacagaaaggccaacgtggagcacagagccaagaccggcctgacccccctgatggaggccgccagcggcggctacgccgaggtgggcagagtgctgctggacaagggcgccgacgtgaacgccccccccgtgcccagcagcagagacaccgccctgaccatcgccgccgacaagggccactacaagttctgcgagctgctgatccacagaggcgcccacatcgacgtgagaaacaagaagggcaacacccccctgtggctggccagcaacggcggccacttcgacgtggtgcagctgctggtgcaggccggcgccgacgtggacgccgccgacaacagaaagatcacccccctgatgagcgccttcagaaagggccacgtgaaggtggtgcagtacctggtgaaggaggtgaaccagttccccagcgacatcgagtgcatgagatacatcgccaccatcaccgacaaggagctgctgaagaagtgccaccagtgcgtggagaccatcgtgaaggccaaggaccagcaggccgccgaggccaacaagaacgccagcatcctgctgaaggagctggacctggagaagagcagagaggagagcagaaagcaggccctggccgccaagagagagaagagaaaggagaagagaaagaagaagaaggaggagcagaagagaaagcaggaggaggacgaggagaacaagcccaaggagaacagcgagctgcccgaggacgaggacgaggaggagaacgacgaggacgtggagcaggaggtgcccatcgagccccccagcgccaccaccaccaccaccatcggcatcagcgccaccagcgccaccttcaccaacgtgttcggcaagaagagagccaacgtggtgaccacccccagcaccaacagaaagaacaagaagaacaagaccaaggagaccccccccaccgcccacctgatcctgcccgagcagcacatgagcctggcccagcagaaggccgacaagaacaagatcaacggcgagcccagaggcggcggcgccggcggcaacagcgacagcgacaacctggacagcaccgactgcaacagcgagagcagcagcggcggcaagagccaggagctgaacttcgtgatggacgtgaacagcagcaagtaccccagcctgctgctgcacagccaggaggagaagaccagcaccgccaccagcaagacccagaccagactggagggcgaggtgacccccaacagcctgagcaccagctacaagaccgtgagcctgcccctgagcagccccaacatcaagctgaacctgaccagccccaagagaggccagaagagagaggagggctggaaggaggtggtgagaagaagcaagaagctgagcgtgcccgccagcgtggtgagcagaatcatgggcagaggcggctgcaacatcaccgccatccaggacgtgaccggcgcccacatcgacgtggacaagcagaaggacaagaacggcgagagaatgatcaccatcagaggcggcaccgagagcaccagatacgccgtgcagctgatcaacgccctgatccaggaccccgccaaggagctggaggacctgatccccaagaaccacatcagaacccccgccagcaccaagagcatccacgccaacttcagcagcggcgtgggcaccaccgccgccagcagcaagaacgccttccccctgggcgcccccaccctggtgaccagccaggccaccaccctgagcaccttccagcccgccaacaagctgaacaagaacgtgcccaccaacgtgagaagcagcttccccgtgagcctgcccctggcctacccccacccccacttcgccctgctggccgcccagaccatgcagcagatcagacaccccagactgcccatggcccagttcggcggcaccttcagccccagccccaacacctggggccccttccccgtgagacccgtgaaccccggcaacaccaacagcagccccaagcacaacaacaccagcagactgcccaaccagaacggcaccgtgctgcccagcgagagcgccggcctggccaccgccagctgccccatcaccgtgagcagcgtggtggccgccagccagcagctgtgcgtgaccaacaccagaacccccagcagcgtgagaaagcagctgttcgcctgcgtgcccaagaccagcccccccgccaccgtgatcagcagcgtgaccagcacctgcagcagcctgcccagcgtgagcagcgcccccatcaccagcggccaggcccccaccaccttcctgcccgccagcaccagccaggcccagctgagcagccagaagatggagagcttcagcgccgtgccccccaccaaggagaaggtgagcacccaggaccagcccatggccaacctgtgcacccccagcagcaccgccaacagctgcagcagcagcgccagcaacacccccggcgcccccgagacccaccccagcagcagccccacccccaccagcagcaacacccaggaggaggcccagcccagcagcgtgagcgacctgagccccatgagcatgcccttcgccagcaacagcgagcccgcccccctgaccctgaccagccccagaatggtggccgccgacaaccaggacaccagcaacctgccccagctggccgtgcccgcccccagagtgagccacagaatgcagcccagaggcagcttctacagcatggtgcccaacgccaccatccaccaggacccccagagcatcttcgtgaccaaccccgtgaccctgacccccccccagggcccccccgccgccgtgcagctgagcagcgccgtgaacatcatgaacggcagccagatgcacatcaaccccgccaacaagagcctgccccccaccttcggccccgccaccctgttcaaccacttcagcagcctgttcgacagcagccaggtgcccgccaaccagggctggggcgacggccccctgagcagcagagtggccaccgacgccagcttcaccgtgcagagcgccttcctgggcaacagcgtgctgggccacctggagaacatgcaccccgacaacagcaaggcccccggcttcagaccccccagccagagagtgagcaccagccccgtgggcctgcccagcatcgaccccagcggcagcagccccagcagcagcagcgcccccctggccagcttcagcggcatccccggcaccagagtgttcctgcagggccccgcccccgtgggcacccccagcttcaacagacagcacttcagcccccacccctggaccagcgccagcaacagcagcaccagcgccccccccaccctgggccagcccaagggcgtgagcgccagccaggacagaaagatccccccccccatcggcaccgagagactggccagaatcagacagggcggcagcgtggcccaggcccccgccggcaccagcttcgtggcccccgtgggccacagcggcatctggagcttcggcgtgaacgccgtgagcgagggcctgagcggctggagccagagcgtgatgggcaaccaccccatgcaccagcagctgagcgaccccagcaccttcagccagcaccagcccatggagagagacgacagcggcatggtggcccccagcaacatcttccaccagcccatggccagcggcttcgtggacttcagcaagggcctgcccatcagcatgtacggcggcaccatcatccccagccacccccagctggccgacgtgcccggcggccccctgttcaacggcctgcacaaccccgaccccgcctggaaccccatgatcaaggtgatccagaacagcaccgagtgcaccgacgcccagcaggccagcctgctgcccagcgtgcccgccctgaagggcgagatccccagcccccagctgaccagacccaagaagagaatcggcagacccatggtggccagccccaaccagagacaccaggaccacctgagacccaaggtgcccgccggcgtgcaggagctgacccactgccccgacacccccctgctgccccccagcgacagcagaggccacaacagcagcaacagccccagcctgcaggccggcggcgccgagggcgccggcgacagaggcagagacaccagatag

SEQ ID NO: 72842 - DNA, 3024 bp, synthetic construct
  misc_feature 1..3024: note = Description of Artificial Sequence: Synthetic coding sequence
  source 1..3024: mol_type = other DNA
atggtggccctgctgctggcccagggcgccaacatcaacgcccagaccgaggagacccaggagaccgccctgaccctggcctgctgcggcggcttcagcgaggtggccgacttcctgatcaaggccggcgccgacatcgagctgggctgcagcacccccctgatggaggccagccaggagggccacctggagctggtgaagtacctgctggccagcggcgccaacgtgcacgccaccaccgccaccggcgacaccgccctgacctacgcctgcgagaacggccacaccgacgtggccgacgtgctgctgcaggccggcgccgacctggacaagcaggaggacatgaagaccatcctggagggcatcgaccccgccaagcaccaggagcacgagagcgagggcggcagaacccccctgatgaaggccgccagagccggccacctgtgcaccgtgcagttcctgatcagcaagggcgccaacgtgaacagagccaccgccaacaacgaccacaccgtggtgagcctggcctgcgccggcggccacctggccgtggtggagctgctgctggcccacggcgccgaccccacccacagactgaaggacggcagcaccatgctgatcgaggccgccaagggcggccacaccaacgtggtgagctacctgctggactaccccaacaacgtgctgagcgtgcccaccaccgacgtgagccagctgcccccccccagccaggaccagagccaggtgcccagagtgcccacccacaccctggccatggtggtgcccccccaggagcccgacagaaccagccaggagaacagccccgccctgctgggcgtgcagaagggcaccagcaagcagaagagcagcagcctgcaggtggccgaccaggacctgctgcccagcttccacccctaccagcccctggagtgcatcgtggaggagaccgagggcaagctgaacgagctgggccagagaatcagcgccatcgagaaggcccagctgaagagcctggagctgatccagggcgagcccctgaacaaggacaagatcgaggagctgaagaagaacagagaggagcaggtgcagaagaagaagaagatcctgaaggagctgcagaaggtggagagacagctgcagatgaagacccagcagcagttcaccaaggagtacctggagaccaagggccagaaggacaccgtgagcctgcaccagcagtgcagccacagaggcgtgttccccgagggcgagggcgacggcagcctgcccgaggaccacttcagcgagctgccccaggtggacaccatcctgttcaaggacaacgacgtggacgacgagcagcagagcccccccagcgccgagcagatcgacttcgtgcccgtgcagcccctgagcagcccccagtgcaacttcagcagcgacctgggcagcaacggcaccaacagcctggagctgcagaaggtgagcggcaaccagcagatcgtgggccagccccagatcgccatcaccggccacgaccagggcctgctggtgcaggagcccgacggcctgatggtggccacccccgcccagaccctgaccgacaccctggacgacctgatcgccgccgtgagcaccagagtgcccaccggcagcaacagcagcagccagaccaccgagtgcctgacccccgagagctgcagccagaccaccagcaacgtggccagccagagcatgccccccgtgtaccccagcgtggacatcgacgcccacaccgagagcaaccacgacaccgccctgaccctggcctgcgccggcggccacgaggagctggtgagcgtgctgatcgccagagacgccaagatcgagcacagagacaagaagggcttcacccccctgatcctggccgccaccgccggccacgtgggcgtggtggagatcctgctggacaagggcggcgacatcgaggcccagagcgagagaaccaaggacacccccctgagcctggcctgcagcggcggcagacaggaggtggtggacctgctgctggccagaggcgccaacaaggagcacagaaacgtgagcgactacacccccctgagcctggccgccagcggcggctacgtgaacatcatcaagatcctgctgaacgccggcgccgagatcaacagcagaaccggcagcaagctgggcatcagccccctgatgctggccgccatgaacggccacgtgcccgccgtgaagctgctgctggacatgggcagcgacatcaacgcccagatcgagaccaacagaaacaccgccctgaccctggcctgcttccagggcagagccgaggtggtgagcctgctgctggacagaaaggccaacgtggagcacagagccaagaccggcctgacccccctgatggaggccgccagcggcggctacgccgaggtgggcagagtgctgctggacaagggcgccgacgtgaacgccccccccgtgcccagcagcagagacaccgccctgaccatcgccgccgacaagggccactacaagttctgcgagctgctgatccacagaggcgcccacatcgacgtgagaaacaagaagggcaacacccccctgtggctggccagcaacggcggccacttcgacgtggtgcagctgctggtgcaggccggcgccgacgtggacgccgccgacaacagaaagatcacccccctgatgagcgccttcagaaagggccacgtgaaggtggtgcagtacctggtgaaggaggtgaaccagttccccagcgacatcgagtgcatgagatacatcgccaccatcaccgacaaggagctgctgaagaagtgccaccagtgcgtggagaccatcgtgaaggccaaggaccagcaggccgccgaggccaacaagaacgccagcatcctgctgaaggagctggacctggagaagagcagagaggagagcagaaagcaggccctggccgccaagagagagaagagaaaggagaagagaaaggagaagagaggcaccgagaaggagaccggcagaagatag

SEQ ID NO: 72843 - DNA, 7629 bp, synthetic construct
  misc_feature 1..7629: note = Description of Artificial Sequence: Synthetic coding sequence
  source 1..7629: mol_type = other DNA
atgctgaccgacagcggcggcggcggcaccagcttcgaggaggacctggacagcgtggcccccagaagcgcccccgccggcgccagcgagccccccccccccggcggcgtgggcctgggcatcagaaccgtgagactgttcggcgaggccggccccgccagcggcgtgggcagcagcggcggcggcggcagcggcagcggcaccggcggcggcgacgccgccctggacttcaagctggccgccgccgtgctgagaaccggcggcggcggcggcgccagcggcagcgacgaggacgaggtgagcgaggtggagagcttcatcctggaccaggaggacctggacaaccccgtgctgaagaccaccagcgagatcttcctgagcagcaccgccgagggcgccgacctgagaaccgtggaccccgagacccaggccagactggaggccctgctggaggccgccggcatcggcaagctgagcaccgccgacggcaaggccttcgccgaccccgaggtgctgagaagactgaccagcagcgtgagctgcgccctggacgaggccgccgccgccctgaccagaatgaaggccgagaacagccacaacgccggccaggtggacaccagaagcctggccgaggcctgcagcgacggcgacgtgaacgccgtgagaaagctgctggacgagggcagaagcgtgaacgagcacaccgaggagggcgagagcctgctgtgcctggcctgcagcgccggctactacgagctggcccaggtgctgctggccatgcacgccaacgtggaggacagaggcaacaagggcgacatcacccccctgatggccgccagcagcggcggctacctggacatcgtgaagctgctgctgctgcacgacgccgacgtgaacagccagagcgccaccggcaacaccgccctgacctacgcctgcgccggcggcttcgtggacatcgtgaaggtgctgctgaacgagggcgccaacatcgaggaccacaacgagaacggccacacccccctgatggaggccgccagcgccggccacgtggaggtggccagagtgctgctggaccacggcgccggcatcaacacccacagcaacgagttcaaggagagcgccctgaccctggcctgctacaagggccacctggacatggtgagattcctgctggaggccggcgccgaccaggagcacaagaccgacgagatgcacaccgccctgatggaggcctgcatggacggccacgtggaggtggccagactgctgctggacagcggcgcccaggtgaacatgcccgccgacagcttcgagagccccctgaccctggccgcctgcggcggccacgtggagctggccgccctgctgatcgagagaggcgccaacctggaggaggtgaacgacgagggctacacccccctgatggaggccgccagagagggccacgaggagatggtggccctgctgctggcccagggcgccaacatcaacgcccagaccgaggagacccaggagaccgccctgaccctggcctgctgcggcggcttcagcgaggtggccgacttcctgatcaaggccggcgccgacatcgagctgggctgcagcacccccctgatggaggccagccaggagggccacctggagctggtgaagtacctgctggccagcggcgccaacgtgcacgccaccaccgccaccggcgacaccgccctgacctacgcctgcgagaacggccacaccgacgtggccgacgtgctgctgcaggccggcgccgacctggagcacgagagcgagggcggcagaacccccctgatgaaggccgccagagccggccacctgtgcaccgtgcagttcctgatcagcaagggcgccaacgtgaacagagccaccgccaacaacgaccacaccgtggtgagcctggcctgcgccggcggccacctggccgtggtggagctgctgctggcccacggcgccgaccccacccacagactgaaggacggcagcaccatgctgatcgaggccgccaagggcggccacaccaacgtggtgagctacctgctggactaccccaacaacgtgctgagcgtgcccaccaccgacgtgagccagctgcccccccccagccaggaccagagccaggtgcccagagtgcccacccacaccctggccatggtggtgcccccccaggagcccgacagaaccagccaggagaacagccccgccctgctgggcgtgcagaagggcaccagcaagcagaagagcagcagcctgcaggtggccgaccaggacctgctgcccagcttccacccctaccagcccctggagtgcatcgtggaggagaccgagggcaagctgaacgagctgggccagagaatcagcgccatcgagaaggcccagctgaagagcctggagctgatccagggcgagcccctgaacaaggacaagatcgaggagctgaagaagaacagagaggagcaggtgcagaagaagaagaagatcctgaaggagctgcagaaggtggagagacagctgcagatgaagacccagcagcagttcaccaaggagtacctggagaccaagggccagaaggacaccgtgagcctgcaccagcagtgcagccacagaggcgtgttccccgagggcgagggcgacggcagcctgcccgaggaccacttcagcgagctgccccaggtggacaccatcctgttcaaggacaacgacgtggacgacgagcagcagagcccccccagcgccgagcagatcgacttcgtgcccgtgcagcccctgagcagcccccagtgcaacttcagcagcgacctgggcagcaacggcaccaacagcctggagctgcagaaggtgagcggcaaccagcagatcgtgggccagccccagatcgccatcaccggccacgaccagggcctgctggtgcaggagcccgacggcctgatggtggccacccccgcccagaccctgaccgacaccctggacgacctgatcgccgccgtgagcaccagagtgcccaccggcagcaacagcagcagccagaccaccgagtgcctgacccccgagagctgcagccagaccaccagcaacgtggccagccagagcatgccccccgtgtaccccagcgtggacatcgacgcccacaccgagagcaaccacgacaccgccctgaccctggcctgcgccggcggccacgaggagctggtgagcgtgctgatcgccagagacgccaagatcgagcacagagacaagaagggcttcacccccctgatcctggccgccaccgccggccacgtgggcgtggtggagatcctgctggacaagggcggcgacatcgaggcccagagcgagagaaccaaggacacccccctgagcctggcctgcagcggcggcagacaggaggtggtggacctgctgctggccagaggcgccaacaaggagcacagaaacgtgagcgactacacccccctgagcctggccgccagcggcggctacgtgaacatcatcaagatcctgctgaacgccggcgccgagatcaacagcagaaccggcagcaagctgggcatcagccccctgatgctggccgccatgaacggccacgtgcccgccgtgaagctgctgctggacatgggcagcgacatcaacgcccagatcgagaccaacagaaacaccgccctgaccctggcctgcttccagggcagagccgaggtggtgagcctgctgctggacagaaaggccaacgtggagcacagagccaagaccggcctgacccccctgatggaggccgccagcggcggctacgccgaggtgggcagagtgctgctggacaagggcgccgacgtgaacgccccccccgtgcccagcagcagagacaccgccctgaccatcgccgccgacaagggccactacaagttctgcgagctgctgatccacagaggcgcccacatcgacgtgagaaacaagaagggcaacacccccctgtggctggccagcaacggcggccacttcgacgtggtgcagctgctggtgcaggccggcgccgacgtggacgccgccgacaacagaaagatcacccccctgatgagcgccttcagaaagggccacgtgaaggtggtgcagtacctggtgaaggaggtgaaccagttccccagcgacatcgagtgcatgagatacatcgccaccatcaccgacaaggagctgctgaagaagtgccaccagtgcgtggagaccatcgtgaaggccaaggaccagcaggccgccgaggccaacaagaacgccagcatcctgctgaaggagctggacctggagaagagcagagaggagagcagaaagcaggccctggccgccaagagagagaagagaaaggagaagagaaagaagaagaaggaggagcagaagagaaagcaggaggaggacgaggagaacaagcccaaggagaacagcgagctgcccgaggacgaggacgaggaggagaacgacgaggacgtggagcaggaggtgcccatcgagccccccagcgccaccaccaccaccaccatcggcatcagcgccaccagcgccaccttcaccaacgtgttcggcaagaagagagccaacgtggtgaccacccccagcaccaacagaaagaacaagaagaacaagaccaaggagaccccccccaccgcccacctgatcctgcccgagcagcacatgagcctggcccagcagaaggccgacaagaacaagatcaacggcgagcccagaggcggcggcgccggcggcaacagcgacagcgacaacctggacagcaccgactgcaacagcgagagcagcagcggcggcaagagccaggagctgaacttcgtgatggacgtgaacagcagcaagtaccccagcctgctgctgcacagccaggaggagaagaccagcaccgccaccagcaagacccagaccagactggagggcgaggtgacccccaacagcctgagcaccagctacaagaccgtgagcctgcccctgagcagccccaacatcaagctgaacctgaccagccccaagagaggccagaagagagaggagggctggaaggaggtggtgagaagaagcaagaagctgagcgtgcccgccagcgtggtgagcagaatcatgggcagaggcggctgcaacatcaccgccatccaggacgtgaccggcgcccacatcgacgtggacaagcagaaggacaagaacggcgagagaatgatcaccatcagaggcggcaccgagagcaccagatacgccgtgcagctgatcaacgccctgatccaggaccccgccaaggagctggaggacctgatccccaagaaccacatcagaacccccgccagcaccaagagcatccacgccaacttcagcagcggcgtgggcaccaccgccgccagcagcaagaacgccttccccctgggcgcccccaccctggtgaccagccaggccaccaccctgagcaccttccagcccgccaacaagctgaacaagaacgtgcccaccaacgtgagaagcagcttccccgtgagcctgcccctggcctacccccacccccacttcgccctgctggccgcccagaccatgcagcagatcagacaccccagactgcccatggcccagttcggcggcaccttcagccccagccccaacacctggggccccttccccgtgagacccgtgaaccccggcaacaccaacagcagccccaagcacaacaacaccagcagactgcccaaccagaacggcaccgtgctgcccagcgagagcgccggcctggccaccgccagctgccccatcaccgtgagcagcgtggtggccgccagccagcagctgtgcgtgaccaacaccagaacccccagcagcgtgagaaagcagctgttcgcctgcgtgcccaagaccagcccccccgccaccgtgatcagcagcgtgaccagcacctgcagcagcctgcccagcgtgagcagcgcccccatcaccagcggccaggcccccaccaccttcctgcccgccagcaccagccaggcccagctgagcagccagaagatggagagcttcagcgccgtgccccccaccaaggagaaggtgagcacccaggaccagcccatggccaacctgtgcacccccagcagcaccgccaacagctgcagcagcagcgccagcaacacccccggcgcccccgagacccaccccagcagcagccccacccccaccagcagcaacacccaggaggaggcccagcccagcagcgtgagcgacctgagccccatgagcatgcccttcgccagcaacagcgagcccgcccccctgaccctgaccagccccagaatggtggccgccgacaaccaggacaccagcaacctgccccagctggccgtgcccgcccccagagtgagccacagaatgcagcccagaggcagcttctacagcatggtgcccaacgccaccatccaccaggacccccagagcatcttcgtgaccaaccccgtgaccctgacccccccccagggcccccccgccgccgtgcagctgagcagcgccgtgaacatcatgaacggcagccagatgcacatcaaccccgccaacaagagcctgccccccaccttcggccccgccaccctgttcaaccacttcagcagcctgttcgacagcagccaggtgcccgccaaccagggctggggcgacggccccctgagcagcagagtggccaccgacgccagcttcaccgtgcagagcgccttcctgggcaacagcgtgctgggccacctggagaacatgcaccccgacaacagcaaggcccccggcttcagaccccccagccagagagtgagcaccagccccgtgggcctgcccagcatcgaccccagcggcagcagccccagcagcagcagcgcccccctggccagcttcagcggcatccccggcaccagagtgttcctgcagggccccgcccccgtgggcacccccagcttcaacagacagcacttcagcccccacccctggaccagcgccagcaacagcagcaccagcgccccccccaccctgggccagcccaagggcgtgagcgccagccaggacagaaagatccccccccccatcggcaccgagagactggccagaatcagacagggcggcagcgtggcccaggcccccgccggcaccagcttcgtggcccccgtgggccacagcggcatctggagcttcggcgtgaacgccgtgagcgagggcctgagcggctggagccagagcgtgatgggcaaccaccccatgcaccagcagctgagcgaccccagcaccttcagccagcaccagcccatggagagagacgacagcggcatggtggcccccagcaacatcttccaccagcccatggccagcggcttcgtggacttcagcaagggcctgcccatcagcatgtacggcggcaccatcatccccagccacccccagctggccgacgtgcccggcggccccctgttcaacggcctgcacaaccccgaccccgcctggaaccccatgatcaaggtgatccagaacagcaccgagtgcaccgacgcccagcagatctggcccggcacctgggccccccacatcggcaacatgcacctgaagtacgtgaactag

SEQ ID NO: 72844 - DNA, 1851 bp, synthetic construct
  misc_feature 1..1851: note = Description of Artificial Sequence: Synthetic coding sequence
  source 1..1851: mol_type = other DNA
atgctgaccgacagcggcggcggcggcaccagcttcgaggaggacctggacagcgtggcccccagaagcgcccccgccggcgccagcgagccccccccccccggcggcgtgggcctgggcatcagaaccgtgagactgttcggcgaggccggccccgccagcggcgtgggcagcagcggcggcggcggcagcggcagcggcaccggcggcggcgacgccgccctggacttcaagctggccgccgccgtgctgagaaccggcggcggcggcggcgccagcggcagcgacgaggacgaggtgagcgaggtggagagcttcatcctggaccaggaggacctggacaaccccgtgctgaagaccaccagcgagatcttcctgagcagcaccgccgagggcgccgacctgagaaccgtggaccccgagacccaggccagactggaggccctgctggaggccgccgccttcgccgaccccgaggtgctgagaagactgaccagcagcgtgagctgcgccctggacgaggccgccgccgccctgaccagaatgaaggccgagaacagccacaacgccggccaggtggacaccagaagcctggccgaggcctgcagcgacggcgacgtgaacgccgtgagaaagctgctggacgagggcagaagcgtgaacgagcacaccgaggagggcgagagcctgctgtgcctggcctgcagcgccggctactacgagctggcccaggtgctgctggccatgcacgccaacgtggaggacagaggcaacaagggcgacatcacccccctgatggccgccagcagcggcggctacctggacatcgtgaagctgctgctgctgcacgacgccgacgtgaacagccagagcgccaccggcaacaccgccctgacctacgcctgcgccggcggcttcgtggacatcgtgaaggtgctgctgaacgagggcgccaacatcgaggaccacaacgagaacggccacacccccctgatggaggccgccagcgccggccacgtggaggtggccagagtgctgctggaccacggcgccggcatcaacacccacagcaacgagttcaaggagagcgccctgaccctggcctgctacaagggccacctggacatggtgagattcctgctggaggccggcgccgaccaggagcacaagaccgacgagatgcacaccgccctgatggaggcctgcatggacggccacgtggaggtggccagactgctgctggacagcggcgcccaggtgaacatgcccgccgacagcttcgagagccccctgaccctggccgcctgcggcggccacgtggagctggccgccctgctgatcgagagaggcgccaacctggaggaggtgaacgacgagggctacacccccctgatggaggccgccagagagggccacgaggagatggtggccctgctgctggcccagggcgccaacatcaacgcccagaccgaggagacccaggagaccgccctgaccctggcctgctgcggcggcttcagcgaggtggccgacttcctgatcaaggccggcgccgacatcgagctgggctgcagcacccccctgatggaggccagccaggagggccacctggagctggtgaagtacctgctggccagcggcgccaacgtgcacgccaccaccgccaccggcgacaccgccctgacctacgcctgcgagaacggccacaccgacgtggccgacgtgctgctgcaggccggcgccgacctggacaagcaggaggacatgaagaccatcctggagggcatcgaccccgccaagcaccaggtgagagtggccttcgacgcctgcaagctgctgagaaaggagtag

SEQ ID NO: 72845 - DNA, 1884 bp, synthetic construct
  misc_feature 1..1884: note = Description of Artificial Sequence: Synthetic coding sequence
  source 1..1884: mol_type = other DNA
atgctgaccgacagcggcggcggcggcaccagcttcgaggaggacctggacagcgtggcccccagaagcgcccccgccggcgccagcgagccccccccccccggcggcgtgggcctgggcatcagaaccgtgagactgttcggcgaggccggccccgccagcggcgtgggcagcagcggcggcggcggcagcggcagcggcaccggcggcggcgacgccgccctggacttcaagctggccgccgccgtgctgagaaccggcggcggcggcggcgccagcggcagcgacgaggacgaggtgagcgaggtggagagcttcatcctggaccaggaggacctggacaaccccgtgctgaagaccaccagcgagatcttcctgagcagcaccgccgagggcgccgacctgagaaccgtggaccccgagacccaggccagactggaggccctgctggaggccgccggcatcggcaagctgagcaccgccgacggcaaggccttcgccgaccccgaggtgctgagaagactgaccagcagcgtgagctgcgccctggacgaggccgccgccgccctgaccagaatgaaggccgagaacagccacaacgccggccaggtggacaccagaagcctggccgaggcctgcagcgacggcgacgtgaacgccgtgagaaagctgctggacgagggcagaagcgtgaacgagcacaccgaggagggcgagagcctgctgtgcctggcctgcagcgccggctactacgagctggcccaggtgctgctggccatgcacgccaacgtggaggacagaggcaacaagggcgacatcacccccctgatggccgccagcagcggcggctacctggacatcgtgaagctgctgctgctgcacgacgccgacgtgaacagccagagcgccaccggcaacaccgccctgacctacgcctgcgccggcggcttcgtggacatcgtgaaggtgctgctgaacgagggcgccaacatcgaggaccacaacgagaacggccacacccccctgatggaggccgccagcgccggccacgtggaggtggccagagtgctgctggaccacggcgccggcatcaacacccacagcaacgagttcaaggagagcgccctgaccctggcctgctacaagggccacctggacatggtgagattcctgctggaggccggcgccgaccaggagcacaagaccgacgagatgcacaccgccctgatggaggcctgcatggacggccacgtggaggtggccagactgctgctggacagcggcgcccaggtgaacatgcccgccgacagcttcgagagccccctgaccctggccgcctgcggcggccacgtggagctggccgccctgctgatcgagagaggcgccaacctggaggaggtgaacgacgagggctacacccccctgatggaggccgccagagagggccacgaggagatggtggccctgctgctggcccagggcgccaacatcaacgcccagaccgaggagacccaggagaccgccctgaccctggcctgctgcggcggcttcagcgaggtggccgacttcctgatcaaggccggcgccgacatcgagctgggctgcagcacccccctgatggaggccagccaggagggccacctggagctggtgaagtacctgctggccagcggcgccaacgtgcacgccaccaccgccaccggcgacaccgccctgacctacgcctgcgagaacggccacaccgacgtggccgacgtgctgctgcaggccggcgccgacctggacaagcaggaggacatgaagaccatcctggagggcatcgaccccgccaagcaccaggtgagagtggccttcgacgcctgcaagctgctgagaaaggagtag

SEQ ID NO: 72846 - DNA, 4461 bp, synthetic construct
  misc_feature 1..4461: note = Description of Artificial Sequence: Synthetic coding sequence
  source 1..4461: mol_type = other DNA
cccagagtgggcagacacagactgagactgagagtgagaaccatgctgaccgacagcggcggcggcggcaccagcttcgaggaggacctggacagcgtggcccccagaagcgcccccgccggcgccagcgagccccccccccccggcggcgtgggcctgggcatcagaaccgtgagactgttcggcgaggccggccccgccagcggcgtgggcagcagcggcggcggcggcagcggcagcggcaccggcggcggcgacgccgccctggacttcaagctggccgccgccgtgctgagaaccggcggcggcggcggcgccagcggcagcgacgaggacgaggtgagcgaggtggagagcttcatcctggaccaggaggacctggacaaccccgtgctgaagaccaccagcgagatcttcctgagcagcaccgccgagggcgccgacctgagaaccgtggaccccgagacccaggccagactggaggccctgctggaggccgccggcatcggcaagctgagcaccgccgacggcaaggccttcgccgaccccgaggtgctgagaagactgaccagcagcgtgagctgcgccctggacgaggccgccgccgccctgaccagaatgaaggccgagaacagccacaacgccggccaggtggacaccagaagcctggccgaggcctgcagcgacggcgacgtgaacgccgtgagaaagctgctggacgagggcagaagcgtgaacgagcacaccgaggagggcgagagcctgctgtgcctggcctgcagcgccggctactacgagctggcccaggtgctgctggccatgcacgccaacgtggaggacagaggcaacaagggcgacatcacccccctgatggccgccagcagcggcggctacctggacatcgtgaagctgctgctgctgcacgacgccgacgtgaacagccagagcgccaccggcaacaccgccctgacctacgcctgcgccggcggcttcgtggacatcgtgaaggtgctgctgaacgagggcgccaacatcgaggaccacaacgagaacggccacacccccctgatggaggccgccagcgccggccacgtggaggtggccagagtgctgctggaccacggcgccggcatcaacacccacagcaacgagttcaaggagagcgccctgaccctggcctgctacaagggccacctggacatggtgagattcctgctggaggccggcgccgaccaggagcacaagaccgacgagatgcacaccgccctgatggaggcctgcatggacggccacgtggaggtggccagactgctgctggacagcggcgcccaggtgaacatgcccgccgacagcttcgagagccccctgaccctggccgcctgcggcggccacgtggagctggccgccctgctgatcgagagaggcgccaacctggaggaggtgaacgacgagggctacacccccctgatggaggccgccagagagggccacgaggagatggtggccctgctgctggcccagggcgccaacatcaacgcccagaccgaggagacccaggagaccgccctgaccctggcctgctgcggcggcttcagcgaggtggccgacttcctgatcaaggccggcgccgacatcgagctgggctgcagcacccccctgatggaggccagccaggagggccacctggagctggtgaagtacctgctggccagcggcgccaacgtgcacgccaccaccgccaccggcgacaccgccctgacctacgcctgcgagaacggccacaccgacgtggccgacgtgctgctgcaggccggcgccgacctggacaagcaggaggacatgaagaccatcctggagggcatcgaccccgccaagcaccaggagcacgagagcgagggcggcagaacccccctgatgaaggccgccagagccggccacctgtgcaccgtgcagttcctgatcagcaagggcgccaacgtgaacagagccaccgccaacaacgaccacaccgtggtgagcctggcctgcgccggcggccacctggccgtggtggagctgctgctggcccacggcgccgaccccacccacagactgaaggacggcagcaccatgctgatcgaggccgccaagggcggccacaccaacgtggtgagctacctgctggactaccccaacaacgtgctgagcgtgcccaccaccgacgtgagccagctgcccccccccagccaggaccagagccaggtgcccagagtgcccacccacaccctggccatggtggtgcccccccaggagcccgacagaaccagccaggagaacagccccgccctgctgggcgtgcagaagggcaccagcaagcagaagagcagcagcctgcaggtggccgaccaggacctgctgcccagcttccacccctaccagcccctggagtgcatcgtggaggagaccgagggcaagctgaacgagctgggccagagaatcagcgccatcgagaaggcccagctgaagagcctggagctgatccagggcgagcccctgaacaaggacaagatcgaggagctgaagaagaacagagaggagcaggtgcagaagaagaagaagatcctgaaggagctgcagaaggtggagagacagctgcagatgaagacccagcagcagttcaccaaggagtacctggagaccaagggccagaaggacaccgtgagcctgcaccagcagtgcagccacagaggcgtgttccccgagggcgagggcgacggcagcctgcccgaggaccacttcagcgagctgccccaggtggacaccatcctgttcaaggacaacgacgtggacgacgagcagcagagcccccccagcgccgagcagatcgacttcgtgcccgtgcagcccctgagcagcccccagtgcaacttcagcagcgacctgggcagcaacggcaccaacagcctggagctgcagaaggtgagcggcaaccagcagatcgtgggccagccccagatcgccatcaccggccacgaccagggcctgctggtgcaggagcccgacggcctgatggtggccacccccgcccagaccctgaccgacaccctggacgacctgatcgccgccgtgagcaccagagtgcccaccggcagcaacagcagcagccagaccaccgagtgcctgacccccgagagctgcagccagaccaccagcaacgtggccagccagagcatgccccccgtgtaccccagcgtggacatcgacgcccacaccgagagcaaccacgacaccgccctgaccctggcctgcgccggcggccacgaggagctggtgagcgtgctgatcgccagagacgccaagatcgagcacagagacaagaagggcttcacccccctgatcctggccgccaccgccggccacgtgggcgtggtggagatcctgctggacaagggcggcgacatcgaggcccagagcgagagaaccaaggacacccccctgagcctggcctgcagcggcggcagacaggaggtggtggacctgctgctggccagaggcgccaacaaggagcacagaaacgtgagcgactacacccccctgagcctggccgccagcggcggctacgtgaacatcatcaagatcctgctgaacgccggcgccgagatcaacagcagaaccggcagcaagctgggcatcagccccctgatgctggccgccatgaacggccacgtgcccgccgtgaagctgctgctggacatgggcagcgacatcaacgcccagatcgagaccaacagaaacaccgccctgaccctggcctgcttccagggcagagccgaggtggtgagcctgctgctggacagaaaggccaacgtggagcacagagccaagaccggcctgacccccctgatggaggccgccagcggcggctacgccgaggtgggcagagtgctgctggacaagggcgccgacgtgaacgccccccccgtgcccagcagcagagacaccgccctgaccatcgccgccgacaagggccactacaagttctgcgagctgctgatccacagaggcgcccacatcgacgtgagaaacaagaagggcaacacccccctgtggctggccagcaacggcggccacttcgacgtggtgcagctgctggtgcaggccggcgccgacgtggacgccgccgacaacagaaagatcacccccctgatgagcgccttcagaaagggccacgtgaaggtggtgcagtacctggtgaaggaggtgaaccagttccccagcgacatcgagtgcatgagatacatcgccaccatcaccgacaaggagctgctgaagaagtgccaccagtgcgtggagaccatcgtgaaggccaaggaccagcaggccgccgaggccaacaagaacgccagcatcctgctgaaggagctggacctggagaagagcagagaggagagcagaaagcaggccctggccgccaagagatag

SEQ ID NO: 72847 - DNA, 1863 bp, synthetic construct
  misc_feature 1..1863: note = Description of Artificial Sequence: Synthetic coding sequence
  source 1..1863: mol_type = other DNA
atgagcctggcccagcagaaggccgacaagaacaagatcaacggcgagcccagaggcggcggcgccggcggcaacagcgacagcgacaacctggacagcaccgactgcaacagcgagagcagcagcggcggcaagagccaggagctgaacttcgtgatggacgtgaacagcagcaagtaccccagcctgctgctgcacagccaggaggagaagaccagcaccgccaccagcaagacccagaccagactggagggcgaggtgacccccaacagcctgagcaccagctacaagaccgtgagcctgcccctgagcagccccaacatcaagctgaacctgaccagccccaagagaggccagaagagagaggagggctggaaggaggtggtgagaagaagcaagaagctgagcgtgcccgccagcgtggtgagcagaatcatgggcagaggcggctgcaacatcaccgccatccaggacgtgaccggcgcccacatcgacgtggacaagcagaaggacaagaacggcgagagaatgatcaccatcagaggcggcaccgagagcaccagatacgccgtgcagctgatcaacgccctgatccaggaccccgccaaggagctggaggacctgatccccaagaaccacatcagaacccccgccagcaccaagagcatccacgccaacttcagcagcggcgtgggcaccaccgccgccagcagcaagaacgccttccccctgggcgcccccaccctggtgaccagccaggccaccaccctgagcaccttccagcccgccaacaagctgaacaagaacgtgcccaccaacgtgagaagcagcttccccgtgagcctgcccctggcctacccccacccccacttcgccctgctggccgcccagaccatgcagcagatcagacaccccagactgcccatggcccagttcggcggcaccttcagccccagccccaacacctggggccccttccccgtgagacccgtgaaccccggcaacaccaacagcagccccaagcacaacaacaccagcagactgcccaaccagaacggcaccgtgctgcccagcgagagcgccggcctggccaccgccagctgccccatcaccgtgagcagcgtggtggccgccagccagcagctgtgcgtgaccaacaccagaacccccagcagcgtgagaaagcagctgttcgcctgcgtgcccaagaccagcccccccgccaccgtgatcagcagcgtgaccagcacctgcagcagcctgcccagcgtgagcagcgcccccatcaccagcggccaggcccccaccaccttcctgcccgccagcaccagccaggcccagctgagcagccagaagatggagagcttcagcgccgtgccccccaccaaggagaaggtgagcacccaggaccagcccatggccaacctgtgcacccccagcagcaccgccaacagctgcagcagcagcgccagcaacacccccggcgcccccgagacccaccccagcagcagccccacccccaccagcagcaacacccaggaggaggcccagcccagcagcgtgagcgacctgagccccatgagcatgcccttcgccagcaacagcgagcccgcccccctgaccctgaccagccccagaatggtggccgccgacaaccaggacaccagcaacctgccccagctggccgtgcccgcccccagagtgagccacagaatgcagcccagaggcagcttctacagcatggtgcccaacgccaccatccaccaggacccccagagcatcttcgtgaccaaccccgtgaccctgtgggaggccgaggccagcggcctgcacgaggtgagaagcctgagacaggcctggtag

SEQ ID NO: 72848 - DNA, 2601 bp, synthetic construct
  misc_feature 1..2601: note = Description of Artificial Sequence: Synthetic coding sequence
  source 1..2601: mol_type = other DNA
atggacgtgaacagcagcaagtaccccagcctgctgctgcacagccaggaggagaagaccagcaccgccaccagcaagacccagaccagactggagggcgaggtgacccccaacagcctgagcaccagctacaagaccgtgagcctgcccctgagcagccccaacatcaagctgaacctgaccagccccaagagaggccagaagagagaggagggctggaaggaggtggtgagaagaagcaagaagctgagcgtgcccgccagcgtggtgagcagaatcatgggcagaggcggctgcaacatcaccgccatccaggacgtgaccggcgcccacatcgacgtggacaagcagaaggacaagaacggcgagagaatgatcaccatcagaggcggcaccgagagcaccagatacgccgtgcagctgatcaacgccctgatccaggaccccgccaaggagctggaggacctgatccccaagaaccacatcagaacccccgccagcaccaagagcatccacgccaacttcagcagcggcgtgggcaccaccgccgccagcagcaagaacgccttccccctgggcgcccccaccctggtgaccagccaggccaccaccctgagcaccttccagcccgccaacaagctgaacaagaacgtgcccaccaacgtgagaagcagcttccccgtgagcctgcccctggcctacccccacccccacttcgccctgctggccgcccagaccatgcagcagatcagacaccccagactgcccatggcccagttcggcggcaccttcagccccagccccaacacctggggccccttccccgtgagacccgtgaaccccggcaacaccaacagcagccccaagcacaacaacaccagcagactgcccaaccagaacggcaccgtgctgcccagcgagagcgccggcctggccaccgccagctgccccatcaccgtgagcagcgtggtggccgccagccagcagctgtgcgtgaccaacaccagaacccccagcagcgtgagaaagcagctgttcgcctgcgtgcccaagaccagcccccccgccaccgtgatcagcagcgtgaccagcacctgcagcagcctgcccagcgtgagcagcgcccccatcaccagcggccaggcccccaccaccttcctgcccgccagcaccagccaggcccagctgagcagccagaagatggagagcttcagcgccgtgccccccaccaaggagaaggtgagcacccaggaccagcccatggccaacctgtgcacccccagcagcaccgccaacagctgcagcagcagcgccagcaacacccccggcgcccccgagacccaccccagcagcagccccacccccaccagcagcaacacccaggaggaggcccagcccagcagcgtgagcgacctgagccccatgagcatgcccttcgccagcaacagcgagcccgcccccctgaccctgaccagccccagaatggtggccgccgacaaccaggacaccagcaacctgccccagctggccgtgcccgcccccagagtgagccacagaatgcagcccagaggcagcttctacagcatggtgcccaacgccaccatccaccaggacccccagagcatcttcgtgaccaaccccgtgaccctgacccccccccagggcccccccgccgccgtgcagctgagcagcgccgtgaacatcatgaacggcagccagatgcacatcaaccccgccaacaagagcctgccccccaccttcggccccgccaccctgttcaaccacttcagcagcctgttcgacagcagccaggtgcccgccaaccagggctggggcgacggccccctgagcagcagagtggccaccgacgccagcttcaccgtgcagagcgccttcctgggcaacagcgtgctgggccacctggagaacatgcaccccgacaacagcaaggcccccggcttcagaccccccagccagagagtgagcaccagccccgtggccaccagcgccccccccaccctgggccagcccaagggcgtgagcgccagccaggacagaaagatccccccccccatcggcaccgagagactggccagaatcagacagggcggcagcgtggcccaggcccccgccggcaccagcttcgtggcccccgtgggccacagcggcatctggagcttcggcgtgaacgccgtgagcgagggcctgagcggctggagccagagcgtgatgggcaaccaccccatgcaccagcagctgagcgaccccagcaccttcagccagcaccagcccatggagagagacgacagcggcatggtggcccccagcaacatcttccaccagcccatggccagcggcttcgtggacttcagcaagggcctgcccatcagcatgtacggcggcaccatcatccccagccacccccagctggccgacgtgcccggcggccccctgttcaacggcctgcacaaccccgaccccgcctggaaccccatgatcaaggtgatccagaacagcaccgagtgcaccgacgcccagcagatctggcccggcacctgggccccccacatcggcaacatgcacctgaagtacgtgaactag

SEQ ID NO: 72849 - DNA, 2298 bp, synthetic construct
  misc_feature 1..2298: note = Description of Artificial Sequence: Synthetic coding sequence
  source 1..2298: mol_type = other DNA
atggccgccgaccccaccgagctgagactgggcagcctgcccgtgttcaccagagacgacttcgagggcgactggagactggtggccagcggcggcttcagccaggtgttccaggccagacacagaagatggagaaccgagtacgccatcaagtgcgccccctgcctgccccccgacgccgccagcagcgacgtgaactacctgatcgaggaggccgccaagatgaagaagatcaagttccagcacatcgtgagcatctacggcgtgtgcaagcagcccctgggcatcgtgatggagttcatggccaacggcagcctggagaaggtgctgagcacccacagcctgtgctggaagctgagattcagaatcatccacgagaccagcctggccatgaacttcctgcacagcatcaagccccccctgctgcacctggacctgaagcccggcaacatcctgctggacagcaacatgcacgtgaagatcagcgacttcggcctgagcaagtggatggagcagagcaccagaatgcagtacatcgagagaagcgccctgagaggcatgctgagctacatcccccccgagatgttcctggagagcaacaaggcccccggccccaagtacgacgtgtacagcttcgccatcgtgatctgggagctgctgacccagaagaagccctacagcggcttcaacatgatgatgatcatcatcagagtggccgccggcatgagacccagcctgcagcccgtgagcgaccagtggcccagcgaggcccagcagatggtggacctgatgaagagatgctgggaccaggaccccaagaagagaccctgcttcctggacatcaccatcgagaccgacatcctgctgagcctgctgcagagcagagtggccgtgcccgagagcaaggccctggccagaaaggtgagctgcaagctgagcctgagacagcccggcgaggtgaacgaggacatcagccaggagctgatggacagcgacagcggcaactacctgaagagagccctgcagctgagcgacagaaagaacctggtgcccagagacgaggagctgtgcatctacgagaacaaggtgacccccctgcacttcctggtggcccagggcagcgtggagcaggtgagactgctgctggcccacgaggtggacgtggactgccagaccgccagcggctacacccccctgctgatcgccgcccaggaccagcagcccgacctgtgcgccctgctgctggcccacggcgccgacgccaacagagtggacgaggacggctgggcccccctgcacttcgccgcccagaacggcgacgacggcaccgccagactgctgctggaccacggcgcctgcgtggacgcccaggagagagagggctggacccccctgcacctggccgcccagaacaacttcgagaacgtggccagactgctggtgagcagacaggccgaccccaacctgcacgaggccgagggcaagacccccctgcacgtggccgcctacttcggccacgtgagcctggtgaagctgctgaccagccagggcgccgagctggacgcccagcagagaaacctgagaacccccctgcacctggccgtggagagaggcaaggtgagagccatccagcacctgctgaagagcggcgccgtgcccgacgccctggaccagagcggctacggccccctgcacaccgccgccgccagaggcaagtacctgatctgcaagatgctgctgagatacggcgccagcctggagctgcccacccaccagggctggacccccctgcacctggccgcctacaagggccacctggagatcatccacctgctggccgagagccacgccaacatgggcgccctgggcgccgtgaactggacccccctgcacctggccgccagacacggcgaggaggccgtggtgagcgccctgctgcagtgcggcgccgaccccaacgccgccgagcagagcggctggacccccctgcacctggccgtgcagagaagcaccttcctgagcgtgatcaacctgctggagcaccacgccaacgtgcacgccagaaacaaggtgggctggacccccgcccacctggccgccctgaagggcaacaccgccatcctgaaggtgctggtggaggccggcgcccagctggacgtgcaggacggcgtgagctgcacccccctgcagctggccctgagaagcagaaagcagggcatcatgagcttcctggagggcaaggagcccagcgtggccaccctgggcggcagcaagcccggcgccgagatggagatctag

SEQ ID NO: 72850 - DNA, 1008 bp, synthetic construct
  misc_feature 1..1008: note = Description of Artificial Sequence: Synthetic coding sequence
  source 1..1008: mol_type = other DNA
atggccgagggcggcagccccgacggcagagccggccccggcagcgccggcagaaacctgaaggagtggctgagagagcagttctgcgaccaccccctggagcactgcgaggacaccagactgcacgacgccgcctacgtgggcgacctgcagaccctgagaagcctgctgcaggaggagagctacagaagcagaatcaacgagaagagcgtgtggtgctgcggctggctgccctgcacccccctgagaatcgccgccaccgccggccacggcagctgcgtggacttcctgatcagaaagggcgccgaggtggacctggtggacgtgaagggccagaccgccctgtacgtggccgtggtgaacggccacctggagagcacccagatcctgctggaggccggcgccgaccccaacggcagcagacaccacagaagcacccccgtgtaccacgccagcagagtgggcagagccgacatcctgaaggccctgatcagatacggcgccgacgtggacgtgaaccaccacctgacccccgacgtgcagcccagattcagcagaagactgaccagcctggtggtgtgccccctgtacatcagcgccgcctaccacaacctgcagtgcttcagactgctgctgctggccggcgccaaccccgacttcaactgcaacggccccgtgaacacccagggcttctacagaggcagccccggctgcgtgatggacgccgtgctgagacacggctgcgaggccgccttcgtgagcctgctggtggagttcggcgccaacctgaacctggtgaagtgggagagcctgggccccgagagcagaggcagaagaaaggtggaccccgaggccctgcaggtgttcaaggaggccagaagcgtgcccagaaccctgctgtgcctgtgcagagtggccgtgagaagagccctgggcaagcacagactgcacctgatccccagcctgcccctgcccgaccccatcaagaagttcctgctgcacgagtag

SEQ ID NO: 72851 - DNA, 909 bp, synthetic construct
  misc_feature 1..909: note = Description of Artificial Sequence: Synthetic coding sequence
  source 1..909: mol_type = other DNA
atgctgcagctgaccggcgagaacgagaagaactgcgaggtgagcgagagaatcagaagaagcggcccctggaaggagatcagcttcggcgactacatctgccacaccttccagggcgactgctgggccgacagaagccccctgcacgaggccgccgcccagggcagactgctggccctgaagaccctgatcgcccagggcgtgaacgtgaacctggtgaccatcaacagagtgagcagcctgcacgaggcctgcctgggcggccacgtggcctgcgccaaggccctgctggagaacggcgcccacgtgaacggcgtgaccgtgcacggcgccacccccctgttcaacgcctgctgcagcggcagcgccgcctgcgtgaacgtgctgctggagttcggcgccaaggcccagctggaggtgcacctggccagccccatccacgaggccgtgaagagaggccacagagagtgcatggagatcctgctggccaacaacgtgaacatcgaccacgaggtgccccagctgggcacccccctgtacgtggcctgcacctaccagagagtggactgcgtgaagaagctgctggagctgggcgccagcgtggaccacggccagtggctggacacccccctgcacgccgccgccagacagagcaacgtggaggtgatccacctgctgaccgactacggcgccaacctgaagagaagaaacgcccagggcaagagcgccctggacctggccgcccccaagagcagcgtggagcaggccctgctgctgagagagggcccccccgccctgagccagctgtgcagactgtgcgtgagaaagtgcctgggcagagcctgccaccaggccatccacaagctgcacctgcccgagcccctggagagattcctgctgtaccagtag

SEQ ID NO: 72852 - DNA, 972 bp, synthetic construct
  misc_feature 1..972: note = Description of Artificial Sequence: Synthetic coding sequence
  source 1..972: mol_type = other DNA
atggaggacggccccgtgttctacggcttcaagaacatcttcatcaccatgttcgccaccttcttcttcttcaagctgctgatcaaggtgttcctggccctgctgacccacttctacatcgtgaagggcaacagaaaggaggccgccagaatcgccgaggagatctacggcggcatcagcgactgctgggccgacagaagccccctgcacgaggccgccgcccagggcagactgctggccctgaagaccctgatcgcccagggcgtgaacgtgaacctggtgaccatcaacagagtgagcagcctgcacgaggcctgcctgggcggccacgtggcctgcgccaaggccctgctggagaacggcgcccacgtgaacggcgtgaccgtgcacggcgccacccccctgttcaacgcctgctgcagcggcagcgccgcctgcgtgaacgtgctgctggagttcggcgccaaggcccagctggaggtgcacctggccagccccatccacgaggccgtgaagagaggccacagagagtgcatggagatcctgctggccaacaacgtgaacatcgaccacgaggtgccccagctgggcacccccctgtacgtggcctgcacctaccagagagtggactgcgtgaagaagctgctggagctgggcgccagcgtggaccacggccagtggctggacacccccctgcacgccgccgccagacagagcaacgtggaggtgatccacctgctgaccgactacggcgccaacctgaagagaagaaacgcccagggcaagagcgccctggacctggccgcccccaagagcagcgtggagcaggccctgctgctgagagagggcccccccgccctgagccagctgtgcagactgtgcgtgagaaagtgcctgggcagagcctgccaccaggccatccacaagctgcacctgcccgagcccctggagagattcctgctgtaccagtag

SEQ ID NO: 72853 - DNA, 909 bp, synthetic construct; identical to SEQ ID NO: 72851
  misc_feature 1..909: note = Description of Artificial Sequence: Synthetic coding sequence
  source 1..909: mol_type = other DNA

SEQ ID NO: 72854 - DNA, 921 bp, synthetic construct
  misc_feature 1..921: note = Description of Artificial Sequence: Synthetic coding sequence
  source 1..921: mol_type = other DNA
atggaggacggccccgtgttctacggcttcaagaacatcttcatcaccatgttcgccaccttcttcttcttcaagctgctgatcaaggtgttcctggccctgctgacccacttctacatcgtgaagggcaacagaaaggaggccgccagaatcgccgaggagatctacggcggcatcagcgactgctgggccgacagaagccccctgcacgaggccgccgcccagggcagactgctggccctgaagaccctgatcgcccaggcctgcctgggcggccacgtggcctgcgccaaggccctgctggagaacggcgcccacgtgaacggcgtgaccgtgcacggcgccacccccctgttcaacgcctgctgcagcggcagcgccgcctgcgtgaacgtgctgctggagttcggcgccaaggcccagctggaggtgcacctggccagccccatccacgaggccgtgaagagaggccacagagagtgcatggagatcctgctggccaacaacgtgaacatcgaccacgaggtgccccagctgggcacccccctgtacgtggcctgcacctaccagagagtggactgcgtgaagaagctgctggagctgggcgccagcgtggaccacggccagtggctggacacccccctgcacgccgccgccagacagagcaacgtggaggtgatccacctgctgaccgactacggcgccaacctgaagagaagaaacgcccagggcaagagcgccctggacctggccgcccccaagagcagcgtggagcaggccctgctgctgagagagggcccccccgccctgagccagctgtgcagactgtgcgtgagaaagtgcctgggcagagcctgccaccaggccatccacaagctgcacctgcccgagcccctggagagattcctgctgtaccagtag

SEQ ID NO: 72855 - DNA, 1764 bp, synthetic construct
  misc_feature 1..1764: note = Description of Artificial Sequence: Synthetic coding sequence
  source 1..1764: mol_type = other DNA
atgaccagattcagctacgccgagtacttcagcctgttccacagctgcagcgcccccagcagaagcaccgccccccccgagagcagccccgccagagcccccatgggcctgttccagggcgtgatgcagaagtacagcagcagcctgttcaagaccagccagctggcccccgccgaccccctgatcaaggccatcaaggacggcgacgaggaggccctgaagaccatgatcaaggagggcaagaacctggccgagcccaacaaggagggctggctgcccctgcacgaggccgcctactacggccaggtgggctgcctgaaggtgctgcagagagcctaccccggcaccatcgaccagagaaccctgcaggaggagaccgccgtgtacctggccacctgcagaggccacctggactgcctgctgagcctgctgcaggccggcgccgagcccgacatcagcaacaagagcagagagacccccctgtacaaggcctgcgagagaaagaacgccgaggccgtgaagatcctggtgcagcacaacgccgacaccaaccacagatgcaacagaggctggaccgccctgcacgagagcgtgagcagaaacgacctggaggtgatgcagatcctggtgagcggcggcgccaaggtggagagcaagaacgcctacggcatcacccccctgttcgtggccgcccagagcggccagctggaggccctgagattcctggccaagtacggcgccgacatcaacacccaggccagcgacaacgccagcgccctgtacgaggcctgcaagaacgagcacgaggaggtggtggagttcctgctgagccagggcgccgacgccaacaagaccaacaaggacggcctgctgcccctgcacatcgccagcaagaagggcaactacagaatcgtgcagatgctgctgcccgtgaccagcagaaccagaatcagaagaagcggcgtgagccccctgcacctggccgccgagagaaaccacgacgaggtgctggaggccctgctgagcgccagattcgacgtgaacacccccctggcccccgagagagccagactgtacgaggacagaagaagcagcgccctgtacttcgccgtggtgaacaacaacgtgtacgccaccgagctgctgctgcagcacggcgccgaccccaacagagacgtgatcagccccctgctggtggccatcagacacggctgcctgagaaccatgcagctgctgctggaccacggcgccaacatcgacgcctacatcgccacccaccccaccgccttccccgccaccatcatgttcgccatgaagtgcctgagcctgctgaagttcctgatggacctgggctgcgacggcgagccctgcttcagctgcctgtacggcaacggcccccacccccccgccccccagcccagcagcagattcaacgacgcccccgccgccgacaaggagcccagcgtggtgcagttctgcgagttcgtgagcgcccccgaggtgagcagatgggccggccccatcatcgacgtgctgctggactacgtgggcaacgtgcagctgtgcagcagactgaaggagcacatcgacagcttcgaggactgggccgtgatcaaggagaaggccgagccccccagacccctggcccacctgtgcagactgagagtgagaaaggccatcggcaagtacagaatcaagctgctggacaccctgcccctgcccggcagactgatcagatacctgaagtacgagaacacccagtag

SEQ ID NO: 72856 - DNA, 1812 bp, synthetic construct
  misc_feature 1..1812: note = Description of Artificial Sequence: Synthetic coding sequence
  source 1..1812: mol_type = other DNA
atggccatcgagcagagcctggccgacaagaccagaggccccaccaccgccgaggccaccgccagcgcctgcaccaacagacagcccgcccacttctacccctggaccagaagcaccgccccccccgagagcagccccgccagagcccccatgggcctgttccagggcgtgatgcagaagtacagcagcagcctgttcaagaccagccagctggcccccgccgaccccctgatcaaggccatcaaggacggcgacgaggaggccctgaagaccatgatcaaggagggcaagaacctggccgagcccaacaaggagggctggctgcccctgcacgaggccgcctactacggccaggtgggctgcctgaaggtgctgcagagagcctaccccggcaccatcgaccagagaaccctgcaggaggagaccgccgtgtacctggccacctgcagaggccacctggactgcctgctgagcctgctgcaggccggcgccgagcccgacatcagcaacaagagcagagagacccccctgtacaaggcctgcgagagaaagaacgccgaggccgtgaagatcctggtgcagcacaacgccgacaccaaccacagatgcaacagaggctggaccgccctgcacgagagcgtgagcagaaacgacctggaggtgatgcagatcctggtgagcggcggcgccaaggtggagagcaagaacgcctacggcatcacccccctgttcgtggccgcccagagcggccagctggaggccctgagattcctggccaagtacggcgccgacatcaacacccaggccagcgacaacgccagcgccctgtacgaggcctgcaagaacgagcacgaggaggtggtggagttcctgctgagccagggcgccgacgccaacaagaccaacaaggacggcctgctgcccctgcacatcgccagcaagaagggcaactacagaatcgtgcagatgctgctgcccgtgaccagcagaaccagaatcagaagaagcggcgtgagccccctgcacctggccgccgagagaaaccacgacgaggtgctggaggccctgctgagcgccagattcgacgtgaacacccccctggcccccgagagagccagactgtacgaggacagaagaagcagcgccctgtacttcgccgtggtgaacaacaacgtgtacgccaccgagctgctgctgcagcacggcgccgaccccaacagagacgtgatcagccccctgctggtggccatcagacacggctgcctgagaaccatgcagctgctgctggaccacggcgccaacatcgacgcctacatcgccacccaccccaccgccttccccgccaccatcatgttcgccatgaagtgcctgagcctgctgaagttcctgatggacctgggctgcgacggcgagccctgcttcagctgcctgtacggcaacggcccccacccccccgccccccagcccagcagcagattcaacgacgcccccgccgccgacaaggagcccagcgtggtgcagttctgcgagttcgtgagcgcccccgaggtgagcagatgggccggccccatcatcgacgtgctgctggactacgtgggcaacgtgcagctgtgcagcagactgaaggagcacatcgacagcttcgaggactgggccgtgatcaaggagaaggccgagccccccagacccctggcccacctgtgcagactgagagtgagaaaggccatcggcaagtacagaatcaagctgctggacaccctgcccctgcccggcagactgatcagatacctgaagtacgagaacacccagtag

SEQ ID NO: 72857 - DNA, 1470 bp, synthetic construct
  misc_feature 1..1470: note = Description of Artificial Sequence: Synthetic coding sequence
  source 1..1470: mol_type = other DNA
atgagacccgccgaccccctgatcaaggccatcaaggacggcgacgaggaggccctgaagaccatgatcaaggagggcaagaacctggccgagcccaacaaggagggctggctgcccctgcacgaggccgcctactacggccaggtgggctgcctgaaggtgctgcagagagcctaccccggcaccatcgaccagagaaccctgcaggaggagaccgccgtgtacctggccacctgcagaggccacctggactgcctgctgagcctgctgcaggccggcgccgagcccgacatcagcaacaagagcagagagacccccctgtacaaggcctgcgagagaaagaacgccgaggccgtgaagatcctggtgcagcacaacgccgacaccaaccacagatgcaacagaggctggaccgccctgcacgagagcgtgagcagaaacgacctggaggtgatgcagatcctggtgagcggcggcgccaaggtggagagcaagaacgcctacggcatcacccccctgttcgtggccgcccagagcggccagctggaggccctgagattcctggccaagtacggcgccgacatcaacacccaggccagcgacaacgccagcgccctgtacgaggcctgcaagaacgagcacgaggaggtggtggagttcctgctgagccagggcgccgacgccaacaagaccaacaaggacggcctgctgcccctgcacatcgccagcaagaagggcaactacagaatcgtgcagatgctgctgcccgtgaccagcagaaccagaatcagaagaagcggcgtgagccccctgcacctggccgccgagagaaaccacgacgaggtgctggaggccctgctgagcgccagattcgacgtgaacacccccctggcccccgagagagccagactgtacgaggacagaagaagcagcgccctgtacttcgccgtggtgaacaacaacgtgtacgccaccgagctgctgctgcagcacggcgccgaccccaacagagacgtgatcagccccctgctggtggccatcagacacggctgcctgagaaccatgcagctgctgctggaccacggcgccaacatcgacgcctacatcgccacccaccccaccgccttccccgccaccatcatgttcgccatgaagtgcctgagcctgctgaagttcctgatggacctgggctgcgacggcgagccctgcttcagctgcctgtacggcaacggcccccacccccccgccccccagcccagcagcagattcaacgacgcccccgccgccgacaaggagcccagcgtggtgcagttctgcgagttcgtgagcgcccccgaggtgagcagatgggccggccccatcatcgacgtgctgctggactacgtgggcaacgtgcagctgtgcagcagactgaaggagcacatcgacagcttcgaggactgggtgctggagggcttcgtgaagtactag

SEQ ID NO: 72858 - DNA, 1908 bp, synthetic construct
  misc_feature 1..1908: note = Description of Artificial Sequence: Synthetic coding sequence
  source 1..1908: mol_type = other DNA
atggccacccagatcagcaccagaggcagccagtgcaccatcggccaggaggagtacagcctgtacagcagcctgagcgaggacgagctggtgcagatggccatcgagcagagcctggccgacaagaccagaggccccaccaccgccgaggccaccgccagcgcctgcaccaacagacagcccgcccacttctacccctggaccagaagcaccgccccccccgagagcagccccgccagagcccccatgggcctgttccagggcgtgatgcagaagtacagcagcagcctgttcaagaccagccagctggcccccgccgaccccctgatcaaggccatcaaggacggcgacgaggaggccctgaagaccatgatcaaggagggcaagaacctggccgagcccaacaaggagggctggctgcccctgcacgaggccgcctactacggccaggtgggctgcctgaaggtgctgcagagagcctaccccggcaccatcgaccagagaaccctgcaggaggagaccgccgtgtacctggccacctgcagaggccacctggactgcctgctgagcctgctgcaggccggcgccgagcccgacatcagcaacaagagcagagagacccccctgtacaaggcctgcgagagaaagaacgccgaggccgtgaagatcctggtgcagcacaacgccgacaccaaccacagatgcaacagaggctggaccgccctgcacgagagcgtgagcagaaacgacctggaggtgatgcagatcctggtgagcggcggcgccaaggtggagagcaagaacgcctacggcatcacccccctgttcgtggccgcccagagcggccagctggaggccctgagattcctggccaagtacggcgccgacatcaacacccaggccagcgacaacgccagcgccctgtacgaggcctgcaagaacgagcacgaggaggtggtggagttcctgctgagccagggcgccgacgccaacaagaccaacaaggacggcctgctgcccctgcacatcgccagcaagaagggcaactacagaatcgtgcagatgctgctgcccgtgaccagcagaaccagaatcagaagaagcggcgtgagccccctgcacctggccgccgagagaaaccacgacgaggtgctggaggccctgctgagcgccagattcgacgtgaacacccccctggcccccgagagagccagactgtacgaggacagaagaagcagcgccctgtacttcgccgtggtgaacaacaacgtgtacgccaccgagctgctgctgcagcacggcgccgaccccaacagagacgtgatcagccccctgctggtggccatcagacacggctgcctgagaaccatgcagctgctgctggaccacggcgccaacatcgacgcctacatcgccacccaccccaccgccttccccgccaccatcatgttcgccatgaagtgcctgagcctgctgaagttcctgatggacctgggctgcgacggcgagccctgcttcagctgcctgtacggcaacggcccccacccccccgccccccagcccagcagcagattcaacgacgcccccgccgccgacaaggagcccagcgtggtgcagttctgcgagttcgtgagcgcccccgaggtgagcagatgggccggccccatcatcgacgtgctgctggactacgtgggcaacgtgcagctgtgcagcagactgaaggagcacatcgacagcttcgaggactgggccgtgatcaaggagaaggccgagccccccagacccctggcccacctgtgcagactgagagtgagaaaggccatcggcaagtacagaatcaagctgctggacaccctgcccctgcccggcagactgatcagatacctgaagtacgagaacacccagtag

SEQ ID NO: 72859 - DNA, 1557 bp, synthetic construct
  misc_feature 1..1557: note = Description of Artificial Sequence: Synthetic coding sequence
  source 1..1557: mol_type = other DNA
atggacttcaccgaggcctacgccgacacctgcagcaccgtgggcctggccgccagagagggcaacgtgaaggtgctgagaaagctgctgaagaagggcagaagcgtggacgtggccgacaacagaggctggatgcccatccacgaggccgcctaccacaacagcgtggagtgcctgcagatgctgatcaacgccgacagcagcgagaactacatcaagatgaagaccttcgagggcttctgcgccctgcacctggccgccagccagggccactggaagatcgtgcagatcctgctggaggccggcgccgaccccaacgccaccaccctggaggagaccacccccctgttcctggccgtggagaacggccagatcgacgtgctgagactgctgctgcagcacggcgccaacgtgaacggcagccacagcatgtgcggctggaacagcctgcaccaggccagcttccaggagaacgccgagatcatcaagctgctgctgagaaagggcgccaacaaggagtgccaggacgacttcggcatcacccccctgttcgtggccgcccagtacggcaagctggagagcctgagcatcctgatcagcagcggcgccaacgtgaactgccaggccctggacaaggccacccccctgttcatcgccgcccaggagggccacaccaagtgcgtggagctgctgctgagcagcggcgccgaccccgacctgtactgcaacgaggacagctggcagctgcccatccacgccgccgcccagatgggccacaccaagatcctggacctgctgatccccctgaccaacagagcctgcgacaccggcctgaacaaggtgagccccgtgtacagcgccgtgttcggcggccacgaggactgcctggagatcctgctgagaaacggctacagccccgacgcccaggcctgcctggtgttcggcttcagcagccccgtgtgcatggccttccagaaggactgcgagttcttcggcatcgtgaacatcctgctgaagtacggcgcccagatcaacgagctgcacctggcctactgcctgaagtacgagaagttcagcatcttcagatacttcctgagaaagggctgcagcctgggcccctggaaccacatctacgagttcgtgaaccacgccatcaaggcccaggccaagtacaaggagtggctgccccacctgctggtggccggcttcgaccccctgatcctgctgtgcaacagctggatcgacagcgtgagcatcgacaccctgatcttcaccctggagttcaccaactggaagaccctggcccccgccgtggagagaatgctgagcgccagagccagcaacgcctggatcctgcagcagcacatcgccaccgtgcccagcctgacccacctgtgcagactggagatcagaagcagcctgaagagcgagagactgagaagcgacagctacatcagccagctgcccctgcccagaagcctgcacaactacctgctgtacgaggacgtgctgagaatgtacgaggtgcccgagctggccgccatccaggacggctag

SEQ ID NO: 72860 - DNA, 1671 bp, synthetic construct
  misc_feature 1..1671: note = Description of Artificial Sequence: Synthetic coding sequence
  source 1..1671: mol_type = other DNA
atggccatgatgcccctggtgctgcaccaccccgagagacaggccgagctgggcagcggcctgagagacggcggcggcgccgccctgagaccccccggcagactggtgaagcagatggacttcaccgaggcctacgccgacacctgcagcaccgtgggcctggccgccagagagggcaacgtgaaggtgctgagaaagctgctgaagaagggcagaagcgtggacgtggccgacaacagaggctggatgcccatccacgaggccgcctaccacaacagcgtggagtgcctgcagatgctgatcaacgccgacagcagcgagaactacatcaagatgaagaccttcgagggcttctgcgccctgcacctggccgccagccagggccactggaagatcgtgcagatcctgctggaggccggcgccgaccccaacgccaccaccctggaggagaccacccccctgttcctggccgtggagaacggccagatcgacgtgctgagactgctgctgcagcacggcgccaacgtgaacggcagccacagcatgtgcggctggaacagcctgcaccaggccagcttccaggagaacgccgagatcatcaagctgctgctgagaaagggcgccaacaaggagtgccaggacgacttcggcatcacccccctgttcgtggccgcccagtacggcaagctggagagcctgagcatcctgatcagcagcggcgccaacgtgaactgccaggccctggacaaggccacccccctgttcatcgccgcccaggagggccacaccaagtgcgtggagctgctgctgagcagcggcgccgaccccgacctgtactgcaacgaggacagctggcagctgcccatccacgccgccgcccagatgggccacaccaagatcctggacctgctgatccccctgaccaacagagcctgcgacaccggcctgaacaaggtgagccccgtgtacagcgccgtgttcggcggccacgaggactgcctggagatcctgctgagaaacggctacagccccgacgcccaggcctgcctggtgttcggcttcagcagccccgtgtgcatggccttccagaaggactgcgagttcttcggcatcgtgaacatcctgctgaagtacggcgcccagatcaacgagctgcacctggcctactgcctgaagtacgagaagttcagcatcttcagatacttcctgagaaagggctgcagcctgggcccctggaaccacatctacgagttcgtgaaccacgccatcaaggcccaggccaagtacaaggagtggctgccccacctgctggtggccggcttcgaccccctgatcctgctgtgcaacagctggatcgacagcgtgagcatcgacaccctgatcttcaccctggagttcaccaactggaagaccctggcccccgccgtggagagaatgctgagcgccagagccagcaacgcctggatcctgcagcagcacatcgccaccgtgcccagcctgacccacctgtgcagactggagatcagaagcagcctgaagagcgagagactgagaagcgacagctacatcagccagctgcccctgcccagaagcctgcacaactacctgctgtacgaggacgtgctgagaatgtacgaggtgcccgagctggccgccatccaggacggctag

SEQ ID NO: 72861 - DNA, 1338 bp, synthetic construct
  misc_feature 1..1338: note = Description of Artificial Sequence: Synthetic coding sequence
  source 1..1338: mol_type = other DNA
atgaagaccttcgagggcttctgcgccctgcacctggccgccagccagggccactggaagatcgtgcagatcctgctggaggccggcgccgaccccaacgccaccaccctggaggagaccacccccctgttcctggccgtggagaacggccagatcgacgtgctgagactgctgctgcagcacggcgccaacgtgaacggcagccacagcatgtgcggctggaacagcctgcaccaggccagcttccaggagaacgccgagatcatcaagctgctgctgagaaagggcgccaacaaggagtgccaggacgacttcggcatcacccccctgttcgtggccgcccagtacggcaagctggagagcctgagcatcctgatcagcagcggcgccaacgtgaactgccaggccctggacaaggccacccccctgttcatcgccgcccaggagggccacaccaagtgcgtggagctgctgctgagcagcggcgccgaccccgacctgtactgcaacgaggacagctggcagctgcccatccacgccgccgcccagatgggccacaccaagatcctggacctgctgatccccctgaccaacagagcctgcgacaccggcctgaacaaggtgagccccgtgtacagcgccgtgttcggcggccacgaggactgcctggagatcctgctgagaaacggctacagccccgacgcccaggcctgcctggtgttcggcttcagcagccccgtgtgcatggccttccagaaggactgcgagttcttcggcatcgtgaacatcctgctgaagtacggcgcccagatcaacgagctgcacctggcctactgcctgaagtacgagaagttcagcatcttcagatacttcctgagaaagggctgcagcctgggcccctggaaccacatctacgagttcgtgaaccacgccatcaaggcccaggccaagtacaaggagtggctgccccacctgctggtggccggcttcgaccccctgatcctgctgtgcaacagctggatcgacagcgtgagcatcgacaccctgatcttcaccctggagttcaccaactggaagaccctggcccccgccgtggagagaatgctgagcgccagagccagcaacgcctggatcctgcagcagcacatcgccaccgtgcccagcctgacccacctgtgcagactggagatcagaagcagcctgaagagcgagagactgagaagcgacagctacatcagccagctgcccctgcccagaagcctgcacaactacctgctgtacgaggacgtgctgagaatgtacgaggtgcccgagctggccgccatccaggacggctag

SEQ ID NO: 72862 - DNA, 1662 bp, synthetic construct
  misc_feature 1..1662: note = Description of Artificial Sequence: Synthetic coding sequence
  source 1..1662: mol_type = other DNA
atgcccctggtgctgcaccaccccgagagacaggccgagctgggcagcggcctgagagacggcggcggcgccgccctgagaccccccggcagactggtgaagcagatggacttcaccgaggcctacgccgacacctgcagcaccgtgggcctggccgccagagagggcaacgtgaaggtgctgagaaagctgctgaagaagggcagaagcgtggacgtggccgacaacagaggctggatgcccatccacgaggccgcctaccacaacagcgtggagtgcctgcagatgctgatcaacgccgacagcagcgagaactacatcaagatgaagaccttcgagggcttctgcgccctgcacctggccgccagccagggccactggaagatcgtgcagatcctgctggaggccggcgccgaccccaacgccaccaccctggaggagaccacccccctgttcctggccgtggagaacggccagatcgacgtgctgagactgctgctgcagcacggcgccaacgtgaacggcagccacagcatgtgcggctggaacagcctgcaccaggccagcttccaggagaacgccgagatcatcaagctgctgctgagaaagggcgccaacaaggagtgccaggacgacttcggcatcacccccctgttcgtggccgcccagtacggcaagctggagagcctgagcatcctgatcagcagcggcgccaacgtgaactgccaggccctggacaaggccacccccctgttcatcgccgcccaggagggccacaccaagtgcgtggagctgctgctgagcagcggcgccgaccccgacctgtactgcaacgaggacagctggcagctgcccatccacgccgccgcccagatgggccacaccaagatcctggacctgctgatccccctgaccaacagagcctgcgacaccggcctgaacaaggtgagccccgtgtacagcgccgtgttcggcggccacgaggactgcctggagatcctgctgagaaacggctacagccccgacgcccaggcctgcctggtgttcggcttcagcagccccgtgtgcatggccttccagaaggactgcgagttcttcggcatcgtgaacatcctgctgaagtacggcgcccagatcaacgagctgcacctggcctactgcctgaagtacgagaagttcagcatcttcagatacttcctgagaaagggctgcagcctgggcccctggaaccacatctacgagttcgtgaaccacgccatcaaggcccaggccaagtacaaggagtggctgccccacctgctggtggccggcttcgaccccctgatcctgctgtgcaacagctggatcgacagcgtgagcatcgacaccctgatcttcaccctggagttcaccaactggaagaccctggcccccgccgtggagagaatgctgagcgccagagccagcaacgcctggatcctgcagcagcacatcgccaccgtgcccagcctgacccacctgtgcagactggagatcagaagcagcctgaagagcgagagactgagaagcgacagctacatcagccagctgcccctgcccagaagcctgcacaactacctgctgtacgaggacgtgctgagaatgtacgaggtgcccgagctggccgccatccaggacggctag

SEQ ID NO: 72863 - DNA, 1338 bp, synthetic construct; identical to SEQ ID NO: 72861
  misc_feature 1..1338: note = Description of Artificial Sequence: Synthetic coding sequence
  source 1..1338: mol_type = other DNA

SEQ ID NO: 72864 - DNA, 1314 bp, synthetic construct
  misc_feature 1..1314: note = Description of Artificial Sequence: Synthetic coding sequence
  source 1..1314: mol_type = other DNA
atggacttcaccgaggcctacgccgacacctgcagcaccgtgggcctggccgccagagagggcaacgtgaaggtgctgagaaagctgctgaagaagggcagaagcgtggacgtggccgacaacagaggctggatgcccatccacgaggccgcctaccacaacagcgtggagtgcctgcagatgctgatcaacgccgacagcagcgagaactacatcaagatgaagaccttcgagggcttctgcgccctgcacctggccgccagccagggccactggaagatcgtgcagatcctgctggaggccggcgccgaccccaacgccaccaccctggaggagaccacccccctgttcctgggcgccaacgtgaactgccaggccctggacaaggccacccccctgttcatcgccgcccaggagggccacaccaagtgcgtggagctgctgctgagcagcggcgccgaccccgacctgtactgcaacgaggacagctggcagctgcccatccacgccgccgcccagatgggccacaccaagatcctggacctgctgatccccctgaccaacagagcctgcgacaccggcctgaacaaggtgagccccgtgtacagcgccgtgttcggcggccacgaggactgcctggagatcctgctgagaaacggctacagccccgacgcccaggcctgcctggtgttcggcttcagcagccccgtgtgcatggccttccagaaggagtggagctgcgagttcttcggcatcgtgaacatcctgctgaagtacggcgcccagatcaacgagctgcacctggcctactgcctgaagtacgagaagttcagcatcttcagatacttcctgagaaagggctgcagcctgggcccctggaaccacatctacgagttcgtgaaccacgccatcaaggcccaggccaagtacaaggagtggctgccccacctgctggtggccggcttcgaccccctgatcctgctgtgcaacagctggatcgacagcgtgagcatcgacaccctgatcttcaccctggagttcaccaactggaagaccctggcccccgccgtggagagaatgctgagcgccagagccagcaacgcctggatcctgcagcagcacatcgccaccgtgcccagcctgacccacctgtgcagactggagatcagaagcagcctgaagagcgagagactgagaagcgacagctacatcagccagctgcccctgcccagaagcctgcacaactacctgctgtacgaggacgtgctgagaatgtacgaggtgcccgagctggccgccatccaggacggctag

SEQ ID NO: 72865 - DNA, 1281 bp, synthetic construct
  misc_feature 1..1281: note = Description of Artificial Sequence: Synthetic coding sequence
  source 1..1281: mol_type = other DNA
atggacggcaccaccgcccccgtgaccaagagcggcgccgccaagctggtgaagagaaacttcctggaggccctgaagagcaacgacttcggcaagctgaaggccatcctgatccagagacagatcgacgtggacaccgtgttcgaggtggaggacgagaacatggtgctggccagctacaagcagggctactggctgcccagctacaagctgaagagcagctgggccaccggcctgcacctgagcgtgctgttcggccacgtggagtgcctgctggtgctgctggaccacaacgccaccatcaactgcagacccaacggcaagacccccctgcacgtggcctgcgagatggccaacgtggactgcgtgaagatcctgtgcgacagaggcgccaagctgaactgctacagcctgagcggccacaccgccctgcacttctgcaccacccccagcagcatcctgtgcgccaagcagctggtgtggagaggcgccaacgtgaacatgaagaccaacaaccaggacgaggagacccccctgcacaccgccgcccacttcggcctgagcgagctggtggccttctacgtggagcacggcgccatcgtggacagcgtgaacgcccacatggagacccccctggccatcgccgcctactgggccctgagattcaaggagcaggagtacagcaccgagcaccacctggtgtgcagaatgctgctggactacaaggccgaggtgaacgccagagacgacgacttcaagagccccctgcacaaggccgcctggaactgcgaccacgtgctgatgcacatgatgctggaggccggcgccgaggccaacctgatggacatcaacggctgcgccgccatccagtacgtgctgaaggtgaccagcgtgagacccgccgcccagcccgagatctgctaccagctgctgctgaaccacggcgccgccagaatctaccccccccagttccacaaggtgatccaggcctgccacagctgccccaaggccatcgaggtggtggtgaacgcctacgagcacatcagatggaacaccaagtggagaagagccatccccgacgacgacctggagaagtactgggacttctaccacagcctgttcaccgtgtgctgcaacagccccagaaccctgatgcacctgagcagatgcgccatcagaagaaccctgcacaacagatgccacagagccatccccctgctgagcctgcccctgagcctgaagaagtacctgctgctggagcccgagggcatcatctactag

SEQ ID NO: 72866 - DNA, 1050 bp, synthetic construct
  misc_feature 1..1050: note = Description of Artificial Sequence: Synthetic coding sequence
  source 1..1050: mol_type = other DNA
atggacggcaccaccgcccccgtgaccaagagcggcgccgccaagctggtgaagagaaacttcctggaggccctgaagagcaacgacttcggcaagctgaaggccatcctgatccagagacagatcgacgtggacaccgtgttcgaggtggaggacgagaacatggtgctggccagctacaagcagggctactggctgcccagctacaagctgaagagcagctgggccaccggcctgcacctgagcgtgctgttcggccacgtggagtgcctgctggtgctgctggaccacaacgccaccatcaactgcagacccaacggcaagacccccctgcacgtggcctgcgagatggccaacgtggactgcgtgaagatcctgtgcgacagaggcgccaagctgaactgctacagcctgagcggccacaccgccctgcacttctgcaccacccccagcagcatcctgtgcgccaagcagctggtgtggagaggcgccaacgtgaacatgaagaccaacaaccaggacgaggagacccccctgcacaccgccgcccacttcggcctgagcgagctggtggccttctacgtggagcacggcgccatcgtggacagcgtgaacgcccacatggagacccccctggccatcgccgcctactgggccctgagattcaaggagcaggagtacagcaccgagcaccacctggtgtgcagaatgctgctggactacaaggccgaggtgaacgccagagacgacgacttcaagagccccctgcacaaggccgcctggaactgcgaccacgtgctgatgcacatgatgctggaggccggcgccgaggccaacctgatggacatcaacggctgcgccgccatccagtacgtgctgaaggtgaccagcgtgagacccgccgcccagcccgagatctgctaccagctgctgctgaaccacggcgccgccagaatctaccccccccagttccacaaggtgagactgtgccccgtggtgagcagactgagaaagatccagatggccgccctgagcgagatcagcaagtag

SEQ ID NO: 72867 - DNA, 3747 bp, synthetic construct
  misc_feature 1..3747: note = Description of Artificial Sequence: Synthetic coding sequence
  source 1..3747: mol_type = other DNA
atgggcaaggaccaggagctgctggaggccgccagaaccggcaacgtggccctggtggagaagctgctgagcggcagaaagggcggcatcctgggcggcggcagcggccccctgcccctgagcaacctgctgagcatctggagaggccccaacgtgaactgcaccgacagcagcggctacaccgccctgcaccacgccgccctgaacggccacaaggacatcgtgctgaagctgctgcagtacgaggccagcaccaacgtggccgacaacaagggctacttccccatccacctggccgcctggaagggcgacgtggagatcgtgaagatcctgatccaccacggccccagccacagcagagtgaacgagcagaacaacgagaacgagaccgccctgcactgcgccgcccagtacggccacagcgaggtggtggccgtgctgctggaggagctgaccgaccccaccatcagaaacagcaagctggagacccccctggacctggccgccctgtacggcagactgagagtggtgaagatgatcatcagcgcccaccccaacctgatgagctgcaacaccagaaagcacacccccctgcacctggccgccagaaacggccacaaggccgtggtgcaggtgctgctggaggccggcatggacgtgagctgccagaccgagaagggcagcgccctgcacgaggccgccctgttcggcaaggtggacgtggtgagagtgctgctggagaccggcatcgacgccaacatcaaggacagcctgggcagaaccgtgctggacatcctgaaggagcaccccagccagaagagcctgcagatcgccaccctgctgcaggagtacctggagggcgtgggcagaagcaccgtgctggaggagcccgtgcaggaggacgccacccaggagacccacatcagcagccccgtggagagccccagccagaagaccaagagcgagaccgtgaccggcgagctgagcaagctgctggacgagatcaagctgtgccaggagaaggactacagcttcgaggacctgtgccacaccatcagcgaccactacctggacaacctgagcaagatcagcgaggaggagctgggcaagaacggcagccagagcgtgagaaccagcagcaccatcaacctgagccccggcgaggtggaggaggaggacgacgacgagaacacctgcggccccagcggcctgtgggaggccctgaccccctgcaacggctgcagaaacctgggcttccccatgctggcccaggagagctaccccaagaagagaaactacaccatggagatcgtgcccagcgccagcctggacaccttccccagcgagaacgagaacttcctgtgcgacctgatggacaccgccgtgaccaagaagccctgcagcctggagatcgccagagcccccagccccagaaccgacaacgccagcgaggtggccgtgaccacccccggcaccagcaaccacagaaacagcagcaccggccccacccccgactgcagcccccccagccccgacaccgccctgaagaacatcgtgaaggtgatcagaccccagcccaagcagagaaccagcatcgtgagcagcctggacttccacagaatgaaccacaaccaggagtacttcgagatcaacaccagcaccggctgcaccagcttcaccgccagcccccccgccagcccccccaccagcagcgtgggcaccaccgaggtgaagaacgagggcaccaaccacaccgacgacctgagcagacaggacgacaacgacccccccaaggagtacgaccccggccagttcgccggcctgctgcacggcagcagccccgcctgcgagagccccgagaaccccttccacctgtacggcaagagagagcagtgcgagaagggccaggacgaggtgagcctggccaacagccccctgcccttcaagcagagccccatcgagaacaacagcgagcccctggtgaagaagatcaagcccaaggtggtgagcagaaccatcttccacaagaagagcaaccagctggagaaccacaccatcgtgggcaccagaagcaccagaagcggcagcagaaacggcgaccagtgggtgatgaacgccggcggcttcgtggagagagcctgcaccctgggcagaatcagaagcctgcccaaggccctgatcgacatgcacctgagcaagagcgtgagcaagagcgacagcgacctgatcgcctaccccagcaacgagaagaccagcagagtgaactggagcgagagcagcaccgccgagcacagcagcaagggcaacagcgagagaacccccagcttcaccagcgagtgggaggagatcgacaagatcatgagcagcatcgacgtgggcatcaacaacgagctgaaggagatgaacggcgagaccaccagacccagatgccccgtgcagaccgtgggccagtggctggagagcatcggcctgccccagtacgagaaccacctgatggccaacggcttcgacaacgtgcagttcatgggcagcaacgtgatggaggaccaggacctgctggagatcggcatcctgaacagcggccacagacagagaatcctgcaggccatccagctgctgcccaagatgagacccatcggccacgacggctaccaccccaccagcgtggccgagtggctggacagcatcgagctgggcgactacaccaaggccttcctgatcaacggctacaccagcatggacctgctgaagaagatctgggaggtggagctgatcaacgtgctgaagatcaacctgatcggccacagaaagagaatcctggccagcctgggcgacagactgcacgacgaccccccccagaagccccccagaagcatcaccctgagagagcccagcggcaaccacacccccccccagctgagccccagcctgagccagagcacctacaccaccggcggcagcctggacgtgccccacatcatcatgcagggcgacgccagaagaagaagaaacgagaactacttcgacgacatccccagaagcaagctggagagacagatggcccagaccggcgactggggcgagcccagcatcaccctgagaccccccaacgaggccaccgccagcacccccgtgcagtactggcagcaccaccccgagaagctgatcttccagagctgcgactacaaggccttctacctgggcagcatgctgatcaaggagctgagaggcaccgagagcacccaggacgcctgcgccaagatgagagtgatgtgcgtgaagagcaccgagcagatgaagaaggtgcccaccatcatcctgagcgtgagctacaagggcgtgaagttcatcgacgccaccaacaagaacatcatcgccgagcacgagatcagaaacatcagctgcgccgcccaggaccccgaggacctgagcaccttcgcctacatcaccaaggacctgaagagcaaccaccactactgccacgtgttcaccgccttcgacgtgaacctggcctacgagatcatcctgaccctgggccaggccttcgaggtggcctaccagctggccctgcaggccagaaagggcggccacagcagcaccctgcccgagagcttcgagaacaagcccagcaagcccatccccaagcccagagtgagcatcagaaagagcgtggacctgctgcacgccagccacaccggccaggagcccagcgagagacacaccgaggaggccctgagaaagttctag

SEQ ID NO: 72868 - DNA, 1353 bp, synthetic construct
  misc_feature 1..1353: note = Description of Artificial Sequence: Synthetic coding sequence
  source 1..1353: mol_type = other DNA
atgatgtggcagtgccacctgagcgcccaggactacagatactaccccgtggacggctacagcctgctgaagagattccccctgcaccccctgaccggccccagatgccccgtgcagaccgtgggccagtggctggagagcatcggcctgccccagtacgagaaccacctgatggccaacggcttcgacaacgtgcagttcatgggcagcaacgtgatggaggaccaggacctgctggagatcggcatcctgaacagcggccacagacagagaatcctgcaggccatccagctgctgcccaagatgagacccatcggccacgacggctaccaccccaccagcgtggccgagtggctggacagcatcgagctgggcgactacaccaaggccttcctgatcaacggctacaccagcatggacctgctgaagaagatctgggaggtggagctgatcaacgtgctgaagatcaacctgatcggccacagaaagagaatcctggccagcctgggcgacagactgcacgacgaccccccccagaagccccccagaagcatcaccctgagaagcagcgtgtgcgagatctggaccaaccagaacgccggcttccccttcagcgccatccaccaggtgcacaacaccggcgactggggcgagcccagcatcaccctgagaccccccaacgaggccaccgccagcacccccgtgcagtactggcagcaccaccccgagaagctgatcttccagagctgcgactacaaggccttctacctgggcagcatgctgatcaaggagctgagaggcaccgagagcacccaggacgcctgcgccaagatgagagccaacatccagaagagcaccgagcagatgaagaaggtgcccaccatcatcctgagcgtgagctacaagggcgtgaagttcatcgacgccaccaacaagaacatcatcgccgagcacgagatcagaaacatcagctgcgccgcccaggaccccgaggacctgagcaccttcgcctacatcaccaaggacctgaagagcaaccaccactactgccacgtgttcaccgccttcgacgtgaacctggcctacgagatcatcctgaccctgggccaggccttcgaggtggcctaccagctggccctgcaggccagaaagggcggccacagcagcaccctgcccgagagcttcgagaacaagcccagcaagcccatccccaagcccagagtgagcatcagaaagagcgtgcagatcgaccccagcgagcagaagaccctggccaacctgccctggatcgtggagcccggccaggaggccaagagaggcatcaacaccaagtacgagaccaccatcttctag

SEQ ID NO: 72869 - DNA, 765 bp, synthetic construct
  misc_feature 1..765: note = Description of Artificial Sequence: Synthetic coding sequence
  source 1..765: mol_type = other DNA
atgcagggcgacgccagaagaagaagaaacgagaactacttcgacgacatccccagaagcaagctggagagacagatggcccagaccggcgactggggcgagcccagcatcaccctgagaccccccaacgaggccaccgccagcacccccgtgcagtactggcagcaccaccccgagaagctgatcttccagagctgcgactacaaggccttctacctgggcagcatgctgatcaaggagctgagaggcaccgagagcacccaggacgcctgcgccaagatgagagccaactgccagaagagcaccgagcagatgaagaaggtgcccaccatcatcctgagcgtgagctacaagggcgtgaagttcatcgacgccaccaacaagaacatcatcgccgagcacgagatcagaaacatcagctgcgccgcccaggaccccgaggacctgagcaccttcgcctacatcaccaaggacctgaagagcaaccaccactactgccacgtgttcaccgccttcgacgtgaacctggcctacgagatcatcctgaccctgggccaggccttcgaggtggcctaccagctggccctgcaggccagaaagggcggccacagcagcaccctgcccgagagcttcgagaacaagcccagcaagcccatccccaagcccagagtgagcatcagaaagagcgtggacctgctgcacgccagccacaccggccaggagcccagcgagagacacaccgaggaggccctgagaaagttctag

SEQ ID NO: 72870 - DNA, 1053 bp, synthetic construct
  misc_feature 1..1053: note = Description of Artificial Sequence: Synthetic coding sequence
  source 1..1053: mol_type = other DNA
gtgctgttccagggcagcaacgtgatggaggaccaggacctgctggagatcggcatcctgaacagcggccacagacagagaatcctgcaggccatccagctgctgcccaagatgagacccatcggccacgacggctaccaccccaccagcgtggccgagtggctggacagcatcgagctgggcgactacaccaaggccttcctgatcaacggctacaccagcatggacctgctgaagaagatctgggaggtggagctgatcaaccagagcagcgtgtgcgagatctggaccaaccagaacgccggcttccccttcagcgccatccaccaggtgcacaacaccggcgactggggcgagcccagcatcaccctgagaccccccaacgaggccaccgccagcacccccgtgcagtactggcagcaccaccccgagaagctgatcttccagagctgcgactacaaggccttctacctgggcagcatgctgatcaaggagctgagaggcaccgagagcacccaggacgcctgcgccaagatgagagccaacatccagaagagcaccgagcagatgaagaaggtgcccaccatcatcctgagcgtgagctacaagggcgtgaagttcatcgacgccaccaacaagaacatcatcgccgagcacgagatcagaaacatcagctgcgccgcccaggaccccgaggacctgagcaccttcgcctacatcaccaaggacctgaagagcaaccaccactactgccacgtgttcaccgccttcgacgtgaacctggcctacgagatcatcctgaccctgggccaggccttcgaggtggcctaccagctggccctgcaggccagaaagggcggccacagcagcaccctgcccgagagcttcgagaacaagcccagcaagcccatccccaagcccagagtgagcatcagaaagagcgtgatcgaccccagcgagcagaagaccctggccaacctgccctggatcgtggagcccggccaggaggccaagagaggcatcaacaccaagtacgagaccaccatcttctag

SEQ ID NO: 72871 - DNA, 2292 bp, synthetic construct
  misc_feature 1..2292: note = Description of Artificial Sequence: Synthetic coding sequence
  source 1..2292: mol_type = other DNA
agcttccaggagagctaccccaagaagagaaactacaccatggagatcgtgcccagcgccagcctggacaccttccccagcgagaacgagaacttcctgtgcgacctgatggacaccgccgtgaccaagaagccctgcagcctggagatcgccagagcccccagccccagaaccgacaacgccagcgaggtggccgtgaccacccccggcaccagcaaccacagaaacagcagcaccggccccacccccgactgcagcccccccagccccgacaccgccctgaagaacatcgtgaaggtgatcagaccccagcccaagcagagaaccagcatcgtgagcagcctggacttccacagaatgaaccacaaccaggagtacttcgagatcaacaccagcaccggctgcaccagcttcaccgccagcccccccgccagcccccccaccagcagcgtgggcaccaccgaggtgaagaacgagggcaccaaccacaccgacgacctgagcagacaggacgacaacgacccccccaaggagtacgaccccggccagttcgccggcctgctgcacggcagcagccccgcctgcgagagccccgagaaccccttccacctgtacggcaagagagagcagtgcgagaagggccaggacgaggtgagcctggccaacagccccctgcccttcaagcagagccccatcgagaacaacagcgagcccctggtgaagaagatcaagcccaaggtggtgagcagaaccatcttccacaagaagagcaaccagctggagaaccacaccatcgtgggcaccagaagcaccagaagcggcagcagaaacggcgaccagtgggtgatgaacgccggcggcttcgtggagagagcctgcaccctgggcagaatcagaagcctgcccaaggccctgatcgacatgcacctgagcaagagcgtgagcaagagcgacagcgacctgatcgcctaccccagcaacgagaagaccagcagagtgaactggagcgagagcagcaccgccgagcacagcagcaagggcaacagcgagagaacccccagcttcaccagcgagtgggaggagatcgacaagatcatgagcagcatcgacgtgggcatcaacaacgagctgaaggagatgaacggccccagatgccccgtgcagaccgtgggccagtggctggagagcatcggcctgccccagtacgagaaccacctgatggccaacggcttcgacaacgtgcagttcatgggcagcaacgtgatggaggaccaggacctgctggagatcggcatcctgaacagcggccacagacagagaatcctgcaggccatccagctgctgcccaagatgagacccatcggccacgacggctaccaccccaccagcgtggccgagtggctggacagcatcgagctgggcgactacaccaaggccttcctgatcaacggctacaccagcatggacctgctgaagaagatctgggaggtggagctgatcaacgtgctgaagatcaacctgatcggccacagaaagagaatcctggccagcctgggcgacagactgcacgacgaccccccccagaagccccccagaagcatcaccctgagaaccggcgactggggcgagcccagcatcaccctgagaccccccaacgaggccaccgccagcacccccgtgcagtactggcagcaccaccccgagaagctgatcttccagagctgcgactacaaggccttctacctgggcagcatgctgatcaaggagctgagaggcaccgagagcacccaggacgcctgcgccaagatgagagtgatgtgcgtgaagagcaccgagcagatgaagaaggtgcccaccatcatcctgagcgtgagctacaagggcgtgaagttcatcgacgccaccaacaagaacatcatcgccgagcacgagatcagaaacatcagctgcgccgcccaggaccccgaggacctgagcaccttcgcctacatcaccaaggacctgaagagcaaccaccactactgccacgtgttcaccgccttcgacgtgaacctggcctacgagatcatcctgaccctgggccaggccttcgaggtggcctaccagctggccctgcaggccagaaagggcggccacagcagcaccctgcccgagagcttcgagaacaagcccagcaagcccatccccaagcccagagtgagcatcagaaagagcgtggacctgctgcacgccagccacaccggccaggagcccagcgagagacacaccgaggaggccctgagaaagttctag

SEQ ID NO: 72872 - DNA, 1281 bp, synthetic construct
  misc_feature 1..1281: note = Description of Artificial Sequence: Synthetic coding sequence
  source 1..1281: mol_type = other DNA
atgatgtggcagtgccacctgagcgcccaggactacagatactaccccgtggacggctacagcctgctgaagagattccccctgcaccccctgaccggccccagatgccccgtgcagaccgtgggccagtggctggagagcatcggcctgccccagtacgagaaccacctgatggccaacggcttcgacaacgtgcagttcatgggcagcaacgtgatggaggaccaggacctgctggagatcggcatcctgaacagcggccacagacagagaatcctgcaggccatccagctgctgcccaagatgagacccatcggccacgacggctaccaccccaccagcgtggccgagtggctggacagcatcgagctgggcgactacaccaaggccttcctgatcaacggctacaccagcatggacctgctgaagaagatctgggaggtggagctgatcaacgtgctgaagatcaacctgatcggccacagaaagagaatcctggccagcctgggcgacagactgcacgacgaccccccccagaagccccccagaagcatcaccctgagaaccggcgactggggcgagcccagcatcaccctgagaccccccaacgaggccaccgccagcacccccgtgcagtactggcagcaccaccccgagaagctgatcttccagagctgcgactacaaggccttctacctgggcagcatgctgatcaaggagctgagaggcaccgagagcacccaggacgcctgcgccaagatgagagccaactgccagaagagcaccgagcagatgaagaaggtgcccaccatcatcctgagcgtgagctacaagggcgtgaagttcatcgacgccaccaacaagaacatcatcgccgagcacgagatcagaaacatcagctgcgccgcccaggaccccgaggacctgagcaccttcgcctacatcaccaaggacctgaagagcaaccaccactactgccacgtgttcaccgccttcgacgtgaacctggcctacgagatcatcctgaccctgggccaggccttcgaggtggcctaccagctggccctgcaggccagaaagggcggccacagcagcaccctgcccgagagcttcgagaacaagcccagcaagcccatccccaagcccagagtgagcatcagaaagagcgtgcagatcgaccccagcgagcagaagaccctggccaacctgccctggatcgtggagcccggccaggaggccaagagaggcatcaacaccaagtacgagaccaccatcttctag

SEQ ID NO: 72873 - DNA, 1383 bp, synthetic construct
  misc_feature 1..1383: note = Description of Artificial Sequence: Synthetic coding sequence
  source 1..1383: mol_type = other DNA
atgatgtggcagtgccacctgagcgcccaggactacagatactaccccgtggacggctacagcctgctgaagagattccccctgcaccccctgaccggccccagatgccccgtgcagaccgtgggccagtggctggagagcatcggcctgccccagtacgagaaccacctgatggccaacggcttcgacaacgtgcagttcatgggcagcaacgtgatggaggaccaggacctgctggagatcggcatcctgaacagcggccacagacagagaatcctgcaggccatccagctgctgcccaagatgagacccatcggccacgacggctaccaccccaccagcgtggccgagtggctggacagcatcgagctgggcgactacaccaaggccttcctgatcaacggctacaccagcatggacctgctgaagaagatctgggaggtggagctgatcaacgtgctgaagatcaacctgatcggccacagaaagagaatcctggccagcctgggcgacagactgcacgacgaccccccccagaagccccccagaagcatcaccctgagagagcccagcggcaaccacacccccccccagctgagccccagcctgagccagagcacctacaccaccggcggcagcctggacgtgccccacatcatcatgcagggcgacgccagaagaagaagaaacgagaactacttcgacgacatccccagaagcaagctggagagacagatggcccagaccggcgactggggcgagcccagcatcaccctgagaccccccaacgaggccaccgccagcacccccgtgcagtactggcagcaccaccccgagaagctgatcttccagagctgcgactacaaggccttctacctgggcagcatgctgatcaaggagctgagaggcaccgagagcacccaggacgcctgcgccaagatgagagccaactgccagaagagcaccgagcagatgaagaaggtgcccaccatcatcctgagcgtgagctacaagggcgtgaagttcatcgacgccaccaacaagaacatcatcgccgagcacgagatcagaaacatcagctgcgccgcccaggaccccgaggacctgagcaccttcgcctacatcaccaaggacctgaagagcaaccaccactactgccacgtgttcaccgccttcgacgtgaacctggcctacgagatcatcctgaccctgggccaggccttcgaggtggcctaccagctggccctgcaggccagaaagggcggccacagcagcaccctgcccgagagcttcgagaacaagcccagcaagcccatccccaagcccagagtgagcatcagaaagagcgtgcccttctgcttcaaggccgacagacccatctag

SEQ ID NO: 72874 - DNA, 2295 bp, synthetic construct
  misc_feature 1..2295: note = Description of Artificial Sequence: Synthetic coding sequence
  source 1..2295: mol_type = other DNA
atgctggcccaggagagctaccccaagaagagaaactacaccatggagatcgtgcccagcgccagcctggacaccttccccagcgagaacgagaacttcctgtgcgacctgatggacaccgccgtgaccaagaagccctgcagcctggagatcgccagagcccccagccccagaaccgacaacgccagcgaggtggccgtgaccacccccggcaccagcaaccacagaaacagcagcaccggccccacccccgactgcagcccccccagccccgacaccgccctgaagaacatcgtgaaggtgatcagaccccagcccaagcagagaaccagcatcgtgagcagcctggacttccacagaatgaaccacaaccaggagtacttcgagatcaacaccagcaccggctgcaccagcttcaccgccagcccccccgccagcccccccaccagcagcgtgggcaccaccgaggtgaagaacgagggcaccaaccacaccgacgacctgagcagacaggacgacaacgacccccccaaggagtacgaccccggccagttcgccggcctgctgcacggcagcagccccgcctgcgagagccccgagaaccccttccacctgtacggcaagagagagcagtgcgagaagggccaggacgaggtgagcctggccaacagccccctgcccttcaagcagagccccatcgagaacaacagcgagcccctggtgaagaagatcaagcccaaggtggtgagcagaaccatcttccacaagaagagcaaccagctggagaaccacaccatcgtgggcaccagaagcaccagaagcggcagcagaaacggcgaccagtgggtgatgaacgccggcggcttcgtggagagagcctgcaccctgggcagaatcagaagcctgcccaaggccctgatcgacatgcacctgagcaagagcgtgagcaagagcgacagcgacctgatcgcctaccccagcaacgagaagaccagcagagtgaactggagcgagagcagcaccgccgagcacagcagcaagggcaacagcgagagaacccccagcttcaccagcgagtgggaggagatcgacaagatcatgagcagcatcgacgtgggcatcaacaacgagctgaaggagatgaacggccccagatgccccgtgcagaccgtgggccagtggctggagagcatcggcctgccccagtacgagaaccacctgatggccaacggcttcgacaacgtgcagttcatgggcagcaacgtgatggaggaccaggacctgctggagatcggcatcctgaacagcggccacagacagagaatcctgcaggccatccagctgctgcccaagatgagacccatcggccacgacggctaccaccccaccagcgtggccgagtggctggacagcatcgagctgggcgactacaccaaggccttcctgatcaacggctacaccagcatggacctgctgaagaagatctgggaggtggagctgatcaacgtgctgaagatcaacctgatcggccacagaaagagaatcctggccagcctgggcgacagactgcacgacgaccccccccagaagccccccagaagcatcaccctgagaaccggcgactggggcgagcccagcatcaccctgagaccccccaacgaggccaccgccagcacccccgtgcagtactggcagcaccaccccgagaagctgatcttccagagctgcgactacaaggccttctacctgggcagcatgctgatcaaggagctgagaggcaccgagagcacccaggacgcctgcgccaagatgagagccaactgccagaagagcaccgagcagatgaagaaggtgcccaccatcatcctgagcgtgagctacaagggcgtgaagttcatcgacgccaccaacaagaacatcatcgccgagcacgagatcagaaacatcagctgcgccgcccaggaccccgaggacctgagcaccttcgcctacatcaccaaggacctgaagagcaaccaccactactgccacgtgttcaccgccttcgacgtgaacctggcctacgagatcatcctgaccctgggccaggccttcgaggtggcctaccagctggccctgcaggccagaaagggcggccacagcagcaccctgcccgagagcttcgagaacaagcccagcaagcccatccccaagcccagagtgagcatcagaaagagcgtggacctgctgcacgccagccacaccggccaggagcccagcgagagacacaccgaggaggccctgagaaagttctag

SEQ ID NO: 72875 - DNA, 3747 bp, synthetic construct
  misc_feature 1..3747: note = Description of Artificial Sequence: Synthetic coding sequence
  source 1..3747: mol_type = other DNA
atgggcaaggaccaggagctgctggaggccgccagaaccggcaacgtggccctggtggagaagctgctgagcggcagaaagggcggcatcctgggcggcggcagcggccccctgcccctgagcaacctgctgagcatctggagaggccccaacgtgaactgcaccgacagcagcggctacaccgccctgcaccacgccgccctgaacggccacaaggacatcgtgctgaagctgctgcagtacgaggccagcaccaacgtggccgacaacaagggctacttccccatccacctggccgcctggaagggcgacgtggagatcgtgaagatcctgatccaccacggccccagccacagcagagtgaacgagcagaacaacgagaacgagaccgccctgcactgcgccgcccagtacggccacagcgaggtggtggccgtgctgctggaggagctgaccgaccccaccatcagaaacagcaagctggagacccccctggacctggccgccctgtacggcagactgagagtggtgaagatgatcatcagcgcccaccccaacctgatgagctgcaacaccagaaagcacacccccctgcacctggccgccagaaacggccacaaggccgtggtgcaggtgctgctggaggccggcatggacgtgagctgccagaccgagaagggcagcgccctgcacgaggccgccctgttcggcaaggtggacgtggtgagagtgctgctggagaccggcatcgacgccaacatcaaggacagcctgggcagaaccgtgctggacatcctgaaggagcaccccagccagaagagcctgcagatcgccaccctgctgcaggagtacctggagggcgtgggcagaagcaccgtgctggaggagcccgtgcaggaggacgccacccaggagacccacatcagcagccccgtggagagccccagccagaagaccaagagcgagaccgtgaccggcgagctgagcaagctgctggacgagatcaagctgtgccaggagaaggactacagcttcgaggacctgtgccacaccatcagcgaccactacctggacaacctgagcaagatcagcgaggaggagctgggcaagaacggcagccagagcgtgagaaccagcagcaccatcaacctgagccccggcgaggtggaggaggaggacgacgacgagaacacctgcggccccagcggcctgtgggaggccctgaccccctgcaacggctgcagaaacctgggcttccccatgctggcccaggagagctaccccaagaagagaaactacaccatggagatcgtgcccagcgccagcctggacaccttccccagcgagaacgagaacttcctgtgcgacctgatggacaccgccgtgaccaagaagccctgcagcctggagatcgccagagcccccagccccagaaccgacaacgccagcgaggtggccgtgaccacccccggcaccagcaaccacagaaacagcagcaccggccccacccccgactgcagcccccccagccccgacaccgccctgaagaacatcgtgaaggtgatcagaccccagcccaagcagagaaccagcatcgtgagcagcctggacttccacagaatgaaccacaaccaggagtacttcgagatcaacaccagcaccggctgcaccagcttcaccgccagcccccccgccagcccccccaccagcagcgtgggcaccaccgaggtgaagaacgagggcaccaaccacaccgacgacctgagcagacaggacgacaacgacccccccaaggagtacgaccccggccagttcgccggcctgctgcacggcagcagccccgcctgcgagagccccgagaaccccttccacctgtacggcaagagagagcagtgcgagaagggccaggacgaggtgagcctggccaacagccccctgcccttcaagcagagccccatcgagaacaacagcgagcccctggtgaagaagatcaagcccaaggtggtgagcagaaccatcttccacaagaagagcaaccagctggagaaccacaccatcgtgggcaccagaagcaccagaagcggcagcagaaacggcgaccagtgggtgatgaacgccggcggcttcgtggagagagcctgcaccctgggcagaatcagaagcctgcccaaggccctgatcgacatgcacctgagcaagagcgtgagcaagagcgacagcgacctgatcgcctaccccagcaacgagaagaccagcagagtgaactggagcgagagcagcaccgccgagcacagcagcaagggcaacagcgagagaacccccagcttcaccagcgagtgggaggagatcgacaagatcatgagcagcatcgacgtgggcatcaacaacgagctgaaggagatgaacggcgagaccaccagacccagatgccccgtgcagaccgtgggccagtggctggagagcatcggcctgccccagtacgagaaccacctgatggccaacggcttcgacaacgtgcagttcatgggcagcaacgtgatggaggaccaggacctgctggagatcggcatcctgaacagcggccacagacagagaatcctgcaggccatccagctgctgcccaagatgagacccatcggccacgacggctaccaccccaccagcgtggccgagtggctggacagcatcgagctgggcgactacaccaaggccttcctgatcaacggctacaccagcatggacctgctgaagaagatctgggaggtggagctgatcaacgtgctgaagatcaacctgatcggccacagaaagagaatcctggccagcctgggcgacagactgcacgacgaccccccccagaagccccccagaagcatcaccctgagagagcccagcggcaaccacacccccccccagctgagccccagcctgagccagagcacctacaccaccggcggcagcctggacgtgccccacatcatcatgcagggcgacgccagaagaagaagaaacgagaactacttcgacgacatccccagaagcaagctggagagacagatggcccagaccggcgactggggcgagcccagcatcaccctgagaccccccaacgaggccaccgccagcacccccgtgcagtactggcagcaccaccccgagaagctgatcttccagagctgcgactacaaggccttctacctgggcagcatgctgatcaaggagctgagaggcaccgagagcacccaggacgcctgcgccaagatgagagccaactgccagaagagcaccgagcagatgaagaaggtgcccaccatcatcctgagcgtgagctacaagggcgtgaagttcatcgacgccaccaacaagaacatcatcgccgagcacgagatcagaaacatcagctgcgccgcccaggaccccgaggacctgagcaccttcgcctacatcaccaaggacctgaagagcaaccaccactactgccacgtgttcaccgccttcgacgtgaacctggcctacgagatcatcctgaccctgggccaggccttcgaggtggcctaccagctggccctgcaggccagaaagggcggccacagcagcaccctgcccgagagcttcgagaacaagcccagcaagcccatccccaagcccagagtgagcatcagaaagagcgtggacctgctgcacgccagccacaccggccaggagcccagcgagagacacaccgaggaggccctgagaaagttctag

SEQ ID NO: 72876 - DNA, 1074 bp, synthetic construct
  misc_feature 1..1074: note = Description of Artificial Sequence: Synthetic coding sequence
  source 1..1074: mol_type = other DNA
atggccaacggcttcgacaacgtgcagttcatgggcagcaacgtgatggaggaccaggacctgctggagatcggcatcctgaacagcggccacagacagagaatcctgcaggccatccagctgctgcccaagatgagacccatcggccacgacggctaccaccccaccagcgtggccgagtggctggacagcatcgagctgggcgactacaccaaggccttcctgatcaacggctacaccagcatggacctgctgaagaagatctgggaggtggagctgatcaaccagagcagcgtgtgcgagatctggaccaaccagaacgccggcttccccttcagcgccatccaccaggtgcacaacaccggcgactggggcgagcccagcatcaccctgagaccccccaacgaggccaccgccagcacccccgtgcagtactggcagcaccaccccgagaagctgatcttccagagctgcgactacaaggccttctacctgggcagcatgctgatcaaggagctgagaggcaccgagagcacccaggacgcctgcgccaagatgagagccaactgccagaagagcaccgagcagatgaagaaggtgcccaccatcatcctgagcgtgagctacaagggcgtgaagttcatcgacgccaccaacaagaacatcatcgccgagcacgagatcagaaacatcagctgcgccgcccaggaccccgaggacctgagcaccttcgcctacatcaccaaggacctgaagagcaaccaccactactgccacgtgttcaccgccttcgacgtgaacctggcctacgagatcatcctgaccctgggccaggccttcgaggtggcctaccagctggccctgcaggccagaaagggcggccacagcagcaccctgcccgagagcttcgagaacaagcccagcaagcccatccccaagcccagagtgagcatcagaaagagcgtgatcgaccccagcgagcagaagaccctggccaacctgccctggatcgtggagcccggccaggaggccaagagaggcatcaacaccaagtacgagaccaccatcttctag

SEQ ID NO: 72877 - DNA, 1533 bp, synthetic construct
  misc_feature 1..1533: note = Description of Artificial Sequence: Synthetic coding sequence
  source 1..1533: mol_type = other DNA
atgatgtggcagtgccacctgagcgcccaggactacagatactaccccgtggacggctacagcctgctgaagagattccccctgcaccccctgaccggccccagatgccccgtgcagaccgtgggccagtggctggagagcatcggcctgccccagtacgagaaccacctgatggccaacggcttcgacaacgtgcagttcatgggcagcaacgtgatggaggaccaggacctgctggagatcggcatcctgaacagcggccacagacagagaatcctgcaggccatccagctgctgcccaagatgagacccatcggccacgacggctaccaccccaccagcgtggccgagtggctggacagcatcgagctgggcgactacaccaaggccttcctgatcaacggctacaccagcatggacctgctgaagaagatctgggaggtggagctgatcaacgtgctgaagatcaacctgatcggccacagaaagagaatcctggccagcctgggcgacagactgcacgacgaccccccccagaagccccccagaagcatcaccctgagagagcccagcggcaaccacacccccccccagctgagccccagcctgagccagagcacctacaccaccggcggcagcctggacgtgccccacatcatcatgcagggcgacgccagaagaagaagaaacgagaactacttcgacgacatccccagaagcaagctggagagacagatggcccagagcagcgtgtgcgagatctggaccaaccagaacgccggcttccccttcagcgccatccaccaggtgcacaacaccggcgactggggcgagcccagcatcaccctgagaccccccaacgaggccaccgccagcacccccgtgcagtactggcagcaccaccccgagaagctgatcttccagagctgcgactacaaggccttctacctgggcagcatgctgatcaaggagctgagaggcaccgagagcacccaggacgcctgcgccaagatgagagccaactgccagaagagcaccgagcagatgaagaaggtgcccaccatcatcctgagcgtgagctacaagggcgtgaagttcatcgacgccaccaacaagaacatcatcgccgagcacgagatcagaaacatcagctgcgccgcccaggaccccgaggacctgagcaccttcgcctacatcaccaaggacctgaagagcaaccaccactactgccacgtgttcaccgccttcgacgtgaacctggcctacgagatcatcctgaccctgggccaggccttcgaggtggcctaccagctggccctgcaggccagaaagggcggccacagcagcaccctgcccgagagcttcgagaacaagcccagcaagcccatccccaagcccagagtgagcatcagaaagagcgtgcagatcgaccccagcgagcagaagaccctggccaacctgccctggatcgtggagcccggccaggaggccaagagaggcatcaacaccaagtacgagaccaccatcttctag

SEQ ID NO: 72878 - DNA, 1245 bp, synthetic construct
  misc_feature 1..1245: note = Description of Artificial Sequence: Synthetic coding sequence
  source 1..1245: mol_type = other DNA
atgatgtggcagtgccacctgagcgcccaggactacagatactaccccgtggacggctacagcctgctgaagagattccccctgcaccccctgaccggccccagatgccccgtgcagaccgtgggccagtggctggagagcatcggcctgccccagtacgagaaccacctgatggccaacggcttcgacaacgtgcagttcatgggcagcaacgtgatggaggaccaggacctgctggagatcggcatcctgaacagcggccacagacagagaatcctgcaggccatccagctgctgcccaagatgagacccatcggccacgacggctaccaccccaccagcgtggccgagtggctggacagcatcgagctgggcgactacaccaaggccttcctgatcaacggctacaccagcatggacctgctgaagaagatctgggaggtggagctgatcaacgtgctgaagatcaacctgatcggccacagaaagagaatcctggccagcctgggcgacagactgcacgacgaccccccccagaagccccccagaagcatcaccctgagaaccggcgactggggcgagcccagcatcaccctgagaccccccaacgaggccaccgccagcacccccgtgcagtactggcagcaccaccccgagaagctgatcttccagagctgcgactacaaggccttctacctgggcagcatgctgatcaaggagctgagaggcaccgagagcacccaggacgcctgcgccaagatgagagccaactgccagaagagcaccgagcagatgaagaaggtgcccaccatcatcctgagcgtgagctacaagggcgtgaagttcatcgacgccaccaacaagaacatcatcgccgagcacgagatcagaaacatcagctgcgccgcccaggaccccgaggacctgagcaccttcgcctacatcaccaaggacctgaagagcaaccaccactactgccacgtgttcaccgccttcgacgtgaacctggcctacgagatcatcctgaccctgggccaggccttcgaggtggcctaccagctggccctgcaggccagaaagggcggccacagcagcaccctgcccgagagcttcgagaacaagcccagcaagcccatccccaagcccagagtgagcatcagaaagagcgtggacctgctgcacgccagccacaccggccaggagcccagcgagagacacaccgaggaggccctgagaaagttctag

SEQ ID NO: 72879 - DNA, 1353 bp, synthetic construct
  misc_feature 1..1353: note = Description of Artificial Sequence: Synthetic coding sequence
  source 1..1353: mol_type = other DNA
atgatgtggcagtgccacctgagcgcccaggactacagatactaccccgtggacggctacagcctgctgaagagattccccctgcaccccctgaccggccccagatgccccgtgcagaccgtgggccagtggctggagagcatcggcctgccccagtacgagaaccacctgatggccaacggcttcgacaacgtgcagttcatgggcagcaacgtgatggaggaccaggacctgctggagatcggcatcctgaacagcggccacagacagagaatcctgcaggccatccagctgctgcccaagatgagacccatcggccacgacggctaccaccccaccagcgtggccgagtggctggacagcatcgagctgggcgactacaccaaggccttcctgatcaacggctacaccagcatggacctgctgaagaagatctgggaggtggagctgatcaacgtgctgaagatcaacctgatcggccacagaaagagaatcctggccagcctgggcgacagactgcacgacgaccccccccagaagccccccagaagcatcaccctgagaagcagcgtgtgcgagatctggaccaaccagaacgccggcttccccttcagcgccatccaccaggtgcacaacaccggcgactggggcgagcccagcatcaccctgagaccccccaacgaggccaccgccagcacccccgtgcagtactggcagcaccaccccgagaagctgatcttccagagctgcgactacaaggccttctacctgggcagcatgctgatcaaggagctgagaggcaccgagagcacccaggacgcctgcgccaagatgagagccaactgccagaagagcaccgagcagatgaagaaggtgcccaccatcatcctgagcgtgagctacaagggcgtgaagttcatcgacgccaccaacaagaacatcatcgccgagcacgagatcagaaacatcagctgcgccgcccaggaccccgaggacctgagcaccttcgcctacatcaccaaggacctgaagagcaaccaccactactgccacgtgttcaccgccttcgacgtgaacctggcctacgagatcatcctgaccctgggccaggccttcgaggtggcctaccagctggccctgcaggccagaaagggcggccacagcagcaccctgcccgagagcttcgagaacaagcccagcaagcccatccccaagcccagagtgagcatcagaaagagcgtgcagatcgaccccagcgagcagaagaccctggccaacctgccctggatcgtggagcccggccaggaggccaagagaggcatcaacaccaagtacgagaccaccatcttctag

SEQ ID NO: 72880 - DNA, 1185 bp, synthetic construct
  misc_feature 1..1185: note = Description of Artificial Sequence: Synthetic coding sequence
  source 1..1185: mol_type = other DNA
atgggccccagatgccccgtgcagaccgtgggccagtggctggagagcatcggcctgccccagtacgagaaccacctgatggccaacggcttcgacaacgtgcagttcatgggcagcaacgtgatggaggaccaggacctgctggagatcggcatcctgaacagcggccacagacagagaatcctgcaggccatccagctgctgcccaagatgagacccatcggccacgacggctaccaccccaccagcgtggccgagtggctggacagcatcgagctgggcgactacaccaaggccttcctgatcaacggctacaccagcatggacctgctgaagaagatctgggaggtggagctgatcaacgtgctgaagatcaacctgatcggccacagaaagagaatcctggccagcctgggcgacagactgcacgacgaccccccccagaagccccccagaagcatcaccctgagaaccggcgactggggcgagcccagcatcaccctgagaccccccaacgaggccaccgccagcacccccgtgcagtactggcagcaccaccccgagaagctgatcttccagagctgcgactacaaggccttctacctgggcagcatgctgatcaaggagctgagaggcaccgagagcacccaggacgcctgcgccaagatgagagccaactgccagaagagcaccgagcagatgaagaaggtgcccaccatcatcctgagcgtgagctacaagggcgtgaagttcatcgacgccaccaacaagaacatcatcgccgagcacgagatcagaaacatcagctgcgccgcccaggaccccgaggacctgagcaccttcgcctacatcaccaaggacctgaagagcaaccaccactactgccacgtgttcaccgccttcgacgtgaacctggcctacgagatcatcctgaccctgggccaggccttcgaggtggcctaccagctggccctgcaggccagaaagggcggccacagcagcaccctgcccgagagcttcgagaacaagcccagcaagcccatccccaagcccagagtgagcatcagaaagagcgtgatcgaccccagcgagcagaagaccctggccaacctgccctggatcgtggagcccggccaggaggccaagagaggcatcaacaccaagtacgagaccaccatcttctag

SEQ ID NO: 72881 - DNA, 1254 bp, synthetic construct
  misc_feature 1..1254: note = Description of Artificial Sequence: Synthetic coding sequence
  source 1..1254: mol_type = other DNA
atgagcaccagataccaccaggccgccagcgacagctacctggagctgctgaaggaggccaccaagagagacctgaacctgagcgacgaggacggcatgacccccaccctgctggccgcctaccacggcaacctggaggccctggagatcatctgcagcagaggcggcgaccccgacagatgcgacatctggggcaacacccccctgcacttcgccgccagcaacggccacgcccactgcgtgagcttcctggtgaacttcggcgccaacatcttcgccctggacaacgacctgcagacccccctggacgccgccgccagcagagagcagaacgagtgcgtggccctgctggacaaggccgccaccgcccagaacatcatgaaccccaagaaggtgaccagactgaaggagcaggcccagaagaacgccagaagacagatcaaggagtgcgagagactgcaggagaagcaccagaacaagatggcccacacctacagcaaggaggagagcggcaccctgagcagcagcaagggcaccttcagcagaagcagccccagcaacgccagcgcccccggcaccttcggcagcctgagcaagggcatcaaggacaccttcaagatcaagttcaagaagaacaaggacaccgccgagcaggtgggcaaggagggcagaagcggccagagaaacgtgatggaggtgttcagagaggaggaggaggacagcttcagcggcgacttcaaggagaagctgcagctgagcgccgaggaggacggcagcgtgcaccacgagagcatcctgaacagacccggcctgggcagcatcgtgttcagaagaaacagaatcagcagccccgaggacatcagcgacagcaagagagagttcggcttcaagctgcccagcgagctgctgcagagacagggcgccagcgaggccgacgagggcgccgccgacgaggagggcgaggagaacggcctgaaggacgacctgccctgggacgacgacgaggtggagtgggaggaggacgtggtggacgccacccccctggaggtgttcctgctgagccagcacctggaggagttcctgcccatcttcaagagagagcagatcgacctggaggccctgctgctgtgcagcgacgaggacctgcagagcatccagatgcagctgggccccagaaagaaggtgctgaacgccatcaacagaagaaagcaggtgctgcagcagcccggccagctggtggacaccagcctgtag

SEQ ID NO: 72882 - DNA, 7992 bp, synthetic construct
  misc_feature 1..7992: note = Description of Artificial Sequence: Synthetic coding sequence
  source 1..7992: mol_type = other DNA
atgcccaagggcggctgccccaaggccccccagcaggaggagctgcccctgagcagcgacatggtggagaagcagaccggcaagaaggacaaggacaaggtgagcctgaccaagacccccaagctggagagaggcgacggcggcaaggaggtgagagagagagccagcaagagaaagctgcccttcaccgccggcgccaacggcgagcagaaggacagcgacaccgagaagcagggccccgagagaaagagaatcaagaaggagcccgtgaccagaaaggccggcctgctgttcggcatgggcctgagcggcatcagagccggctaccccctgagcgagagacagcaggtggccctgctgatgcagatgaccgccgaggagagcgccaacagccccgtggacaccacccccaagcaccccagccagagcaccgtgtgccagaagggcacccccaacagcgccagcaagaccaaggacaaggtgaacaagagaaacgagagaggcgagaccagactgcacagagccgccatcagaggcgacgccagaagaatcaaggagctgatcagcgagggcgccgacgtgaacgtgaaggacttcgccggctggaccgccctgcacgaggcctgcaacagaggctactacgacgtggccaagcagctgctggccgccggcgccgaggtgaacaccaagggcctggacgacgacacccccctgcacgacgccgccaacaacggccactacaaggtggtgaagctgctgctgagatacggcggcaacccccagcagagcaacagaaagggcgagacccccctgaaggtggccaacagccccaccatggtgaacctgctgctgggcaagggcacctacaccagcagcgaggagagcagcaccgagagcagcgaggaggaggacgcccccagcttcgcccccagcagcagcgtggacggcaacaacaccgacagcgagttcgagaagggcctgaagcacaaggccaagaaccccgagccccagaaggccaccgcccccgtgaaggacgagtacgagttcgacgaggacgacgagcaggacagagtgccccccgtggacgacaagcacctgctgaagaaggactacagaaaggagaccaagagcaacagcttcatcagcatccccaagatggaggtgaagagctacaccaagaacaacaccatcgcccccaagaaggccagccacagaatcctgagcgacaccagcgacgaggaggacgccagcgtgaccgtgggcaccggcgagaagctgagactgagcgcccacaccatcctgcccggcagcaagaccagagagcccagcaacgccaagcagcagaaggagaagaacaaggtgaagaagaagagaaagaaggagaccaagggcagagaggtgagattcggcaagagaagcgacaagttctgcagcagcgagagcgagagcgagagcagcgagagcggcgaggacgacagagacagcctgggcagcagcggctgcctgaagggcagccccctggtgctgaaggaccccagcctgttcagcagcctgagcgccagcagcaccagcagccacggcagcagcgccgcccagaagcagaaccccagccacaccgaccagcacaccaagcactggagaaccgacaactggaagaccatcagcagccccgcctggagcgaggtgagcagcctgagcgacagcaccagaaccagactgaccagcgagagcgactacagcagcgagggcagcagcgtggagagcctgaagcccgtgagaaagagacaggagcacagaaagagagccagcctgagcgagaagaagagccccttcctgagcagcgccgagggcgccgtgcccaagctggacaaggagggcaaggtggtgaagaagcacaagaccaagcacaagcacaagaacaaggagaagggccagtgcagcatcagccaggagctgaagctgaagagcttcacctacgagtacgaggacagcaagcagaagagcgacaaggccatcctgctggagaacgacctgagcaccgagaacaagctgaaggtgctgaagcacgacagagaccacttcaagaaggaggagaagctgagcaagatgaagctggaggagaaggagtggctgttcaaggacgagaagagcctgaagagaatcaaggacaccaacaaggacatcagcagaagcttcagagaggagaaggacagaagcaacaaggccgagaaggagagaagcctgaaggagaagagccccaaggaggagaagctgagactgtacaaggaggagagaaagaagaagagcaaggacagacccagcaagctggagaagaagaacgacctgaaggaggacaagatcagcaaggagaaggagaagatcttcaaggaggacaaggagaagctgaagaaggagaaggtgtacagagaggacagcgccttcgacgagtactgcaacaagaaccagttcctggagaacgaggacaccaagttcagcctgagcgacgaccagagagacagatggttcagcgacctgagcgacagcagcttcgacttcaagggcgaggacagctgggacagccccgtgaccgactacagagacatgaagagcgacagcgtggccaagctgatcctggagaccgtgaaggaggacagcaaggagagaagaagagacagcagagccagagagaagagagactacagagagcccttcttcagaaagaaggacagagactacctggacaagaacagcgagaagagaaaggagcagaccgagaagcacaagagcgtgcccggctacctgagcgagaaggacaagaagagaagagagagcgccgaggccggcagagacagaaaggacgccctggagagctgcaaggagagaagagacggcagagccaagcccgaggaggcccacagagaggagctgaaggagtgcggctgcgagagcggcttcaaggacaagagcgacggcgacttcggcaagggcctggagccctgggagagacaccaccccgccagagagaaggagaagaaggacggccccgacaaggagagaaaggagaagaccaagcccgagagatacaaggagaagagcagcgacaaggacaagagcgagaagagcatcctggagaagtgccagaaggacaaggagttcgacaagtgcttcaaggagaagaaggacaccaaggagaagcacaaggacacccacggcaaggacaaggagagaaaggccagcctggaccagggcaaggagaagaaggagaaggccttccccggcatcatcagcgaggacttcagcgagaagaaggacgacaagaagggcaaggagaagagctggtacatcgccgacatcttcaccgacgagagcgaggacgacagagacagctgcatgggcagcggcttcaagatgggcgaggccagcgacctgcccagaaccgacggcctgcaggagaaggaggagggcagagaggcctacgccagcgacagacacagaaagagcagcgacaagcagcaccccgagagacagaaggacaaggagcccagagacagaagaaaggacagaggcgccgccgacgccggcagagacaagaaggagaaggtgttcgagaagcacaaggagaagaaggacaaggagagcaccgagaagtacaaggacagaaaggacagagccagcgtggacagcacccaggacaagaagaacaagcagaagctgcccgagaaggccgagaagaagcacgccgccgaggacaaggccaagagcaagcacaaggagaagagcgacaaggagcacagcaaggagagaaagagcagcagaagcgccgacgccgagaagagcctgctggagaagctggaggaggaggccctgcacgagtacagagaggacagcaacgacaagatcagcgaggtgagcagcgacagcttcaccgacagaggccaggagcccggcctgaccgccttcctggaggtgagcttcaccgagccccccggcgacgacaagcccagagagagcgcctgcctgcccgagaagctgaaggagaaggagagacacagacacagcagcagcagcagcaagaagagccacgacagagagagagccaagaaggagaaggccgagaagaaggagaagggcgaggactacaaggagggcggcagcagaaaggacagcggccagtacgagaaggacttcctggaggccgacgcctacggcgtgagctacaacatgaaggccgacatcgaggacgagctggacaagaccatcgagctgttcagcaccgagaagaaggacaagaacgacagcgagagagagcccagcaagaagatcgagaaggagctgaagccctacggcagcagcgccatcaacatcctgaaggagaagaagaagagagagaagcacagagagaagtggagagacgagaaggagagacacagagacagacacgccgacggcctgctgagacaccacagagacgagctgctgagacaccacagagacgagcagaagcccgccaccagagacaaggacagcccccccagagtgctgaaggacaagagcagagacgagggccccagactgggcgacgccaagctgaaggagaagttcaaggacggcgccgagaaggagaagggcgaccccgtgaagatgagcaacggcaacgacaaggtggcccccagcaaggaccccggcaagaaggacgccagacccagagagaagctgctgggcgacggcgacctgatgatgaccagcttcgagagaatgctgagccagaaggacctggagatcgaggagagacacaagagacacaaggagagaatgaagcagatggagaagctgagacacagaagcggcgaccccaagctgaaggagaaggccaagcccgccgacgacggcagaaagaagggcctggacatccccgccaagaagccccccggcctggacccccccttcaaggacaagaagctgaaggagagcacccccatcccccccgccgccgagaacaagctgcaccccgccagcggcgccgacagcaaggactggctggccggcccccacatgaaggaggtgctgcccgccagccccagacccgaccagagcagacccaccggcgtgcccacccccaccagcgtgctgagctgccccagctacgaggaggtgatgcacacccccagaacccccagctgcagcgccgacgactacgccgacctggtgttcgactgcgccgacagccagcacagcacccccgtgcccaccgcccccaccagcgcctgcagccccagcttcttcgacagattcagcgtggccagcagcggcctgagcgagaacgccagccaggcccccgccagacccctgagcaccaacctgtacagaagcgtgagcgtggacatcagaagaacccccgaggaggagttcagcgtgggcgacaagctgttcagacagcagagcgtgcccgccgccagcagctacgacagccccatgccccccagcatggaggacagagcccccctgccccccgtgcccgccgagaagttcgcctgcctgagccccggctactacagccccgactacggcctgcccagccccaaggtggacgccctgcactgcccccccgccgccgtggtgaccgtgacccccagccccgagggcgtgttcagcagcctgcaggccaagcccagccccagccccagagccgagctgctggtgcccagcctggagggcgccctgccccccgacctggacaccagcgaggaccagcaggccaccgccgccatcatcccccccgagcccagctacctggagcccctggacgagggccccttcagcgccgtgatcaccgaggagcccgtggagtgggcccaccccagcgagcaggccctggccagcagcctgatcggcggcaccagcgagaaccccgtgagctggcccgtgggcagcgacctgctgctgaagagcccccagagattccccgagagccccaagagattctgccccgccgaccccctgcacagcgccgcccccggccccttcagcgccagcgaggccccctaccccgccccccccgccagccccgccccctacgccctgcccgtggccgagcccggcctggaggacgtgaaggacggcgtggacgccgtgcccgccgccatcagcaccagcgaggccgccccctacgccccccccagcggcctggagagcttcttcagcaactgcaagagcctgcccgaggcccccctggacgtggcccccgagcccgcctgcgtggccgccgtggcccaggtggaggccctgggccccctggagaacagcttcctggacggcagcagaggcctgagccacctgggccaggtggagcccgtgccctgggccgacgccttcgccggccccgaggacgacctggacctgggccccttcagcctgcccgagctgcccctgcagaccaaggacgccgccgacggcgaggccgagcccgtggaggagagcctggccccccccgaggagatgccccccggcgcccccggcgtgatcaacggcggcgacgtgagcaccgtggtggccgaggagccccccgccctgccccccgaccaggccagcaccagactgcccgccgagctggagcccgagcccagcggcgagcccaagctggacgtggccctggaggccgccgtggaggccgagaccgtgcccgaggagagagccagaggcgaccccgacagcagcgtggagcccgcccccgtgccccccgagcagagacccctgggcagcggcgaccagggcgccgaggccgagggcccccccgccgccagcctgtgcgcccccgacggccccgcccccaacaccgtggcccaggcccaggccgccgacggcgccggccccgaggacgacaccgaggccagcagagccgccgcccccgccgagggcccccccggcggcatccagcccgaggccgccgagcccaagcccaccgccgaggcccccaaggcccccagagtggaggagatcccccagagaatgaccagaaacagagcccagatgctggccaaccagagcaagcagggccccccccccagcgagaaggagtgcgcccccacccccgcccccgtgaccagagccaaggccagaggcagcgaggacgacgacgcccaggcccagcaccccagaaagagaagattccagagaagcacccagcagctgcagcagcagctgaacaccagcacccagcagaccagagaggtgatccagcagaccctggccgccatcgtggacgccatcaagctggacgccatcgagccctaccacagcgacagagccaacccctacttcgagtacctgcagatcagaaagaagatcgaggagaagagaaagatcctgtgctgcatcaccccccaggccccccagtgctacgccgagtacgtgacctacaccggcagctacctgctggacggcaagcccctgagcaagctgcacatccccgtgatcgcccccccccccagcctggccgagcccctgaaggagctgttcagacagcaggaggccgtgagaggcaagctgagactgcagcacagcatcgagagagagaagctgatcgtgagctgcgagcaggagatcctgagagtgcactgcagagccgccagaaccatcgccaaccaggccgtgcccttcagcgcctgcaccatgctgctggacagcgaggtgtacaacatgcccctggagagccagggcgacgagaacaagagcgtgagagacagattcaacgccagacagttcatcagctggctgcaggacgtggacgacaagtacgacagaatgaagacctgcctgctgatgagacagcagcacgaggccgccgccctgaacgccgtgcagagaatggagtggcagctgaaggtgcaggagctggaccccgccggccacaagagcctgtgcgtgaacgaggtgcccagcttctacgtgcccatggtggacgtgaacgacgacttcgtgctgctgcccgcctag

SEQ ID NO: 72883 - DNA, 1836 bp, synthetic construct
  misc_feature 1..1836: note = Description of Artificial Sequence: Synthetic coding sequence
  source 1..1836: mol_type = other DNA
agcatccccaagatggaggtgaagagctacaccaagaacaacaccatcgcccccaagaaggccagccacagaatcctgagcgacaccagcgacgaggaggacgccagcgtgaccgtgggcaccggcgagaagctgagactgagcgcccacaccatcctgcccggcagcaagaccagagagcccagcaacgccaagcagcagaaggagaagaacaaggtgaagaagaagagaaagaaggagaccaagggcagagaggtgagattcggcaagagaagcgacaagttctgcagcagcgagagcgagagcgagagcagcgagagcggcgaggacgacagagacagcctgggcagcagcggctgcctgaagggcagccccctggtgctgaaggaccccagcctgttcagcagcctgagcgccagcagcaccagcagccacggcagcagcgccgcccagaagcagaaccccagccacaccgaccagcacaccaagcactggagaaccgacaactggaagaccatcagcagccccgcctggagcgaggtgagcagcctgagcgacagcaccagaaccagactgaccagcgagagcgactacagcagcgagggcagcagcgtggagagcctgaagcccgtgagaaagagacaggagcacagaaagagagccagcctgagcgagaagaagagccccttcctgagcagcgccgagggcgccgtgcccaagctggacaaggagggcaaggtggtgaagaagcacaagaccaagcacaagcacaagaacaaggagaagggccagtgcagcatcagccaggagctgaagctgaagagcttcacctacgagtacgaggacagcaagcagaagagcgacaaggccatcctgctggagaacgacctgagcaccgagaacaagctgaaggtgctgaagcacgacagagaccacttcaagaaggaggagaagctgagcaagatgaagctggaggagaaggagtggctgttcaaggacgagaagagcctgaagagaatcaaggacaccaacaaggacatcagcagaagcttcagagaggagaaggacagaagcaacaaggccgagaaggagagaagcctgaaggagaagagccccaaggaggagaagctgagactgtacaaggaggagagaaagaagaagagcaaggacagacccagcaagctggagaagaagaacgacctgaaggaggacaagatcagcaaggagaaggagaagatcttcaaggaggacaaggagaagctgaagaaggagaaggtgtacagagaggacagcgccttcgacgagtactgcaacaagaaccagttcctggagaacgaggacaccaagttcagcctgagcgacgaccagagagacagatggttcagcgacctgagcgacagcagcttcgacttcaagggcgaggacagctgggacagccccgtgaccgactacagagacatgaagagcgacagcgtggccaagctgatcctggagaccgtgaaggaggacagcaaggagagaagaagagacagcagagccagagagaagagagactacagagagcccttcttcagaaagaaggacagagactacctggacaagaacagcgagaagagaaaggagcagaccgagaagcacaagagcgtgcccggctacctgagcgagaagcacgagagaagaagaagaagaatggcccccatcagaaagggcagaagaagacagaaccagaaggacaccaagagaaaccccgtgaccagaaccaaggtgagaaaccagagctggaagaacgtgagaagaaccaagaacctgatcaacgtgctgaagagaaagaagtag

SEQ ID NO: 72884 - DNA, 7992 bp, synthetic construct; identical to SEQ ID NO: 72882
  misc_feature 1..7992: note = Description of Artificial Sequence: Synthetic coding sequence
  source 1..7992: mol_type = other DNA

SEQ ID NO: 72885 - DNA, 1317 bp, synthetic construct
  misc_feature 1..1317: note = Description of Artificial Sequence: Synthetic coding sequence
  source 1..1317: mol_type = other DNA
agcgccggcagagtgaacgaggacagagtgagaagcagaaccatgcccaagggcggctgccccaaggccccccagcaggaggagctgcccctgagcagcgacatggtggagaagcagaccggcaagaaggacaaggacaaggtgagcctgaccaagacccccaagctggagagaggcgacggcggcaaggaggtgagagagagagccagcaagagaaagctgcccttcaccgccggcgccaacggcgagcagaaggacagcgacaccgagaagcagggccccgagagaaagagaatcaagaaggagcccgtgaccagaaaggccggcctgctgttcggcatgggcctgagcggcatcagagccggctaccccctgagcgagagacagcaggtggccctgctgatgcagatgaccgccgaggagagcgccaacagccccgtggacaccacccccaagcaccccagccagagcaccgtgtgccagaagggcacccccaacagcgccagcaagaccaaggacaaggtgaacaagagaaacgagagaggcgagaccagactgcacagagccgccatcagaggcgacgccagaagaatcaaggagctgatcagcgagggcgccgacgtgaacgtgaaggacttcgccggctggaccgccctgcacgaggcctgcaacagaggctactacgacgtggccaagcagctgctggccgccggcgccgaggtgaacaccaagggcctggacgacgacacccccctgcacgacgccgccaacaacggccactacaaggtggtgaagctgctgctgagatacggcggcaacccccagcagagcaacagaaagggcgagacccccctgaaggtggccaacagccccaccatggtgaacctgctgctgggcaagggcacctacaccagcagcgaggagagcagcaccgagagcagcgaggaggaggacgcccccagcttcgcccccagcagcagcgtggacggcaacaacaccgacagcgagttcgagaagggcctgaagcacaaggccaagaaccccgagccccagaaggccaccgcccccgtgaaggacgagtacgagttcgacgaggacgacgagcaggacagagtgccccccgtggacgacaagcacctgctgaagaaggactacagaaaggagaccaagagcaacagcttcatcagcatccccaagatggagaaggtgaccctgaagatcaccagactgcaccagagaaagagacccatcgtgagctgccagaccagaagaaccagaagaaccagagtgagcccctggggccaggagagaagctag

SEQ ID NO: 72886 - DNA, 6189 bp, synthetic construct
  misc_feature 1..6189: note = Description of Artificial Sequence: Synthetic coding sequence
  source 1..6189: mol_type = other DNA
atgcccaagagcggcttcaccaagcccatccagagcgagaacagcgacagcgacagcaacatggtggagaagccctacggcagaaagagcaaggacaagatcgccagctacagcaagacccccaagatcgagagaagcgacgtgagcaaggagatgaaggagaagagcagcatgaagagaaagctgcccttcaccatcagccccagcagaaacgaggagagagacagcgacaccgacagcgaccccggccacaccagcgagaactggggcgagagactgatcagcagctacagaacctacagcgagaaggagggccccgagaagaagaagaccaagaaggaggccggcaacaagaagagcacccccgtgagcatcctgttcggctaccccctgagcgagagaaagcagatggccctgctgatgcagatgaccgccagagacaacagccccgacagcacccccaaccaccccagccagaccacccccgcccagaagaagacccccagcagcagcagcagacagaaggacaaggtgaacaagagaaacgagagaggcgagacccccctgcacatggccgccatcagaggcgacgtgaagcaggtgaaggagctgatcagcctgggcgccaacgtgaacgtgaaggacttcgccggctggacccccctgcacgaggcctgcaacgtgggctactacgacgtggccaagatcctgatcgccgccggcgccgacgtgaacacccagggcctggacgacgacacccccctgcacgacagcgccagcagcggccacagagacatcgtgaagctgctgctgagacacggcggcaaccccttccaggccaacaagcacggcgagagacccgtggacgtggccgagaccgaggagctggagctgctgctgaagagagaggtgcccctgagcgacgacgacgagagctacaccgacagcgaggaggcccagagcgtgaaccccagcagcgtggacgagaacatcgacagcgagaccgagaaggacagcctgatctgcgagagcaagcagatcctgcccagcaagacccccctgcccagcgccctggacgagtacgagttcaaggacgacgacgacgaggagatcaacaagatgatcgacgacagacacatcctgagaaaggagcagagaaaggagaacgagcccgaggccgagaagacccacctgttcgccaagcaggagaaggccttctaccccaagagcttcaagagcaagaagcagaagcccagcagagtgctgtacagcagcaccgagagcagcgacgaggaggccctgcagaacaagaagatcagcaccagctgcagcgtgatccccgagaccagcaacagcgacatgcagaccaagaaggagtacgtggtgagcggcgagcacaagcagaagggcaaggtgaagagaaagctgaagaaccagaacaagaacaaggagaaccaggagctgaagcaggagaaggagggcaaggagaacaccagaatcaccaacctgaccgtgaacaccggcctggactgcagcgagaagaccagagaggagggcaacttcagaaagagcttcagccccaaggacgacaccagcctgcacctgttccacatcagcaccggcaagagccccaagcacagctgcggcctgagcgagaagcagagcacccccctgaagcaggagcacaccaagacctgcctgagccccggcagcagcgagatgagcctgcagcccgacctggtgagatacgacaacaccgagagcgagttcctgcccgagagcagcagcgtgaagagctgcaagcacaaggagaagagcaagcaccagaaggacttccacctggagttcggcgagaagagcaacgccaagatcaaggacgaggaccacagccccaccttcgagaacagcgactgcaccctgaagaagatggacaaggagggcaagaccctgaagaagcacaagctgaagcacaaggagagagagaaggagaagcacaagaaggagatcgagggcgagaaggagaagtacaagaccaaggacagcgccaaggagctgcagagaagcgtggagttcgacagagagttctggaaggagaacttcttcaagagcgacgagaccgaggacctgttcctgaacatggagcacgagagcctgaccctggagaagaagagcaagctggagaagaacatcaaggacgacaagagcaccaaggagaagcacgtgagcaaggagagaaacttcaaggaggagagagacaagatcaagaaggagagcgagaagagcttcagagaggagaagatcaaggacctgaaggaggagagagagaacatccccaccgacaaggacagcgagttcaccagcctgggcatgagcgccatcgaggagagcatcggcctgcacctggtggagaaggagatcgacatcgagaagcaggagaagcacatcaaggagagcaaggagaagcccgagaagagaagccagatcaaggagaaggacatcgagaagatggagagaaagaccttcgagaaggagaagaagatcaagcacgagcacaagagcgagaaggacaagctggacctgagcgagtgcgtggacaagatcaaggagaaggacaagctgtacagccaccacaccgagaagtgccacaaggagggcgagaagagcaagaacaccgccgccatcaagaagaccgacgacagagagaagagcagagagaagatggacagaaagcacgacaaggagaagcccgagaaggagagacacctggccgagagcaaggagaagcacctgatggagaagaagaacaagcagagcgacaacagcgagtacagcaagagcgagaagggcaagaacaaggagaaggacagagagctggacaagaaggagaagagcagagacaaggagagcatcaacatcaccaacagcaagcacatccaggaggagaagaagagcagcatcgtggacggcaacaaggcccagcacgagaagcccctgagcctgaaggagaagaccaaggacgagcccctgaagacccccgacggcaaggagaaggacaagaaggacaaggacatcgacagatacaaggagagagacaagcacaaggacaagatccagatcaacagcctgctgaagctgaagagcgaggccgacaagcccaagcccaagagcagccccgccagcaaggacaccagacccaaggagaagagactggtgaacgacgacctgatgcagaccagcttcgagagaatgctgagcctgaaggacctggagatcgagcagtggcacaagaagcacaaggagaagatcaagcagaaggagaaggagagactgagaaacagaaactgcctggagctgaagatcaaggacaaggagaagaccaagcacacccccaccgagagcaagaacaaggagctgaccagaagcaagagcagcgaggtgaccgacgcctacaccaaggagaagcagcccaaggacgccgtgagcaacagaagccagagcgtggacaccaagaacgtgatgaccctgggcaagagcagcttcgtgagcgacaacagcctgaacagaagccccagaagcgagaacgagaagcccggcctgagcagcagaagcgtgagcatgatcagcgtggccagcagcgaggacagctgccacaccaccgtgaccacccccagaccccccgtggagtacgacagcgacttcatgctggagagcagcgagagccagatgagcttcagccagagccccttcctgagcatcgccaagagccccgccctgcacgagagagagctggacagcctggccgacctgcccgagagaatcaagcccccctacgccaacagactgagcaccagccacctgagaagcagcagcgtggaggacgtgaagctgatcatcagcgagggcagacccaccatcgaggtgagaagatgcagcatgcccagcgtgatctgcgagcacaccaagcagttccagaccatcagcgaggagagcaaccagggcagcctgctgaccgtgcccggcgacaccagccccagccccaagcccgaggtgttcagcaacgtgcccgagagagacctgagcaacgtgagcaacatccacagcagcttcgccaccagccccaccggcgccagcaacagcaagtacgtgagcgccgacagaaacctgatcaagaacaccgcccccgtgaacaccgtgatggacagccccgtgcacctggagcccagcagccaggtgggcgtgatccagaacaagagctgggagatgcccgtggacagactggagaccctgagcaccagagacttcatctgccccaacagcaacatccccgaccaggagagcagcctgcagagcttctgcaacagcgagaacaaggtgctgaaggagaacgccgacttcctgagcctgagacagaccgagctgcccggcaacagctgcgcccaggaccccgccagcttcatgcccccccagcagccctgcagcttccccagccagagcctgagcgacgccgagagcatcagcaagcacatgagcctgagctacgtggccaaccaggagcccggcatcctgcagcagaagaacgccgtgcagatcatcagcagcgccctggacaccgacaacgagagcaccaaggacaccgagaacaccttcgtgctgggcgacgtgcagaagaccgacgccttcgtgcccgtgtacagcgacagcaccatccaggaggccagccccaacttcgagaaggcctacaccctgcccgtgctgcccagcgagaaggacttcaacggcagcgacgccagcacccagctgaacacccactacgccttcagcaagctgacctacaagagcagcagcggccacgaggtggagaacagcaccaccgacacccaggtgatcagccacgagaaggagaacaagctggagagcctggtgctgacccacctgagcagatgcgacagcgacctgtgcgagatgaacgccggcatgcccaagggcaacctgaacgagcaggaccccaagcactgccccgagagcgagaagtgcctgctgagcatcgaggacgaggagagccagcagagcatcctgagcagcctggagaaccacagccagcagagcacccagcccgagatgcacaagtacggccagctggtgaaggtggagctggaggagaacgccgaggacgacaagaccgagaaccagatcccccagagaatgaccagaaacaaggccaacaccatggccaaccagagcaagcagatcctggccagctgcaccctgctgagcgagaaggacagcgagagcagcagccccagaggcagaatcagactgaccgaggacgacgacccccagatccaccaccccagaaagagaaaggtgagcagagtgccccagcccgtgcaggtgagccccagcctgctgcaggccaaggagaagacccagcagagcctggccgccatcgtggacagcctgaagctggacgagatccagccctacagcagcgagagagccaacccctacttcgagtacctgcacatcagaaagaagatcgaggagaagagaaagctgctgtgcagcgtgatcccccaggccccccagtactacgacgagtacgtgaccttcaacggcagctacctgctggacggcaaccccctgagcaagatctgcatccccaccatcacccccccccccagcctgagcgaccccctgaaggagctgttcagacagcaggaggtggtgagaatgaagctgagactgcagcacagcatcgagagagagaagctgatcgtgagcaacgagcaggaggtgctgagagtgcactacagagccgccagaaccctggccaaccagaccctgcccttcagcgcctgcaccgtgctgctggacgccgaggtgtacaacgtgcccctggacagccagagcgacgacagcaagaccagcgtgagagacagattcaacgccagacagttcatgagctggctgcaggacgtggacgacaagttcgacaagctgaagacctgcctgctgatgagacagcagcacgaggccgccgccctgaacgccgtgcagagactggagtggcagctgaagctgcaggagctggaccccgccacctacaagagcatcagcatctacgagatccaggagttctacgtgcccctggtggacgtgaacgacgacttcgagctgacccccatctag

SEQ ID NO: 72887 - DNA, 1317 bp, synthetic construct
  misc_feature 1..1317: note = Description of Artificial Sequence: Synthetic coding sequence
  source 1..1317: mol_type = other DNA
atggtgaacgtgcccgagctgctgctgggccagagccccagcagaaacgacaccaagatcatcaacagcgaggaggcccagagcgtgaaccccagcagcgtggacgagaacatcgacagcgagaccgagaaggacagcctgatctgcgagagcaagcagatcctgcccagcaagacccccctgcccagcgccctggacgagtacgagttcaaggacgacgacgacgaggagatcaacaagatgatcgacgacagacacatcctgagaaaggagcagagaaaggagaacgagcccgaggccgagaagacccacctgttcgccaagcaggagaaggccttctaccccaagagcttcaagagcaagaagcagaagcccagcagagtgctgtacagcagcaccgagagcagcgacgaggaggccctgcagaacaagaagatcagcaccagctgcagcgtgatccccgagaccagcaacagcgacatgcagaccaagaaggagtacgtggtgagcggcgagcacaagcagaagggcaaggtgaagagaaagctgaagaaccagaacaagaacaaggagaaccaggagctgaagcaggagaaggagggcaaggagaacaccagaatcaccaacctgaccgtgaacaccggcctggactgcagcgagaagaccagagaggagggcaacttcagaaagagcttcagccccaaggacgacaccagcctgcacctgttccacatcagcaccggcaagagccccaagcacagctgcggcctgagcgagaagcagagcacccccctgaagcaggagcacaccaagacctgcctgagccccggcagcagcgagatgagcctgcagcccgacctggtgagatacgacaacaccgagagcgagttcctgcccgagagcagcagcgtgaagagctgcaagcacaaggagaagagcaagcaccagaaggacttccacctggagttcggcgagaagagcaacgccaagatcaaggacgaggaccacagccccaccttcgagaacagcgactgcaccctgaagaagatggacaaggagggcaagaccctgaagaagcacaagctgaagcacaaggagagagagaaggagaagcacaagaaggagatcgagggcgagaaggagaagtacaagaccaaggacagcgccaaggagctgcagagaagcgtggagttcgacagagagttctggaaggagaacttcttcaagagcgacgagaccgaggacctgttcctgaacatggagcacgagagcctgaccctggagaagatcaagatcggcaagaagcaccagagatag

SEQ ID NO: 72888 - DNA, 6120 bp, synthetic construct
  misc_feature 1..6120: note = Description of Artificial Sequence: Synthetic coding sequence
  source 1..6120: mol_type = other DNA
atgcccaagagcggcttcaccaagcccatccagagcgagaacagcgacagcgacagcaacatggtggagaagccctacggcagaaagagcaaggacaagatcgccagctacagcaagacccccaagatcgagagaagcgacgtgagcaaggagatgaaggagaagagcagcatgaagagaaagctgcccttcaccatcagccccagcagaaacgaggagagagacagcgacaccgagaaggagggccccgagaagaagaagaccaagaaggaggccggcaacaagaagagcacccccgtgagcatcctgttcggctaccccctgagcgagagaaagcagatggccctgctgatgcagatgaccgccagagacaacagccccgacagcacccccaaccaccccagccagaccacccccgcccagaagaagacccccagcagcagcagcagacagaaggacaaggtgaacaagagaaacgagagaggcgagacccccctgcacatggccgccatcagaggcgacgtgaagcaggtgaaggagctgatcagcctgggcgccaacgtgaacgtgaaggacttcgccggctggacccccctgcacgaggcctgcaacgtgggctactacgacgtggccaagatcctgatcgccgccggcgccgacgtgaacacccagggcctggacgacgacacccccctgcacgacagcgccagcagcggccacagagacatcgtgaagctgctgctgagacacggcggcaaccccttccaggccaacaagcacggcgagagacccgtggacgtggccgagaccgaggagctggagctgctgctgaagagagaggtgcccctgagcgacgacgacgagagctacaccgacagcgaggaggcccagagcgtgaaccccagcagcgtggacgagaacatcgacagcgagaccgagaaggacagcctgatctgcgagagcaagcagatcctgcccagcaagacccccctgcccagcgccctggacgagtacgagttcaaggacgacgacgacgaggagatcaacaagatgatcgacgacagacacatcctgagaaaggagcagagaaaggagaacgagcccgaggccgagaagacccacctgttcgccaagcaggagaaggccttctaccccaagagcttcaagagcaagaagcagaagcccagcagagtgctgtacagcagcaccgagagcagcgacgaggaggccctgcagaacaagaagatcagcaccagctgcagcgtgatccccgagaccagcaacagcgacatgcagaccaagaaggagtacgtggtgagcggcgagcacaagcagaagggcaaggtgaagagaaagctgaagaaccagaacaagaacaaggagaaccaggagctgaagcaggagaaggagggcaaggagaacaccagaatcaccaacctgaccgtgaacaccggcctggactgcagcgagaagaccagagaggagggcaacttcagaaagagcttcagccccaaggacgacaccagcctgcacctgttccacatcagcaccggcaagagccccaagcacagctgcggcctgagcgagaagcagagcacccccctgaagcaggagcacaccaagacctgcctgagccccggcagcagcgagatgagcctgcagcccgacctggtgagatacgacaacaccgagagcgagttcctgcccgagagcagcagcgtgaagagctgcaagcacaaggagaagagcaagcaccagaaggacttccacctggagttcggcgagaagagcaacgccaagatcaaggacgaggaccacagccccaccttcgagaacagcgactgcaccctgaagaagatggacaaggagggcaagaccctgaagaagcacaagctgaagcacaaggagagagagaaggagaagcacaagaaggagatcgagggcgagaaggagaagtacaagaccaaggacagcgccaaggagctgcagagaagcgtggagttcgacagagagttctggaaggagaacttcttcaagagcgacgagaccgaggacctgttcctgaacatggagcacgagagcctgaccctggagaagaagagcaagctggagaagaacatcaaggacgacaagagcaccaaggagaagcacgtgagcaaggagagaaacttcaaggaggagagagacaagatcaagaaggagagcgagaagagcttcagagaggagaagatcaaggacctgaaggaggagagagagaacatccccaccgacaaggacagcgagttcaccagcctgggcatgagcgccatcgaggagagcatcggcctgcacctggtggagaaggagatcgacatcgagaagcaggagaagcacatcaaggagagcaaggagaagcccgagaagagaagccagatcaaggagaaggacatcgagaagatggagagaaagaccttcgagaaggagaagaagatcaagcacgagcacaagagcgagaaggacaagctggacctgagcgagtgcgtggacaagatcaaggagaaggacaagctgtacagccaccacaccgagaagtgccacaaggagggcgagaagagcaagaacaccgccgccatcaagaagaccgacgacagagagaagagcagagagaagatggacagaaagcacgacaaggagaagcccgagaaggagagacacctggccgagagcaaggagaagcacctgatggagaagaagaacaagcagagcgacaacagcgagtacagcaagagcgagaagggcaagaacaaggagaaggacagagagctggacaagaaggagaagagcagagacaaggagagcatcaacatcaccaacagcaagcacatccaggaggagaagaagagcagcatcgtggacggcaacaaggcccagcacgagaagcccctgagcctgaaggagaagaccaaggacgagcccctgaagacccccgacggcaaggagaaggacaagaaggacaaggacatcgacagatacaaggagagagacaagcacaaggacaagatccagatcaacagcctgctgaagctgaagagcgaggccgacaagcccaagcccaagagcagccccgccagcaaggacaccagacccaaggagaagagactggtgaacgacgacctgatgcagaccagcttcgagagaatgctgagcctgaaggacctggagatcgagcagtggcacaagaagcacaaggagaagatcaagcagaaggagaaggagagactgagaaacagaaactgcctggagctgaagatcaaggacaaggagaagaccaagcacacccccaccgagagcaagaacaaggagctgaccagaagcaagagcagcgaggtgaccgacgcctacaccaaggagaagcagcccaaggacgccgtgagcaacagaagccagagcgtggacaccaagaacgtgatgaccctgggcaagagcagcttcgtgagcgacaacagcctgaacagaagccccagaagcgagaacgagaagcccggcctgagcagcagaagcgtgagcatgatcagcgtggccagcagcgaggacagctgccacaccaccgtgaccacccccagaccccccgtggagtacgacagcgacttcatgctggagagcagcgagagccagatgagcttcagccagagccccttcctgagcatcgccaagagccccgccctgcacgagagagagctggacagcctggccgacctgcccgagagaatcaagcccccctacgccaacagactgagcaccagccacctgagaagcagcagcgtggaggacgtgaagctgatcatcagcgagggcagacccaccatcgaggtgagaagatgcagcatgcccagcgtgatctgcgagcacaccaagcagttccagaccatcagcgaggagagcaaccagggcagcctgctgaccgtgcccggcgacaccagccccagccccaagcccgaggtgttcagcaacgtgcccgagagagacctgagcaacgtgagcaacatccacagcagcttcgccaccagccccaccggcgccagcaacagcaagtacgtgagcgccgacagaaacctgatcaagaacaccgcccccgtgaacaccgtgatggacagccccgtgcacctggagcccagcagccaggtgggcgtgatccagaacaagagctgggagatgcccgtggacagactggagaccctgagcaccagagacttcatctgccccaacagcaacatccccgaccaggagagcagcctgcagagcttctgcaacagcgagaacaaggtgctgaaggagaacgccgacttcctgagcctgagacagaccgagctgcccggcaacagctgcgcccaggaccccgccagcttcatgcccccccagcagccctgcagcttccccagccagagcctgagcgacgccgagagcatcagcaagcacatgagcctgagctacgtggccaaccaggagcccggcatcctgcagcagaagaacgccgtgcagatcatcagcagcgccctggacaccgacaacgagagcaccaaggacaccgagaacaccttcgtgctgggcgacgtgcagaagaccgacgccttcgtgcccgtgtacagcgacagcaccatccaggaggccagccccaacttcgagaaggcctacaccctgcccgtgctgcccagcgagaaggacttcaacggcagcgacgccagcacccagctgaacacccactacgccttcagcaagctgacctacaagagcagcagcggccacgaggtggagaacagcaccaccgacacccaggtgatcagccacgagaaggagaacaagctggagagcctggtgctgacccacctgagcagatgcgacagcgacctgtgcgagatgaacgccggcatgcccaagggcaacctgaacgagcaggaccccaagcactgccccgagagcgagaagtgcctgctgagcatcgaggacgaggagagccagcagagcatcctgagcagcctggagaaccacagccagcagagcacccagcccgagatgcacaagtacggccagctggtgaaggtggagctggaggagaacgccgaggacgacaagaccgagaaccagatcccccagagaatgaccagaaacaaggccaacaccatggccaaccagagcaagcagatcctggccagctgcaccctgctgagcgagaaggacagcgagagcagcagccccagaggcagaatcagactgaccgaggacgacgacccccagatccaccaccccagaaagagaaaggtgagcagagtgccccagcccgtgcaggtgagccccagcctgctgcaggccaaggagaagacccagcagagcctggccgccatcgtggacagcctgaagctggacgagatccagccctacagcagcgagagagccaacccctacttcgagtacctgcacatcagaaagaagatcgaggagaagagaaagctgctgtgcagcgtgatcccccaggccccccagtactacgacgagtacgtgaccttcaacggcagctacctgctggacggcaaccccctgagcaagatctgcatccccaccatcacccccccccccagcctgagcgaccccctgaaggagctgttcagacagcaggaggtggtgagaatgaagctgagactgcagcacagcatcgagagagagaagctgatcgtgagcaacgagcaggaggtgctgagagtgcactacagagccgccagaaccctggccaaccagaccctgcccttcagcgcctgcaccgtgctgctggacgccgaggtgtacaacgtgcccctggacagccagagcgacgacagcaagaccagcgtgagagacagattcaacgccagacagttcatgagctggctgcaggacgtggacgacaagttcgacaagctgaagacctgcctgctgatgagacagcagcacgaggccgccgccctgaacgccgtgcagagactggagtggcagctgaagctgcaggagctggaccccgccacctacaagagcatcagcatctacgagatccaggagttctacgtgcccctggtggacgtgaacgacgacttcgagctgacccccatctag

SEQ ID NO: 72889 - DNA, 372 bp, synthetic construct
  misc_feature 1..372: note = Description of Artificial Sequence: Synthetic coding sequence
  source 1..372: mol_type = other DNA
accgaggacctgttcctgaacatggagcacgagagcctgaccctggagaagaagagcaagctggagaagaacatcaaggacgacaagagcaccaaggagaagcacgtgagcaaggagagaaacttcaaggaggagagagacaagatcaagaaggagagcgagaagagcttcagagagggcatgagcgccatcgaggagagcatcggcctgcacctggtggagaaggagatcgacatcgagaagcaggagaagcacatcaaggagagcaaggagaagcccgagaagagaagccagatcaaggagaaggacatcgagaagatggagagaaagaccttcgagaagggcaccagctacatcagaatcacccagtag

SEQ ID NO: 72890 - DNA, 993 bp, synthetic construct
  misc_feature 1..993: note = Description of Artificial Sequence: Synthetic coding sequence
  source 1..993: mol_type = other DNA
atgcccaagagcggcttcaccaagcccatccagagcgagaacagcgacagcgacagcaacatggtggagaagccctacggcagaaagagcaaggacaagatcgccagctacagcaagacccccaagatcgagagaagcgacgtgagcaaggagatgaaggagaagagcagcatgaagagaaagctgcccttcaccatcagccccagcagaaacgaggagagagacagcgacaccgacagcgaccccggccacaccagcgagaactggggcgagagactgatcagcagctacagaacctacagcgagaaggagggccccgagaagaagaagaccaagaaggaggccggcaacaagaagagcacccccgtgagcatcctgttcggctaccccctgagcgagagaaagcagatggccctgctgatgcagatgaccgccagagacaacagccccgacagcacccccaaccaccccagccagaccacccccgcccagaagaagacccccagcagcagcagcagacagaaggacaaggtgaacaagagaaacgagagaggcgagacccccctgcacatggccgccatcagaggcgacgtgaagcaggtgaaggagctgatcagcctgggcgccaacgtgaacgtgaaggacttcgccggctggacccccctgcacgaggcctgcaacgtgggctactacgacgtggccaagatcctgatcgccgccggcgccgacgtgaacacccagggcctggacgacgacacccccctgcacgacagcgccagcagcggccacagagacatcgtgaagctgctgctgagacacggcggcaaccccttccaggccaacaagcacggcgagagacccgtggacgtggccgagaccgaggagctggagctgctgctgaagagagaggtgcccctgagcgacgacgacgagagctacaccggcagcagctaccagttcgccggcaacgccaagctgagcggcgccagctag

SEQ ID NO: 72891 - DNA, 1116 bp, synthetic construct
  misc_feature 1..1116: note = Description of Artificial Sequence: Synthetic coding sequence
  source 1..1116: mol_type = other DNA
atgcccaagagcggcttcaccaagcccatccagagcgagaacagcgacagcgacagcaacatggtggagaagccctacggcagaaagagcaaggacaagatcgccagctacagcaagacccccaagatcgagagaagcgacgtgagcaaggagatgaaggagaagagcagcatgaagagaaagctgcccttcaccatcagccccagcagaaacgaggagagagacagcgacaccgagaaggagggccccgagaagaagaagaccaagaaggaggccggcaacaagaagagcacccccgtgagcatcctgttcggctaccccctgagcgagagaaagcagatggccctgctgatgcagatgaccgccagagacaacagccccgacagcacccccaaccaccccagccagaccacccccgcccagaagaagacccccagcagcagcagcagacagaaggacaaggtgaacaagagaaacgagagaggcgagacccccctgcacatggccgccatcagaggcgacgtgaagcaggtgaaggagctgatcagcctgggcgccaacgtgaacgtgaaggacttcgccggctggacccccctgcacgaggcctgcaacgtgggctactacgacgtggccaagatcctgatcgccgccggcgccgacgtgaacacccagggcctggacgacgacacccccctgcacgacagcgccagcagcggccacagagacatcgtgaagctgctgctgagacacggcggcaaccccttccaggccaacaagcacggcgagagacccgtggacgtggccgagaccgaggagctggagctgctgctgaagagagaggtgcccctgagcgacgacgacgagagctacaccgacagcgaggaggcccagagcgtgaaccccagcagcgtggacgagaacatcgacagcgagaccgagaaggacagcctgatctgcgagagcaagcagatcctgcccagcaagacccccctgcccagcgccctggacgagtacgagttcaaggacgacgacgacgaggagatcaacaagatgatcgacgacagacacatcctgagaaaggagcagagaaagaagaagagaaaggagaagaagtag

SEQ ID NO: 72892 - DNA, 984 bp, synthetic construct
  misc_feature 1..984: note = Description of Artificial Sequence: Synthetic coding sequence
  source 1..984: mol_type = other DNA
atggccaaggcccccagctgggccggcgtgggcgccctggcctacaaggcccccgaggccctgtggcccgccgaggccgtgatggacggcaccatggaggacagcgaggccgtgcagagagccaccgccctgatcgagcagagactggcccaggaggaggagaacgagaagctgagaggcgacgccagacagaagctgcccatggacctgctggtgctggaggacgagaagcaccacggcgcccagagcgccgccctgcagaaggtgaagggccaggagagagtgagaaagaccagcctggacctgagaagagagatcatcgacgtgggcggcatccagaacctgatcgagctgagaaagaagagaaagcagaagaagagagacgccctggccgccagccacgagcccccccccgagcccgaggagatcaccggccccgtggacgaggagaccttcctgaaggccgccgtggagggcaagatgaaggtgatcgagaagttcctggccgacggcggcagcgccgacacctgcgaccagttcagaagaaccgccctgcacagagccagcctggagggccacatggagatcctggagaagctgctggacaacggcgccaccgtggacttccaggacagactggactgcaccgccatgcactgggcctgcagaggcggccacctggaggtggtgaagctgctgcagagccacggcgccgacaccaacgtgagagacaaggagggcgacaccgccctgcacgacgccgtgagactgaacagatacaagatcatcaagctgctgctgctgcacggcgccgacatgatgaccaagaacctggccggcaagacccccaccgacctggtgcagctgtggcaggccgacaccagacacgccctggagcaccccgagcccggcgccgagcacaacggcctggagggccccaacgacagcggcagagagaccccccagcccgtgcccgcccagtag

SEQ ID NO: 72893 - DNA, 1083 bp, synthetic construct
  misc_feature 1..1083: note = Description of Artificial Sequence: Synthetic coding sequence
  source 1..1083: mol_type = other DNA
atggccaaggcccccagctgggccggcgtgggcgccctggcctacaaggcccccgaggccctgtggcccgccgaggccgtgatggacggcaccatggaggacagcgaggccgtgcagagagccaccgccctgatcgagcagagactggcccaggaggaggagaacgagaagctgagaggcgacgccagacagaagctgcccatggacctgctggtgctggaggacgagaagcaccacggcgcccagagcgccgccctgcagaaggtgaagggccaggagagagtgagaaagaccagcctggacctgagaagagagatcatcgacgtgggcggcatccagaacctgatcgagctgagaaagaagagaaagcagaagaagagagacgccctggccgccagccacgagcccccccccgagcccgaggagatcaccggccccgtggacgaggagaccttcctgaaggccgccgtggagggcaagatgaaggtgatcgagaagttcctggccgacggcggcagcgccgacacctgcgaccagttcagaagaaccgccctgcacagagccagcctggagggccacatggagatcctggagaagctgctggacaacggcgccaccgtggacttccaggacagactggactgcaccgccatgcactgggcctgcagaggcggccacctggaggtggtgaagctgctgcagagccacggcgccgacaccaacgtgagagacaagctgctgagcacccccctgcacgtggccgtgagaaccggccaggtggagatcgtggagcacttcctgagcctgggcctggagatcaacgccagagacagagagggcgacaccgccctgcacgacgccgtgagactgaacagatacaagatcatcaagctgctgctgctgcacggcgccgacatgatgaccaagaacctggccggcaagacccccaccgacctggtgcagctgtggcaggccgacaccagacacgccctggagcaccccgagcccggcgccgagcacaacggcctggagggccccaacgacagcggcagagagaccccccagcccgtgcccgcccagtag

SEQ ID NO: 72894 - DNA, 1002 bp, synthetic construct
  misc_feature 1..1002: note = Description of Artificial Sequence: Synthetic coding sequence
  source 1..1002: mol_type = other DNA
atggacggcaccatggaggacagcgaggccgtgcagagagccaccgccctgatcgagcagagactggcccaggaggaggagaacgagaagctgagaggcgacgccagacagaagctgcccatggacctgctggtgctggaggacgagaagcaccacggcgcccagagcgccgccctgcagaaggtgaagggccaggagagagtgagaaagaccagcctggacctgagaagagagatcatcgacgtgggcggcatccagaacctgatcgagctgagaaagaagagaaagcagaagaagagagacgccctggccgccagccacgagcccccccccgagcccgaggagatcaccggccccgtggacgaggagaccttcctgaaggccgccgtggagggcaagatgaaggtgatcgagaagttcctggccgacggcggcagcgccgacacctgcgaccagttcagaagaaccgccctgcacagagccagcctggagggccacatggagatcctggagaagctgctggacaacggcgccaccgtggacttccaggacagactggactgcaccgccatgcactgggcctgcagaggcggccacctggaggtggtgaagctgctgcagagccacggcgccgacaccaacgtgagagacaagctgctgagcacccccctgcacgtggccgtgagaaccggccaggtggagatcgtggagcacttcctgagcctgggcctggagatcaacgccagagacagagagggcgacaccgccctgcacgacgccgtgagactgaacagatacaagatcatcaagctgctgctgctgcacggcgccgacatgatgaccaagaacctggccggcaagacccccaccgacctggtgcagctgtggcaggccgacaccagacacgccctggagcaccccgagcccggcgccgagcacaacggcctggagggccccaacgacagcggcagagagaccccccagcccgtgcccgcccagtag

SEQ ID NO: 72895 - DNA, 903 bp, synthetic construct
  misc_feature 1..903: note = Description of Artificial Sequence: Synthetic coding sequence
  source 1..903: mol_type = other DNA
atggacggcaccatggaggacagcgaggccgtgcagagagccaccgccctgatcgagcagagactggcccaggaggaggagaacgagaagctgagaggcgacgccagacagaagctgcccatggacctgctggtgctggaggacgagaagcaccacggcgcccagagcgccgccctgcagaaggtgaagggccaggagagagtgagaaagaccagcctggacctgagaagagagatcatcgacgtgggcggcatccagaacctgatcgagctgagaaagaagagaaagcagaagaagagagacgccctggccgccagccacgagcccccccccgagcccgaggagatcaccggccccgtggacgaggagaccttcctgaaggccgccgtggagggcaagatgaaggtgatcgagaagttcctggccgacggcggcagcgccgacacctgcgaccagttcagaagaaccgccctgcacagagccagcctggagggccacatggagatcctggagaagctgctggacaacggcgccaccgtggacttccaggacagactggactgcaccgccatgcactgggcctgcagaggcggccacctggaggtggtgaagctgctgcagagccacggcgccgacaccaacgtgagagacaaggagggcgacaccgccctgcacgacgccgtgagactgaacagatacaagatcatcaagctgctgctgctgcacggcgccgacatgatgaccaagaacctggccggcaagacccccaccgacctggtgcagctgtggcaggccgacaccagacacgccctggagcaccccgagcccggcgccgagcacaacggcctggagggccccaacgacagcggcagagagaccccccagcccgtgcccgcccagtag

SEQ ID NO: 72896 - DNA, 918 bp, synthetic construct
  misc_feature 1..918: note = Description of Artificial Sequence: Synthetic coding sequence
  source 1..918: mol_type = other DNA
atggacttcatcagcatccagcagctggtgagcggcgagagagtggagggcaaggtgctgggcttcggccacggcgtgcccgaccccggcgcctggcccagcgactggagaagaggcccccaggaggccgtggccagagagaagctgaagctggaggaggagaagaagaagaagctggagagattcaacagcaccagattcaacctggacaacctggccgacctggagaacctggtgcagagaagaaagaagagactgagacacagagtgccccccagaaagcccgagcccctggtgaagccccagagccaggcccaggtggagcccgtgggcctggagatgttcctgaaggccgccgccgagaaccaggagtacctgatcgacaagtacctgaccgacggcggcgaccccaacgcccacgacaagctgcacagaaccgccctgcactgggcctgcctgaagggccacagccagctggtgaacaagctgctggtggccggcgccaccgtggacgccagagacctgctggacagaacccccgtgttctgggcctgcagaggcggccacctggtgatcctgaagcagctgctgaaccagggcgccagagtgaacgccagagacaagatcggcagcacccccctgcacgtggccgtgagaaccagacaccccgactgcctggagcacctgatcgagtgcggcgcccacctgaacgcccaggacaaggagggcgacaccgccctgcacgaggccgtgagacacggcagctacaaggccatgaagctgctgctgctgtacggcgccgagctgggcgtgagaaacgccgccagcgtgacccccgtgcagctggccagagactggcagagaggcatcagagaggccctgcaggcccacgtggcccaccccagaaccagatgctag

SEQ ID NO: 72897 - DNA, 792 bp, synthetic construct
  misc_feature 1..792: note = Description of Artificial Sequence: Synthetic coding sequence
  source 1..792: mol_type = other DNA
atggacttcatcagcatccagcagctggtgagcggcgagagagtggagggcaaggtgctgggcttcggccacggcgtgcccgaccccggcgcctggcccagcgactggagaagaggcccccaggaggccgtggccagagagaagctgaagctggaggaggagaagaagaagaagctggagagattcaacagcaccagattcaacctggacaacctggccgacctggagaacctggtgcagagaagaaagaagagactgagacacagagtgccccccagaaagcccgagcccctggtgaagctgcacagaaccgccctgcactgggcctgcctgaagggccacagccagctggtgaacaagctgctggtggccggcgccaccgtggacgccagagacctgctggacagaacccccgtgttctgggcctgcagaggcggccacctggtgatcctgaagcagctgctgaaccagggcgccagagtgaacgccagagacaagatcggcagcacccccctgcacgtggccgtgagaaccagacaccccgactgcctggagcacctgatcgagtgcggcgcccacctgaacgcccaggacaaggagggcgacaccgccctgcacgaggccgtgagacacggcagctacaaggccatgaagctgctgctgctgtacggcgccgagctgggcgtgagaaacgccgccagcgtgacccccgtgcagctggccagagactggcagagaggcatcagagaggccctgcaggcccacgtggcccaccccagaaccagatgctag

SEQ ID NO: 72898 - DNA, 918 bp, synthetic construct; identical to SEQ ID NO: 72896
  misc_feature 1..918: note = Description of Artificial Sequence: Synthetic coding sequence
  source 1..918: mol_type = other DNA

SEQ ID NO: 72899 - DNA, 3804 bp, synthetic construct
  misc_feature 1..3804: note = Description of Artificial Sequence: Synthetic coding sequence
  source 1..3804: mol_type = other DNA
atgaaccacatgttccacatcaagagacacagcatcagcgccggcaccgacgcctacaagaagaccaagcccatccagaacctgttccagaagcccctgtacgaccactgcagcgccaacaactacaagagcatggagcccgagctggagaacgtgagaagcagcccccccagaggcgacagaaccagcaaggtgagcctgaaggaggagctgcagcaggacatgcagagattcaagaacgagatcggcatgctgaaggtggagttccaggccctggagaaggagaaggtgcagctgcagaaggaggtggaggaggagagaaagaagcacagaaacaacgagatggaggtgagcgccaacatccacgacggcgccaccgacgacgccgaggacgacgacgacgacgacggcctgatccagaagagaaagagcggcgagaccgaccaccagcagttccccagaaaggagaacaaggagtacgccagcagcggccccgccctgcagatgaaggaggtgaagagcaccgagaaggagaagagaaccagcaaggagagcgtgaacagccccgtgttcggcaaggccagcctgctgaccggcggcctgctgcaggtggacgacgacagcagcctgagcgagatcgacgaggacgagggcagacccaccaagaagaccagcaacgagaagaacaaggtgaagaaccagatccagagcatggacgacgtggacgacctgacccagagcagcgagaccgccagcgaggactgcgagctgccccacagcagctacaagaacttcatgctgctgatcgagcagctgggcatggagtgcaaggacagcgtgagcctgctgaagatccaggacgccgccctgagctgcgagagactgctggagctgaagaagaaccactgcgagctgctgaccgtgaagatcaagaagatggaggacaaggtgaacgtgctgcagagagagctgagcgagaccaaggagatcaagagccagctggagcaccagaaggtggagtgggagagagagctgtgcagcctgagattcagcctgaaccaggaggaggagaagagaagaaacgccgacaccctgtacgagaagatcagagagcagctgagaagaaaggaggagcagtacagaaaggaggtggaggtgaagcagcagctggagctgagcctgcagaccctggagatggagctgagaaccgtgaagagcaacctgaaccaggtggtgcaggagagaaacgacgcccagagacagctgagcagagagcagaacgccagaatgctgcaggacggcatcctgaccaaccacctgagcaagcagaaggagatcgagatggcccagaagaagatgaacagcgagaacagccacagccacgaggaggagaaggacctgagccacaagaacagcatgctgcaggaggagatcgccatgctgagactggagatcgacaccatcaagaaccagaaccaggagaaggagaagaagtgcttcgaggacctgaagatcgtgaaggagaagaacgaggacctgcagaagaccatcaagcagaacgaggagaccctgacccagaccatcagccagtacaacggcagactgagcgtgctgaccgccgagaacgccatgctgaacagcaagctggagaacgagaagcagagcaaggagagactggaggccgaggtggagagctaccacagcagactggccgccgccatccacgacagagaccagagcgagaccagcaagagagagctggagctggccttccagagagccagagacgagtgcagcagactgcaggacaagatgaacttcgacgtgagcaacctgaaggacaacaacgagatcctgagccagcagctgttcaagaccgagagcaagctgaacagcctggagatcgagttccaccacaccagagacgccctgagagagaagaccctgggcctggagagagtgcagaaggacctgagccagacccagtgccagatgaaggagatggagcagaagtaccagaacgagcaggtgaaggtgaacaagtacatcggcaagcaggagagcgtggaggagagactgagccagctgcagagcgagaacatgctgctgagacagcagctggacgacgcccacaacaaggccgacaacaaggagaagaccgtgatcaacatccaggaccagttccacgccatcgtgcagaagctgcaggccgagagcgagaagcagagcctgctgctggaggagagaaacaaggagctgatcagcgagtgcaaccacctgaaggagagacagtaccagtacgagaacgagaaggccgagagagaggtggtggtgagacagctgcagcaggagctggccgacaccctgaagaagcagagcatgagcgaggccagcctggaggtgaccagcagatacagaatcaacctggaggacgagacccaggacctgaagaagaagctgggccagatcagaaaccagctgcaggaggcccaggacagacacaccgaggccgtgagatgcgccgagaagatgcaggaccacaagcagaagctggagaaggacaacgccaagctgaaggtgaccgtgaagaagcagatggacaagatcgaggagctgcagaagaacctgctgaacgccaacctgagcgaggacgagaaggagcagctgaagaagctgatggagctgaagcagagcctggagtgcaacctggaccaggagatgaagaagaacgtggagctggagagagagatcaccggcttcaagaacctgctgaagatgaccagaaagaagctgaacgagtacgagaacggcgagttcagcttccacggcgacctgaagaccagccagttcgagatggacatccagatcaacaagctgaagcacaagatcgacgacctgaccgccgagctggagaccgccggcagcaagtgcctgcacctggacaccaagaaccagatcctgcaggaggagctgctgagcatgaagaccgtgcagaagaagtgcgagaagctgcagaagaacaagaagaagctggagcaggaggtgatcaacctgagaagccacatcgagagaaacatggtggagctgggccaggtgaagcagtacaagcaggagatcgaggagagagccagacaggagatcgccgagaagctgaaggaggtgaacctgttcctgcaggcccaggccgccagccaggagaacctggagcagttcagagagaacaacttcgccagcatgaagagccagatggagctgagaatcaaggacctggagagcgagctgagcaagatcaagaccagccaggaggacttcaacaagaccgagctggagaagtacaagcagctgtacctggaggagctgaaggtgagaaagagcctgagcagcaagctgaccaagaccaacgagagactggccgaggtgaacaccaagctgctggtggagaagcagcagagcagaagcctgttcaccaccctgaccaccagacccgtgatggagcccccctgcgtgggcaacctgaacaacagcctggacctgaacagaaagctgatccccagagagaacctggtgatcagcaccagcaaccccagagccagcaacaacagcatggagaactacctgagcaagatgcagcaggagctggagaagaacatcaccagagagctgaaggaggccgccgccgagctggagagcggcagcatcgccagccccctgggcagcaccgacgagagcaacctgaaccaggacctggtgtggaaggccagcagagagtacgtgcaggtgctgaagaagaactacatgatctag

SEQ ID NO: 72900 - DNA, 5133 bp, synthetic construct
  misc_feature 1..5133: note = Description of Artificial Sequence: Synthetic coding sequence
  source 1..5133: mol_type = other DNA
atgaagaagatcttcagcaagaagggcgagagccccctgggcagcttcgccagaagacagagaagcagcgccggcggcggcggcgagcccggcgagggcgcctacagccagcccggctaccacgtgagagacagagacctgggcaagatccacaaggccgccagcgccggcaacgtggccaaggtgcagcagatcctgctgctgagaaagaacggcctgaacgacagagacaagatgaacagaaccgccctgcacctggcctgcgccaacggccaccccgaggtggtgaccctgctggtggacagaaagtgccagctgaacgtgtgcgacaacgagaacagaaccgccctgatgaaggccgtgcagtgccaggaggagaagtgcgccaccatcctgctggagcacggcgccgaccccaacctggccgacgtgcacggcaacaccgccctgcactacgccgtgtacaacgaggacatcagcgtggccaccaagctgctgctgtacgacgccaacatcgaggccaagaacaaggacgacctgacccccctgctgctggccgtgagcggcaagaagcagcagatggtggagttcctgatcaagaagaaggccaacgtgaacgccgtggacaagctggagagcagccaccagctgatcagcgagtacaaggaggagagaatccccaagcacagcagccagaacagcaacagcgtggacgagagcagcgaggacagcctgagcagactgagcggcaagcccggcgtggacgacagctggcccaccagcgacgacgaggacctgaacttcgacaccaagaacgtgcccaagcccagcctggccaagctgatgaccgccagccagcagagcagaaagaacctggaggccacctacggcaccgtgagaaccggcaacagaaccctgttcgaggacagagacagcgacagccaggacgaggtggtggtggagagcctgcccaccaccagcatcaaggtgcagtgcttcagccaccccacctaccagagccccgacctgctgcccaagcccagccacaagagcctggccaaccccggcctgatgaaggaggagcccaccaagcccggcatcgccaagaaggagaacggcatcgacatcatcgagagcgcccccctggagcagaccaacaacgacaacctgacctacgtggacgaggtgcacaagaacaacagaagcgacatgatgagcgccctgggcctgggccaggaggaggacatcgagagcccctgggacagcgagagcatcagcgagaacttcccccagaagtacgtggaccccctggccggcgccgccgacggcaaggagaagaacatcggcaacgagcaggccgaggacgtgttctacatccccagctgcatgagcggcagcagaaacttcaagatggccaagctggaggacaccagaaacgtgggcatgcccgtggcccacatggagagccccgagagatacctgcacctgaagcccaccatcgagatgaaggacagcgtgcccaacaaggccggcggcatgaaggacgtgcagaccagcaaggccgccgagcacgacctggaggtggccagcgaggaggagcaggagagagagggcagcgagaacaaccagccccaggtggaggaggagagaaagaagcacagaaacaacgagatggaggtgagcgccaacatccacgacggcgccaccgacgacgccgaggacgacgacgacgacgacggcctgatccagaagagaaagagcggcgagaccgaccaccagcagttccccagaaaggagaacaaggagtacgccagcagcggccccgccctgcagatgaaggaggtgaagagcaccgagaaggagaagagaaccagcaaggagagcgtgaacagccccgtgttcggcaaggccagcctgctgaccggcggcctgctgcaggtggacgacgacagcagcctgagcgagatcgacgaggacgagggcagacccaccaagaagaccagcaacgagaagaacaaggtgaagaaccagatccagagcatggacgacgtggacgacctgacccagagcagcgagaccgccagcgaggactgcgagctgccccacagcagctacaagaacttcatgctgctgatcgagcagctgggcatggagtgcaaggacagcgtgagcctgctgaagatccaggacgccgccctgagctgcgagagactgctggagctgaagaagaaccactgcgagctgctgaccgtgaagatcaagaagatggaggacaaggtgaacgtgctgcagagagagctgagcgagaccaaggagatcaagagccagctggagcaccagaaggtggagtgggagagagagctgtgcagcctgagattcagcctgaaccaggaggaggagaagagaagaaacgccgacaccctgtacgagaagatcagagagcagctgagaagaaaggaggagcagtacagaaaggaggtggaggtgaagcagcagctggagctgagcctgcagaccctggagatggagctgagaaccgtgaagagcaacctgaaccaggtggtgcaggagagaaacgacgcccagagacagctgagcagagagcagaacgccagaatgctgcaggacggcatcctgaccaaccacctgagcaagcagaaggagatcgagatggcccagaagaagatgaacagcgagaacagccacagccacgaggaggagaaggacctgagccacaagaacagcatgctgcaggaggagatcgccatgctgagactggagatcgacaccatcaagaaccagaaccaggagaaggagaagaagtgcttcgaggacctgaagatcgtgaaggagaagaacgaggacctgcagaagaccatcaagcagaacgaggagaccctgacccagaccatcagccagtacaacggcagactgagcgtgctgaccgccgagaacgccatgctgaacagcaagctggagaacgagaagcagagcaaggagagactggaggccgaggtggagagctaccacagcagactggccgccgccatccacgacagagaccagagcgagaccagcaagagagagctggagctggccttccagagagccagagacgagtgcagcagactgcaggacaagatgaacttcgacgtgagcaacctgaaggacaacaacgagatcctgagccagcagctgttcaagaccgagagcaagctgaacagcctggagatcgagttccaccacaccagagacgccctgagagagaagaccctgggcctggagagagtgcagaaggacctgagccagacccagtgccagatgaaggagatggagcagaagtaccagaacgagcaggtgaaggtgaacaagtacatcggcaagcaggagagcgtggaggagagactgagccagctgcagagcgagaacatgctgctgagacagcagctggacgacgcccacaacaaggccgacaacaaggagaagaccgtgatcaacatccaggaccagttccacgccatcgtgcagaagctgcaggccgagagcgagaagcagagcctgctgctggaggagagaaacaaggagctgatcagcgagtgcaaccacctgaaggagagacagtaccagtacgagaacgagaaggccgagagagaggtggtggtgagacagctgcagcaggagctggccgacaccctgaagaagcagagcatgagcgaggccagcctggaggtgaccagcagatacagaatcaacctggaggacgagacccaggacctgaagaagaagctgggccagatcagaaaccagctgcaggaggcccaggacagacacaccgaggccgtgagatgcgccgagaagatgcaggaccacaagcagaagctggagaaggacaacgccaagctgaaggtgaccgtgaagaagcagatggacaagatcgaggagctgcagaagaacctgctgaacgccaacctgagcgaggacgagaaggagcagctgaagaagctgatggagctgaagcagagcctggagtgcaacctggaccaggagatgaagaagaacgtggagctggagagagagatcaccggcttcaagaacctgctgaagatgaccagaaagaagctgaacgagtacgagaacggcgagttcagcttccacggcgacctgaagaccagccagttcgagatggacatccagatcaacaagctgaagcacaagatcgacgacctgaccgccgagctggagaccgccggcagcaagtgcctgcacctggacaccaagaaccagatcctgcaggaggagctgctgagcatgaagaccgtgcagaagaagtgcgagaagctgcagaagaacaagaagaagctggagcaggaggtgatcaacctgagaagccacatcgagagaaacatggtggagctgggccaggtgaagcagtacaagcaggagatcgaggagagagccagacaggagatcgccgagaagctgaaggaggtgaacctgttcctgcaggcccaggccgccagccaggagaacctggagcagttcagagagaacaacttcgccagcatgaagagccagatggagctgagaatcaaggacctggagagcgagctgagcaagatcaagaccagccaggaggacttcaacaagaccgagctggagaagtacaagcagctgtacctggaggagctgaaggtgagaaagagcctgagcagcaagctgaccaagaccaacgagagactggccgaggtgaacaccaagctgctggtggagaagcagcagagcagaagcctgttcaccaccctgaccaccagacccgtgatggagcccccctgcgtgggcaacctgaacaacagcctggacctgaacagaaagctgatccccagagagaacctggtgatcagcaccagcaaccccagagccagcaacaacagcatggagaactacctgagcaagatgcagcaggagctggagaagaacatcaccagagagctgaaggaggccgccgccgagctggagagcggcagcatcgccagccccctgggcagcaccgacgagagcaacctgaaccaggacctggtgtggaaggccagcagagagtacgtgcaggtgctgaagaagaactacatgatctag

SEQ ID NO: 72901 - DNA, 5181 bp, synthetic construct
  misc_feature 1..5181: note = Description of Artificial Sequence: Synthetic coding sequence
  source 1..5181: mol_type = other DNA
atgaagaagatcttcagcaagaagggcgagagccccctgggcagcttcgccagaagacagagaagcagcgccggcggcggcggcgagcccggcgagggcgcctacagccagcccggctaccacgtgagagacagagacctgggcaagatccacaaggccgccagcgccggcaacgtggccaaggtgcagcagatcctgctgctgagaaagaacggcctgaacgacagagacaagatgaacagaaccgccctgcacctggcctgcgccaacggccaccccgaggtggtgaccctgctggtggacagaaagtgccagctgaacgtgtgcgacaacgagaacagaaccgccctgatgaaggccgtgcagtgccaggaggagaagtgcgccaccatcctgctggagcacggcgccgaccccaacctggccgacgtgcacggcaacaccgccctgcactacgccgtgtacaacgaggacatcagcgtggccaccaagctgctgctgtacgacgccaacatcgaggccaagaacaaggacgacctgacccccctgctgctggccgtgagcggcaagaagcagcagatggtggagttcctgatcaagaagaaggccaacgtgaacgccgtggacaagctggagagcagccaccagctgatcagcgagtacaaggaggagagaatccccaagcacagcagccagaacagcaacagcgtggacgagagcagcgaggacagcctgagcagcctgttctacttcatcttcttcgagaccaagagctgcaccgtggcccaggccggcgtgctgcagcacgacctgagcagcctgcagagcctgctgcccggcttcacccagttcttctgcctgcacctgcccagcagctgggaccacagactgagcggcaagcccggcgtggacgacagctggcccaccagcgacgacgaggacctgaacttcgacaccaagaacgtgcccaagcccagcctggccaagctgatgaccgccagccagcagagcagaaagaacctggaggccacctacggcaccgtgagaaccggcaacagaaccctgttcgaggacagagacagcgacagccaggacgaggtggtggtggagagcctgcccaccaccagcatcaaggtgcagtgcttcagccaccccacctaccagagccccgacctgctgcccaagcccagccacaagagcctggccaaccccggcctgatgaaggaggagcccaccaagcccggcatcgccaagaaggagaacggcatcgacatcatcgagagcgcccccctggagcagaccaacaacgacaacctgacctacgtggacgaggtgcacaagaacaacagaagcgacatgatgagcgccctgggcctgggccaggaggaggacatcgagagcccctgggacagcgagagcatcagcgagaacttcccccagaagtacgtggaccccctggccggcgccgccgacggcaaggagaagaacatcggcaacgagcaggccgaggagagccccgagagatacctgcacctgaagcccaccatcgagatgaaggacagcgtgcccaacaaggccggcggcatgaaggacgtgcagaccagcaaggccgccgagcacgacctggaggtggccagcgaggaggagcaggagagagagggcagcgagaacaaccagccccaggtggaggaggagagaaagaagcacagaaacaacgagatggaggtgagcgccaacatccacgacggcgccaccgacgacgccgaggacgacgacgacgacgacggcctgatccagaagagaaagagcggcgagaccgaccaccagcagttccccagaaaggagaacaaggagtacgccagcagcggccccgccctgcagatgaaggaggtgaagagcaccgagaaggagaagagaaccagcaaggagagcgtgaacagccccgtgttcggcaaggccagcctgctgaccggcggcctgctgcaggtggacgacgacagcagcctgagcgagatcgacgaggacgagggcagacccaccaagaagaccagcaacgagaagaacaaggtgaagaaccagatccagagcatggacgacgtggacgacctgacccagagcagcgagaccgccagcgaggactgcgagctgccccacagcagctacaagaacttcatgctgctgatcgagcagctgggcatggagtgcaaggacagcgtgagcctgctgaagatccaggacgccgccctgagctgcgagagactgctggagctgaagaagaaccactgcgagctgctgaccgtgaagatcaagaagatggaggacaaggtgaacgtgctgcagagagagctgagcgagaccaaggagatcaagagccagctggagcaccagaaggtggagtgggagagagagctgtgcagcctgagattcagcctgaaccaggaggaggagaagagaagaaacgccgacaccctgtacgagaagatcagagagcagctgagaagaaaggaggagcagtacagaaaggaggtggaggtgaagcagcagctggagctgagcctgcagaccctggagatggagctgagaaccgtgaagagcaacctgaaccaggtggtgcaggagagaaacgacgcccagagacagctgagcagagagcagaacgccagaatgctgcaggacggcatcctgaccaaccacctgagcaagcagaaggagatcgagatggcccagaagaagatgaacagcgagaacagccacagccacgaggaggagaaggacctgagccacaagaacagcatgctgcaggaggagatcgccatgctgagactggagatcgacaccatcaagaaccagaaccaggagaaggagaagaagtgcttcgaggacctgaagatcgtgaaggagaagaacgaggacctgcagaagaccatcaagcagaacgaggagaccctgacccagaccatcagccagtacaacggcagactgagcgtgctgaccgccgagaacgccatgctgaacagcaagctggagaacgagaagcagagcaaggagagactggaggccgaggtggagagctaccacagcagactggccgccgccatccacgacagagaccagagcgagaccagcaagagagagctggagctggccttccagagagccagagacgagtgcagcagactgcaggacaagatgaacttcgacgtgagcaacctgaaggacaacaacgagatcctgagccagcagctgttcaagaccgagagcaagctgaacagcctggagatcgagttccaccacaccagagacgccctgagagagaagaccctgggcctggagagagtgcagaaggacctgagccagacccagtgccagatgaaggagatggagcagaagtaccagaacgagcaggtgaaggtgaacaagtacatcggcaagcaggagagcgtggaggagagactgagccagctgcagagcgagaacatgctgctgagacagcagctggacgacgcccacaacaaggccgacaacaaggagaagaccgtgatcaacatccaggaccagttccacgccatcgtgcagaagctgcaggccgagagcgagaagcagagcctgctgctggaggagagaaacaaggagctgatcagcgagtgcaaccacctgaaggagagacagtaccagtacgagaacgagaaggccgagagagaggtggtggtgagacagctgcagcaggagctggccgacaccctgaagaagcagagcatgagcgaggccagcctggaggtgaccagcagatacagaatcaacctggaggacgagacccaggacctgaagaagaagctgggccagatcagaaaccagctgcaggaggcccaggacagacacaccgaggccgtgagatgcgccgagaagatgcaggaccacaagcagaagctggagaaggacaacgccaagctgaaggtgaccgtgaagaagcagatggacaagatcgaggagctgcagaagaacctgctgaacgccaacctgagcgaggacgagaaggagcagctgaagaagctgatggagctgaagcagagcctggagtgcaacctggaccaggagatgaagaagaacgtggagctggagagagagatcaccggcttcaagaacctgctgaagatgaccagaaagaagctgaacgagtacgagaacggcgagttcagcttccacggcgacctgaagaccagccagttcgagatggacatccagatcaacaagctgaagcacaagatcgacgacctgaccgccgagctggagaccgccggcagcaagtgcctgcacctggacaccaagaaccagatcctgcaggaggagctgctgagcatgaagaccgtgcagaagaagtgcgagaagctgcagaagaacaagaagaagctggagcaggaggtgatcaacctgagaagccacatcgagagaaacatggtggagctgggccaggtgaagcagtacaagcaggagatcgaggagagagccagacaggagatcgccgagaagctgaaggaggtgaacctgttcctgcaggcccaggccgccagccaggagaacctggagcagttcagagagaacaacttcgccagcatgaagagccagatggagctgagaatcaaggacctggagagcgagctgagcaagatcaagaccagccaggaggacttcaacaagaccgagctggagaagtacaagcagctgtacctggaggagctgaaggtgagaaagagcctgagcagcaagctgaccaagaccaacgagagactggccgaggtgaacaccaagctgctggtggagaagcagcagagcagaagcctgttcaccaccctgaccaccagacccgtgatggagcccccctgcgtgggcaacctgaacaacagcctggacctgaacagaaagctgatccccagagagaacctggtgatcagcaccagcaaccccagagccagcaacaacagcatggagaactacctgagcaagatgcagcaggagctggagaagaacatcaccagagagctgaaggaggccgccgccgagctggagagcggcagcatcgccagccccctgggcagcaccgacgagagcaacctgaaccaggacctggtgtggaaggccagcagagagtacgtgcaggtgctgaagaagaactacatgatctag

SEQ ID NO: 72902 - DNA, 642 bp, synthetic construct
  misc_feature 1..642: note = Description of Artificial Sequence: Synthetic coding sequence
  source 1..642: mol_type = other DNA
tgattcagagagaacaacttcgccagcatgaagagccagatggagctgagaatcaaggacctggagagcgagctgagcaagatcaagaccagccaggaggacttcaacaagaccgagctggagaagtacaagcagctgtacctggaggagctgaaggtgagaaagagcctgagcagcaagctgaccaagaccaacgagagactggccgaggtgaacaccaagctgctggtggagaagcagcagagcagaagcctgttcaccaccctgaccaccagacccgtgatggagcccccctgcgtgggcaacctgaacaacagcctggacctgaacagaaagctgatccccagagagaacctggtgatcagcaccagcaaccccagagccagcaacaacagcatggagaactacctgagcaagatgcagcaggagctggagaagaacatcaccagagagctgaaggaggccgccgccgagctggagagcggcagcatcgccagccccctgggcagcaccgacgagagcaacctgaaccaggacctggtgtggaaggccagcagagagtacggccccagcgacgagaccccccacgactacgtgctgatgaccgaccagtgcctgaccagcagaaccgacctgcagtag

SEQ ID NO: 72903 - DNA, 3261 bp, synthetic construct
  misc_feature 1..3261: note = Description of Artificial Sequence: Synthetic coding sequence
  source 1..3261: mol_type = other DNA
atgagcagagtgtgcatcgtggtgctggaggaggtggaggacgagagccccgccttcatcagcaagctgccccaggagaacaagagcctgcacagcccccccagcggcaacgtgctggtgagataccccagcctggtgcaggccatcttcaacggcgaccccgacgaggtgagagccctgatcttcaagaaggaggacgtgaacttccaggacaacgagaagagaacccccctgcacgccgccgcctacctgggcgacgccgagatcatcgagctgctgatcctgagcggcgccagagtgaacgccaaggacagcaagtggctgacccccctgcacagagccgtggccagctgcagcgaggaggccgtgcaggtgctgctgaagcacagcgccgacgtgaacgccagagacaagaactggcagacccccctgcacatcgccgccgccaacaaggccgtgaagtgcgccgaggccctggtgcccctgctgagcaacgtgaacgtgagcgacagagccggcagaaccgccctgcaccacgccgccttcagcggccacggcgagatggtgaagctgctgctgagcagaggcgccaacatcaacgccttcgacaagaaggacagaagagccatccactgggccgcctacatgggccacatcgaggtggtgaagctgctggtgagccacggcgccgaggtgacctgcaaggacaagaagagctacacccccctgcacgccgccgccagcagcggcatgatcagcgtggtgaagtacctgctggacctgggcgtggacatgaacgagcccaacgcctacggcaacacccccctgcacgtggcctgctacaacggccaggacgtggtggtgaacgagctgatcgactgcggcgccatcgtgaaccagaagaacgagaagggcttcacccccctgcacttcgccgccgccagcacccacggcgccctgtgcctggagctgctggtgggcaacggcgccgacgtgaacatgaagagcaaggacggcaagacccccctgcacatgaccgccctgcacggcagattcagcagaagccagaccatcatccagagcggcgccgtgatcgactgcgaggacaagaacggcaacacccccctgcacatcgccgccagatacggccacgagctgctgatcaacaccctgatcaccagcggcgccgacaccgccaagagaggcatccacggcatgttccccctgcacctggccgccctgagcggcttcagcgactgctgcagaaagctgctgagcagcggcttcgacatcgacacccccgacgacttcggcagaacctgcctgcacgccgccgccgccggcggcaacctggagtgcctgaacctgctgctgaacaccggcgccgacttcaacaagaaggacaagttcggcagaagccccctgcactacgccgccgccaactgcaactaccagtgcctgttcgccctggtgggcagcggcgccagcgtgaacgacctggacgagagaggctgcacccccctgcactacgccgccaccagcgacaccgacggcaagtgcctggagtacctgctgagaaacgacgccaaccccggcatcagagacaagcagggctacaacgccgtgcactacagcgccgcctacggccacagactgtgcctgcagctgatcgccagcgagacccccctggacgtgctgatggagaccagcggcaccgacatgctgagcgacagcgacaacagagccaccatcagccccctgcacctggccgcctaccacggccaccaccaggccctggaggtgctggtgcagagcctgctggacctggacgtgagaaacagcagcggcagaacccccctggacctggccgccttcaagggccacgtggagtgcgtggacgtgctgatcaaccagggcgccagcatcctggtgaaggactacatcctgaagagaacccccatccacgccgccgccaccaacggccacagcgagtgcctgagactgctgatcggcaacgccgagccccagaacgccgtggacatccaggacggcaacggccagacccccctgatgctgagcgtgctgaacggccacaccgactgcgtgtacagcctgctgaacaagggcgccaacgtggacgccaaggacaagtggggcagaaccgccctgcacagaggcgccgtgaccggccacgaggagtgcgtggacgccctgctgcagcacggcgccaagtgcctgctgagagacagcagaggcagaacccccatccacctgagcgccgcctgcggccacatcggcgtgctgggcgccctgctgcagagcgccgccagcatggacgccaaccccgccaccgccgacaaccacggctacaccgccctgcactgggcctgctacaacggccacgagacctgcgtggagctgctgctggagcaggaggtgttccagaagaccgagggcaacgccttcagccccctgcactgcgccgtgatcaacgacaacgagggcgccgccgagatgctgatcgacaccctgggcgccagcatcgtgaacgccaccgacagcaagggcagaacccccctgcacgccgccgccttcaccgaccacgtggagtgcctgcagctgctgctgagccacaacgcccaggtgaacagcgtggacagcaccggcaagacccccctgatgatggccgccgagaacggccagaccaacaccgtggagatgctggtgagcagcgccagcgccgagctgaccctgcaggacaacagcaagaacaccgccctgcacctggcctgcagcaagggccacgagaccagcgccctgctgatcctggagaagatcaccgacagaaacctgatcaacgccaccaacgccgccctgcagacccccctgcacgtggccgccagaaacggcctgaccatggtggtgcaggagctgctgggcaagggcgccagcgtgctggccgtggacgagaacggctacacccccgccctggcctgcgcccccaacaaggacgtggccgactgcctggccctgatcctggccaccatgatgcccgtgagcagcagcagccccctgagcagcctgaccttcaacgccatcaacagatacaccaacaccagcaagaccgtgagcttcgaggccctgcccatcatgagaaacgagcccagcagctactgcagcttcaacaacatcggcggcgagcaggagtacctgtacaccgacgtggacgagctgaacgacagcgacagcgagacctactag

SEQ ID NO: 72904 - DNA, 3162 bp, synthetic construct
  misc_feature 1..3162: note = Description of Artificial Sequence: Synthetic coding sequence
  source 1..3162: mol_type = other DNA
atggccttcctgaagctgagagaccagcccagcctggtgcaggccatcttcaacggcgaccccgacgaggtgagagccctgatcttcaagaaggaggacgtgaacttccaggacaacgagaagagaacccccctgcacgccgccgcctacctgggcgacgccgagatcatcgagctgctgatcctgagcggcgccagagtgaacgccaaggacagcaagtggctgacccccctgcacagagccgtggccagctgcagcgaggaggccgtgcaggtgctgctgaagcacagcgccgacgtgaacgccagagacaagaactggcagacccccctgcacatcgccgccgccaacaaggccgtgaagtgcgccgaggccctggtgcccctgctgagcaacgtgaacgtgagcgacagagccggcagaaccgccctgcaccacgccgccttcagcggccacggcgagatggtgaagctgctgctgagcagaggcgccaacatcaacgccttcgacaagaaggacagaagagccatccactgggccgcctacatgggccacatcgaggtggtgaagctgctggtgagccacggcgccgaggtgacctgcaaggacaagaagagctacacccccctgcacgccgccgccagcagcggcatgatcagcgtggtgaagtacctgctggacctgggcgtggacatgaacgagcccaacgcctacggcaacacccccctgcacgtggcctgctacaacggccaggacgtggtggtgaacgagctgatcgactgcggcgccatcgtgaaccagaagaacgagaagggcttcacccccctgcacttcgccgccgccagcacccacggcgccctgtgcctggagctgctggtgggcaacggcgccgacgtgaacatgaagagcaaggacggcaagacccccctgcacatgaccgccctgcacggcagattcagcagaagccagaccatcatccagagcggcgccgtgatcgactgcgaggacaagaacggcaacacccccctgcacatcgccgccagatacggccacgagctgctgatcaacaccctgatcaccagcggcgccgacaccgccaagagaggcatccacggcatgttccccctgcacctggccgccctgagcggcttcagcgactgctgcagaaagctgctgagcagcggcttcgacatcgacacccccgacgacttcggcagaacctgcctgcacgccgccgccgccggcggcaacctggagtgcctgaacctgctgctgaacaccggcgccgacttcaacaagaaggacaagttcggcagaagccccctgcactacgccgccgccaactgcaactaccagtgcctgttcgccctggtgggcagcggcgccagcgtgaacgacctggacgagagaggctgcacccccctgcactacgccgccaccagcgacaccgacggcaagtgcctggagtacctgctgagaaacgacgccaaccccggcatcagagacaagcagggctacaacgccgtgcactacagcgccgcctacggccacagactgtgcctgcagctgatcgccagcgagacccccctggacgtgctgatggagaccagcggcaccgacatgctgagcgacagcgacaacagagccaccatcagccccctgcacctggccgcctaccacggccaccaccaggccctggaggtgctggtgcagagcctgctggacctggacgtgagaaacagcagcggcagaacccccctggacctggccgccttcaagggccacgtggagtgcgtggacgtgctgatcaaccagggcgccagcatcctggtgaaggactacatcctgaagagaacccccatccacgccgccgccaccaacggccacagcgagtgcctgagactgctgatcggcaacgccgagccccagaacgccgtggacatccaggacggcaacggccagacccccctgatgctgagcgtgctgaacggccacaccgactgcgtgtacagcctgctgaacaagggcgccaacgtggacgccaaggacaagtggggcagaaccgccctgcacagaggcgccgtgaccggccacgaggagtgcgtggacgccctgctgcagcacggcgccaagtgcctgctgagagacagcagaggcagaacccccatccacctgagcgccgcctgcggccacatcggcgtgctgggcgccctgctgcagagcgccgccagcatggacgccaaccccgccaccgccgacaaccacggctacaccgccctgcactgggcctgctacaacggccacgagacctgcgtggagctgctgctggagcaggaggtgttccagaagaccgagggcaacgccttcagccccctgcactgcgccgtgatcaacgacaacgagggcgccgccgagatgctgatcgacaccctgggcgccagcatcgtgaacgccaccgacagcaagggcagaacccccctgcacgccgccgccttcaccgaccacgtggagtgcctgcagctgctgctgagccacaacgcccaggtgaacagcgtggacagcaccggcaagacccccctgatgatggccgccgagaacggccagaccaacaccgtggagatgctggtgagcagcgccagcgccgagctgaccctgcaggacaacagcaagaacaccgccctgcacctggcctgcagcaagggccacgagaccagcgccctgctgatcctggagaagatcaccgacagaaacctgatcaacgccaccaacgccgccctgcagacccccctgcacgtggccgccagaaacggcctgaccatggtggtgcaggagctgctgggcaagggcgccagcgtgctggccgtggacgagaacggctacacccccgccctggcctgcgcccccaacaaggacgtggccgactgcctggccctgatcctggccaccatgatgcccgtgagcagcagcagccccctgagcagcctgaccttcaacgccatcaacagatacaccaacaccagcaagaccgtgagcttcgaggccctgcccatcatgagaaacgagcccagcagctactgcagcttcaacaacatcggcggcgagcaggagtacctgtacaccgacgtggacgagctgaacgacagcgacagcgagacctactag

SEQ ID NO: 72905 - DNA, 3162 bp, synthetic construct; identical to SEQ ID NO: 72904
  misc_feature 1..3162: note = Description of Artificial Sequence: Synthetic coding sequence
  source 1..3162: mol_type = other DNA

SEQ ID NO: 72906 - DNA, 4026 bp, synthetic construct
  misc_feature 1..4026: note = Description of Artificial Sequence: Synthetic coding sequence
  source 1..4026: mol_type = other DNA
atgaccaagagaaagaagaccatcaacctgaacatccaggacgcccagaagagaaccgccctgcactgggcctgcgtgaacggccacgaggaggtggtgaccttcctggtggacagaaagtgccagctggacgtgctggacggcgagcacagaacccccctgatgaaggccctgcagtgccaccaggaggcctgcgccaacatcctgatcgacagcggcgccgacatcaacctggtggacgtgtacggcaacaccgccctgcactacgccgtgtacagcgagatcctgagcgtggtggccaagctgctgagccacggcgccgtgatcgaggtgcacaacaaggccagcctgacccccctgctgctgagcatcaccaagagaagcgagcagatcgtggagttcctgctgatcaagaacgccaacgccaacgccgtgaacaagtacaagtgcaccgccctgatgctggccgtgtgccacggcagcagcgagatcgtgggcatgctgctgcagcagaacgtggacgtgttcgccgccgacatctgcggcgtgaccgccgagcactacgccgtgacctgcggcttccaccacatccacgagcagatcatggagtacatcagaaagctgagcaagaaccaccagaacaccaaccccgagggcaccagcgccggcacccccgacgaggccgcccccctggccgagagaacccccgacaccgccgagagcctggtggagaagacccccgacgaggccgcccccctggtggagagaacccccgacaccgccgagagcctggtggagaagacccccgacgaggccgccagcctggtggagggcaccagcgacaagatccagtgcctggagaaggccaccagcggcaagttcgagcagagcgccgaggagacccccagagagatcaccagccccgccaaggagaccagcgagaagttcacctggcccgccaagggcagacccagaaagatcgcctgggagaagaaggaggacacccccagagagatcatgagccccgccaaggagaccagcgagaagttcacctgggccgccaagggcagacccagaaagatcgcctgggagaagaaggagacccccgtgaagaccggctgcgtggccagagtgaccagcaacaagaccaaggtgctggagaagggcagaagcaagatgatcgcctgccccaccaaggagagcagcaccaaggccagcgccaacgaccagagattccccagcgagagcaagcaggaggaggacgaggagtacagctgcgacagcagaagcctgttcgagagcagcgccaagatccaggtgtgcatccccgagagcatctaccagaaggtgatggagatcaacagagaggtggaggagccccccaagaagcccagcgccttcaagcccgccatcgagatgcagaacagcgtgcccaacaaggccttcgagctgaagaacgagcagaccctgagagccgaccccatgttcccccccgagagcaagcagaaggactacgaggagaacagctgggacagcgagagcctgtgcgagaccgtgagccagaaggacgtgtgcctgcccaaggccacccaccagaaggagatcgacaagatcaacggcaagctggaggagagccccaacaaggacggcctgctgaaggccacctgcggcatgaaggtgagcatccccaccaaggccctggagctgaaggacatgcagaccttcaaggccgagccccccggcaagcccagcgccttcgagcccgccaccgagatgcagaagagcgtgcccaacaaggccctggagctgaagaacgagcagaccctgagagccgacgagatcctgcccagcgagagcaagcagaaggactacgaggagaacagctgggacaccgagagcctgtgcgagaccgtgagccagaaggacgtgtgcctgcccaaggccgcccaccagaaggagatcgacaagatcaacggcaagctggagggcagccccgtgaaggacggcctgctgaaggccaactgcggcatgaaggtgagcatccccaccaaggccctggagctgatggacatgcagaccttcaaggccgagccccccgagaagcccagcgccttcgagcccgccatcgagatgcagaagagcgtgcccaacaaggccctggagctgaagaacgagcagaccctgagagccgacgagatcctgcccagcgagagcaagcagaaggactacgaggagagcagctgggacagcgagagcctgtgcgagaccgtgagccagaaggacgtgtgcctgcccaaggccacccaccagaaggagatcgacaagatcaacggcaagctggaggagagccccgacaacgacggcttcctgaaggccccctgcagaatgaaggtgagcatccccaccaaggccctggagctgatggacatgcagaccttcaaggccgagccccccgagaagcccagcgccttcgagcccgccatcgagatgcagaagagcgtgcccaacaaggccctggagctgaagaacgagcagaccctgagagccgaccagatgttccccagcgagagcaagcagaagaaggtggaggagaacagctgggacagcgagagcctgagagagaccgtgagccagaaggacgtgtgcgtgcccaaggccacccaccagaaggagatggacaagatcagcggcaagctggaggacagcaccagcctgagcaagatcctggacaccgtgcacagctgcgagagagccagagagctgcagaaggaccactgcgagcagagaaccggcaagatggagcagatgaagaagaagttctgcgtgctgaagaagaagctgagcgaggccaaggagatcaagagccagctggagaaccagaaggtgaagtgggagcaggagctgtgcagcgtgagactgaccctgaaccaggaggaggagaagagaagaaacgccgacatcctgaacgagaagatcagagaggagctgggcagaatcgaggagcagcacagaaaggagctggaggtgaagcagcagctggagcaggccctgagaatccaggacatcgagctgaagagcgtggagagcaacctgaaccaggtgagccacacccacgagaacgagaactacctgctgcacgagaactgcatgctgaagaaggagatcgccatgctgaagctggagatcgccaccctgaagcaccagtaccaggagaaggagaacaagtacttcgaggacatcaagatcctgaaggagaagaacgccgagctgcagatgaccctgaagctgaaggaggagagcctgaccaagagagccagccagtacagcggccagctgaaggtgctgatcgccgagaacaccatgctgaccagcaagctgaaggagaagcaggacaaggagatcctggaggccgagatcgagagccaccaccccagactggccagcgccgtgcaggaccacgaccagatcgtgaccagcagaaagagccaggagcccgccttccacatcgccggcgacgcctgcctgcagagaaagatgaacgtggacgtgagcagcaccatctacaacaacgaggtgctgcaccagcccctgagcgaggcccagagaaagagcaagagcctgaagatcaacctgaactacgccggcgacgccctgagagagaacaccctggtgagcgagcacgcccagagagaccagagagagacccagtgccagatgaaggaggccgagcacatgtaccagaacgagcaggacaacgtgaacaagcacaccgagcagcaggagagcctggaccagaagctgttccagctgcagagcaagaacatgtggctgcagcagcagctggtgcacgcccacaagaaggccgacaacaagagcaagatcaccatcgacatccacttcctggagagaaagatgcagcaccacctgctgaaggagaagaacgaggagatcttcaactacaacaaccacctgaagaacagaatctaccagtacgagaaggagaaggccgagaccgagaacagctag

SEQ ID NO: 72907 - DNA, 360 bp, synthetic construct
  misc_feature 1..360: note = Description of Artificial Sequence: Synthetic coding sequence
  source 1..360: mol_type = other DNA
atgggcaccagaaccctgcagttcgagatcagcgacagccacgagaaggaggaggacctgctgcacaagaaccacctgatgcaggacgagatcgccagactgagactggagatccacaccatcaagaaccagatcctggagaagaagtacctgaaggacatcgagatcatcaagagaaagcacgaggacctgcagaaggccctgaagcagaacggcgagaagagcaccaagaccatcgcccactacagcggccagctgaccgccctgaccgacgagaacaccatgctgagaagcaagctggagaaggagaagcagagcagacagagactgaccaagtggaaccacaccatcgtggactag

SEQ ID NO: 72908 - DNA, 759 bp, synthetic construct
  misc_feature 1..759: note = Description of Artificial Sequence: Synthetic coding sequence
  source 1..759: mol_type = other DNA
atgagccaggccgccaaggccagcgccagcgccaccgtggccgtgaaccccggccccgacaccaagggcaagggcgccccccccgccggcaccagccccagccccggcaccaccctggcccccaccaccgtgcccatcaccagcgccaaggccgccgagctgccccccggcaactacagactggtggtgttcgagctggagaacttccagggcagaagagccgagttcagcggcgagtgcagcaacctggccgacagaggcttcgacagagtgagaagcatcatcgtgagcgccggcccctgggtggccttcgagcagagcaacttcagaggcgagatgttcatcctggagaagggcgagtaccccagatggaacacctggagcagcagctacagaagcgacagactgatgagcttcagacccatcaagatggacgcccaggagcacaagatcagcctgttcgagggcgccaacttcaagggcaacaccatcgagatccagggcgacgacgcccccagcctgtgggtgtacggcttcagcgacagagtgggcagcgtgaaggtgagcagcggcacctgggtgggctaccagtaccccggctacagaggctaccagtacctgctggagcccggcgacttcagacactggaacgagtggggcgccttccagccccagatgcagagcctgagaagactgagagacaagcagtggcacctggagggcagcttccccgtgctggccaccgagccccccaagtag

SEQ ID NO: 72909 - DNA, 627 bp, synthetic construct
  misc_feature 1..627: note = Description of Artificial Sequence: Synthetic coding sequence
  source 1..627: mol_type = other DNA
tgaagagacgagctgagatgcaagatccccgccggcagactgagaagagccgccagaccccacagaagactgggccccaccggcaaggaggtgcacgccctgaagagactgagagacagcgccaacgccaacgacgtggagaccgtgcagcagctgctggaggacggcgccgacccctgcgccgccgacgacaagggcagaaccgccctgcacttcgccagctgcaacggcaacgaccagatcgtgcagctgctgctggaccacggcgccgaccccaaccagagagacggcctgggcaacacccccctgcacctggagtgcagcccccagctggtgcccgccggcgccagagtggacgccctggacagagccggcagaacccccctgcacctggccaagagcaagctgaacatcctgcaggagggccacgcccagtgcctggaggccgtgagactggaggtgaagcagatcatccacatgctgagagagtacctggagagactgggccagcacgagcagagagagagactggacgacctgtgcaccagactgcagatgaccagcaccaaggagcaggtggacgaggtgaccgacctgctggccagcttcaccagcctgagcctgtag

SEQ ID NO: 72910 - DNA, 2184 bp, synthetic construct
  misc_feature 1..2184: note = Description of Artificial Sequence: Synthetic coding sequence
  source 1..2184: mol_type = other DNA
atgagccagcaggacgccgtggccgccctgagcgagagactgctggtggccgcctacaagggccagaccgagaacgtggtgcagctgatcaacaagggcgccagagtggccgtgaccaagcacggcagaacccccctgcacctggccgccaacaagggccacctgcccgtggtgcagatcctgctgaaggccggctgcgacctggacgtgcaggacgacggcgaccagaccgccctgcacagagccaccgtggtgggcaacaccgagatcatcgccgccctgatccacgagggctgcgccctggacagacaggacaaggacggcaacaccgccctgcacgaggccagctggcacggcttcagccagagcgccaagctgctgatcaaggccggcgccaacgtgctggccaagaacaaggccggcaacaccgccctgcacctggcctgccagaacagccacagccagagcaccagagtgctgctgctggccggcagcagagccgacctgaagaacaacgccggcgacacctgcctgcacgtggccgccagatacaaccacctgagcatcatcagactgctgctgaccgccttctgcagcgtgcacgagaagaaccaggccggcgacaccgccctgcacgtggccgccgccctgaaccacaagaaggtggccaagatcctgctggaggccggcgccgacaccaccatcgtgaacaacgccggccagacccccctggagaccgccagataccacaacaaccccgaggtggccctgctgctgaccaaggccccccaggtgctgagattcagcagaggcagaagcctgagaaagaagagagagagactgaaggaggagagaagagcccagagcgtgcccagagacgaggtggcccagagcaagggcagcgtgagcgccggcgacacccccagcagcgagcaggccgtggccagaaaggaggaggccagagaggagttcctgagcgccagccccgagcccagagccaaggacgacagaagaagaaagagcagacccaaggtgagcgccttcagcgaccccaccccccccgccgaccagcagcccggccaccagaagaacctgcacgcccacaaccaccccaagaagagaaacagacacagatgcagcagccccccccccccccacgagttcagagcctaccagctgtacaccctgtacagaggcaaggacggcaaggtgatgcaggcccccatcaacggctgcagatgcgagcccctgatcaacaagctggagaaccagctggaggccaccgtggaggagatcaaggccgagctgggcagcgtgcaggacaagatgaacaccaagctgggccagatggagaacaagacccagcaccagatgagagtgctggacaagctgatggtggagagactgagcgccgagagaaccgagtgcctgaacagactgcagcagcacagcgacaccgagaagcacgagggcgagaagagacagatcagcctggtggacgagctgaagacctggtgcatgctgaagatccagaacctggagcagaagctgagcggcgacagcagagcctgcagagccaagagcacccccagcacctgcgagagcagcaccggcgtggaccagctggtggtgaccgccggccccgccgccgccagcgacagcagcccccccgtggtgagacccaaggagaaggccctgaacagcaccgccacccagagactgcagcaggagctgagcagcagcgactgcaccggcagcagactgagaaacgtgaaggtgcagaccgccctgctgcccatgaacgaggccgccagaagcgaccagcaggccggcccctgcgtgaacagaggcacccagaccaagaagagcggcaagagcggccccaccagacacagagcccagcagcccgccgccagcagcacctgcggccagcccccccccgccaccggcagcgagcagaccggcccccacatcagagacaccagccaggccctggagctgacccagtacttcttcgaggccgtgagcacccagatggagaagtggtacgagagaaagatcgaggaggccagaagccaggccaaccagaaggcccagcaggacaaggccaccctgaaggagcacatcaagagcctggaggaggagctggccaagctgagaaccagagtgcagaaggagaactag

SEQ ID NO: 72911 - DNA, 2079 bp, synthetic construct
  misc_feature 1..2079: note = Description of Artificial Sequence: Synthetic coding sequence
  source 1..2079: mol_type = other DNA
atgagccagcaggacgccgtggccgccctgagcgagagactgctggtggccgcctacaagggccagaccgagaacgtggtgcagctgatcaacaagggcgccagagtggccgtgaccaagcacggcagaacccccctgcacctggccgccaacaagggccacctgcccgtggtgcagatcctgctgaaggccggctgcgacctggacgtgcaggacgacggcgaccagaccgccctgcacagagccaccgtggtgggcaacaccgagatcatcgccgccctgatccacgagggctgcgccctggacagacaggacaaggacggcaacaccgccctgcacgaggccagctggcacggcttcagccagagcgccaagctgctgatcaaggccggcgccaacgtgctggccaagaacaaggccggcaacaccgccctgcacctggcctgccagaacagccacagccagagcaccagagtgctgctgctggccggcagcagagccgacctgaagaacaacgccggcgacacctgcctgcacgtggccgccagatacaaccacctgagcatcatcagactgctgctgaccgccttctgcagcgtgcacgagaagaaccaggccggcgacaccgccctgcacgtggccgccgccctgaaccacaagaaggtggccaagatcctgctggaggccggcgccgacaccaccatcgtgaacaacgccggccagacccccctggagaccgccagataccacaacaaccccgaggtggccctgctgctgaccaaggccccccagggcagcgtgagcgccggcgacacccccagcagcgagcaggccgtggccagaaaggaggaggccagagaggagttcctgagcgccagccccgagcccagagccaaggacgacagaagaagaaagagcagacccaaggtgagcgccttcagcgaccccaccccccccgccgaccagcagcccggccaccagaagaacctgcacgcccacaaccaccccaagaagagaaacagacacagatgcagcagccccccccccccccacgagttcagagcctaccagctgtacaccctgtacagaggcaaggacggcaaggtgatgcaggcccccatcaacggctgcagatgcgagcccctgatcaacaagctggagaaccagctggaggccaccgtggaggagatcaaggccgagctgggcagcgtgcaggacaagatgaacaccaagctgggccagatggagaacaagacccagcaccagatgagagtgctggacaagctgatggtggagagactgagcgccgagagaaccgagtgcctgaacagactgcagcagcacagcgacaccgagaagcacgagggcgagaagagacagatcagcctggtggacgagctgaagacctggtgcatgctgaagatccagaacctggagcagaagctgagcggcgacagcagagcctgcagagccaagagcacccccagcacctgcgagagcagcaccggcgtggaccagctggtggtgaccgccggccccgccgccgccagcgacagcagcccccccgtggtgagacccaaggagaaggccctgaacagcaccgccacccagagactgcagcaggagctgagcagcagcgactgcaccggcagcagactgagaaacgtgaaggtgcagaccgccctgctgcccatgaacgaggccgccagaagcgaccagcaggccggcccctgcgtgaacagaggcacccagaccaagaagagcggcaagagcggccccaccagacacagagcccagcagcccgccgccagcagcacctgcggccagcccccccccgccaccggcagcgagcagaccggcccccacatcagagacaccagccaggccctggagctgacccagtacttcttcgaggccgtgagcacccagatggagaagtggtacgagagaaagatcgaggaggccagaagccaggccaaccagaaggcccagcaggacaaggccaccctgaaggagcacatcaagagcctggaggaggagctggccaagctgagaaccagagtgcagaaggagaactag

SEQ ID NO: 72912 - DNA, 2169 bp, synthetic construct
  misc_feature 1..2169: note = Description of Artificial Sequence: Synthetic coding sequence
  source 1..2169: mol_type = other DNA
atgagccagcaggacgccgtggccgccctgagcgagagactgctggtggccgcctacaagggccagaccgagaacgtggtgcagctgatcaacaagggcgccagagtggccgtgaccaagcacggcagaacccccctgcacctggccgccaacaagggccacctgcccgtggtgcagatcctgctgaaggccggctgcgacctggacgtgcaggacgacggcgaccagaccgccctgcacagagccaccgtggtgggcaacaccgagatcatcgccgccctgatccacgagggctgcgccctggacagacaggacaaggacggcaacaccgccctgcacgaggccagctggcacggcttcagccagagcgccaagctgctgatcaaggccggcgccaacgtgctggccaagaacaaggccggcaacaccgccctgcacctggcctgccagaacagccacagccagagcaccagagtgctgctgctggccggcagcagagccgacctgaagaacaacgccggcgacacctgcctgcacgtggccgccagatacaaccacctgagcatcatcagactgctgctgaccgccttctgcagcgtgcacgagaagaaccaggccggcgacaccgccctgcacgtggccgccgccctgaaccacaagaaggtggccaagatcctgctggaggccggcgccgacaccaccatcgtgaacaacgccggccagacccccctggagaccgccagataccacaacaaccccgaggtggccctgctgctgaccaaggccccccaggtgctgagattcagcagaggcagaagcctgagaaagaagagagagagactgaaggaggagagaagagcccagagcgtgcccagagacgaggtggcccagagcaagggcagcgtgagcgccggcgacacccccagcagcgagcaggccgtggccagaaaggaggaggccagagaggagttcctgagcgccagccccgagcccagagccaaggacgacagaagaagaaagagcagacccaaggtgagcgccttcagcgaccccaccccccccgccgaccagcagcccggccaccagaagaacctgcacgcccacaaccaccccaagaagagaaacagacacagatgcagcagccccccccccccccacgagttcagagcctaccagctgtacaccctgtacagaggcaaggacggcaaggtgatgcaggcccccatcaacggctgcagatgcgagcccctgatcaacaagctggagaaccagctggaggccaccgtggaggagatcaaggccgagctgggcagcgtgcaggacaagatgaacaccaagctgggccagatggagaacaagacccagcaccagatgagagtgctggacaagctgatggtggagagactgagcgccgagagaaccgagtgcctgaacagactgcagcagcacagcgacaccgagaagcacgagggcgagaagagacagatcagcctggtggacgagctgaagacctggtgcatgctgaagatccagaacctggagcagaagctgagcggcgacagcagagcctgcagagccaagagcacccccagcacctgcgtggaccagctggtggtgaccgccggccccgccgccgccagcgacagcagcccccccgtggtgagacccaaggagaaggccctgaacagcaccgccacccagagactgcagcaggagctgagcagcagcgactgcaccggcagcagactgagaaacgtgaaggtgcagaccgccctgctgcccatgaacgaggccgccagaagcgaccagcaggccggcccctgcgtgaacagaggcacccagaccaagaagagcggcaagagcggccccaccagacacagagcccagcagcccgccgccagcagcacctgcggccagcccccccccgccaccggcagcgagcagaccggcccccacatcagagacaccagccaggccctggagctgacccagtacttcttcgaggccgtgagcacccagatggagaagtggtacgagagaaagatcgaggaggccagaagccaggccaaccagaaggcccagcaggacaaggccaccctgaaggagcacatcaagagcctggaggaggagctggccaagctgagaaccagagtgcagaaggagaactag

SEQ ID NO: 72913 - DNA, 528 bp, synthetic construct
  misc_feature 1..528: note = Description of Artificial Sequence: Synthetic coding sequence
  source 1..528: mol_type = other DNA
atgagccagcaggacgccgtggccgccctgagcgagagactgctggtggccgcctacaagggccagaccgagaacgtggtgcagctgatcaacaagggcgccagagtggccgtgaccaagcacggcagaacccccctgcacctggccgccaacaagggccacctgcccgtggtgcagatcctgctgaaggccggctgcgacctggacgtgcaggacgacggcgaccagaccgccctgcacagagccaccgtggtgggcaacaccgagatcatcgccgccctgatccacgagggctgcgccctggacagacaggacaaggacggcaacaccgccctgcacgaggccagctggcacggcttcagccagagcgccaagctgctgatcaaggccggcgccaacgtgctggccaagaacaaggccggcaacaccgccctgcacctggcctgccagaacagccacagccagagcaccagagtgctgctgctggccggcagcagagccgacctgaagaacaacgccggcgactag

SEQ ID NO: 72914 - DNA, 243 bp, synthetic construct
  misc_feature 1..243: note = Description of Artificial Sequence: Synthetic coding sequence
  source 1..243: mol_type = other DNA
atgagccagcaggacgccgtggccgccctgagcgagagactgctggtggccgcctacaagggccagaccgagaacgtggtgcagctgatcaacaagggcgccagagtggccgtgaccaagcacggcagaacccccctgcacctggccgccaacaagggccacctgcccgtggtgcagatcctgctgaaggccggctgcgacctggacgtgcaggacgacggcgaccagaccgccctgcactag

SEQ ID NO: 72915 - DNA, 2184 bp, synthetic construct; identical to SEQ ID NO: 72910
  misc_feature 1..2184: note = Description of Artificial Sequence: Synthetic coding sequence
  source 1..2184: mol_type = other DNA

SEQ ID NO: 72916 - DNA, 357 bp, synthetic construct
  misc_feature 1..357: note = Description of Artificial Sequence: Synthetic coding sequence
  source 1..357: mol_type = other DNA
atgagccagcaggacgccgtggccgccctgagcgagagactgctggtggccgcctacaagggccagaccgagaacgtggtgcagctgatcaacaagggcgccagagtggccgtgaccaagcacggcagaacccccctgcacctggccgccaacaagggccacctgcccgtggtgcagatcctgctgaaggccggctgcgacctggacgtgcaggacgacggcgaccagaccgccctgcacagagccaccgtggtgggcaacaccgagatcatcgccgccctgatccacgagggctgcgccctggacagacaggacaaggacggcaacaccgccctgcacgaggccagctggcactag

SEQ ID NO: 72917 - DNA, 309 bp, synthetic construct
  misc_feature 1..309: note = Description of Artificial Sequence: Synthetic coding sequence
  source 1..309: mol_type = other DNA
atgagccagcaggacgccgtggccgccctgagcgagagactgctggtggccgcctacaagggccagaccgagaacgtggtgcagctgatcaacaagggcgccagagtggccgtgaccaagcacggcagaacccccctgcacctggccgccaacaagggccacctgcccgtggtgcagatcctgctgaaggccggctgcgacctggacgtgcaggacgacggcgaccagaccgccctgcacagagccaccgtggtgggcaacaccgagatcatcgccgccctgatccacgagggctgcgccctggactag

SEQ ID NO: 72918 - DNA, 1992 bp, synthetic construct
  misc_feature 1..1992: note = Description of Artificial Sequence: Synthetic coding sequence
  source 1..1992: mol_type = other DNA
atgagccagcaggacgccgtggccgccctgagcgagagactgctggtggccgcctacaagggccagaccgagaacgtggtgcagctgatcaacaagggcgccagagtggccgtgaccaagcacggcagaacccccctgcacctggccgccaacaagggccacctgcccgtggtgcagatcctgctgaaggccggctgcgacctggacgtgcaggacgacggcgaccagaccgccctgcacagagccaccgtggtgggcaacaccgagatcatcgccgccctgatccacgagggctgcgccctggacagacaggacaaggccggcaacaccgccctgcacctggcctgccagaacagccacagccagagcaccagagtgctgctgctggccggcagcagagccgacctgaagaacaacgccggcgacacctgcctgcacgtggccgccagatacaaccacctgagcatcatcagactgctgctgaccgccttctgcagcgtgcacgagaagaaccaggccggcgacaccgccctgcacgtggccgccgccctgaaccacaagaaggtggccaagatcctgctggaggccggcgccgacaccaccatcgtgaacaacgtgctgagattcagcagaggcagaagcctgagaaagaagagagagagactgaaggaggagagaagagcccagagcgtgcccagagacgaggtggcccagagcaagggcagcgtgagcgccggcgacacccccagcagcgagcaggccgtggccagaaaggaggaggccagagaggagttcctgagcgccagccccgagcccagagccaaggacgacagaagaagaaagagcagacccaaggtgagcgccttcagcgaccccaccccccccgccgaccagcagcccggccaccagaagaacctgcacgcccacaaccaccccaagaagagaaacagacacagatgcagcagccccccccccccccacgagttcagagcctaccagctgtacaccctgtacagaggcaaggacggcaaggtgatgcaggcccccatcaacggctgcagatgcgagcccctgatcaacaagctggagaaccagctggaggccaccgtggaggagatcaaggccgagctgggcagcgtgcaggacaagatgaacaccaagctgggccagatggagaacaagacccagcaccagatgagagtgctggacaagctgatggtggagagactgagcgccgagagaaccgagtgcctgaacagactgcagcagcacagcgacaccgagaagcacgagggcgagaagagacagatcagcctggtggacgagctgaagacctggtgcatgctgaagatccagaacctggagcagaagctgagcggcgacagcagagcctgcagagccaagagcacccccagcacctgcgtggaccagctggtggtgaccgccggccccgccgccgccagcgacagcagcccccccgtggtgagacccaaggagaaggccctgaacagcaccgccacccagagactgcagcaggagctgagcagcagcgactgcaccggcagcagactgagaaacgtgaaggtgcagaccgccctgctgcccatgaacgaggccgccagaagcgaccagcaggccggcccctgcgtgaacagaggcacccagaccaagaagagcggcaagagcggccccaccagacacagagcccagcagcccgccgccagcagcacctgcggccagcccccccccgccaccggcagcgagcagaccggcccccacatcagagacaccagccaggccctggagctgacccagtacttcttcgaggccgtgagcacccagatggagaagtggtacgagagaaagatcgaggaggccagaagccaggccaaccagaaggcccagcaggacaaggccaccctgaaggagcacatcaagagcctggaggaggagctggccaagctgagaaccagagtgcagaaggagaactag

SEQ ID NO: 72919 - DNA, 765 bp, synthetic construct
  misc_feature 1..765: note = Description of Artificial Sequence: Synthetic coding sequence
  source 1..765: mol_type = other DNA
atgaacaagctgttcagcttctggaagagaaagaacgagaccagaagccagggctacaacctgagagagaaggacctgaagaagctgcacagagccgccagcgtgggcgacctgaagaagctgaaggagtacctgcagatcaagaagtacgacgtgaacatgcaggacaagaagtacagaacccccctgcacctggcctgcgccaacggccacaccgacgtggtgctgttcctgatcgagcagcagtgcaagatcaacgtgagagacagcgagaacaagagccccctgatcaaggccgtgcagtgccagaacgaggactgcgccaccatcctgctgaacttcggcgccgaccccgacctgagagacatcagatacaacaccgtgctgcactacgccgtgtgcggccagagcctgagcctggtggagaagctgctggagtacgaggccgacctggaggccaagaacaaggacggctacacccccctgctggtggccgtgatcaacaacaaccccaagatggtgaagttcctgctggagaagggcgccgacgtgaacgccagcgacaactaccagagaaccgccctgatcctggccgtgagcggcgagcccccctgcctggtgaagctgctgctgcagcagggcgtggagctgtgctacgagggcatcgtggacagccagctgagaaacatgttcatcagcatggtgctgctgcacagatacccccagttcaccgccagccacggcaagaagaagcacgccaagtag

SEQ ID NO: 72920 - DNA, 825 bp, synthetic construct
  misc_feature 1..825: note = Description of Artificial Sequence: Synthetic coding sequence
  source 1..825: mol_type = other DNA
atgaacaagctgttcagcttctggaagagaaagaacgagaccagaagccagggctacaacctgagagagaaggacctgaagaagctgcacagagccgccagcgtgggcgacctgaagaagctgaaggagtacctgcagatcaagaagtacgacgtgaacatgcaggacaagaagtacagcgtggtgcagagcagcagatggctgctgagctacaccacccccctgaacgacttcatcagaacccccctgcacctggcctgcgccaacggccacaccgacgtggtgctgttcctgatcgagcagcagtgcaagatcaacgtgagagacagcgagaacaagagccccctgatcaaggccgtgcagtgccagaacgaggactgcgccaccatcctgctgaacttcggcgccgaccccgacctgagagacatcagatacaacaccgtgctgcactacgccgtgtgcggccagagcctgagcctggtggagaagctgctggagtacgaggccgacctggaggccaagaacaaggacggctacacccccctgctggtggccgtgatcaacaacaaccccaagatggtgaagttcctgctggagaagggcgccgacgtgaacgccagcgacaactaccagagaaccgccctgatcctggccgtgagcggcgagcccccctgcctggtgaagctgctgctgcagcagggcgtggagctgtgctacgagggcatcgtggacagccagctgagaaacatgttcatcagcatggtgctgctgcacagatacccccagttcaccgccagccacggcaagaagaagcacgccaagtag

SEQ ID NO: 72921 - DNA, 606 bp, synthetic construct
  misc_feature 1..606: note = Description of Artificial Sequence: Synthetic coding sequence
  source 1..606: mol_type = other DNA
atgcaggacaagaagtacagaacccccctgcacctggcctgcgccaacggccacaccgacgtggtgctgttcctgatcgagcagcagtgcaagatcaacgtgagagacagcgagaacaagagccccctgatcaaggccgtgcagtgccagaacgaggactgcgccaccatcctgctgaacttcggcgccgaccccgacctgagagacatcagatacaacaccgtgctgcactacgccgtgtgcggccagagcctgagcctggtggagaagctgctggagtacgaggccgacctggaggccaagaacaaggacggctacacccccctgctggtggccgtgatcaacaacaaccccaagatggtgaagttcctgctggagaagggcgccgacgtgaacgccagcgacaactaccagagaaccgccctgatcctggccgtgagcggcgagcccccctgcctggtgaagctgctgctgcagcagggcgtggagctgtgctacgagggcatcgtggacagccagctgagaaacatgttcatcagcatggtgctgctgcacagatacccccagttcaccgccagccacggcaagaagaagcacgccaagtag

SEQ ID NO: 72922 - DNA, 942 bp, synthetic construct
  misc_feature 1..942: note = Description of Artificial Sequence: Synthetic coding sequence
  source 1..942: mol_type = other DNA
atggacaccagcaccaacctggacatcggcgcccagctgatcgtggaggagtgccccagcacctacagcctgaccggcatgcccgacatcaagatcgagcaccccctggaccccaacagcgaggagggcagcgcccagggcgtggccatgggcatgaagttcatcctgcccaacagattcgacatgaacgtgtgcagcagattcgtgaagagcctgaacgaggaggacagcaagaacatccaggaccaggtgaacagcgacctggaggtggccagcgtgctgttcaaggccgagtgcaacatccacaccagccccagccccggcatccaggtgagacacgtgtacacccccagcaccaccaagcacttcagccccatcaagcagagcaccaccctgaccaacaagcacagaggcaacgaggtgagcaccacccccctgctggccaacagcctgagcgtgcaccagctggccgcccagggcgagatgctgtacctggccaccagaatcgagcaggagaacgtgatcaaccacaccgacgaggagggcttcacccccctgatgtgggccgccgcccacggccagatcgccgtggtggagttcctgctgcagaacggcgccgacccccagctgctgggcaagggcagagagagcgccctgagcctggcctgcagcaagggctacaccgacatcgtgaagatgctgctggactgcggcgtggacgtgaacgagtacgactggaacggcggcacccccctgctgtacgccgtgcacggcaaccacgtgaagtgcgtgaagatgctgctggagagcggcgccgaccccaccatcgagaccgacagcggctacaacagcatggacctggccgtggccctgggctacagaagcgtgcagcaggtgatcgagagccacctgctgaagctgctgcagaacatcaaggagtag

SEQ ID NO: 72923 - DNA, 1428 bp, synthetic construct
  misc_feature 1..1428: note = Description of Artificial Sequence: Synthetic coding sequence
  source 1..1428: mol_type = other DNA
atggccgccagcgccctgagaggcctgcccgtggccggcggcggcgagagcagcgagagcgaggacgacggctgggagatcggctacctggacagaaccagccagaagctgaagagactgctgcccatcgaggagaagaaggagaagttcaagaaggccatgaccatcggcgacgtgagcctggtgcaggagctgctggacagcggcatcagcgtggacagcaacttccagtacggctggacccccctgatgtacgccgccagcgtggccaacgccgagctggtgagagtgctgctggacagaggcgccaacgccagcttcgagaaggacaagcagagcatcctgatcaccgcctgcagcgcccacggcagcgaggagcagatcctgaagtgcgtggagctgctgctgagcagaaacgccgaccccaacgtggcctgcagaagactgatgacccccatcatgtacgccgccagagacggccacacccaggtggtggccctgctggtggcccacggcgccgaggtgaacacccaggacgagaacggctacaccgccctgacctgggccgccagacagggccacaagaacatcgtgctgaagctgctggagctgggcgccaacaagatgctgcagaccaaggacggcaagatgcccagcgagatcgccaagagaaacaagcaccacgagatcttcaacctgctgagcttcaccctgaaccccctggagggcaagctgcagcagctgaccaaggaggacaccatctgcaagatcctgaccaccgacagcgacagagagaaggaccacatcttcagcagctacaccgccttcggcgacctggaggtgttcctgcacggcctgggcctggagcacatgaccgacctgctgaaggagagagacatcaccctgagacacctgctgaccatgagagaggacgagttcaccaagaacggcatcaccagcaaggaccagcagaagatcctggccgccctgaaggagctgcaggtggaggagatccagttcggcgagctgagcgaggagaccaagctggagatcagcggcgacgagttcctgaacttcctgctgaagctgaacaagcagtgcggccacctgatcaccgccgtgcagaacgtgatcaccgagctgcccgtgaacagccagaagatcaccctggagtgggccagcccccagaacttcaccagcgtgtgcgaggagctggtgaacaacgtggaggacctgagcgagaaggtgtgcaagctgaaggacctgatccagaagctgcagaacgagagagagaacgaccccacccacatccagctgagagaggaggtgagcacctggaacagcagaatcctgaagagaaccgccatcaccatctgcggcttcggcttcctgctgttcatctgcaagctgaccttccagagaaagtag

SEQ ID NO: 72924 - DNA, 1041 bp, synthetic construct
  misc_feature 1..1041: note = Description of Artificial Sequence: Synthetic coding sequence
  source 1..1041: mol_type = other DNA
atggccatggtgagcgagttcctgaagcaggcctggttcatcgagaacgaggagcaggagtacgtgcagaccgtgaagagcagcaagggcggccccggcagcgccgtgagcccctaccccaccttcaaccccagcagcgacgtggccgccctgcacaaggccatcatggtgaagggcgtggacgaggccaccatcatcgacatcctgaccaagagaaacaacgcccagagacagcagatcaaggccgcctacctgcaggagaccggcaagcccctggacgagaccctgaagaaggccctgaccggccacctggaggaggtggtgctggccctgctgaagacccccgcccagttcgacgccgacgagctgagagccgccatgaagggcctgggcaccgacgaggacaccctgatcgagatcctggccagcagaaccaacaaggagatcagagacatcaacagagtgtacagagaggagctgaagagagacctggccaaggacatcaccagcgacaccagcggcgacttcagaaacgccctgctgagcctggccaagggcgacagaagcgaggacttcggcgtgaacgaggacctggccgacagcgacgccagagccctgtacgaggccggcgagagaagaaagggcaccgacgtgaacgtgttcaacaccatcctgaccaccagaagctacccccagctgagaagagtgttccagaagtacaccaagtacagcaagcacgacatgaacaaggtgctggacctggagctgaagggcgacatcgagaagtgcctgaccgccatcgtgaagtgcgccaccagcaagcccgccttcttcgccgagaagctgcaccaggccatgaagggcgtgggcaccagacacaaggccctgatcagaatcatggtgagcagaagcgagatcgacatgaacgacatcaaggccttctaccagaagatgtacggcatcagcctgtgccaggccatcctggacgagaccaagggcgactacgagaagatcctggtggccctgtgcggcggcaactag

SEQ ID NO: 72925 - DNA, 1041 bp, synthetic construct; identical to SEQ ID NO: 72924
  misc_feature 1..1041: note = Description of Artificial Sequence: Synthetic coding sequence
  source 1..1041: mol_type = other DNA

SEQ ID NO: 72926 - DNA, 348 bp, synthetic construct
  misc_feature 1..348: note = Description of Artificial Sequence: Synthetic coding sequence
  source 1..348: mol_type = other DNA
atggccatggtgagcgagttcctgaagcaggcctggttcatcgagaacgaggagcaggagtacgtgcagaccgtgaagagcagcaagggcggccccggcagcgccgtgagcccctaccccaccttcaaccccagcagcgacgtggccgccctgcacaaggccatcatggtgaagggcgtggacgaggccaccatcatcgacatcctgaccaagagaaacaacgcccagagacagcagatcaaggccgcctacctgcaggagaccggcaagcccctggacgagaccctgaagaaggccctgaccggccacctggaggaggtggtgctggccctgctgaagaccccctag

SEQ ID NO: 72927 - DNA, 615 bp, synthetic construct
  misc_feature 1..615: note = Description of Artificial Sequence: Synthetic coding sequence
  source 1..615: mol_type = other DNA
atgaacctgatcctgagatacaccttcagcaagatggccatggtgagcgagttcctgaagcaggcctggttcatcgagaacgaggagcaggagtacgtgcagaccgtgaagagcagcaagggcggccccggcagcgccgtgagcccctaccccaccttcaaccccagcagcgacgtggccgccctgcacaaggccatcatggtgaagggcgtggacgaggccaccatcatcgacatcctgaccaagagaaacaacgcccagagacagcagatcaaggccgcctacctgcaggagaccggcaagcccctggacgagaccctgaagaaggccctgaccggccacctggaggaggtggtgctggccctgctgaagacccccgcccagttcgacgccgacgagctgagagccgccatgaagggcctgggcaccgacgaggacaccctgatcgagatcctggccagcagaaccaacaaggagatcagagacatcaacagagtgtacagagaggagctgaagagagacctggccaaggacatcaccagcgacaccagcggcgacttcagaaacgccctgctgagcctggccaagggcgacagaagcgaggacttcggctag

SEQ ID NO: 72928 - DNA, 975 bp, synthetic construct
  misc_feature 1..975: note = Description of Artificial Sequence: Synthetic coding sequence
  source 1..975: mol_type = other DNA
atgttctgcggcgactacgtgcagggcaccatcttccccgcccccaacttcaaccccatcatggacgcccagatgctgggcggcgccctgcagggcttcgactgcgacaaggacatgctgatcaacatcctgacccagagatgcaacgcccagagaatgatgatcgccgaggcctaccagagcatgtacggcagagacctgatcggcgacatgagagagcagctgagcgaccacttcaaggacgtgatggccggcctgatgtaccccccccccctgtacgacgcccacgagctgtggcacgccatgaagggcgtgggcaccgacgagaactgcctgatcgagatcctggccagcagaaccaacggcgagatcttccagatgagagaggcctactgcctgcagtacagcaacaacctgcaggaggacatctacagcgagaccagcggccacttcagagacaccctgatgaacctggtgcagggcaccagagaggagggctacaccgaccccgccatggccgcccaggacgccatggtgctgtgggaggcctgccagcagaagaccggcgagcacaagaccatgctgcagatgatcctgtgcaacaagagctaccagcagctgagactggtgttccaggagttccagaacatcagcggccaggacatggtggacgccatcaacgagtgctacgacggctacttccaggagctgctggtggccatcgtgctgtgcgtgagagacaagcccgcctacttcgcctacagactgtacagcgccatccacgacttcggcttccacaacaagaccgtgatcagaatcctgatcgccagaagcgagatcgacctgctgaccatcagaaagagatacaaggagagatacggcaagagcctgttccacgacatcagaaacttcgccagcggccactacaagaaggccctgctggccatctgcgccggcgacgccgaggactactag

SEQ ID NO: 72929 - DNA, 975 bp, synthetic construct
  misc_feature 1..975: note = Description of Artificial Sequence: Synthetic coding sequence
  source 1..975: mol_type = other DNA
atgttctgcagcaacctggtgcagggcaccatcttccccgcccccaacttcaaccccatcatggacgcccagatgctgggcggcgccctgcagggcttcgactgcgacaaggacatgctgatcaacatcctgacccagagatgcaacgcccagagaatgatgatcgccgaggcctaccagagcatgtacggcagagacctgatcggcgacatgagagagcagctgagcgaccacttcaaggacgtgatggccggcctgatgtaccccccccccctgtacgacgcccacgagctgtggcacgccatgaagggcgtgggcaccgacgagaactgcctgatcgagatcctggccagcagaaccaacggcgagatcttccagatgagagaggcctactgcctgcagtacagcaacaacctgcaggaggacatctacagcgagaccagcggccacttcagagacaccctgatgaacctggtgcagggcaccagagaggagggctacaccgaccccgccatggccgcccaggacgccatggtgctgtgggaggcctgccagcagaagaccggcgagcacaagaccatgctgcagatgatcctgtgcaacaagagctaccagcagctgagactggtgttccaggagttccagaacatcagcggccaggacatggtggacgccatcaacgagtgctacgacggctacttccaggagctgctggtggccatcgtgctgtgcgtgagagacaagcccgcctacttcgcctacagactgtacagcgccatccacgacttcggcttccacaacaagaccgtgatcagaatcctgatcgccagaagcgagatcgacctgctgaccatcagaaagagatacaaggagagatacggcaagagcctgttccacgacatcagaaacttcgccagcggccactacaagaaggccctgctggccatctgcgccggcgacgccgaggactactag

SEQ ID NO: 72930 - DNA, 1518 bp, synthetic construct
  misc_feature 1..1518: note = Description of Artificial Sequence: Synthetic coding sequence
  source 1..1518: mol_type = other DNA
atgagctaccccggctacccccccccccccggcggctacccccccgccgcccccggcggcggcccctggggcggcgccgcctacccccccccccccagcatgccccccatcggcctggacaacgtggccacctacgccggccagttcaaccaggactacctgagcggcatggccgccaacatgagcggcaccttcggcggcgccaacatgcccaacctgtaccccggcgcccccggcgccggctacccccccgtgccccccggcggcttcggccagccccccagcgcccagcagcccgtgcccccctacggcatgtaccccccccccggcggcaacccccccagcagaatgcccagctaccccccctaccccggcgcccccgtgcccggccagcccatgcccccccccggccagcagccccccggcgcctaccccggccagccccccgtgacctaccccggccagccccccgtgcccctgcccggccagcagcagcccgtgcccagctaccccggctaccccggcagcggcaccgtgacccccgccgtgccccccacccagttcggcagcagaggcaccatcaccgacgcccccggcttcgaccccctgagagacgccgaggtgctgagaaaggccatgaagggcttcggcaccgacgagcaggccatcatcgactgcctgggcagcagaagcaacaagcagagacagcagatcctgctgagcttcaagaccgcctacggcaaggacctgatcaaggacctgaagagcgagctgagcggcaacttcgagaagaccatcctggccctgatgaagacccccgtgctgttcgacatctacgagatcaaggaggccatcaagggcgtgggcaccgacgaggcctgcctgatcgagatcctggccagcagaagcaacgagcacatcagagagctgaacagagcctacaaggccgagttcaagaagaccctggaggaggccatcagaagcgacaccagcggccacttccagagactgctgatcagcctgagccagggcaacagagacgagagcaccaacgtggacatgagcctggcccagagagacgcccaggagctgtacgccgccggcgagaacagactgggcaccgacgagagcaagttcaacgccgtgctgtgcagcagaagcagagcccacctggtggccgtgttcaacgagtaccagagaatgaccggcagagacatcgagaagagcatctgcagagagatgagcggcgacctggaggagggcatgctggccgtggtgaagtgcctgaagaacacccccgccttcttcgccgagagactgaacaaggccatgagaggcgccggcaccaaggacagaaccctgatcagaatcatggtgagcagaagcgagaccgacctgctggacatcagaagcgagtacaagagaatgtacggcaagagcctgtaccacgacatcagcggcgacaccagcggcgactacagaaagatcctgctgaagatctgcggcggcaacgactag

SEQ ID NO: 72931 - DNA, 1518 bp, synthetic construct; identical to SEQ ID NO: 72930
  misc_feature 1..1518: note = Description of Artificial Sequence: Synthetic coding sequence
  source 1..1518: mol_type = other DNA

SEQ ID NO: 72932 - DNA, 489 bp, synthetic construct
  misc_feature 1..489: note = Description of Artificial Sequence: Synthetic coding sequence
  source 1..489: mol_type = other DNA
atgagcctggcccagagagacgcccaggagctgtacgccgccggcgagaacagactgggcaccgacgagagcaagttcaacgccgtgctgtgcagcagaagcagagcccacctggtggccgtgttcaacgagtaccagagaatgaccggcagagacatcgagaagagcatctgcagagagatgagcggcgacctggaggagggcatgctggccgtggtgaagtgcctgaagaacacccccgccttcttcgccgagagactgaacaaggccatgagaggcgccggcaccaaggacagaaccctgatcagaatcatggtgagcagaagcgagaccgacctgctggacatcagaagcgagtacaagagaatgtacggcaagagcctgtaccacgacatcagcagcatcagctgcatgcccgccagctacggccacctggaggaggccacctgcctggccctgaagctgctgagagtggagggcaacgactag

SEQ ID NO: 72933 - DNA, 1518 bp, synthetic construct; identical to SEQ ID NO: 72930
  misc_feature 1..1518: note = Description of Artificial Sequence: Synthetic coding sequence
  source 1..1518: mol_type = other DNA

SEQ ID NO: 72934 - DNA, 1518 bp, synthetic construct; identical to SEQ ID NO: 72930
  misc_feature 1..1518: note = Description of Artificial Sequence: Synthetic coding sequence
  source 1..1518: mol_type = other DNA

SEQ ID NO: 72935 - DNA, 1518 bp, synthetic construct; identical to SEQ ID NO: 72930
  misc_feature 1..1518: note = Description of Artificial Sequence: Synthetic coding sequence
  source 1..1518: mol_type = other DNA

SEQ ID NO: 72936 - DNA, 1239 bp, synthetic construct
  misc_feature 1..1239: note = Description of Artificial Sequence: Synthetic coding sequence
  source 1..1239: mol_type = other DNA
atgagaggcagcagcaccagaaccatcagcagagagtgctggagactgtgggccgcccccctgtgccccgccgcctgcagcagcctgtgggacgtgagcacccccagaagaaagcccaccctgcaggacgccctgatcagcgccatcccctaccccggccagccccccgtgacctaccccggccagccccccgtgcccctgcccggccagcagcagcccgtgcccagctaccccggctaccccggcagcggcaccgtgacccccgccgtgccccccacccagttcggcagcagaggcaccatcaccgacgcccccggcttcgaccccctgagagacgccgaggtgctgagaaaggccatgaagggcttcggcaccgacgagcaggccatcatcgactgcctgggcagcagaagcaacaagcagagacagcagatcctgctgagcttcaagaccgcctacggcaaggacctgatcaaggacctgaagagcgagctgagcggcaacttcgagaagaccatcctggccctgatgaagacccccgtgctgttcgacatctacgagatcaaggaggccatcaagggcgtgggcaccgacgaggcctgcctgatcgagatcctggccagcagaagcaacgagcacatcagagagctgaacagagcctacaaggccgagttcaagaagaccctggaggaggccatcagaagcgacaccagcggccacttccagagactgctgatcagcctgagccagggcaacagagacgagagcaccaacgtggacatgagcctggcccagagagacgcccaggagctgtacgccgccggcgagaacagactgggcaccgacgagagcaagttcaacgccgtgctgtgcagcagaagcagagcccacctggtggccgtgttcaacgagtaccagagaatgaccggcagagacatcgagaagagcatctgcagagagatgagcggcgacctggaggagggcatgctggccgtggtgaagtgcctgaagaacacccccgccttcttcgccgagagactgaacaaggccatgagaggcgccggcaccaaggacagaaccctgatcagaatcatggtgagcagaagcgagaccgacctgctggacatcagaagcgagtacaagagaatgtacggcaagagcctgtaccacgacatcagcggcgacaccagcggcgactacagaaagatcctgctgaagatctgcggcggcaacgactag

SEQ ID NO: 72937 - DNA, 453 bp, synthetic construct
  misc_feature 1..453: note = Description of Artificial Sequence: Synthetic coding sequence
  source 1..453: mol_type = other DNA
atgagctaccccggctacccccccccccccggcggctacccccccgccgcccccggcggcggcccctggggcggcgccgcctacccccccccccccagcatgccccccatcggcctggacaacgtggccacctacgccggccagttcaaccaggactacctgagcggcatggccgccaacatgagcggcaccttcggcggcgccaacatgcccaacctgtaccccggcgcccccggcgccggctacccccccgtgccccccggcggcttcggccagccccccagcgcccagcagcccgtgcccccctacggcatgtaccccccccccggcggcaacccccccagcagaatgcccagctaccccccctaccccggcgcccccgtgcccggccagcccatgcccccccccggccagcagccccccggcgcctaccccggccagccccccgtgtag

SEQ ID NO: 72938 - DNA, 1518 bp, synthetic construct; identical to SEQ ID NO: 72930
  misc_feature 1..1518: note = Description of Artificial Sequence: Synthetic coding sequence
  source 1..1518: mol_type = other DNA

SEQ ID NO: 72939 - DNA, 615 bp, synthetic construct
  misc_feature 1..615: note = Description of Artificial Sequence: Synthetic coding sequence
  source 1..615: mol_type = other DNA
atgagctaccccggctacccccccccccccggcggctacccccccgccgcccccggcggcggcccctggggcggcgccgcctacccccccccccccagcatgccccccatcggcctggacaacgtggccacctacgccggccagttcaaccaggactacctgagcggcatggccgccaacatgagcggcaccttcggcggcgccaacatgcccaacctgtaccccggcgcccccggcgccggctacccccccgtgccccccggcggcttcggccagccccccagcgcccagcagcccgtgcccccctacggcatgtaccccccccccggcggcaacccccccagcagaatgcccagctaccccccctaccccggcgcccccgtgcccggccagcccatgcccccccccggccagcagccccccggcgcctaccccggccagccccccgtgacctaccccggccagccccccgtgcccctgcccggccagcagcagcccgtgcccagctaccccggctaccccggcagcggcaccgtgacccccgccgtgccccccacccagttcggcagcagaggcaccatcaccgacgcccccggcttcgaccccctgagatag

SEQ ID NO: 72940 - DNA, 447 bp, synthetic construct
  misc_feature 1..447: note = Description of Artificial Sequence: Synthetic coding sequence
  source 1..447: mol_type = other DNA
tgagagaacagactgggcaccgacgagagcaagttcaacgccgtgctgtgcagcagaagcagagcccacctggtggccgtgttcaacgagtaccagagaatgaccggcagagacatcgagaagagcatctgcagagagatgagcggcgacctggaggagggcatgctggccgtggtgaagtgcctgaagaacacccccgccttcttcgccgagagactgaacaaggccatgagaggcgccggcaccaaggacagaaccctgatcagaatcatggtgagcagaagcgagaccgacctgctggacatcagaagcgagtacaagagaatgtacggcaagagcctgtaccacgacatcagcagcatcagctgcatgcccgccagctacggccacctggaggaggccacctgcctggccctgaagctgctgagagtggagggcaacgactag

SEQ ID NO: 72941 - DNA, 1518 bp, synthetic construct; identical to SEQ ID NO: 72930
  misc_feature 1..1518: note = Description of Artificial Sequence: Synthetic coding sequence
  source 1..1518: mol_type = other DNA

SEQ ID NO: 72942 - DNA, 1419 bp, synthetic construct
  misc_feature 1..1419: note = Description of Artificial Sequence: Synthetic coding sequence
  source 1..1419: mol_type = other DNA
atgccccccatcggcctggacaacgtggccacctacgccggccagttcaaccaggactacctgagcggcatggccgccaacatgagcggcaccttcggcggcgccaacatgcccaacctgtaccccggcgcccccggcgccggctacccccccgtgccccccggcggcttcggccagccccccagcgcccagcagcccgtgcccccctacggcatgtaccccccccccggcggcaacccccccagcagaatgcccagctaccccccctaccccggcgcccccgtgcccggccagcccatgcccccccccggccagcagccccccggcgcctaccccggccagccccccgtgacctaccccggccagccccccgtgcccctgcccggccagcagcagcccgtgcccagctaccccggctaccccggcagcggcaccgtgacccccgccgtgccccccacccagttcggcagcagaggcaccatcaccgacgcccccggcttcgaccccctgagagacgccgaggtgctgagaaaggccatgaagggcttcggcaccgacgagcaggccatcatcgactgcctgggcagcagaagcaacaagcagagacagcagatcctgctgagcttcaagaccgcctacggcaaggacctgatcaaggacctgaagagcgagctgagcggcaacttcgagaagaccatcctggccctgatgaagacccccgtgctgttcgacatctacgagatcaaggaggccatcaagggcgtgggcaccgacgaggcctgcctgatcgagatcctggccagcagaagcaacgagcacatcagagagctgaacagagcctacaaggccgagttcaagaagaccctggaggaggccatcagaagcgacaccagcggccacttccagagactgctgatcagcctgagccagggcaacagagacgagagcaccaacgtggacatgagcctggcccagagagacgcccaggagctgtacgccgccggcgagaacagactgggcaccgacgagagcaagttcaacgccgtgctgtgcagcagaagcagagcccacctggtggccgtgttcaacgagtaccagagaatgaccggcagagacatcgagaagagcatctgcagagagatgagcggcgacctggaggagggcatgctggccgtggtgaagtgcctgaagaacacccccgccttcttcgccgagagactgaacaaggccatgagaggcgccggcaccaaggacagaaccctgatcagaatcatggtgagcagaagcgagaccgacctgctggacatcagaagcgagtacaagagaatgtacggcaagagcctgtaccacgacatcagcggcgacaccagcggcgactacagaaagatcctgctgaagatctgcggcggcaacgactag

SEQ ID NO: 72943 - DNA, 1074 bp, synthetic construct
  misc_feature 1..1074: note = Description of Artificial Sequence: Synthetic coding sequence
  source 1..1074: mol_type = other DNA
atgggcagacagctggccggctgcggcgacgccggcaagaaggccagcttcaagatgagcaccgtgcacgagatcctgtgcaagctgagcctggagggcgaccacagcaccccccccagcgcctacggcagcgtgaaggcctacaccaacttcgacgccgagagagacgccctgaacatcgagaccgccatcaagaccaagggcgtggacgaggtgaccatcgtgaacatcctgaccaacagaagcaacgcccagagacaggacatcgccttcgcctaccagagaagaaccaagaaggagctggccagcgccctgaagagcgccctgagcggccacctggagaccgtgatcctgggcctgctgaagacccccgcccagtacgacgccagcgagctgaaggccagcatgaagggcctgggcaccgacgaggacagcctgatcgagatcatctgcagcagaaccaaccaggagctgcaggagatcaacagagtgtacaaggagatgtacaagaccgacctggagaaggacatcatcagcgacaccagcggcgacttcagaaagctgatggtggccctggccaagggcagaagagccgaggacggcagcgtgatcgactacgagctgatcgaccaggacgccagagacctgtacgacgccggcgtgaagagaaagggcaccgacgtgcccaagtggatcagcatcatgaccgagagaagcgtgccccacctgcagaaggtgttcgacagatacaagagctacagcccctacgacatgctggagagcatcagaaaggaggtgaagggcgacctggagaacgccttcctgaacctggtgcagtgcatccagaacaagcccctgtacttcgccgacagactgtacgacagcatgaagggcaagggcaccagagacaaggtgctgatcagaatcatggtgagcagaagcgaggtggacatgctgaagatcagaagcgagttcaagagaaagtacggcaagagcctgtactactacatccagcaggacaccaagggcgactaccagaaggccctgctgtacctgtgcggcggcgacgactag

SEQ ID NO: 72944 - DNA, 1020 bp, synthetic construct
  misc_feature 1..1020: note = Description of Artificial Sequence: Synthetic coding sequence
  source 1..1020: mol_type = other DNA
atgagcaccgtgcacgagatcctgtgcaagctgagcctggagggcgaccacagcaccccccccagcgcctacggcagcgtgaaggcctacaccaacttcgacgccgagagagacgccctgaacatcgagaccgccatcaagaccaagggcgtggacgaggtgaccatcgtgaacatcctgaccaacagaagcaacgcccagagacaggacatcgccttcgcctaccagagaagaaccaagaaggagctggccagcgccctgaagagcgccctgagcggccacctggagaccgtgatcctgggcctgctgaagacccccgcccagtacgacgccagcgagctgaaggccagcatgaagggcctgggcaccgacgaggacagcctgatcgagatcatctgcagcagaaccaaccaggagctgcaggagatcaacagagtgtacaaggagatgtacaagaccgacctggagaaggacatcatcagcgacaccagcggcgacttcagaaagctgatggtggccctggccaagggcagaagagccgaggacggcagcgtgatcgactacgagctgatcgaccaggacgccagagacctgtacgacgccggcgtgaagagaaagggcaccgacgtgcccaagtggatcagcatcatgaccgagagaagcgtgccccacctgcagaaggtgttcgacagatacaagagctacagcccctacgacatgctggagagcatcagaaaggaggtgaagggcgacctggagaacgccttcctgaacctggtgcagtgcatccagaacaagcccctgtacttcgccgacagactgtacgacagcatgaagggcaagggcaccagagacaaggtgctgatcagaatcatggtgagcagaagcgaggtggacatgctgaagatcagaagcgagttcaagagaaagtacggcaagagcctgtactactacatccagcaggacaccaagggcgactaccagaaggccctgctgtacctgtgcggcggcgacgactag

SEQ ID NO: 72945 - DNA, 1020 bp, synthetic construct; identical to SEQ ID NO: 72944
  misc_feature 1..1020: note = Description of Artificial Sequence: Synthetic coding sequence
  source 1..1020: mol_type = other DNA

SEQ ID NO: 72946 - DNA, 1020 bp, synthetic construct; identical to SEQ ID NO: 72944
  misc_feature 1..1020: note = Description of Artificial Sequence: Synthetic coding sequence
  source 1..1020: mol_type = other DNA

SEQ ID NO: 72947 - DNA, 246 bp, synthetic construct
  misc_feature 1..246: note = Description of Artificial Sequence: Synthetic coding sequence
  source 1..246: mol_type = other DNA
atgagcaccgtgcacgagatcctgtgcaagctgagcctggagggcgaccacagcaccccccccagcgcctacggcagcgtgaaggcctacaccaacttcgacgccgagagagacgccctgaacatcgagaccgccatcaagaccaagggcgtggacgaggtgaccatcgtgaacatcctgaccaacagaagcaacgcccagagacaggacatcgccttcgcctaccagagaagaaccaagaagtag

SEQ ID NO: 72948 - DNA, 531 bp, synthetic construct
  misc_feature 1..531: note = Description of Artificial Sequence: Synthetic coding sequence
  source 1..531: mol_type = other DNA
atgagcaccgtgcacgagatcctgtgcaagctgagcctggagggcgaccacagcaccccccccagcgcctacggcagcgtgaaggcctacaccaacttcgacgccgagagagacgccctgaacatcgagaccgccatcaagaccaagggcgtggacgaggtgaccatcgtgaacatcctgaccaacagaagcaacgcccagagacaggacatcgccttcgcctaccagagaagaaccaagaaggagctggccagcgccctgaagagcgccctgagcggccacctggagaccgtgatcctgggcctgctgaagacccccgcccagtacgacgccagcgagctgaaggccagcatgaagggcctgggcaccgacgaggacagcctgatcgagatcatctgcagcagaaccaaccaggagctgcaggagatcaacagagtgtacaaggagatgtacaagaccgacctggagaaggacatcatcagcgacaccagcggcgacttcagaaagctgatggtggccctggccaagtag

SEQ ID NO: 72949 - DNA, 144 bp, synthetic construct
  misc_feature 1..144: note = Description of Artificial Sequence: Synthetic coding sequence
  source 1..144: mol_type = other DNA
atgagcaccgtgcacgagatcctgtgcaagctgagcctggagggcgaccacagcaccccccccagcgcctacggcagcgtgaaggcctacaccaacttcgacgccgagagagacgccctgaacatcgagaccgccatcaagtag

SEQ ID NO: 72950 - DNA, 405 bp, synthetic construct
  misc_feature 1..405: note = Description of Artificial Sequence: Synthetic coding sequence
  source 1..405: mol_type = other DNA
atgagcaccgtgcacgagatcctgtgcaagctgagcctggagggcgaccacagcaccccccccagcgcctacggcagcgtgaaggcctacaccaacttcgacgccgagagagacgccctgaacatcgagaccgccatcaagaccaagggcgtggacgaggtgaccatcgtgaacatcctgaccaacagaagcaacgcccagagacaggacatcgccttcgcctaccagagaagaaccaagaaggagctggccagcgccctgaagagcgccctgagcggccacctggagaccgtgatcctgggcctgctgaagacccccgcccagtacgacgccagcgagctgaaggccagcatgaagggcctgggcaccgacgaggacagcctgatcgagatcatctgcagctag

SEQ ID NO: 72951 - DNA, 402 bp, synthetic construct
  misc_feature 1..402: note = Description of Artificial Sequence: Synthetic coding sequence
  source 1..402: mol_type = other DNA
atgagcaccgtgcacgagatcctgtgcaagctgagcctggagggcgaccacagcaccccccccagcgcctacggcagcgtgaaggcctacaccaacttcgacgccgagagagacgccctgaacatcgagaccgccatcaagaccaagggcgtggacgaggtgaccatcgtgaacatcctgaccaacagaagcaacgcccagagacaggacatcgccttcgcctaccagagaagaaccaagaaggagctggccagcgccctgaagagcgccctgagcggccacctggagaccgtgatcctgggcctgctgaagacccccgcccagtacgacgccagcgagctgaaggccagcatgaagggcctgggcaccgacgaggacagcctgatcgagatcatctgctag

SEQ ID NO: 72952 - DNA, 450 bp, synthetic construct
  misc_feature 1..450: note = Description of Artificial Sequence: Synthetic coding sequence
  source 1..450: mol_type = other DNA
atgagcaccgtgcacgagatcctgtgcaagctgagcctggagggcgaccacagcaccccccccagcgcctacggcagcgtgaaggcctacaccaacttcgacgccgagagagacgccctgaacatcgagaccgccatcaagaccaagggcgtggacgaggtgaccatcgtgaacatcctgaccaacagaagcaacgcccagagacaggacatcgccttcgcctaccagagaagaaccaagaaggagctggccagcgccctgaagagcgccctgagcggccacctggagaccgtgatcctgggcctgctgaagacccccgcccagtacgacgccagcgagctgaaggccagcatgaagggcctgggcaccgacgaggacagcctgatcgagatcatctgcagcagaaccaaccaggagctgcaggagatcaacagagtgtacaaggagtag

SEQ ID NO: 72953 - DNA, 198 bp, synthetic construct
  misc_feature 1..198: note = Description of Artificial Sequence: Synthetic coding sequence
  source 1..198: mol_type = other DNA
atgagcaccgtgcacgagatcctgtgcaagctgagcctggagggcgaccacagcaccccccccagcgcctacggcagcgtgaaggcctacaccaacttcgacgccgagagagacgccctgaacatcgagaccgccatcaagaccaagggcgtggacgaggtgaccatcgtgaacatcctgaccaacagaagcaactag

SEQ ID NO: 72954 - DNA, 360 bp, synthetic construct
  misc_feature 1..360: note = Description of Artificial Sequence: Synthetic coding sequence
  source 1..360: mol_type = other DNA
atgagcaccgtgcacgagatcctgtgcaagctgagcctggagggcgaccacagcaccccccccagcgcctacggcagcgtgaaggcctacaccaacttcgacgccgagagagacgccctgaacatcgagaccgccatcaagaccaagggcgtggacgaggtgaccatcgtgaacatcctgaccaacagaagcaacgcccagagacaggacatcgccttcgcctaccagagaagaaccaagaaggagctggccagcgccctgaagagcgccctgagcggccacctggagaccgtgatcctgggcctgctgaagacccccgcccagtacgacgccagcgagctgaaggccagcatgaagtag

SEQ ID NO: 72955 - DNA, 771 bp, synthetic construct
  misc_feature 1..771: note = Description of Artificial Sequence: Synthetic coding sequence
  source 1..771: mol_type = other DNA
atgagcaccgtgcacgagatcctgtgcaagctgagcctggagggcgaccacagcaccccccccagcgcctacggcagcgtgaaggcctacaccaacttcgacgccgagagagacgccctgaacatcgagaccgccatcaagaccaagggcgtggacgaggtgaccatcgtgaacatcctgaccaacagaagcaacgcccagagacaggacatcgccttcgcctaccagagaagaaccaagaaggagctggccagcgccctgaagagcgccctgagcggccacctggagaccgtgatcctgggcctgctgaagacccccgcccagtacgacgccagcgagctgaaggccagcatgaagggcctgggcaccgacgaggacagcctgatcgagatcatctgcagcagaaccaaccaggagctgcaggagatcaacagagtgtacaaggagatgtacaagaccgacctggagaaggacatcatcagcgacaccagcggcgacttcagaaagctgatggtggccctggccaagggcagaagagccgaggacggcagcgtgatcgactacgagctgatcgaccaggacgccagagacctgtacgacgccggcgtgaagagaaagggcaccgacgtgcccaagtggatcagcatcatgaccgagagaagcgtgccccacctgcagaaggtgttcgacagatacaagagctacagcccctacgacatgctggagagcatcagaaaggaggtgaagggcgacctggagaacgccttctag

SEQ ID NO: 72956 - DNA, 360 bp, synthetic construct; identical to SEQ ID NO: 72954
  misc_feature 1..360: note = Description of Artificial Sequence: Synthetic coding sequence
  source 1..360: mol_type = other DNA

SEQ ID NO: 72957 - DNA, 531 bp, synthetic construct; identical to SEQ ID NO: 72948
  misc_feature 1..531: note = Description of Artificial Sequence: Synthetic coding sequence
  source 1..531: mol_type = other DNA

SEQ ID NO: 72958 - DNA, 684 bp, synthetic construct
  misc_feature 1..684: note = Description of Artificial Sequence: Synthetic coding sequence
  source 1..684: mol_type = other DNA
atgagcaccgtgcacgagatcctgtgcaagctgagcctggagggcgaccacagcaccccccccagcgcctacggcagcgtgaaggcctacaccaacttcgacgccgagagagacgccctgaacatcgagaccgccatcaagaccaagggcgtggacgaggtgaccatcgtgaacatcctgaccaacagaagcaacgcccagagacaggacatcgccttcgcctaccagagaagaaccaagaaggagctggccagcgccctgaagagcgccctgagcggccacctggagaccgtgatcctgggcctgctgaagacccccgcccagtacgacgccagcgagctgaaggccagcatgaagggcctgggcaccgacgaggacagcctgatcgagatcatctgcagcagaaccaaccaggagctgcaggagatcaacagagtgtacaaggagatgtacaagaccgacctggagaaggacatcatcagcgacaccagcggcgacttcagaaagctgatggtggccctggccaagggcagaagagccgaggacggcagcgtgatcgactacgagctgatcgaccaggacgccagagacctgtacgacgccggcgtgaagagaaagggcaccgacgtgcccaagtggatcagcatcatgaccgagagaagcgtgccccacctgcagaagtag

SEQ ID NO: 72959 - DNA, 531 bp, synthetic construct; identical to SEQ ID NO: 72948
  misc_feature 1..531: note = Description of Artificial Sequence: Synthetic coding sequence
  source 1..531: mol_type = other DNA

SEQ ID NO: 72960 - DNA, 333 bp, synthetic construct
  misc_feature 1..333: note = Description of Artificial Sequence: Synthetic coding sequence
  source 1..333: mol_type = other DNA
atgagcaccgtgcacgagatcctgtgcaagctgagcctggagggcgaccacagcaccccccccagcgcctacggcagcgtgaaggcctacaccaacttcgacgccgagagagacgccctgaacatcgagaccgccatcaagaccaagggcgtggacgaggtgaccatcgtgaacatcctgaccaacagaagcaacgcccagagacaggacatcgccttcgcctaccagagaagaaccaagaaggagctggccagcgccctgaagagcgccctgagcggccacctggagaccgtgatcctgggcctgctgaagacccccgcccagtacgactag

SEQ ID NO: 72961 - DNA, 972 bp, synthetic construct
  misc_feature 1..972: note = Description of Artificial Sequence: Synthetic coding sequence
  source 1..972: mol_type = other DNA
atggccagcatctgggtgggccacagaggcaccgtgagagactaccccgacttcagccccagcgtggacgccgaggccatccagaaggccatcagaggcatcggcaccgacgagaagatgctgatcagcatcctgaccgagagaagcaacgcccagagacagctgatcgtgaaggagtaccaggccgcctacggcaaggagctgaaggacgacctgaagggcgacctgagcggccacttcgagcacctgatggtggccctggtgaccccccccgccgtgttcgacgccaagcagctgaagaagagcatgaagggcgccggcaccaacgaggacgccctgatcgagatcctgaccaccagaaccagcagacagatgaaggacatcagccaggcctactacaccgtgtacaagaagagcctgggcgacgacatcagcagcgagaccagcggcgacttcagaaaggccctgctgaccctggccgacggcagaagagacgagagcctgaaggtggacgagcacctggccaagcaggacgcccagatcctgtacaaggccggcgagaacagatggggcaccgacgaggacaagttcaccgagatcctgtgcctgagaagcttcccccagctgaagctgaccttcgacgagtacagaaacatcagccagaaggacatcgtggacagcatcaagggcgagctgagcggccacttcgaggacctgctgctggccatcgtgaactgcgtgagaaacacccccgccttcctggccgagagactgcacagagccctgaagggcatcggcaccgacgagttcaccctgaacagaatcatggtgagcagaagcgagatcgacctgctggacatcagaaccgagttcaagaagcactacggctacagcctgtacagcgccatcaagagcgacaccagcggcgactacgagatcaccctgctgaagatctgcggcggcgacgactag

SEQ ID NO: 72962 - DNA, 405 bp, synthetic construct
  misc_feature 1..405: note = Description of Artificial Sequence: Synthetic coding sequence
  source 1..405: mol_type = other DNA
atggccagcatctgggtgggccacagaggcaccgtgagagactaccccgacttcagccccagcgtggacgccgaggccatccagaaggccatcagaggcatcggcaccgacgagaagatgctgatcagcatcctgaccgagagaagcaacgcccagagacagctgatcgtgaaggagtaccaggccgcctacggcaaggagctgaaggacgacctgaagggcgacctgagcggccacttcgagcacctgatggtggccctggtgaccccccccgccgtgttcgacgccaagcagctgaagaagagcatgaagggcgccggcaccaacgaggacgccctgatcgagatcctgaccaccagaaccagcagacagatgaaggacatcagccaggcctactacacctag

SEQ ID NO: 72963 - DNA, 315 bp, synthetic construct
  misc_feature 1..315: note = Description of Artificial Sequence: Synthetic coding sequence
  source 1..315: mol_type = other DNA
atggccagcatctgggtgggccacagaggcaccgtgagagactaccccgacttcagccccagcgtggacgccgaggccatccagaaggccatcagaggcatcggcaccgacgagaagatgctgatcagcatcctgaccgagagaagcaacgcccagagacagctgatcgtgaaggagtaccaggccgcctacggcaaggagctgaaggacgacctgaagggcgacctgagcggccacttcgagcacctgatggtggccctggtgaccccccccgccgtgttcgacgccaagcagctgaagaagagcatgaagtag

SEQ ID NO: 72964 - DNA, 465 bp, synthetic construct
  misc_feature 1..465: note = Description of Artificial Sequence: Synthetic coding sequence
  source 1..465: mol_type = other DNA
atggccagcatctgggtgggccacagaggcaccgtgagagactaccccgacttcagccccagcgtggacgccgaggccatccagaaggccatcagaggcatcggcaccgacgagaagatgctgatcagcatcctgaccgagagaagcaacgcccagagacagctgatcgtgaaggagtaccaggccgcctacggcaaggagctgaaggacgacctgaagggcgacctgagcggccacttcgagcacctgatggtggccctggtgaccccccccgccgtgttcgacgccaagcagctgaagaagagcatgaagggcgccggcaccaacgaggacgccctgatcgagatcctgaccaccagaaccagcagacagatgaaggacatcagccaggcctactacaccgtgtacaagaagagcctgggcgacgacatcagcagcgagaccagcggcgacttcagaaagtag

SEQ ID NO: 72965 - DNA, 966 bp, synthetic construct
  misc_feature 1..966: note = Description of Artificial Sequence: Synthetic coding sequence
  source 1..966: mol_type = other DNA
atggccatggccaccaagggcggcaccgtgaaggccgccagcggcttcaacgccatggaggacgcccagaccctgagaaaggccatgaagggcctgggcaccgacgaggacgccatcatcagcgtgctggcctacagaaacaccgcccagagacaggagatcagaaccgcctacaagagcaccatcggcagagacctgatcgacgacctgaagagcgagctgagcggcaacttcgagcaggtgatcgtgggcatgatgacccccaccgtgctgtacgacgtgcaggagctgagaagagccatgaagggcgccggcaccgacgagggctgcctgatcgagatcctggccagcagaacccccgaggagatcagaagaatcagccagacctaccagcagcagtacggcagaagcctggaggacgacatcagaagcgacaccagcttcatgttccagagagtgctggtgagcctgagcgccggcggcagagacgagggcaactacctggacgacgccctggtgagacaggacgcccaggacctgtacgaggccggcgagaagaagtggggcaccgacgaggtgaagttcctgaccgtgctgtgcagcagaaacagaaaccacctgctgcacgtgttcgacgagtacaagagaatcagccagaaggacatcgagcagagcatcaagagcgagaccagcggcagcttcgaggacgccctgctggccatcgtgaagtgcatgagaaacaagagcgcctacttcgccgagaagctgtacaagagcatgaagggcctgggcaccgacgacaacaccctgatcagagtgatggtgagcagagccgagatcgacatgctggacatcagagcccacttcaagagactgtacggcaagagcctgtacagcttcatcaagggcgacaccagcggcgactacagaaaggtgctgctggtgctgtgcggcggcgacgactag

SEQ ID NO: 72966 - DNA, 900 bp, synthetic construct
  misc_feature 1..900: note = Description of Artificial Sequence: Synthetic coding sequence
  source 1..900: mol_type = other DNA
atggccatggccaccaagggcggcaccgtgaaggccgccagcggcttcaacgccatggaggacgcccagaccctgagaaaggccatgaagggcctgggcaccgacgaggacgccatcatcagcgtgctggcctacagaaacaccgcccagagacaggagatcagaaccgcctacaagagcaccatcggcagagacctgatcgacgacctgaagagcgagctgagcggcaacttcgagcagggcgccggcaccgacgagggctgcctgatcgagatcctggccagcagaacccccgaggagatcagaagaatcagccagacctaccagcagcagtacggcagaagcctggaggacgacatcagaagcgacaccagcttcatgttccagagagtgctggtgagcctgagcgccggcggcagagacgagggcaactacctggacgacgccctggtgagacaggacgcccaggacctgtacgaggccggcgagaagaagtggggcaccgacgaggtgaagttcctgaccgtgctgtgcagcagaaacagaaaccacctgctgcacgtgttcgacgagtacaagagaatcagccagaaggacatcgagcagagcatcaagagcgagaccagcggcagcttcgaggacgccctgctggccatcgtgaagtgcatgagaaacaagagcgcctacttcgccgagaagctgtacaagagcatgaagggcctgggcaccgacgacaacaccctgatcagagtgatggtgagcagagccgagatcgacatgctggacatcagagcccacttcaagagactgtacggcaagagcctgtacagcttcatcaagggcgacaccagcggcgactacagaaaggtgctgctggtgctgtgcggcggcgacgactag

SEQ ID NO: 72967 - DNA, 714 bp, synthetic construct
  misc_feature 1..714: note = Description of Artificial Sequence: Synthetic coding sequence
  source 1..714: mol_type = other DNA
atgatgacccccaccgtgctgtacgacgtgcaggagctgagaagagccatgaagggcgccggcaccgacgagggctgcctgatcgagatcctggccagcagaacccccgaggagatcagaagaatcagccagacctaccagcagcagtacggcagaagcctggaggacgacatcagaagcgacaccagcttcatgttccagagagtgctggtgagcctgagcgccggcggcagagacgagggcaactacctggacgacgccctggtgagacaggacgcccaggacctgtacgaggccggcgagaagaagtggggcaccgacgaggtgaagttcctgaccgtgctgtgcagcagaaacagaaaccacctgctgcacgtgttcgacgagtacaagagaatcagccagaaggacatcgagcagagcatcaagagcgagaccagcggcagcttcgaggacgccctgctggccatcgtgaagtgcatgagaaacaagagcgcctacttcgccgagaagctgtacaagagcatgaagggcctgggcaccgacgacaacaccctgatcagagtgatggtgagcagagccgagatcgacatgctggacatcagagcccacttcaagagactgtacggcaagagcctgtacagcttcatcaagggcgacaccagcggcgactacagaaaggtgctgctggtgctgtgcggcggcgacgactag

SEQ ID NO: 72968 - DNA, 963 bp, synthetic construct
  misc_feature 1..963: note = Description of Artificial Sequence: Synthetic coding sequence
  source 1..963: mol_type = other DNA
atggcccaggtgctgagaggcaccgtgaccgacttccccggcttcgacgagagagccgacgccgagaccctgagaaaggccatgaagggcctgggcaccgacgaggagagcatcctgaccctgctgaccagcagaagcaacgcccagagacaggagatcagcgccgccttcaagaccctgttcggcagagacctgctggacgacctgaagagcgagctgaccggcaagttcgagaagctgatcgtggccctgatgaagcccagcagactgtacgacgcctacgagctgaagcacgccctgaagggcgccggcaccaacgagaaggtgctgaccgagatcatcgccagcagaacccccgaggagctgagagccatcaagcaggtgtacgaggaggagtacggcagcagcctggaggacgacgtggtgggcgacaccagcggctactaccagagaatgctggtggtgctgctgcaggccaacagagaccccgacgccggcatcgacgaggcccaggtggagcaggacgcccaggccctgttccaggccggcgagctgaagtggggcaccgacgaggagaagttcatcaccatcttcggcaccagaagcgtgagccacctgagaaaggtgttcgacaagtacatgaccatcagcggcttccagatcgaggagaccatcgacagagagaccagcggcaacctggagcagctgctgctggccgtggtgaagagcatcagaagcatccccgcctacctggccgagaccctgtactacgccatgaagggcgccggcaccgacgaccacaccctgatcagagtgatggtgagcagaagcgagatcgacctgttcaacatcagaaaggagttcagaaagaacttcgccaccagcctgtacagcatgatcaagggcgacaccagcggcgactacaagaaggccctgctgctgctgtgcggcgaggacgactag

SEQ ID NO: 72969 - DNA, 2022 bp, synthetic construct
  misc_feature 1..2022: note = Description of Artificial Sequence: Synthetic coding sequence
  source 1..2022: mol_type = other DNA
atggccaagcccgcccagggcgccaagtacagaggcagcatccacgacttccccggcttcgaccccaaccaggacgccgaggccctgtacaccgccatgaagggcttcggcagcgacaaggaggccatcctggacatcatcaccagcagaagcaacagacagagacaggaggtgtgccagagctacaagagcctgtacggcaaggacctgatcgccgacctgaagtacgagctgaccggcaagttcgagagactgatcgtgggcctgatgagaccccccgcctactgcgacgccaaggagatcaaggacgccatcagcggcatcggcaccgacgagaagtgcctgatcgagatcctggccagcagaaccaacgagcagatgcaccagctggtggccgcctacaaggacgcctacgagagagacctggaggccgacatcatcggcgacaccagcggccacttccagaagatgctggtggtgctgctgcagggcaccagagaggaggacgacgtggtgagcgaggacctggtgcagcaggacgtgcaggacctgtacgaggccggcgagctgaagtggggcaccgacgaggcccagttcatctacatcctgggcaacagaagcaagcagcacctgagactggtgttcgacgagtacctgaagaccaccggcaagcccatcgaggccagcatcagaggcgagctgagcggcgacttcgagaagctgatgctggccgtggtgaagtgcatcagaagcacccccgagtacttcgccgagagactgttcaaggccatgaagggcctgggcaccagagacaacaccctgatcagaatcatggtgagcagaagcgagctggacatgctggacatcagagagatcttcagaaccaagtacgagaagagcctgtacagcatgatcaagaacgacaccagcggcgagtacaagaagaccctgctgaagctgagcggcggcgacgacgacgccgccggccagttcttccccgaggccgcccaggtggcctaccagatgtgggagctgagcgccgtggccagagtggagctgaagggcaccgtgagacccgccaacgacttcaaccccgacgccgacgccaaggccctgagaaaggccatgaagggcctgggcaccgacgaggacaccatcatcgacatcatcacccacagaagcaacgtgcagagacagcagatcagacagaccttcaagagccacttcggcagagacctgatgaccgacctgaagagcgagatcagcggcgacctggccagactgatcctgggcctgatgatgccccccgcccactacgacgccaagcagctgaagaaggccatggagggcgccggcaccgacgagaaggccctgatcgagatcctggccaccagaaccaacgccgagatcagagccatcaacgaggcctacaaggaggactaccacaagagcctggaggacgccctgagcagcgacaccagcggccacttcagaagaatcctgatcagcctggccaccggccacagagaggagggcggcgagaacctggaccaggccagagaggacgcccaggtggccgccgagatcctggagatcgccgacacccccagcggcgacaagaccagcctggagaccagattcatgaccatcctgtgcaccagaagctacccccacctgagaagagtgttccaggagttcatcaagatgaccaactacgacgtggagcacaccatcaagaaggagatgagcggcgacgtgagagacgccttcgtggccatcgtgcagagcgtgaagaacaagcccctgttcttcgccgacaagctgtacaagagcatgaagggcgccggcaccgacgagaagaccctgaccagaatcatggtgagcagaagcgagatcgacctgctgaacatcagaagagagttcatcgagaagtacgacaagagcctgcaccaggccatcgagggcgacaccagcggcgacttcctgaaggccctgctggccctgtgcggcggcgaggactag

SEQ ID NO: 72970 - DNA, 2004 bp, synthetic construct
  misc_feature 1..2004: note = Description of Artificial Sequence: Synthetic coding sequence
  source 1..2004: mol_type = other DNA
atggccaagcccgcccagggcgccaagtacagaggcagcatccacgacttccccggcttcgaccccaaccaggacgccgaggccctgtacaccgccatgaagggcttcggcagcgacaaggaggccatcctggacatcatcaccagcagaagcaacagacagagacaggaggtgtgccagagctacaagagcctgtacggcaaggacctgatcgccgacctgaagtacgagctgaccggcaagttcgagagactgatcgtgggcctgatgagaccccccgcctactgcgacgccaaggagatcaaggacgccatcagcggcatcggcaccgacgagaagtgcctgatcgagatcctggccagcagaaccaacgagcagatgcaccagctggtggccgcctacaaggacgcctacgagagagacctggaggccgacatcatcggcgacaccagcggccacttccagaagatgctggtggtgctgctgcagggcaccagagaggaggacgacgtggtgagcgaggacctggtgcagcaggacgtgcaggacctgtacgaggccggcgagctgaagtggggcaccgacgaggcccagttcatctacatcctgggcaacagaagcaagcagcacctgagactggtgttcgacgagtacctgaagaccaccggcaagcccatcgaggccagcatcagaggcgagctgagcggcgacttcgagaagctgatgctggccgtggtgaagtgcatcagaagcacccccgagtacttcgccgagagactgttcaaggccatgaagggcctgggcaccagagacaacaccctgatcagaatcatggtgagcagaagcgagctggacatgctggacatcagagagatcttcagaaccaagtacgagaagagcctgtacagcatgatcaagaacgacaccagcggcgagtacaagaagaccctgctgaagctgagcggcggcgacgacgacgccgccggccagttcttccccgaggccgcccaggtggcctaccagatgtgggagctgagcgccgtggccagagtggagctgaagggcaccgtgagacccgccaacgacttcaaccccgacgccgacgccaaggccctgagaaaggccatgaagggcctgggcaccgacgaggacaccatcatcgacatcatcacccacagaagcaacgtgcagagacagcagatcagacagaccttcaagagccacttcggcagagacctgatgaccgacctgaagagcgagatcagcggcgacctggccagactgatcctgggcctgatgatgccccccgcccactacgacgccaagcagctgaagaaggccatggagggcgccggcaccgacgagaaggccctgatcgagatcctggccaccagaaccaacgccgagatcagagccatcaacgaggcctacaaggaggactaccacaagagcctggaggacgccctgagcagcgacaccagcggccacttcagaagaatcctgatcagcctggccaccggccacagagaggagggcggcgagaacctggaccaggccagagaggacgcccaggagatcgccgacacccccagcggcgacaagaccagcctggagaccagattcatgaccatcctgtgcaccagaagctacccccacctgagaagagtgttccaggagttcatcaagatgaccaactacgacgtggagcacaccatcaagaaggagatgagcggcgacgtgagagacgccttcgtggccatcgtgcagagcgtgaagaacaagcccctgttcttcgccgacaagctgtacaagagcatgaagggcgccggcaccgacgagaagaccctgaccagaatcatggtgagcagaagcgagatcgacctgctgaacatcagaagagagttcatcgagaagtacgacaagagcctgcaccaggccatcgagggcgacaccagcggcgacttcctgaaggccctgctggccctgtgcggcggcgaggactag

SEQ ID NO: 72971 - DNA, 333 bp, synthetic construct
  misc_feature 1..333: note = Description of Artificial Sequence: Synthetic coding sequence
  source 1..333: mol_type = other DNA
atggccaagcccgcccagggcgccaagtacagaggcagcatccacgacttccccggcttcgaccccaaccaggacgccgaggccctgtacaccgccatgaagggcttcggcagcgacaaggaggccatcctggacatcatcaccagcagaagcaacagacagagacaggaggtgtgccagagctacaagagcctgtacggcaaggacctgatcgccgacctgaagtacgagctgaccggcaagttcgagagactgatcgtgggcctgatgagaccccccgcctactgcgacgccaaggagatcaaggacgccatcagcggcatcggcacctag

SEQ ID NO: 72972 - DNA, 1926 bp, synthetic construct
  misc_feature 1..1926: note = Description of Artificial Sequence: Synthetic coding sequence
  source 1..1926: mol_type = other DNA
atgaagggcttcggcagcgacaaggaggccatcctggacatcatcaccagcagaagcaacagacagagacaggaggtgtgccagagctacaagagcctgtacggcaaggacctgatcgccgacctgaagtacgagctgaccggcaagttcgagagactgatcgtgggcctgatgagaccccccgcctactgcgacgccaaggagatcaaggacgccatcagcggcatcggcaccgacgagaagtgcctgatcgagatcctggccagcagaaccaacgagcagatgcaccagctggtggccgcctacaaggacgcctacgagagagacctggaggccgacatcatcggcgacaccagcggccacttccagaagatgctggtggtgctgctgcagggcaccagagaggaggacgacgtggtgagcgaggacctggtgcagcaggacgtgcaggacctgtacgaggccggcgagctgaagtggggcaccgacgaggcccagttcatctacatcctgggcaacagaagcaagcagcacctgagactggtgttcgacgagtacctgaagaccaccggcaagcccatcgaggccagcatcagaggcgagctgagcggcgacttcgagaagctgatgctggccgtggtgaagtgcatcagaagcacccccgagtacttcgccgagagactgttcaaggccatgaagggcctgggcaccagagacaacaccctgatcagaatcatggtgagcagaagcgagctggacatgctggacatcagagagatcttcagaaccaagtacgagaagagcctgtacagcatgatcaagaacgacaccagcggcgagtacaagaagaccctgctgaagctgagcggcggcgacgacgacgccgccggccagttcttccccgaggccgcccaggtggcctaccagatgtgggagctgagcgccgtggccagagtggagctgaagggcaccgtgagacccgccaacgacttcaaccccgacgccgacgccaaggccctgagaaaggccatgaagggcctgggcaccgacgaggacaccatcatcgacatcatcacccacagaagcaacgtgcagagacagcagatcagacagaccttcaagagccacttcggcagagacctgatgaccgacctgaagagcgagatcagcggcgacctggccagactgatcctgggcctgatgatgccccccgcccactacgacgccaagcagctgaagaaggccatggagggcgccggcaccgacgagaaggccctgatcgagatcctggccaccagaaccaacgccgagatcagagccatcaacgaggcctacaaggaggactaccacaagagcctggaggacgccctgagcagcgacaccagcggccacttcagaagaatcctgatcagcctggccaccggccacagagaggagggcggcgagaacctggaccaggccagagaggacgcccaggtggccgccgagatcctggagatcgccgacacccccagcggcgacaagaccagcctggagaccagattcatgaccatcctgtgcaccagaagctacccccacctgagaagagtgttccaggagttcatcaagatgaccaactacgacgtggagcacaccatcaagaaggagatgagcggcgacgtgagagacgccttcgtggccatcgtgcagagcgtgaagaacaagcccctgttcttcgccgacaagctgtacaagagcatgaagggcgccggcaccgacgagaagaccctgaccagaatcatggtgagcagaagcgagatcgacctgctgaacatcagaagagagttcatcgagaagtacgacaagagcctgcaccaggccatcgagggcgacaccagcggcgacttcctgaaggccctgctggccctgtgcggcggcgaggactag

SEQ ID NO: 72973 - DNA, 1644 bp, synthetic construct
  misc_feature 1..1644: note = Description of Artificial Sequence: Synthetic coding sequence
  source 1..1644: mol_type = other DNA
atgcaccagctggtggccgcctacaaggacgcctacgagagagacctggaggccgacatcatcggcgacaccagcggccacttccagaagatgctggtggtgctgctgcagggcaccagagaggaggacgacgtggtgagcgaggacctggtgcagcaggacgtgcaggacctgtacgaggccggcgagctgaagtggggcaccgacgaggcccagttcatctacatcctgggcaacagaagcaagcagcacctgagactggtgttcgacgagtacctgaagaccaccggcaagcccatcgaggccagcatcagaggcgagctgagcggcgacttcgagaagctgatgctggccgtggtgaagtgcatcagaagcacccccgagtacttcgccgagagactgttcaaggccatgaagggcctgggcaccagagacaacaccctgatcagaatcatggtgagcagaagcgagctggacatgctggacatcagagagatcttcagaaccaagtacgagaagagcctgtacagcatgatcaagaacgacaccagcggcgagtacaagaagaccctgctgaagctgagcggcggcgacgacgacgccgccggccagttcttccccgaggccgcccaggtggcctaccagatgtgggagctgagcgccgtggccagagtggagctgaagggcaccgtgagacccgccaacgacttcaaccccgacgccgacgccaaggccctgagaaaggccatgaagggcctgggcaccgacgaggacaccatcatcgacatcatcacccacagaagcaacgtgcagagacagcagatcagacagaccttcaagagccacttcggcagagacctgatgaccgacctgaagagcgagatcagcggcgacctggccagactgatcctgggcctgatgatgccccccgcccactacgacgccaagcagctgaagaaggccatggagggcgccggcaccgacgagaaggccctgatcgagatcctggccaccagaaccaacgccgagatcagagccatcaacgaggcctacaaggaggactaccacaagagcctggaggacgccctgagcagcgacaccagcggccacttcagaagaatcctgatcagcctggccaccggccacagagaggagggcggcgagaacctggaccaggccagagaggacgcccaggtggccgccgagatcctggagatcgccgacacccccagcggcgacaagaccagcctggagaccagattcatgaccatcctgtgcaccagaagctacccccacctgagaagagtgttccaggagttcatcaagatgaccaactacgacgtggagcacaccatcaagaaggagatgagcggcgacgtgagagacgccttcgtggccatcgtgcagagcgtgaagaacaagcccctgttcttcgccgacaagctgtacaagagcatgaagggcgccggcaccgacgagaagaccctgaccagaatcatggtgagcagaagcgagatcgacctgctgaacatcagaagagagttcatcgagaagtacgacaagagcctgcaccaggccatcgagggcgacaccagcggcgacttcctgaaggccctgctggccctgtgcggcggcgaggactag

SEQ ID NO: 72974 - DNA, 1467 bp, synthetic construct
  misc_feature 1..1467: note = Description of Artificial Sequence: Synthetic coding sequence
  source 1..1467: mol_type = other DNA
atgagctaccccggctacccccccaccggctacccccccttccccggctacccccccgccggccaggagagcagcttcccccccagcggccagtacccctaccccagcggcttcccccccatgggcggcggcgcctacccccaggtgcccagcagcggctaccccggcgccggcggctaccccgcccccggcggctaccccgcccccggcggctaccccggcgccccccagcccggcggcgcccccagctaccccggcgtgccccccggccagggcttcggcgtgccccccggcggcgccggcttcagcggctacccccagccccccagccagagctacggcggcggccccgcccaggtgcccctgcccggcggcttccccggcggccagatgcccagccagtaccccggcggccagcccacctaccccagccagatcaacaccgacagcttcagcagctaccccgtgttcagccccgtgagcctggactacagcagcgagcccgccaccgtgacccaggtgacccagggcaccatcagacccgccgccaacttcgacgccatcagagacgccgagatcctgagaaaggccatgaagggcttcggcaccgacgagcaggccatcgtggacgtggtggccaacagaagcaacgaccagagacagaagatcaaggccgccttcaagaccagctacggcaaggacctgatcaaggacctgaagagcgagctgagcggcaacatggaggagctgatcctggccctgttcatgccccccacctactacgacgcctggagcctgagaaaggccatgcagggcgccggcacccaggagagagtgctgatcgagatcctgtgcaccagaaccaaccaggagatcagagagatcgtgagatgctaccagagcgagttcggcagagacctggagaaggacatcagaagcgacaccagcggccacttcgagagactgctggtgagcatgtgccagggcaacagagacgagaaccagagcatcaaccaccagatggcccaggaggacgcccagagactgtaccaggccggcgagggcagactgggcaccgacgagagctgcttcaacatgatcctggccaccagaagcttcccccagctgagagccaccatggaggcctacagcagaatggccaacagagacctgctgagcagcgtgagcagagagttcagcggctacgtggagagcggcctgaagaccatcctgcagtgcgccctgaacagacccgccttcttcgccgagagactgtactacgccatgaagggcgccggcaccgacgacagcaccctggtgagaatcgtggtgaccagaagcgagatcgacctggtgcagatcaagcagatgttcgcccagatgtaccagaagaccctgggcaccatgatcgccggcgacaccagcggcgactacagaagactgctgctggccatcgtgggccagtag

SEQ ID NO: 72975 - DNA, 1401 bp, synthetic construct
  misc_feature 1..1401: note = Description of Artificial Sequence: Synthetic coding sequence
  source 1..1401: mol_type = other DNA
atgagctaccccggctacccccccaccggctacccccccttccccggctacccccccgccggccaggagagcagcttcccccccagcggccagtacccctaccccagcggcttcccccccatgggcggcggcgcctacccccaggtgcccagcagcggctaccccggcgccggcggctaccccgcccccggcggctaccccgcccccggcggctaccccggcgccccccagcccggcggcgcccccagctaccccggcgtgccccccggccagggcttcggcgtgccccccggcggcgccggcttcagcggctacccccagccccccagccagagctacggcggcggccccgcccaggtgcccctgcccggcggcttccccggcggccagatgcccagccagtaccccggcggccagcccacctaccccagccagcccgccaccgtgacccaggtgacccagggcaccatcagacccgccgccaacttcgacgccatcagagacgccgagatcctgagaaaggccatgaagggcttcggcaccgacgagcaggccatcgtggacgtggtggccaacagaagcaacgaccagagacagaagatcaaggccgccttcaagaccagctacggcaaggacctgatcaaggacctgaagagcgagctgagcggcaacatggaggagctgatcctggccctgttcatgccccccacctactacgacgcctggagcctgagaaaggccatgcagggcgccggcacccaggagagagtgctgatcgagatcctgtgcaccagaaccaaccaggagatcagagagatcgtgagatgctaccagagcgagttcggcagagacctggagaaggacatcagaagcgacaccagcggccacttcgagagactgctggtgagcatgtgccagggcaacagagacgagaaccagagcatcaaccaccagatggcccaggaggacgcccagagactgtaccaggccggcgagggcagactgggcaccgacgagagctgcttcaacatgatcctggccaccagaagcttcccccagctgagagccaccatggaggcctacagcagaatggccaacagagacctgctgagcagcgtgagcagagagttcagcggctacgtggagagcggcctgaagaccatcctgcagtgcgccctgaacagacccgccttcttcgccgagagactgtactacgccatgaagggcgccggcaccgacgacagcaccctggtgagaatcgtggtgaccagaagcgagatcgacctggtgcagatcaagcagatgttcgcccagatgtaccagaagaccctgggcaccatgatcgccggcgacaccagcggcgactacagaagactgctgctggccatcgtgggccagtag

SEQ ID NO: 72976 - DNA, 435 bp, synthetic construct
  misc_feature 1..435: note = Description of Artificial Sequence: Synthetic coding sequence
  source 1..435: mol_type = other DNA
atgagctaccccggctacccccccaccggctacccccccttccccggctacccccccgccggccaggagagcagcttcccccccagcggccagtacccctaccccagcggcttcccccccatgggcggcggcgcctacccccaggtgcccagcagcggctaccccggcgccggcggctaccccgcccccggcggctaccccgcccccggcggctaccccggcgccccccagcccggcggcgcccccagctaccccggcgtgccccccggccagggcttcggcgtgccccccggcggcgccggcttcagcggctacccccagccccccagccagagctacggcggcggccccgcccaggtgcccctgcccggcggcttccccggcggccagatgcccagccagtaccccggcggccagcccacctaccccagctag

SEQ ID NO: 72977 - DNA, 1011 bp, synthetic construct
  misc_feature 1..1011: note = Description of Artificial Sequence: Synthetic coding sequence
  source 1..1011: mol_type = other DNA
atgcccagccagtaccccggcggccagcccacctaccccagccagcccgccaccgtgacccaggtgacccagggcaccatcagacccgccgccaacttcgacgccatcagagacgccgagatcctgagaaaggccatgaagggcttcggcaccgacgagcaggccatcgtggacgtggtggccaacagaagcaacgaccagagacagaagatcaaggccgccttcaagaccagctacggcaaggacctgatcaaggacctgaagagcgagctgagcggcaacatggaggagctgatcctggccctgttcatgccccccacctactacgacgcctggagcctgagaaaggccatgcagggcgccggcacccaggagagagtgctgatcgagatcctgtgcaccagaaccaaccaggagatcagagagatcgtgagatgctaccagagcgagttcggcagagacctggagaaggacatcagaagcgacaccagcggccacttcgagagactgctggtgagcatgtgccagggcaacagagacgagaaccagagcatcaaccaccagatggcccaggaggacgcccagagactgtaccaggccggcgagggcagactgggcaccgacgagagctgcttcaacatgatcctggccaccagaagcttcccccagctgagagccaccatggaggcctacagcagaatggccaacagagacctgctgagcagcgtgagcagagagttcagcggctacgtggagagcggcctgaagaccatcctgcagtgcgccctgaacagacccgccttcttcgccgagagactgtactacgccatgaagggcgccggcaccgacgacagcaccctggtgagaatcgtggtgaccagaagcgagatcgacctggtgcagatcaagcagatgttcgcccagatgtaccagaagaccctgggcaccatgatcgccggcgacaccagcggcgactacagaagactgctgctggccatcgtgggccagtag

SEQ ID NO: 72978 - DNA, 984 bp, synthetic construct
  misc_feature 1..984: note = Description of Artificial Sequence: Synthetic coding sequence
  source 1..984: mol_type = other DNA
atggcctggtggaagagctggatcgagcaggagggcgtgaccgtgaagagcagcagccacttcaaccccgaccccgacgccgagaccctgtacaaggccatgaagggcatcggcaccaacgagcaggccatcatcgacgtgctgaccaagagaagcaacacccagagacagcagatcgccaagagcttcaaggcccagttcggcaaggacctgaccgagaccctgaagagcgagctgagcggcaagttcgagagactgatcgtggccctgatgtaccccccctacagatacgaggccaaggagctgcacgacgccatgaagggcctgggcaccaaggagggcgtgatcatcgagatcctggccagcagaaccaagaaccagctgagagagatcatgaaggcctacgaggaggactacggcagcagcctggaggaggacatccaggccgacaccagcggctacctggagagaatcctggtgtgcctgctgcagggcagcagagacgacgtgagcagcttcgtggaccccggcctggccctgcaggacgcccaggacctgtacgccgccggcgagaagatcagaggcaccgacgagatgaagttcatcaccatcctgtgcaccagaagcgccacccacctgctgagagtgttcgaggagtacgagaagatcgccaacaagagcatcgaggacagcatcaagagcgagacccacggcagcctggaggaggccatgctgaccgtggtgaagtgcacccagaacctgcacagctacttcgccgagagactgtactacgccatgaagggcgccggcaccagagacggcaccctgatcagaaacatcgtgagcagaagcgagatcgacctgaacctgatcaagtgccacttcaagaagatgtacggcaagaccctgagcagcatgatcatggaggacaccagcggcgactacaagaacgccctgctgagcctggtgggcagcgacccctag

SEQ ID NO: 72979 - DNA, 831 bp, synthetic construct
  misc_feature 1..831: note = Description of Artificial Sequence: Synthetic coding sequence
  source 1..831: mol_type = other DNA
atggcctggtggaagagctggatcgagcaggagggcgtgaccgtgaagagcagcagccacttcaaccccgaccccgacgccgagaccctgtacaaggccatgaagggcatcggcgtgggcagccagctgctgagccaccaggccgccgccttcgccttccccagcagcgccctgaccagcgtgagcccctggggccagcagggccacctgtgctgcaaccccgccggcaccaacgagcaggccatcatcgacgtgctgaccaagagaagcaacacccagagacagcagatcgccaagagcttcaaggcccagttcggcaaggacctgaccgagaccctgaagagcgagctgagcggcaagttcgagagactgatcgtggccctgatgtaccccccctacagatacgaggccaaggagctgcacgacgccatgaagggcagcagagacgacgtgagcagcttcgtggaccccggcctggccctgcaggacgcccaggacctgtacgccgccggcgagaagatcagaggcaccgacgagatgaagttcatcaccatcctgtgcaccagaagcgccacccacctgctgagagtgaagtgcacccagaacctgcacagctacttcgccgagagactgtactacgccatgaagggcgccggcaccagagacggcaccctgatcagaaacatcgtgagcagaagcgagatcgacctgaacctgatcaagtgccacttcaagaagatgtacggcaagaccctgagcagcatgatcatggaggacaccagcggcgactacaagaacgccctgctgagcctggtgggcagcgacccctag

SEQ ID NO: 72980 - DNA, 798 bp, synthetic construct
  misc_feature 1..798: note = Description of Artificial Sequence: Synthetic coding sequence
  source 1..798: mol_type = other DNA
atggcctggtggaagagctgggacctgaccgagaccctgaagagcgagctgagcggcaagttcgagagactgatcgtggccctgatgtaccccccctacagatacgaggccaaggagctgcacgacgccatgaagggcctgggcaccaaggagggcgtgatcatcgagatcctggccagcagaaccaagaaccagctgagagagatcatgaaggcctacgaggaggactacggcagcagcctggaggaggacatccaggccgacaccagcggctacctggagagaatcctggtgtgcctgctgcagggcagcagagacgacgtgagcagcttcgtggaccccggcctggccctgcaggacgcccaggacctgtacgccgccggcgagaagatcagaggcaccgacgagatgaagttcatcaccatcctgtgcaccagaagcgccacccacctgctgagagtgttcgaggagtacgagaagatcgccaacaagagcatcgaggacagcatcaagagcgagacccacggcagcctggaggaggccatgctgaccgtggtgaagtgcacccagaacctgcacagctacttcgccgagagactgtactacgccatgaagggcgccggcaccagagacggcaccctgatcagaaacatcgtgagcagaagcgagatcgacctgaacctgatcaagtgccacttcaagaagatgtacggcaagaccctgagcagcatgatcatggaggacaccagcggcgactacaagaacgccctgctgagcctggtgggcagcgacccctag

SEQ ID NO: 72981 - DNA, 426 bp, synthetic construct
  misc_feature 1..426: note = Description of Artificial Sequence: Synthetic coding sequence
  source 1..426: mol_type = other DNA
atggcctggtggaagagctggatcgagcaggagggcgtgaccgtgaagagcagcagccacttcaaccccgaccccgacgccgagaccctgtacaaggccatgaagggcatcggcaccaacgagcaggccatcatcgacgtgctgaccaagagaagcaacacccagagacagcagatcgccaagagcttcaaggcccagttcggcaaggacctgaccgagaccctgaagagcgagctgagcggcaagttcgagagactgatcgtggccctgatgtaccccccctacagatacgaggccaaggagctgcacgacgccatgaagggcctgggcaccaaggagggcgtgatcatcgagatcctggccagcagaaccaagaaccagctgagagagatcatgaaggcctacgaggagggccagcagggctag

SEQ ID NO: 72982 - DNA, 1038 bp, synthetic construct
  misc_feature 1..1038: note = Description of Artificial Sequence: Synthetic coding sequence
  source 1..1038: mol_type = other DNA
atgagcgtgaccggcggcaagatggcccccagcctgacccaggagatcctgagccacctgggcctggccagcaagaccgccgcctggggcaccctgggcaccctgagaaccttcctgaacttcagcgtggacaaggacgcccagagactgctgagagccatcaccggccagggcgtggacagaagcgccatcgtggacgtgctgaccaacagaagcagagagcagagacagctgatcagcagaaacttccaggagagaacccagcaggacctgatgaagagcctgcaggccgccctgagcggcaacctggagagaatcgtgatggccctgctgcagcccaccgcccagttcgacgcccaggagctgagaaccgccctgaaggccagcgacagcgccgtggacgtggccatcgagatcctggccaccagaacccccccccagctgcaggagtgcctggccgtgtacaagcacaacttccaggtggaggccgtggacgacatcaccagcgagaccagcggcatcctgcaggacctgctgctggccctggccaagggcggcagagacagctacagcggcatcatcgactacaacctggccgagcaggacgtgcaggccctgcagagagccgagggccccagcagagaggagacctgggtgcccgtgttcacccagagaaaccccgagcacctgatcagagtgttcgaccagtaccagagaagcaccggccaggagctggaggaggccgtgcagaacagattccacggcgacgcccaggtggccctgctgggcctggccagcgtgatcaagaacacccccctgtacttcgccgacaagctgcaccaggccctgcaggagaccgagcccaactaccaggtgctgatcagaatcctgatcagcagatgcgagaccgacctgctgagcatcagagccgagttcagaaagaagttcggcaagagcctgtacagcagcctgcaggacgccgtgaagggcgactgccagagcgccctgctggccctgtgcagagccgaggacatgtag

SEQ ID NO: 72983 - DNA, 1929 bp, synthetic construct
  misc_feature 1..1929: note = Description of Artificial Sequence: Synthetic coding sequence
  source 1..1929: mol_type = other DNA
atgctgaccagacccagccaggtgctgctgaacagcctgagcgtggaccccgacgccgagtgcaagtacggcctgtacttcagagacggcagaagaaaggtggactacatcctggtgtaccaccacaagagacccagcggcaacagaaccctggtgagaagagtgcagcacagcgacacccccagcggcgccagaagcgtgaagcaggaccaccccctgcccggcaagggcgccagcctggacgccggcagcggcgagccccccatggactaccacgaggacgacaagagattcagaagagaggagtacgagggcaacctgctggaggccggcctggagctggagagagacgaggacaccaagatccacggcgtgggcttcgtgaagatccacgccccctggaacgtgctgtgcagagaggccgagttcctgaagctgaagatgcccaccaagaagatgtaccacatcaacgagaccagaggcctgctgaagaagatcaacagcgtgctgcagaagatcaccgaccccatccagcccaaggtggccgagcacagaccccagaccatgaagagactgagctaccccttcagcagagagaagcagcacctgttcgacctgagcgacaaggacagcttcttcgacagcaagaccagaagcaccatcgtgtacgagatcctgaagagaaccacctgcaccaaggccaagtacagcatgggcatcaccagcctgctggccaacggcgtgtacgccgccgcctaccccctgcacgacggcgactacaacggcgagaacgtggagttcaacgacagaaagctgctgtacgaggagtgggccagatacggcgtgttctacaagtaccagcccatcgacctggtgagaaagtacttcggcgagaagatcggcctgtacttcgcctggctgggcgtgtacacccagatgctgatccccgccagcatcgtgggcatcatcgtgttcctgtacggctgcgccaccatggacgagaacatccccagcatggagatgtgcgaccagagacacaacatcaccatgtgccccctgtgcgacaagacctgcagctactggaagatgagcagcgcctgcgccaccgccagagccagccacctgttcgacaaccccgccaccgtgttcttcagcgtgttcatggccctgtgggccgccaccttcatggagcactggaagagaaagcagatgagactgaactacagatgggacctgaccggcttcgaggaggaggaggaccaccccagagccgagtacgaggccagagtgctggagaagagcctgaagaaggagagcagaaacaaggagaccgacaaggtgaagctgacctggagagacagattccccgcctacctgaccaacctggtgagcatcatcttcatgatcgccgtgaccttcgccatcgtgctgggcgtgatcatctacagaatcagcatggccgccgccctggccatgaacagcagccccagcgtgagaagcaacatcagagtgaccgtgaccgccaccgccgtgatcatcaacctggtggtgatcatcctgctggacgaggtgtacggctgcatcgccagatggctgaccaagatcgaggtgcccaagaccgagaagagcttcgaggagagactgatcttcaaggccttcctgctgaagttcgtgaacagctacacccccatcttctacgtggccttcttcaagggcagattcgtgggcagacccggcgactacgtgtacatcttcagaagcttcagaatggaggaggtgaccgagatcctgttcatcagcggcagccccttctgcctggcctacgacctgagcaccccctgcacctgggagaagcagctgcagcacatctgcagcgccaagagcagcagattcctgagcttcctgctggagaccttcctgttcccctag

SEQ ID NO: 72984 - DNA, 2961 bp, synthetic construct
  misc_feature 1..2961: note = Description of Artificial Sequence: Synthetic coding sequence
  source 1..2961: mol_type = other DNA
atgagagtgaacgagaagtacagcaccctgcccgccgaggacagaagcgtgcacatcatcaacatctgcgccatcgaggacatcggctacctgcccagcgagggcaccctgctgaacagcctgagcgtggaccccgacgccgagtgcaagtacggcctgtacttcagagacggcagaagaaaggtggactacatcctggtgtaccaccacaagagacccagcggcaacagaaccctggtgagaagagtgcagcacagcgacacccccagcggcgccagaagcgtgaagcaggaccaccccctgcccggcaagggcgccagcctggacgccggcagcggcgagccccccatggactaccacgaggacgacaagagattcagaagagaggagtacgagggcaacctgctggaggccggcctggagctggagagagacgaggacaccaagatccacggcgtgggcttcgtgaagatccacgccccctggaacgtgctgtgcagagaggccgagttcctgaagctgaagatgcccaccaagaagatgtaccacatcaacgagaccagaggcctgctgaagaagatcaacagcgtgctgcagaagatcaccgaccccatccagcccaaggtggccgagcacagaccccagaccatgaagagactgagctaccccttcagcagagagaagcagcacctgttcgacctgagcgacaaggacagcttcttcgacagcaagaccagaagcaccatcgtgtacgagatcctgaagagaaccacctgcaccaaggccaagtacagcatgggcatcaccagcctgctggccaacggcgtgtacgccgccgcctaccccctgcacgacggcgactacaacggcgagaacgtggagttcaacgacagaaagctgctgtacgaggagtgggccagatacggcgtgttctacaagtaccagcccatcgacctggtgagaaagtacttcggcgagaagatcggcctgtacttcgcctggctgggcgtgtacacccagatgctgatccccgccagcatcgtgggcatcatcgtgttcctgtacggctgcgccaccatggacgagaacatccccagcatggagatgtgcgaccagagacacaacatcaccatgtgccccctgtgcgacaagacctgcagctactggaagatgagcagcgcctgcgccaccgccagagccagccacctgttcgacaaccccgccaccgtgttcttcagcgtgttcatggccctgtgggccgccaccttcatggagcactggaagagaaagcagatgagactgaactacagatgggacctgaccggcttcgaggaggaggaggaggccgtgaaggaccaccccagagccgagtacgaggccagagtgctggagaagagcctgaagaaggagagcagaaacaaggagaagagaagacacatccccgaggagagcaccaacaagtggaagcagagagtgaagaccgccatggccggcgtgaagctgaccgacaaggtgaagctgacctggagagacagattccccgcctacctgaccaacctggtgagcatcatcttcatgatcgccgtgaccttcgccatcgtgctgggcgtgatcatctacagaatcagcatggccgccgccctggccatgaacagcagccccagcgtgagaagcaacatcagagtgaccgtgaccgccaccgccgtgatcatcaacctggtggtgatcatcctgctggacgaggtgtacggctgcatcgccagatggctgaccaagatcgaggtgcccaagaccgagaagagcttcgaggagagactgatcttcaaggccttcctgctgaagttcgtgaacagctacacccccatcttctacgtggccttcttcaagggcagattcgtgggcagacccggcgactacgtgtacatcttcagaagcttcagaatggaggagtgcgcccccggcggctgcctgatggagctgtgcatccagctgagcatcatcatgctgggcaagcagctgatccagaacaacctgttcgagatcggcatccccaagatgaagaagctgatcagatacctgaagctgaagcagcagagcccccccgaccacgaggagtgcgtgaagagaaagcagagatacgaggtggactacaacctggagcccttcgccggcctgacccccgagtacatggagatgatcatccagttcggcttcgtgaccctgttcgtggccagcttccccctggcccccctgttcgccctgctgaacaacatcatcgagatcagactggacgccaagaagttcgtgaccgagctgagaagacccgtggccgtgagagccaaggacatcggcatctggtacaacatcctgagaggcatcggcaagctggccgtgatcatcaacgccttcgtgatcagcttcaccagcgacttcatccccagactggtgtacctgtacatgtacagcaagaacggcaccatgcacggcttcgtgaaccacaccctgagcagcttcaacgtgagcgacttccagaacggcaccgcccccaacgaccccctggacctgggctacgaggtgcagatctgcagatacaaggactacagagagcccccctggagcgagaacaagtacgacatcagcaaggacttctgggccgtgctggccgccagactggccttcgtgatcgtgttccagaacctggtgatgttcatgagcgacttcgtggactgggtgatccccgacatccccaaggacatcagccagcagatccacaaggagaaggtgctgatggtggagctgttcatgagagaggagcaggacaagcagcagctgctggagacctggatggagaaggagagacagaaggacgagcccccctgcaaccaccacaacaccaaggcctgccccgacagcctgggcagccccgcccccagccacgcctaccacggcggcgtgctgtag

SEQ ID NO: 72985 - DNA, 2523 bp, synthetic construct
  misc_feature 1..2523: note = Description of Artificial Sequence: Synthetic coding sequence
  source 1..2523: mol_type = other DNA
atggactaccacgaggacgacaagagattcagaagagaggagtacgagggcaacctgctggaggccggcctggagctggagagagacgaggacaccaagatccacggcgtgggcttcgtgaagatccacgccccctggaacgtgctgtgcagagaggccgagttcctgaagctgaagatgcccaccaagaagatgtaccacatcaacgagaccagaggcctgctgaagaagatcaacagcgtgctgcagaagatcaccgaccccatccagcccaaggtggccgagcacagaccccagaccatgaagagactgagctaccccttcagcagagagaagcagcacctgttcgacctgagcgacaaggacagcttcttcgacagcaagaccagaagcaccatcgtgtacgagatcctgaagagaaccacctgcaccaaggccaagtacagcatgggcatcaccagcctgctggccaacggcgtgtacgccgccgcctaccccctgcacgacggcgactacaacggcgagaacgtggagttcaacgacagaaagctgctgtacgaggagtgggccagatacggcgtgttctacaagtaccagcccatcgacctggtgagaaagtacttcggcgagaagatcggcctgtacttcgcctggctgggcgtgtacacccagatgctgatccccgccagcatcgtgggcatcatcgtgttcctgtacggctgcgccaccatggacgagaacatccccagcatggagatgtgcgaccagagacacaacatcaccatgtgccccctgtgcgacaagacctgcagctactggaagatgagcagcgcctgcgccaccgccagagccagccacctgttcgacaaccccgccaccgtgttcttcagcgtgttcatggccctgtgggccgccaccttcatggagcactggaagagaaagcagatgagactgaactacagatgggacctgaccggcttcgaggaggaggaggaccaccccagagccgagtacgaggccagagtgctggagaagagcctgaagaaggagagcagaaacaaggagaccgacaaggtgaagctgacctggagagacagattccccgcctacctgaccaacctggtgagcatcatcttcatgatcgccgtgaccttcgccatcgtgctgggcgtgatcatctacagaatcagcatggccgccgccctggccatgaacagcagccccagcgtgagaagcaacatcagagtgaccgtgaccgccaccgccgtgatcatcaacctggtggtgatcatcctgctggacgaggtgtacggctgcatcgccagatggctgaccaagatcgaggtgcccaagaccgagaagagcttcgaggagagactgatcttcaaggccttcctgctgaagttcgtgaacagctacacccccatcttctacgtggccttcttcaagggcagattcgtgggcagacccggcgactacgtgtacatcttcagaagcttcagaatggaggagtgcgcccccggcggctgcctgatggagctgtgcatccagctgagcatcatcatgctgggcaagcagctgatccagaacaacctgttcgagatcggcatccccaagatgaagaagctgatcagatacctgaagctgaagcagcagagcccccccgaccacgaggagtgcgtgaagagaaagcagagatacgaggtggactacaacctggagcccttcgccggcctgacccccgagtacatggagatgatcatccagttcggcttcgtgaccctgttcgtggccagcttccccctggcccccctgttcgccctgctgaacaacatcatcgagatcagactggacgccaagaagttcgtgaccgagctgagaagacccgtggccgtgagagccaaggacatcggcatctggtacaacatcctgagaggcatcggcaagctggccgtgatcatcaacgccttcgtgatcagcttcaccagcgacttcatccccagactggtgtacctgtacatgtacagcaagaacggcaccatgcacggcttcgtgaaccacaccctgagcagcttcaacgtgagcgacttccagaacggcaccgcccccaacgaccccctggacctgggctacgaggtgcagatctgcagatacaaggactacagagagcccccctggagcgagaacaagtacgacatcagcaaggacttctgggccgtgctggccgccagactggccttcgtgatcgtgttccagaacctggtgatgttcatgagcgacttcgtggactgggtgatccccgacatccccaaggacatcagccagcagatccacaaggagaaggtgctgatggtggagctgttcatgagagaggagcaggacaagcagcagctgctggagacctggatggagaaggagagacagaaggacgagcccccctgcaaccaccacaacaccaaggcctgccccgacagcctgggcagccccgcccccagccacgcctaccacggcggcgtgctgtag

SEQ ID NO: 72986 - DNA, 2523 bp, synthetic construct; identical to SEQ ID NO: 72985
  misc_feature 1..2523: note = Description of Artificial Sequence: Synthetic coding sequence
  source 1..2523: mol_type = other DNA

SEQ ID NO: 72987 - DNA, 2961 bp, synthetic construct
  misc_feature 1..2961: note = Description of Artificial Sequence: Synthetic coding sequence
  source 1..2961: mol_type = other DNA
atgagagtgaacgagaagtacagcaccctgcccgccgaggacagaagcgtgcacatcatcaacatctgcgccatcgaggacatcggctacctgcccagcgagggcaccctgctgaacagcctgagcgtggaccccgacgccgagtgcaagtacggcctgtacttcagagacggcagaagaaaggtggactacatcctggtgtaccaccacaagagacccagcggcaacagaaccctggtgagaagagtgcagcacagcgacacccccagcggcgccagaagcgtgaagcaggaccaccccctgcccggcaagggcgccagcctggacgccggcagcggcgagccccccatggactaccacgaggacgacaagagattcagaagagaggagtacgagggcaacctgctggaggccggcctggagctggagagagacgaggacaccaagatccacggcgtgggcttcgtgaagatccacgccccctggaacgtgctgtgcagagaggccgagttcctgaagctgaagatgcccaccaagaagatgtaccacatcaacgagaccagaggcctgctgaagaagatcaacagcgtgctgcagaagatcaccgaccccatccagcccaaggtggccgagcacagaccccagaccatgaagagactgagctaccccttcagcagagagaagcagcacctgttcgacctgagcgacaaggacagcttcttcgacagcaagaccagaagcaccatcgtgtacgagatcctgaagagaaccacctgcaccaaggccaagtacagcatgggcatcaccagcctgctggccaacggcgtgtacgccgccgcctaccccctgcacgacggcgactacaacggcgagaacgtggagttcaacgacagaaagctgctgtacgaggagtgggccagatacggcgtgttctacaagtaccagcccatcgacctggtgagaaagtacttcggcgagaagatcggcctgtacttcgcctggctgggcgtgtacacccagatgctgatccccgccagcatcgtgggcatcatcgtgttcctgtacggctgcgccaccatggacgagaacatccccagcatggagatgtgcgaccagagacacaacatcaccatgtgccccctgtgcgacaagacctgcagctactggaagatgagcagcgcctgcgccaccgccagagccagccacctgttcgacaaccccgccaccgtgttcttcagcgtgttcatggccctgtgggccgccaccttcatggagcactggaagagaaagcagatgagactgaactacagatgggacctgaccggcttcgaggaggaggagaaggccctgctggaccaccccagagccgagtacgaggccagagtgctggagaagagcctgaagaaggagagcagaaacaaggagaagagaagacacatccccgaggagagcaccaacaagtggaagcagagagtgaagaccgccatggccggcgtgaagctgaccgacaaggtgaagctgacctggagagacagattccccgcctacctgaccaacctggtgagcatcatcttcatgatcgccgtgaccttcgccatcgtgctgggcgtgatcatctacagaatcagcatggccgccgccctggccatgaacagcagccccagcgtgagaagcaacatcagagtgaccgtgaccgccaccgccgtgatcatcaacctggtggtgatcatcctgctggacgaggtgtacggctgcatcgccagatggctgaccaagatcgaggtgcccaagaccgagaagagcttcgaggagagactgatcttcaaggccttcctgctgaagttcgtgaacagctacacccccatcttctacgtggccttcttcaagggcagattcgtgggcagacccggcgactacgtgtacatcttcagaagcttcagaatggaggagtgcgcccccggcggctgcctgatggagctgtgcatccagctgagcatcatcatgctgggcaagcagctgatccagaacaacctgttcgagatcggcatccccaagatgaagaagctgatcagatacctgaagctgaagcagcagagcccccccgaccacgaggagtgcgtgaagagaaagcagagatacgaggtggactacaacctggagcccttcgccggcctgacccccgagtacatggagatgatcatccagttcggcttcgtgaccctgttcgtggccagcttccccctggcccccctgttcgccctgctgaacaacatcatcgagatcagactggacgccaagaagttcgtgaccgagctgagaagacccgtggccgtgagagccaaggacatcggcatctggtacaacatcctgagaggcatcggcaagctggccgtgatcatcaacgccttcgtgatcagcttcaccagcgacttcatccccagactggtgtacctgtacatgtacagcaagaacggcaccatgcacggcttcgtgaaccacaccctgagcagcttcaacgtgagcgacttccagaacggcaccgcccccaacgaccccctggacctgggctacgaggtgcagatctgcagatacaaggactacagagagcccccctggagcgagaacaagtacgacatcagcaaggacttctgggccgtgctggccgccagactggccttcgtgatcgtgttccagaacctggtgatgttcatgagcgacttcgtggactgggtgatccccgacatccccaaggacatcagccagcagatccacaaggagaaggtgctgatggtggagctgttcatgagagaggagcaggacaagcagcagctgctggagacctggatggagaaggagagacagaaggacgagcccccctgcaaccaccacaacaccaaggcctgccccgacagcctgggcagccccgcccccagccacgcctaccacggcggcgtgctgtag

SEQ ID NO: 72988 - DNA, 942 bp, synthetic construct
  misc_feature 1..942: note = Description of Artificial Sequence: Synthetic coding sequence
  source 1..942: mol_type = other DNA
atgctggacgccgccagcaaggccagagaggcccccgaggccgcccccggctgggacgacccccagggcgagggcagaagaggcagaggcgagggcctgagctgggccgtgggcccccaccccgaccccggcgtgctgatgcagggcgaggtgtggagcggcagattcagccacgccgtgatccagttcggcttcgtgaccctgttcgtggccagcttccccctggcccccctgttcgccctgctgaacaacatcatcgagatcagactggacgccaagaagttcgtgaccgagctgagaagacccgtggccgtgagagccaaggacatcggcatctggtacaacatcctgagaggcatcggcaagctggccgtgatcatcaacgccttcgtgatcagcttcaccagcgacttcatccccagactggtgtacctgtacatgtacagcaagaacggcaccatgcacggcttcgtgaaccacaccctgagcagcttcaacgtgagcgacttccagaacggcaccgcccccaacgaccccctggacctgggctacgaggtgcagatctgcagatacaaggactacagagagcccccctggagcgagaacaagtacgacatcagcaaggacttctgggccgtgctggccgccagactggccttcgtgatcgtgttccagaacctggtgatgttcatgagcgacttcgtggactgggtgatccccgacatccccaaggacatcagccagcagatccacaaggagaaggtgctgatggtggagctgttcatgagagaggagcaggacaagcagcagctgctggagacctggatggagaaggagagacagaaggacgagcccccctgcaaccaccacaacaccaaggcctgccccgacagcctgggcagccccgcccccagccacgcctaccacggcggcgtgctgtag

SEQ ID NO: 72989 - DNA, 2235 bp, synthetic construct
  misc_feature 1..2235: note = Description of Artificial Sequence: Synthetic coding sequence
  source 1..2235: mol_type = other DNA
atgaagagactgagctaccccttcagcagagagaagcagcacctgttcgacctgagcgacaaggacagcttcttcgacagcaagaccagaagcaccatcgtgtacgagatcctgaagagaaccacctgcaccaaggccaagtacagcatgggcatcaccagcctgctggccaacggcgtgtacgccgccgcctaccccctgcacgacggcgactacaacggcgagaacgtggagttcaacgacagaaagctgctgtacgaggagtgggccagatacggcgtgttctacaagtaccagcccatcgacctggtgagaaagtacttcggcgagaagatcggcctgtacttcgcctggctgggcgtgtacacccagatgctgatccccgccagcatcgtgggcatcatcgtgttcctgtacggctgcgccaccatggacgagaacatccccagcatggagatgtgcgaccagagacacaacatcaccatgtgccccctgtgcgacaagacctgcagctactggaagatgagcagcgcctgcgccaccgccagagccagccacctgttcgacaaccccgccaccgtgttcttcagcgtgttcatggccctgtgggccgccaccttcatggagcactggaagagaaagcagatgagactgaactacagatgggacctgaccggcttcgaggaggaggagaaggccctgctggaccaccccagagccgagtacgaggccagagtgctggagaagagcctgaagaaggagagcagaaacaaggagaccgacaaggtgaagctgacctggagagacagattccccgcctacctgaccaacctggtgagcatcatcttcatgatcgccgtgaccttcgccatcgtgctgggcgtgatcatctacagaatcagcatggccgccgccctggccatgaacagcagccccagcgtgagaagcaacatcagagtgaccgtgaccgccaccgccgtgatcatcaacctggtggtgatcatcctgctggacgaggtgtacggctgcatcgccagatggctgaccaagatcgaggtgcccaagaccgagaagagcttcgaggagagactgatcttcaaggccttcctgctgaagttcgtgaacagctacacccccatcttctacgtggccttcttcaagggcagattcgtgggcagacccggcgactacgtgtacatcttcagaagcttcagaatggaggagtgcgcccccggcggctgcctgatggagctgtgcatccagctgagcatcatcatgctgggcaagcagctgatccagaacaacctgttcgagatcggcatccccaagatgaagaagctgatcagatacctgaagctgaagcagcagagcccccccgaccacgaggagtgcgtgaagagaaagcagagatacgaggtggactacaacctggagcccttcgccggcctgacccccgagtacatggagatgatcatccagttcggcttcgtgaccctgttcgtggccagcttccccctggcccccctgttcgccctgctgaacaacatcatcgagatcagactggacgccaagaagttcgtgaccgagctgagaagacccgtggccgtgagagccaaggacatcggcatctggtacaacatcctgagaggcatcggcaagctggccgtgatcatcaacgccttcgtgatcagcttcaccagcgacttcatccccagactggtgtacctgtacatgtacagcaagaacggcaccatgcacggcttcgtgaaccacaccctgagcagcttcaacgtgagcgacttccagaacggcaccgcccccaacgaccccctggacctgggctacgaggtgcagatctgcagatacaaggactacagagagcccccctggagcgagaacaagtacgacatcagcaaggacttctgggccgtgctggccgccagactggccttcgtgatcgtgttccagaacctggtgatgttcatgagcgacttcgtggactgggtgatccccgacatccccaaggacatcagccagcagatccacaaggagaaggtgctgatggtggagctgttcatgagagaggagcaggacaagcagcagctgctggagacctggatggagaaggagagacagaaggacgagcccccctgcaaccaccacaacaccaaggcctgccccgacagcctgggcagccccgcccccagccacgcctaccacggcggcgtgctgtag

SEQ ID NO: 72990 - DNA, 1983 bp, synthetic construct
  misc_feature 1..1983: note = Description of Artificial Sequence: Synthetic coding sequence
  source 1..1983: mol_type = other DNA
atgaaggtgaccctgagcgccctggacaccagcgagagcagcttcacccccctggtggtgatcgagctggcccaggacgtgaaggaggagaccaaggagtggctgaagaacagaatcatcgccaagaagaaggacggcggcgcccagctgctgttcagacccctgctgaacaagtacgagcaggagaccctggagaaccagaacctgtacctggtgggcgccagcaagatcagaatgctgctgggcgccgaggccgtgggcctggtgaaggagtgcaacgacaacaccatgagagccttcacctacagaaccagacagaacttcaagggcttcgacgacaacaacgacgacttcctgaccatggccgagtgccagttcatcatcaagcacgagctggagaacctgagagccaaggacgagaagatgatccccggctacccccaggccaagctgtaccccggcaagagcctgctgagaagactgctgaccagcggcatcgtgatccaggtgttccccctgcacgacagcgaggccctgaagaagctggaggacacctggtacaccagattcgccctgaagtaccagcccatcgacagcatcagaggctacttcggcgagaccatcgccctgtacttcggcttcctggagtacttcaccttcgccctgatccccatggccgtgatcggcctgccctactacctgttcgtgtgggaggactacgacaagtacgtgatcttcgccagcttcaacctgatctggagcaccgtgatcctggagctgtggaagagaggctgcgccaacatgacctacagatggggcaccctgctgatgaagagaaagttcgaggagcccagacccggcttccacggcgtgctgggcatcaacagcatcaccggcaaggaggagcccctgtaccccagctacaagagacagctgagaatctacctggtgagcctgcccttcgtgtgcctgtgcctgtacttcagcctgtacgtgatgatgatctacttcgacatggaggtgtgggccctgggcctgcacgagaacagcggcagcgagtggaccagcgtgctgctgtacgtgcccagcatcatctacgccatcgtgatcgagatcatgaacagactgtacagatacgccgccgagttcctgaccagctgggagaaccacagactggagagcgcctaccagaaccacctgatcctgaaggtgctggtgttcaacttcctgaactgcttcgccagcctgttctacatcgccttcgtgctgaaggacatgaagctgctgagacagagcctggccaccctgctgatcaccagccagatcctgaaccagatcatggagagcttcctgccctactggctgcagagaaagcacggcgtgagagtgaagagaaaggtgcaggccctgaaggccgacatcgacgccaccctgtacgagcaggtgatcctggagaaggagatgggcacctacctgggcaccttcgacgactacctggagctgttcctgcagttcggctacgtgagcctgttcagctgcgtgtaccccctggccgccgccttcgccgtgctgaacaacttcaccgaggtgaacagcgacgccctgaagatgtgcagagtgttcaagagacccttcagcgagcccagcgccaacatcggcgtgtggcagctggccttcgagaccatgagcgtgatcagcgtggtgaccaactgcgccctgatcggcatgagcccccaggtgaacgccgtgttccccgagagcaaggccgacctgatcctgatcgtggtggccgtggagcacgccctgctggccctgaagttcatcctggccttcgccatccccgacaagcccagacacatccagatgaagctggccagactggagttcgagagcctggaggccctgaagcagcagcagatgaagctggtgaccgagaacctgaaggaggagcccatggagagcggcaaggagaaggccacctag

SEQ ID NO: 72991 - DNA, 1413 bp, synthetic construct
  misc_feature 1..1413: note = Description of Artificial Sequence: Synthetic coding sequence
  source 1..1413: mol_type = other DNA
atgaaggtgaccctgagcgccctggacaccagcgagagcagcttcacccccctggtggtgatcgagctggcccaggacgtgaaggaggagaccaaggagtggctgaagaacagaatcatcgccaagaagaaggacggcggcgcccagctgctgttcagacccctgctgaacaagtacgagcaggagaccctggagaaccagaacctgtacctggtgggcgccagcaagatcagaatgctgctgggcgccgaggccgtgggcctggtgaaggagtgcaacgacaacaccatgagagccttcacctacagaaccagacagaacttcaagggcttcgacgacaacaacgacgacttcctgaccatggccgagtgccagttcatcatcaagcacgagctggagaacctgagagccaaggacgagaagatgatccccggctacccccaggccaagctgtaccccggcaagagcctgctgagaagactgctgaccagcggcatcgtgatccaggtgttccccctgcacgacagcgaggccctgaagaagctggaggacacctggtacaccagattcgccctgaagtaccagcccatcgagaaccacagactggagagcgcctaccagaaccacctgatcctgaaggtgctggtgttcaacttcctgaactgcttcgccagcctgttctacatcgccttcgtgctgaaggacatgaagctgctgagacagagcctggccaccctgctgatcaccagccagatcctgaaccagatcatggagagcttcctgccctactggctgcagagaaagcacggcgtgagagtgaagagaaaggtgcaggccctgaaggccgacatcgacgccaccctgtacgagcaggtgatcctggagaaggagatgggcacctacctgggcaccttcgacgactacctggagctgttcctgcagttcggctacgtgagcctgttcagctgcgtgtaccccctggccgccgccttcgccgtgctgaacaacttcaccgaggtgaacagcgacgccctgaagatgtgcagagtgttcaagagacccttcagcgagcccagcgccaacatcggcgtgtggcagctggccttcgagaccatgagcgtgatcagcgtggtgaccaactgcgccctgatcggcatgagcccccaggtgaacgccgtgttccccgagagcaaggccgacctgatcctgatcgtggtggccgtggagcacgccctgctggccctgaagttcatcctggccttcgccatccccgacaagcccagacacatccagatgaagctggccagactggagttcgagagcctggaggccctgaagcagcagcagatgaagctggtgaccgagaacctgaaggaggagcccatggagagcggcaaggagaaggccacctag

SEQ ID NO: 72992 - DNA, 423 bp, synthetic construct
  misc_feature 1..423: note = Description of Artificial Sequence: Synthetic coding sequence
  source 1..423: mol_type = other DNA
atgaaggtgaccctgagcgccctggacaccagcgagagcagcttcacccccctggtggtgatcgagctggcccaggacgtgaaggaggagaccaaggagtggctgaagaacagaatcatcgccaagaagaaggacggcggcgcccagctgctgttcagacccctgctgaacaagtacgagcaggagaccctggagaaccagaacctgtacctggtgggcgccagcaagatcagaatgctgctgggcgccgaggccgtgggcctggtgaaggagtgcaacgacaacaccatgagagccttcacctacagaaccagacagaacttcaagggcttcgacgacaacaacgacgacttcctgaccatggccgagtgccagttcatcatcaagcacgagctggagaacctgagagccaaggacgagtag

SEQ ID NO: 72993 - DNA, 339 bp, synthetic construct
  misc_feature 1..339: note = Description of Artificial Sequence: Synthetic coding sequence
  source 1..339: mol_type = other DNA
atgaaggtgaccctgagcgccctggacaccagcgagagcagcttcacccccctggtggtgatcgagctggcccaggacgtgaaggaggagaccaaggagtggctgaagaacagaatcatcgccaagaagaaggacggcggcgcccagctgctgttcagacccctgctgaacaagtacgagcaggagaccctggagaaccagaacctgtacctggtgggcgccagcaagatcagaatgctgctgggcgccgaggccgtgggcctggtgaaggagtgcaacgacaacaccatgagagccttcacctacagaaccagacagaacttcaagggcttcgactag

SEQ ID NO: 72994 - DNA, 117 bp, synthetic construct
  misc_feature 1..117: note = Description of Artificial Sequence: Synthetic coding sequence
  source 1..117: mol_type = other DNA
atgaaggtgaccctgagcgccctggacaccagcgagagcagcttcacccccctggtggtgatcgagctggcccaggacgtgaaggaggagaccaaggagtggctgaagaacagatag

SEQ ID NO: 72995 - DNA, 405 bp, synthetic construct
  misc_feature 1..405: note = Description of Artificial Sequence: Synthetic coding sequence
  source 1..405: mol_type = other DNA
atgaaggtgaccctgagcgccctggacaccagcgagagcagcttcacccccctggtggtgatcgagctggcccaggacgtgaaggaggagaccaaggagtggctgaagaacagaatcatcgccaagaagaaggacggcggcgcccagctgctgttcagacccctgctgaacaagtacgagcaggagaccctggagaaccagaacctgtacctggtgggcgccagcaagatcagaatgctgctgggcgccgaggccgtgggcctggtgaaggagtgcaacgacaacaccatgagagccttcacctacagaaccagacagaacttcaagggcttcgacgacaacaacgacgacttcctgaccatggccgagtgccagttcatcatcaagcacgagctggagaactag

SEQ ID NO: 72996 - DNA, 441 bp, synthetic construct
  misc_feature 1..441: note = Description of Artificial Sequence: Synthetic coding sequence
  source 1..441: mol_type = other DNA
atgaaggtgaccctgagcgccctggacaccagcgagagcagcttcacccccctggtggtgatcgagctggcccaggacgtgaaggaggagaccaaggagtggctgaagaacagaatcatcgccaagaagaaggacggcggcgcccagctgctgttcagacccctgctgaacaagtacgagcaggagaccctggagaaccagaacctgtacctggtgggcgccagcaagatcagaatgctgctgggcgccgaggccgtgggcctggtgaaggagtgcaacgacaacaccatgagagccttcacctacagaaccagacagaacttcaagggcttcgacgacaacaacgacgacttcctgaccatggccgagtgccagttcatcatcaagcacgagctggagaacctgagagccaaggacgagaagatgatccccggctactag

SEQ ID NO: 72997 - DNA, 426 bp, synthetic construct
  misc_feature 1..426: note = Description of Artificial Sequence: Synthetic coding sequence
  source 1..426: mol_type = other DNA
atgaaggtgaccctgagcgccctggacaccagcgagagcagcttcacccccctggtggtgatcgagctggcccaggacgtgaaggaggagaccaaggagtggctgaagaacagaatcatcgccaagaagaaggacggcggcgcccagctgctgttcagacccctgctgaacaagtacgagcaggagaccctggagaaccagaacctgtacctggtgggcgccagcaagatcagaatgctgctgggcgccgaggccgtgggcctggtgaaggagtgcaacgacaacaccatgagagccttcacctacagaaccagacagaacttcaagggcttcgacgacaacaacgacgacttcctgaccatggccgagtgccagttcatcatcaagcacgagctggagaacctgagagccaaggacgagaagtag

SEQ ID NO: 72998 - DNA, 1785 bp, synthetic construct
  misc_feature 1..1785: note = Description of Artificial Sequence: Synthetic coding sequence
  source 1..1785: mol_type = other DNA
atgaaggtgaccctgagcgccctggacaccagcgagagcagcttcacccccctggtggtgatcgagctggcccaggacgtgaaggaggagaccaaggagtggctgaagaacagaatcatcgccaagaagaaggacggcgacaacaacgacgacttcctgaccatggccgagtgccagttcatcatcaagcacgagctggagaacctgagagccaaggacgagaagatgatccccggctacccccaggccaagctgtaccccggcaagagcctgctgagaagactgctgaccagcggcatcgtgatccaggtgttccccctgcacgacagcgaggccctgaagaagctggaggacacctggtacaccagattcgccctgaagtaccagcccatcgacagcatcagaggctacttcggcgagaccatcgccctgtacttcggcttcctggagtacttcaccttcgccctgatccccatggccgtgatcggcctgccctactacctgttcgtgtgggaggactacgacaagtacgtgatcttcgccagcttcaacctgatctggagcaccgtgatcctggagctgtggaagagaggctgcgccaacatgacctacagatggggcaccctgctgatgaagagaaagttcgaggagcccagacccggcttccacggcgtgctgggcatcaacagcatcaccggcaaggaggagcccctgtaccccagctacaagagacagctgagaatctacctggtgagcctgcccttcgtgtgcctgtgcctgtacttcagcctgtacgtgatgatgatctacttcgacatggaggtgtgggccctgggcctgcacgagaacagcggcagcgagtggaccagcgtgctgctgtacgtgcccagcatcatctacgccatcgtgatcgagatcatgaacagactgtacagatacgccgccgagttcctgaccagctgggagaaccacagactggagagcgcctaccagaaccacctgatcctgaaggtgctggtgttcaacttcctgaactgcttcgccagcctgttctacatcgccttcgtgctgaaggacatgaagctgctgagacagagcctggccaccctgctgatcaccagccagatcctgaaccagatcatggagagcttcctgccctactggctgcagagaaagcacggcgtgagagtgaagagaaaggtgcaggccctgaaggccgacatcgacgccaccctgtacgagcaggtgatcctggagaaggagatgggcacctacctgggcaccttcgacgactacctggagctgttcctgcagttcggctacgtgagcctgttcagctgcgtgtaccccctggccgccgccttcgccgtgctgaacaacttcaccgaggtgaacagcgacgccctgaagatgtgcagagtgttcaagagacccttcagcgagcccagcgccaacatcggcgtgtggcagctggccttcgagaccatgagcgtgatcagcgtggtgaccaactgcgccctgatcggcatgagcccccaggtgaacgccgtgttccccgagagcaaggccgacctgatcctgatcgtggtggccgtggagcacgccctgctggccctgaagttcatcctggccttcgccatccccgacaagcccagacacatccagatgaagctggccagactggagttcgagagcctggaggccctgaagcagcagcagatgaagctggtgaccgagaacctgaaggaggagcccatggagagcggcaaggagaaggccacctag

SEQ ID NO: 72999 - DNA, 1884 bp, synthetic construct
  misc_feature 1..1884: note = Description of Artificial Sequence: Synthetic coding sequence
  source 1..1884: mol_type = other DNA
atgaaggtgaccctgagcgccctggacaccagcgagagcagcttcacccccctggtggtgatcgagctggcccaggacgtgaaggaggagaccaaggagtggctgaagaacagaatcatcgccaagaagaaggacggcggcgcccagctgctgttcagacccctgctgaacaagtacgagcaggagaccctggagaaccagaacctgtacctggtgggcgccagcaagatcagaatgctgctgggcgccgaggccgtgggcctggtgaaggagtgcaacgacaacaccatgagagccttcacctacagaaccagacagaacttcaagggcttcgacgacaacaacgacgacttcctgaccatggccgagtgccagttcatcatcaagcacgagctggagaacctgagagccaaggacgagaagatgatccccggctacccccaggccaagctgtaccccggcaagagcctgctgagaagactgctgaccagcggcatcgtgatccaggtgttccccctgcacgacagcgaggccctgaagaagctggaggacacctggtacaccagattcgccctgaagtaccagcccatcgacagcatcagaggctacttcggcgagaccatcgccctgtacttcggcttcctggagtacttcaccttcgccctgatccccatggccgtgatcggcctgccctactacctgttcgtgtgggaggactacgacaagtacgtgatcttcgccagcttcaacctgatctggagcaccgtgatcctggagctgtggaagagaggctgcgccaacatgacctacagatggggcaccctgctgatgaagagaaagttcgaggagcccagacccggcttccacggcgtgctgggcatcaacagcatcaccggcaaggaggagcccctgtaccccagctacaagagacagctgagaatctacctggtgagcctgcccttcgtgtgcctgtgcctgtacttcagcctgtacgtgatgatgatctacttcgacatggaggtgtgggccctgggcctgcacgagaacagcggcagcgagtggaccagcgtgctgctgtacgtgcccagcatcatctacgccatcgtgatcgagatcatgaacagactgtacagatacgccgccgagttcctgaccagctgggagaaccacagactggagagcgcctaccagaaccacctgatcctgaaggtgctggtgttcaacttcctgaactgcttcgccagcctgttctacatcgccttcgtgctgaaggacatgaagctgctgagacagagcctggccaccctgctgatcaccagccagatcctgaaccagatcatggagagcttcctgccctactggctgcagagaaagcacggcgtgagagtgaagagaaaggtgcaggccctgaaggccgacatcgacgccaccctgtacgagcaggtgatcctggagaaggagatgggcacctacctgggcaccttcgacgactacctggagctgttcctgcagttcggctacgtgagcctgttcagctgcgtgtaccccctggccgccgccttcgccgtgctgaacaacttcaccgaggtgaacagcgacgccctgaagatgtgcagagtgttcaagagacccttcagcgagcccagcgccaacatcggcgtgtggcagctggccttcgagaccatgagcgtgatcagcgtggtgaccaactgcgccctgatcggcatgagcccccaggtgaacgccgtgttccccgagagcaaggccgacctgatcctgatcgtggtggccgtggaggccgccagctgcaagctggtgagcctgcccagatacagctggagcaccaacagcgtgcccggcaccgtgatcggccccggcgtgtag

SEQ ID NO: 73000 - DNA, 1650 bp, synthetic construct
  misc_feature 1..1650: note = Description of Artificial Sequence: Synthetic coding sequence
  source 1..1650: mol_type = other DNA
atgaaggtgaccctgagcgccctggacaccagcgagagcagcttcacccccctggtggtgatcgagctggcccaggacgtgaaggaggagaccaaggagtggctgaagaacagaatcatcgccaagaagaaggacggcgtgagaagactgctgaccagcggcatcgtgatccaggtgttccccctgcacgacagcgaggccctgaagaagctggaggacacctggtacaccagattcgccctgaagtaccagcccatcgacagcatcagaggctacttcggcgagaccatcgccctgtacttcggcttcctggagtacttcaccttcgccctgatccccatggccgtgatcggcctgccctactacctgttcgtgtgggaggactacgacaagtacgtgatcttcgccagcttcaacctgatctggagcaccgtgatcctggagctgtggaagagaggctgcgccaacatgacctacagatggggcaccctgctgatgaagagaaagttcgaggagcccagacccggcttccacggcgtgctgggcatcaacagcatcaccggcaaggaggagcccctgtaccccagctacaagagacagctgagaatctacctggtgagcctgcccttcgtgtgcctgtgcctgtacttcagcctgtacgtgatgatgatctacttcgacatggaggtgtgggccctgggcctgcacgagaacagcggcagcgagtggaccagcgtgctgctgtacgtgcccagcatcatctacgccatcgtgatcgagatcatgaacagactgtacagatacgccgccgagttcctgaccagctgggagaaccacagactggagagcgcctaccagaaccacctgatcctgaaggtgctggtgttcaacttcctgaactgcttcgccagcctgttctacatcgccttcgtgctgaaggacatgaagctgctgagacagagcctggccaccctgctgatcaccagccagatcctgaaccagatcatggagagcttcctgccctactggctgcagagaaagcacggcgtgagagtgaagagaaaggtgcaggccctgaaggccgacatcgacgccaccctgtacgagcaggtgatcctggagaaggagatgggcacctacctgggcaccttcgacgactacctggagctgttcctgcagttcggctacgtgagcctgttcagctgcgtgtaccccctggccgccgccttcgccgtgctgaacaacttcaccgaggtgaacagcgacgccctgaagatgtgcagagtgttcaagagacccttcagcgagcccagcgccaacatcggcgtgtggcagctggccttcgagaccatgagcgtgatcagcgtggtgaccaactgcgccctgatcggcatgagcccccaggtgaacgccgtgttccccgagagcaaggccgacctgatcctgatcgtggtggccgtggagcacgccctgctggccctgaagttcatcctggccttcgccatccccgacaagcccagacacatccagatgaagctggccagactggagttcgagagcctggaggccctgaagcagcagcagatgaagctggtgaccgagaacctgaaggaggagcccatggagagcggcaaggagaaggccacctag

SEQ ID NO: 73001 - DNA, 2997 bp, synthetic construct
  misc_feature 1..2997: note = Description of Artificial Sequence: Synthetic coding sequence
  source 1..2997: mol_type = other DNA
atgcccgaggacatccccctgctgcccggcagccccagaagactgagcccccaggccggcagcagaggcggccagggccccaagcacggccagcagtgcctgaagatgcccggccccagagcccccggcctgcagggcggcagcaacagagaccccggccagccctgcggcggcgagagcaccagaagcagcagcgtgatcaacaactacctggacgccaacgagcccgtgagcctggaggccagactgagcagaatgcacttccacgacagccagagaaaggtggactacgtgctggcctaccactacagaaagagaggcgtgcacctggcccagggcttccccggccacagcctggccatcgtgagcaacggcgagaccggcaaggagccccacgccggcggccccggcgacatcgagctgggccccctggacgccctggaggaggagagaaaggagcagagagaggagttcgagcacaacctgatggaggccggcctggagctggagaaggacctggagaacaagagccagggcagcatcttcgtgagaatccacgccccctggcaggtgctggccagagaggccgagttcctgaagatcaaggtgcccaccaagaagatgtacgagatcaaggccggcggcagcatcgccaagaagttcagcgccgccctgcagaagctgagcagccacctgcagcccagagtgcccgagcacagcaacaacaagatgaagaacctgagctaccccttcagcagagagaagatgtacctgtacaacatccaggagaaggacaccttcttcgacaacgccaccagaagcagaatcgtgcacgagatcctgaagagaaccgcctgcagcagagccaacaacaccatgggcatcaacagcctgatcgccaacaacatctacgaggccgcctaccccctgcacgacggcgagtacgacagccccgaggacgacatgaacgacagaaagctgctgtaccaggagtgggccagatacggcgtgttctacaagttccagcccatcgacctgatcagaaagtacttcggcgagaagatcggcctgtacttcgcctggctgggcctgtacaccagcttcctgatccccagcagcgtgatcggcgtgatcgtgttcctgtacggctgcgccaccatcgaggaggacatccccagcagagagatgtgcgaccagcagaacgccttcaccatgtgccccctgtgcgacaagagctgcgactactggaacctgagcagcgcctgcggcaccgcccaggccagccacctgttcgacaaccccgccaccgtgttcttcagcatcttcatggccctgtgggccaccatgttcctggagaactggaagagactgcagatgagactgggctacttctgggacctgaccggcatcgaggaggaggaggagagagcccaggagcacagcagacccgagtacgagaccaaggtgagagagaagatgctgaaggagagcaaccagagcgccgtgcagaagctggagaccaacaccaccgagtgcggcgacgaggacgacgaggacaagctgacctggaaggacagattccccggctacctgatgaacttcgccagcatcctgttcatgatcgccctgaccttcagcatcgtgttcggcgtgatcgtgtacagaatcaccaccgccgccgccctgagcctgaacaaggccaccagaagcaacgtgagagtgaccgtgaccgccaccgccgtgatcatcaacctggtggtgatcctgatcctggacgagatctacggcgccgtggccaagtggctgaccaagatcgaggtgcccaagaccgagcagaccttcgaggagagactgatcctgaaggccttcctgctgaagttcgtgaacgcctacagccccatcttctacgtggccttcttcaagggcagattcgtgggcagacccggcagctacgtgtacgtgttcgacggctacagaatggaggagtgcgcccccggcggctgcctgatggagctgtgcatccagctgagcatcatcatgctgggcaagcagctgatccagaacaacatcttcgagatcggcgtgcccaagctgaagaagctgttcagaaagctgaaggacgagaccgaggccggcgagaccgacagcgcccacagcaagcaccccgagcagtgggacctggactacagcctggagccctacaccggcctgacccccgagtacatggagatgatcatccagttcggcttcgtgaccctgttcgtggccagcttccccctggcccccgtgttcgccctgctgaacaacgtgatcgaggtgagactggacgccaagaagttcgtgaccgagctgagaagacccgacgccgtgagaaccaaggacatcggcatctggttcgacatcctgagcggcatcggcaagttcagcgtgatcagcaacgccttcgtgatcgccatcaccagcgacttcatccccagactggtgtaccagtacagctacagccacaacggcaccctgcacggcttcgtgaaccacaccctgagcttcttcaacgtgagccagctgaaggagggcacccagcccgagaacagccagttcgaccaggaggtgcagttctgcagattcaaggactacagagagcccccctgggcccccaacccctacgagttcagcaagcagtactggttcatcctgagcgccagactggccttcgtgatcatcttccagaacctggtgatgttcctgagcgtgctggtggactggatgatccccgacatccccaccgacatcagcgaccagatcaagaaggagaagagcctgctggtggacttcttcctgaaggaggagcacgagaagctgaagctgatggacgagcccgccctgagaagccccggcggcggcgacagaagcagaagcagagccgccagcagcgcccccagcggccagagccagctgggcagcatgatgagcagcggcagccagcacaccaacgtgtag

SEQ ID NO: 73002 - DNA, 3000 bp, synthetic construct
  misc_feature 1..3000: note = Description of Artificial Sequence: Synthetic coding sequence
  source 1..3000: mol_type = other DNA
atgcccgaggacatccccctgctgcccggcagccccagaagactgagcccccaggccggcagcagaggcggccagggccccaagcacggccagcagtgcctgaagatgcccggccccagagcccccggcctgcagggcggcagcaacagagaccccggccagccctgcggcggcgagagcaccagaagcagcagcgtgatcaacaactacctggacgccaacgagcccgtgagcctggaggccagactgagcagaatgcacttccacgacagccagagaaaggtggactacgtgctggcctaccactacagaaagagaggcgtgcacctggcccagggcttccccggccacagcctggccatcgtgagcaacggcgagaccggcaaggagccccacgccggcggccccggcgacatcgagctgggccccctggacgccctggaggaggagagaaaggagcagagagaggagttcgagcacaacctgatggaggccggcctggagctggagaaggacctggagaacaagagccagggcagcatcttcgtgagaatccacgccccctggcaggtgctggccagagaggccgagttcctgaagatcaaggtgcccaccaagaaggagatgtacgagatcaaggccggcggcagcatcgccaagaagttcagcgccgccctgcagaagctgagcagccacctgcagcccagagtgcccgagcacagcaacaacaagatgaagaacctgagctaccccttcagcagagagaagatgtacctgtacaacatccaggagaaggacaccttcttcgacaacgccaccagaagcagaatcgtgcacgagatcctgaagagaaccgcctgcagcagagccaacaacaccatgggcatcaacagcctgatcgccaacaacatctacgaggccgcctaccccctgcacgacggcgagtacgacagccccgaggacgacatgaacgacagaaagctgctgtaccaggagtgggccagatacggcgtgttctacaagttccagcccatcgacctgatcagaaagtacttcggcgagaagatcggcctgtacttcgcctggctgggcctgtacaccagcttcctgatccccagcagcgtgatcggcgtgatcgtgttcctgtacggctgcgccaccatcgaggaggacatccccagcagagagatgtgcgaccagcagaacgccttcaccatgtgccccctgtgcgacaagagctgcgactactggaacctgagcagcgcctgcggcaccgcccaggccagccacctgttcgacaaccccgccaccgtgttcttcagcatcttcatggccctgtgggccaccatgttcctggagaactggaagagactgcagatgagactgggctacttctgggacctgaccggcatcgaggaggaggaggagagagcccaggagcacagcagacccgagtacgagaccaaggtgagagagaagatgctgaaggagagcaaccagagcgccgtgcagaagctggagaccaacaccaccgagtgcggcgacgaggacgacgaggacaagctgacctggaaggacagattccccggctacctgatgaacttcgccagcatcctgttcatgatcgccctgaccttcagcatcgtgttcggcgtgatcgtgtacagaatcaccaccgccgccgccctgagcctgaacaaggccaccagaagcaacgtgagagtgaccgtgaccgccaccgccgtgatcatcaacctggtggtgatcctgatcctggacgagatctacggcgccgtggccaagtggctgaccaagatcgaggtgcccaagaccgagcagaccttcgaggagagactgatcctgaaggccttcctgctgaagttcgtgaacgcctacagccccatcttctacgtggccttcttcaagggcagattcgtgggcagacccggcagctacgtgtacgtgttcgacggctacagaatggaggagtgcgcccccggcggctgcctgatggagctgtgcatccagctgagcatcatcatgctgggcaagcagctgatccagaacaacatcttcgagatcggcgtgcccaagctgaagaagctgttcagaaagctgaaggacgagaccgaggccggcgagaccgacagcgcccacagcaagcaccccgagcagtgggacctggactacagcctggagccctacaccggcctgacccccgagtacatggagatgatcatccagttcggcttcgtgaccctgttcgtggccagcttccccctggcccccgtgttcgccctgctgaacaacgtgatcgaggtgagactggacgccaagaagttcgtgaccgagctgagaagacccgacgccgtgagaaccaaggacatcggcatctggttcgacatcctgagcggcatcggcaagttcagcgtgatcagcaacgccttcgtgatcgccatcaccagcgacttcatccccagactggtgtaccagtacagctacagccacaacggcaccctgcacggcttcgtgaaccacaccctgagcttcttcaacgtgagccagctgaaggagggcacccagcccgagaacagccagttcgaccaggaggtgcagttctgcagattcaaggactacagagagcccccctgggcccccaacccctacgagttcagcaagcagtactggttcatcctgagcgccagactggccttcgtgatcatcttccagaacctggtgatgttcctgagcgtgctggtggactggatgatccccgacatccccaccgacatcagcgaccagatcaagaaggagaagagcctgctggtggacttcttcctgaaggaggagcacgagaagctgaagctgatggacgagcccgccctgagaagccccggcggcggcgacagaagcagaagcagagccgccagcagcgcccccagcggccagagccagctgggcagcatgatgagcagcggcagccagcacaccaacgtgtag

SEQ ID NO: 73003 - DNA, 3012 bp, synthetic construct
  misc_feature 1..3012: note = Description of Artificial Sequence: Synthetic coding sequence
  source 1..3012: mol_type = other DNA
atggccacccccggccccagagacatccccctgctgcccggcagccccagaagactgagcccccaggccggcagcagaggcggccagggccccaagcacggccagcagtgcctgaagatgcccggccccagagcccccggcctgcagggcggcagcaacagagaccccggccagccctgcggcggcgagagcaccagaagcagcagcgtgatcaacaactacctggacgccaacgagcccgtgagcctggaggccagactgagcagaatgcacttccacgacagccagagaaaggtggactacgtgctggcctaccactacagaaagagaggcgtgcacctggcccagggcttccccggccacagcctggccatcgtgagcaacggcgagaccggcaaggagccccacgccggcggccccggcgacatcgagctgggccccctggacgccctggaggaggagagaaaggagcagagagaggagttcgagcacaacctgatggaggccggcctggagctggagaaggacctggagaacaagagccagggcagcatcttcgtgagaatccacgccccctggcaggtgctggccagagaggccgagttcctgaagatcaaggtgcccaccaagaaggagatgtacgagatcaaggccggcggcagcatcgccaagaagttcagcgccgccctgcagaagctgagcagccacctgcagcccagagtgcccgagcacagcaacaacaagatgaagaacctgagctaccccttcagcagagagaagatgtacctgtacaacatccaggagaaggacaccttcttcgacaacgccaccagaagcagaatcgtgcacgagatcctgaagagaaccgcctgcagcagagccaacaacaccatgggcatcaacagcctgatcgccaacaacatctacgaggccgcctaccccctgcacgacggcgagtacgacagccccgaggacgacatgaacgacagaaagctgctgtaccaggagtgggccagatacggcgtgttctacaagttccagcccatcgacctgatcagaaagtacttcggcgagaagatcggcctgtacttcgcctggctgggcctgtacaccagcttcctgatccccagcagcgtgatcggcgtgatcgtgttcctgtacggctgcgccaccatcgaggaggacatccccagcagagagatgtgcgaccagcagaacgccttcaccatgtgccccctgtgcgacaagagctgcgactactggaacctgagcagcgcctgcggcaccgcccaggccagccacctgttcgacaaccccgccaccgtgttcttcagcatcttcatggccctgtgggccaccatgttcctggagaactggaagagactgcagatgagactgggctacttctgggacctgaccggcatcgaggaggaggaggagagagcccaggagcacagcagacccgagtacgagaccaaggtgagagagaagatgctgaaggagagcaaccagagcgccgtgcagaagctggagaccaacaccaccgagtgcggcgacgaggacgacgaggacaagctgacctggaaggacagattccccggctacctgatgaacttcgccagcatcctgttcatgatcgccctgaccttcagcatcgtgttcggcgtgatcgtgtacagaatcaccaccgccgccgccctgagcctgaacaaggccaccagaagcaacgtgagagtgaccgtgaccgccaccgccgtgatcatcaacctggtggtgatcctgatcctggacgagatctacggcgccgtggccaagtggctgaccaagatcgaggtgcccaagaccgagcagaccttcgaggagagactgatcctgaaggccttcctgctgaagttcgtgaacgcctacagccccatcttctacgtggccttcttcaagggcagattcgtgggcagacccggcagctacgtgtacgtgttcgacggctacagaatggaggagtgcgcccccggcggctgcctgatggagctgtgcatccagctgagcatcatcatgctgggcaagcagctgatccagaacaacatcttcgagatcggcgtgcccaagctgaagaagctgttcagaaagctgaaggacgagaccgaggccggcgagaccgacagcgcccacagcaagcaccccgagcagtgggacctggactacagcctggagccctacaccggcctgacccccgagtacatggagatgatcatccagttcggcttcgtgaccctgttcgtggccagcttccccctggcccccgtgttcgccctgctgaacaacgtgatcgaggtgagactggacgccaagaagttcgtgaccgagctgagaagacccgacgccgtgagaaccaaggacatcggcatctggttcgacatcctgagcggcatcggcaagttcagcgtgatcagcaacgccttcgtgatcgccatcaccagcgacttcatccccagactggtgtaccagtacagctacagccacaacggcaccctgcacggcttcgtgaaccacaccctgagcttcttcaacgtgagccagctgaaggagggcacccagcccgagaacagccagttcgaccaggaggtgcagttctgcagattcaaggactacagagagcccccctgggcccccaacccctacgagttcagcaagcagtactggttcatcctgagcgccagactggccttcgtgatcatcttccagaacctggtgatgttcctgagcgtgctggtggactggatgatccccgacatccccaccgacatcagcgaccagatcaagaaggagaagagcctgctggtggacttcttcctgaaggaggagcacgagaagctgaagctgatggacgagcccgccctgagaagccccggcggcggcgacagaagcagaagcagagccgccagcagcgcccccagcggccagagccagctgggcagcatgatgagcagcggcagccagcacaccaacgtgtag

SEQ ID NO: 73004 - DNA, 261 bp, synthetic construct
  misc_feature 1..261: note = Description of Artificial Sequence: Synthetic coding sequence
  source 1..261: mol_type = other DNA
atgttcctgagcgtgctggtggactggatgatccccgacatccccaccgacatcagcgaccagatcaagaaggagaagagcctgctggtggacttcttcctgaaggaggagcacgagaagctgaagctgatggacgagcccgccctgagaagccccggcggcggcgacagaagcagaagcagagccgccagcagcgcccccagcggccagagccagctgggcagcatgatgagcagcggcagccagcacaccaacgtgtag

SEQ ID NO: 73005 - DNA, 3000 bp, synthetic construct
  misc_feature 1..3000: note = Description of Artificial Sequence: Synthetic coding sequence
  source 1..3000: mol_type = other DNA
atgcccgaggacatccccctgctgcccggcagccccagaagactgagcccccaggccggcagcagaggcggccagggccccaagcacggccagcagtgcctgaagatgcccggccccagagcccccggcctgcagggcggcagcaacagagaccccggccagccctgcggcggcgagagcaccagaagcagcagcgtgatcaacaactacctggacgccaacgagcccgtgagcctggaggccagactgagcagaatgcacttccacgacagccagagaaaggtggactacgtgctggcctaccactacagaaagagaggcgtgcacctggcccagggcttccccggccacagcctggccatcgtgagcaacggcgagaccggcaaggagccccacgccggcggccccggcgacatcgagctgggccccctggacgccctggaggaggagagaaaggagcagagagaggagttcgagcacaacctgatggaggccggcctggagctggagaaggacctggagaacaagagccagggcagcatcttcgtgagaatccacgccccctggcaggtgctggccagagaggccgagttcctgaagatcaaggtgcccaccaagaaggagatgtacgagatcaaggccggcggcagcatcgccaagaagttcagcgccgccctgcagaagctgagcagccacctgcagcccagagtgcccgagcacagcaacaacaagatgaagaacctgagctaccccttcagcagagagaagatgtacctgtacaacatccaggagaaggacaccttcttcgacaacgccaccagaagcagaatcgtgcacgagatcctgaagagaaccgcctgcagcagagccaacaacaccatgggcatcaacagcctgatcgccaacaacatctacgaggccgcctaccccctgcacgacggcgagtacgacagccccgaggacgacatgaacgacagaaagctgctgtaccaggagtgggccagatacggcgtgttctacaagttccagcccatcgacctgatcagaaagtacttcggcgagaagatcggcctgtacttcgcctggctgggcctgtacaccagcttcctgatccccagcagcgtgatcggcgtgatcgtgttcctgtacggctgcgccaccatcgaggaggacatccccagcagagagatgtgcgaccagcagaacgccttcaccatgtgccccctgtgcgacaagagctgcgactactggaacctgagcagcgcctgcggcaccgcccaggccagccacctgttcgacaaccccgccaccgtgttcttcagcatcttcatggccctgtgggccaccatgttcctggagaactggaagagactgcagatgagactgggctacttctgggacctgaccggcatcgaggaggaggagcccagagtgcaggagcacagcagacccgagtacgagaccaaggtgagagagaagatgctgaaggagagcaaccagagcgccgtgcagaagctggagaccaacaccaccgagtgcggcgacgaggacgacgaggacaagctgacctggaaggacagattccccggctacctgatgaacttcgccagcatcctgttcatgatcgccctgaccttcagcatcgtgttcggcgtgatcgtgtacagaatcaccaccgccgccgccctgagcctgaacaaggccaccagaagcaacgtgagagtgaccgtgaccgccaccgccgtgatcatcaacctggtggtgatcctgatcctggacgagatctacggcgccgtggccaagtggctgaccaagatcgaggtgcccaagaccgagcagaccttcgaggagagactgatcctgaaggccttcctgctgaagttcgtgaacgcctacagccccatcttctacgtggccttcttcaagggcagattcgtgggcagacccggcagctacgtgtacgtgttcgacggctacagaatggaggagtgcgcccccggcggctgcctgatggagctgtgcatccagctgagcatcatcatgctgggcaagcagctgatccagaacaacatcttcgagatcggcgtgcccaagctgaagaagctgttcagaaagctgaaggacgagaccgaggccggcgagaccgacagcgcccacagcaagcaccccgagcagtgggacctggactacagcctggagccctacaccggcctgacccccgagtacatggagatgatcatccagttcggcttcgtgaccctgttcgtggccagcttccccctggcccccgtgttcgccctgctgaacaacgtgatcgaggtgagactggacgccaagaagttcgtgaccgagctgagaagacccgacgccgtgagaaccaaggacatcggcatctggttcgacatcctgagcggcatcggcaagttcagcgtgatcagcaacgccttcgtgatcgccatcaccagcgacttcatccccagactggtgtaccagtacagctacagccacaacggcaccctgcacggcttcgtgaaccacaccctgagcttcttcaacgtgagccagctgaaggagggcacccagcccgagaacagccagttcgaccaggaggtgcagttctgcagattcaaggactacagagagcccccctgggcccccaacccctacgagttcagcaagcagtactggttcatcctgagcgccagactggccttcgtgatcatcttccagaacctggtgatgttcctgagcgtgctggtggactggatgatccccgacatccccaccgacatcagcgaccagatcaagaaggagaagagcctgctggtggacttcttcctgaaggaggagcacgagaagctgaagctgatggacgagcccgccctgagaagccccggcggcggcgacagaagcagaagcagagccgccagcagcgcccccagcggccagagccagctgggcagcatgatgagcagcggcagccagcacaccaacgtgtag

SEQ ID NO: 73006 - DNA, 2742 bp, synthetic construct
  misc_feature 1..2742: note = Description of Artificial Sequence: Synthetic coding sequence
  source 1..2742: mol_type = other DNA
atgggcgaccccgacctgctggaggtgctggccgaggagggcgagaaggtgaacaagcacatcgactacagcttccagatgagcgagcagagcctgagcagcagagagaccagcttcctgatcaacgaggagaccatgcccgccaagagattcaacctgttcctgagaagaagactgatgttccagaagaaccagcagagcaaggacagcatcttcttcagagacggcatcagacagatcgacttcgtgctgagctacgtggacgacgtgaagaaggacgccgagctgaaggccgagagaagaaaggagttcgagaccaacctgagaaagaccggcctggagctggagatcgaggacaagagagacagcgaggacggcagaacctacttcgtgaagatccacgccccctgggaggtgctggtgacctacgccgaggtgctgggcatcaagatgcccatcaaggagagcgacatccccagacccaagcacacccccatcagctacgtgctgggccccgtgagactgcccctgagcgtgaagtacccccaccccgagtacttcaccgcccagttcagcagacacagacaggagctgttcctgatcgaggaccaggccaccttcttccccagcagcagcagaaacagaatcgtgtactacatcctgagcagatgccccttcggcatcgaggacggcaagaagagattcggcatcgagagactgctgaacagcaacacctacagcagcgcctaccccctgcacgacggccagtactggaagcccagcgagccccccaaccccaccaacgagagatacaccctgcaccagaactgggccagattcagctacttctacaaggagcagcccctggacctgatcaagaactactacggcgagaagatcggcatctacttcgtgttcctgggcttctacaccgagatgctgttcttcgccgccgtggtgggcctggcctgcttcatctacggcctgctgagcatggagcacaacaccagcagcaccgagatctgcgaccccgagatcggcggccagatgatcatgtgccccctgtgcgaccaggtgtgcgactactggagactgaacagcacctgcctggccagcaagttcagccacctgttcgacaacgagagcaccgtgttcttcgccatcttcatgggcatctgggtgaccctgttcctggagttctggaagcagagacaggccagactggagtacgagtgggacctggtggacttcgaggaggagcagcagcagctgcagctgagacccgagttcgaggccatgtgcaagcacagaaagctgaacgccgtgaccaaggagatggagccctacatgcccctgtacaccagaatcccctggtacttcctgagcggcgccaccgtgaccctgtggatgagcctggtggtgaccagcatggtggccgtgatcgtgtacagactgagcgtgttcgccaccttcgccagcttcatggagagcgacgccagcctgaagcaggtgaagagcttcctgaccccccagatcaccaccagcctgaccggcagctgcctgaacttcatcgtgatcctgatcctgaacttcttctacgagaagatcagcgcctggatcaccaagatggagatccccagaacctaccaggagtacgagagcagcctgaccctgaagatgttcctgttccagttcgtgaacttctacagcagctgcttctacgtggccttcttcaagggcaagttcgtgggctaccccggcaagtacacctacctgttcaacgagtggagaagcgaggagtgcgaccccggcggctgcctgatcgagctgaccacccagctgaccatcatcatgaccggcaagcagatcttcggcaacatcaaggaggccatctaccccctggccctgaactggtggagaagaagaaaggccagaaccaacagcgagaagctgtacagcagatgggagcaggaccacgacctggagagcttcggccccctgggcctgttctacgagtacctggagaccgtgacccagttcggcttcgtgaccctgttcgtggccagcttccccctggcccccctgctggccctgatcaacaacatcgtggagatcagagtggacgcctggaagctgaccacccagtacagaagaaccgtggccagcaaggcccacagcatcggcgtgtggcaggacatcctgtacggcatggccgtgctgagcgtggccaccaacgccttcatcgtggccttcaccagcgacatcatccccagactggtgtactactacgcctacagcaccaacgccacccagcccatgaccggctacgtgaacaacagcctgagcgtgttcctgatcgccgacttccccaaccacaccgcccccagcgagaagagagacttcatcacctgcagatacagagactacagatacccccccgacgacgagaacaagtacttccacaacatgcagttctggcacgtgctggccgccaagatgaccttcatcatcgtgatggagcacgtggtgttcctggtgaagttcctgctggcctggatgatccccgacgtgcccaaggacgtggtggagagaatcaagagagagaagctgatgaccatcaagatcctgcacgacttcgagctgaacaagctgaaggagaacctgggcatcaacagcaacgagttcgccaagcacgtgatgatcgaggagaacaaggcccagctggccaagagcaccctgtag

SEQ ID NO: 73007 - DNA, 2733 bp, synthetic construct
  misc_feature 1..2733: note = Description of Artificial Sequence: Synthetic coding sequence
  source 1..2733: mol_type = other DNA
atgaagaagatgagcagaaacgtgctgctgcagatggaggaggaggaggacgacgacgacggcgacatcgtgctggagaacctgggccagaccatcgtgcccgacctgggcagcctggagagccagcacgacttcagaacccccgagttcgaggagttcaacggcaagcccgacagcctgttcttcaacgacggccagagaagaatcgacttcgtgctggtgtacgaggacgagagcagaaaggagaccaacaagaagggcaccaacgagaagcagagaagaaagagacaggcctacgagagcaacctgatctgccacggcctgcagctggaggccaccagaagcgtgctggacgacaagctggtgttcgtgaaggtgcacgccccctgggaggtgctgtgcacctacgccgagatcatgcacatcaagctgcccctgaagcccaacgacctgaagaacagaagcagcgccttcggcaccctgaactggttcaccaaggtgctgagcgtggacgagagcatcatcaagcccgagcaggagttcttcaccgcccccttcgagaagaacagaatgaacgacttctacatcgtggacagagacgccttcttcaaccccgccaccagaagcagaatcgtgtacttcatcctgagcagagtgaagtaccaggtgatcaacaacgtgagcaagttcggcatcaacagactggtgaacagcggcatctacaaggccgccttccccctgcacgactgcaagttcagaagacagagcgaggaccccagctgccccaacgagagatacctgctgtacagagagtgggcccaccccagaagcatctacaagaagcagcccctggacctgatcagaaagtactacggcgagaagatcggcatctacttcgcctggctgggctactacacccagatgctgctgctggccgccgtggtgggcgtggcctgcttcctgtacggctacctgaaccaggacaactgcacctggagcaaggaggtgtgccaccccgacatcggcggcaagatcatcatgtgcccccagtgcgacagactgtgccccttctggaagctgaacatcacctgcgagagcagcaagaagctgtgcatcttcgacagcttcggcaccctggtgttcgccgtgttcatgggcgtgtgggtgaccctgttcctggagttctggaagagaagacaggccgagctggagtacgagtgggacaccgtggagctgcagcaggaggagcaggccagacccgagtacgaggccagatgcacccacgtggtgatcaacgagatcacccaggaggaggagagaatccccttcaccgcctggggcaagtgcatcagaatcaccctgtgcgccagcgccgtgttcttctggatcctgctgatcatcgccagcgtgatcggcatcatcgtgtacagactgagcgtgttcatcgtgttcagcgccaagctgcccaagaacatcaacggcaccgaccccatccagaagtacctgaccccccagaccgccaccagcatcaccgccagcatcatcagcttcatcatcatcatgatcctgaacaccatctacgagaaggtggccatcatgatcaccaacttcgagctgcccagaacccagaccgactacgagaacagcctgaccatgaagatgttcctgttccagttcgtgaactactacagcagctgcttctacatcgccttcttcaagggcaagttcgtgggctaccccggcgaccccgtgtactggctgggcaagtacagaaacgaggagtgcgaccccggcggctgcctgctggagctgaccacccagctgaccatcatcatgggcggcaaggccatctggaacaacatccaggaggtgctgctgccctggatcatgaacctgatcggcagattccacagagtgagcggcagcgagaagatcacccccagatgggagcaggactaccacctgcagcccatgggcaagctgggcctgttctacgagtacctggagatgatcatccagttcggcttcgtgaccctgttcgtggccagcttccccctggcccccctgctggccctggtgaacaacatcctggagatcagagtggacgcctggaagctgaccacccagttcagaagactggtgcccgagaaggcccaggacatcggcgcctggcagcccatcatgcagggcatcgccatcctggccgtggtgaccaacgccatgatcatcgccttcaccagcgacatgatccccagactggtgtactactggagcttcagcgtgcccccctacggcgaccacaccagctacaccatggagggctacatcaacaacaccctgagcatcttcaaggtggccgacttcaagaacaagagcaagggcaacccctacagcgacctgggcaaccacaccacctgcagatacagagacttcagatacccccccggccacccccaggagtacaagcacaacatctactactggcacgtgatcgccgccaagctggccttcatcatcgtgatggagcacgtgatctacagcgtgaagttcttcatcagctacgccatccccgacgtgagcaagagaaccaagagcaagatccagagagagaagtacctgacccagaagctgctgcacgagaaccacctgaaggacatgaccaagaacatgggcgtgatcgccgagagaatgatcgaggccgtggacaacaacctgagacccaagagcgagtag

SEQ ID NO: 73008 - DNA, 2790 bp, synthetic construct
  misc_feature 1..2790: note = Description of Artificial Sequence: Synthetic coding sequence
  source 1..2790: mol_type = other DNA
atgaagaagatgagcagaaacgtgctgctgcagatggaggaggaggaggacgacgacgacggcgacatcgtgctggagaacctgggccagaccatcgtgcccgacctgggcagcctggagagccagcacgacttcagaacccccgagttcgaggagttcaacggcaagcccgacagcctgttcttcaacgacggccagagaagaatcgacttcgtgctggtgtacgaggacgagagcagaaaggagaccaacaagaagggcaccaacgagaagcagagaagaaagagacaggcctacgagagcaacctgatctgccacggcctgcagctggaggccaccagaagcgtgctggacgacaagctggtgttcgtgaaggtgcacgccccctgggaggtgctgtgcacctacgccgagatcatgcacatcaagctgcccctgaagcccaacgacctgaagaacagaagcagcgccttcggcaccctgaactggttcaccaaggtgctgagcgtggacgagagcatcatcaagcccgagcaggagttcttcaccgcccccttcgagaagaacagaatgaacgacttctacatcgtggacagagacgccttcttcaaccccgccaccagaagcagaatcgtgtacttcatcctgagcagagtgaagtaccaggtgatcaacaacgtgagcaagttcggcatcaacagactggtgaacagcggcatctacaaggccgccttccccctgcacgactgcaagttcagaagacagagcgaggaccccagctgccccaacgagagatacctgctgtacagagagtgggcccaccccagaagcatctacaagaagcagcccctggacctgatcagaaagtactacggcgagaagatcggcatctacttcgcctggctgggctactacacccagatgctgctgctggccgccgtggtgggcgtggcctgcttcctgtacggctacctgaaccaggacaactgcacctggagcaaggaggtgtgccaccccgacatcggcggcaagatcatcatgtgcccccagtgcgacagactgtgccccttctggaagctgaacatcacctgcgagagcagcaagaagctgtgcatcttcgacagcttcggcaccctggtgttcgccgtgttcatgggcgtgtgggtgaccctgttcctggagttctggaagagaagacaggccgagctggagtacgagtgggacaccgtggagctgcagcaggaggagcaggccagacccgagtacgaggccagatgcacccacgtggtgatcaacgagatcacccaggaggaggagagaatccccttcaccgcctggggcaagtgcatcagaatcaccctgtgcgccagcgccgtgttcttctggatcctgctgatcatcgccagcgtgatcggcatcatcgtgtacagactgagcgtgttcatcgtgttcagcgccaagctgcccaagaacatcaacggcaccgaccccatccagaagtacctgaccccccagaccgccaccagcatcaccgccagcatcatcagcttcatcatcatcatgatcctgaacaccatctacgagaaggtggccatcatgatcaccaacttcgagctgcccagaacccagaccgactacgagaacagcctgaccatgaagatgttcctgttccagttcgtgaactactacagcagctgcttctacatcgccttcttcaagggcaagttcgtgggctaccccggcgaccccgtgtactggctgggcaagtacagaaacgaggagtgcgaccccggcggctgcctgctggagctgaccacccagctgaccatcatcatgggcggcaaggccatctggaacaacatccaggaggtgctgctgccctggatcatgaacctgatcggcagattccacagagtgagcggcagcgagaagatcacccccagatgggagcaggactaccacctgcagcccatgggcaagctgggcctgttctacgagtacctggagatgatcatccagttcggcttcgtgaccctgttcgtggccagcttccccctggcccccctgctggccctggtgaacaacatcctggagatcagagtggacgcctggaagctgaccacccagttcagaagactggtgcccgagaaggcccaggacatcggcgcctggcagcccatcatgcagggcatcgccatcctggccgtggtgaccaacgccatgatcatcgccttcaccagcgacatgatccccagactggtgtactactggagcttcagcgtgcccccctacggcgaccacaccagctacaccatggagggctacatcaacaacaccctgagcatcttcaaggtggccgacttcaagaacaagagcaagggcaacccctacagcgacctgggcaaccacaccacctgcagatacagagacttcagatacccccccggccacccccaggagtacaagcacaacatctactactggcacgtgatcgccgccaagctggccttcatcatcgtgatggagtacctggccctgctgcccagactgggccacagcggcatgatcctggcccactgcaacctgagactgcccgtggactgctgcatgtgctacagattcgtggacgagatcagactgctggagcagctgaccagcgacttcatcgacagcctgtactacatcttcagcatcagcatcatcagcatcttcttcagcgtgaccttcttcttcctgctgctgagcctgggccccaccccctgcttcagcgtgagcaacttcctgagctag

SEQ ID NO: 73009 - DNA, 2790 bp, synthetic construct; identical to SEQ ID NO: 73008
  misc_feature 1..2790: note = Description of Artificial Sequence: Synthetic coding sequence
  source 1..2790: mol_type = other DNA

SEQ ID NO: 73010 - DNA, 2679 bp, synthetic construct
  misc_feature 1..2679: note = Description of Artificial Sequence: Synthetic coding sequence
  source 1..2679: mol_type = other DNA
atgttctgcgccgccgtgctggagaacctgggccagaccatcgtgcccgacctgggcagcctggagagccagcacgacttcagaacccccgagttcgaggagttcaacggcaagcccgacagcctgttcttcaacgacggccagagaagaatcgacttcgtgctggtgtacgaggacgagagcagaaaggagaccaacaagaagggcaccaacgagaagcagagaagaaagagacaggcctacgagagcaacctgatctgccacggcctgcagctggaggccaccagaagcgtgctggacgacaagctggtgttcgtgaaggtgcacgccccctgggaggtgctgtgcacctacgccgagatcatgcacatcaagctgcccctgaagcccaacgacctgaagaacagaagcagcgccttcggcaccctgaactggttcaccaaggtgctgagcgtggacgagagcatcatcaagcccgagcaggagttcttcaccgcccccttcgagaagaacagaatgaacgacttctacatcgtggacagagacgccttcttcaaccccgccaccagaagcagaatcgtgtacttcatcctgagcagagtgaagtaccaggtgatcaacaacgtgagcaagttcggcatcaacagactggtgaacagcggcatctacaaggccgccttccccctgcacgactgcaagttcagaagacagagcgaggaccccagctgccccaacgagagatacctgctgtacagagagtgggcccaccccagaagcatctacaagaagcagcccctggacctgatcagaaagtactacggcgagaagatcggcatctacttcgcctggctgggctactacacccagatgctgctgctggccgccgtggtgggcgtggcctgcttcctgtacggctacctgaaccaggacaactgcacctggagcaaggaggtgtgccaccccgacatcggcggcaagatcatcatgtgcccccagtgcgacagactgtgccccttctggaagctgaacatcacctgcgagagcagcaagaagctgtgcatcttcgacagcttcggcaccctggtgttcgccgtgttcatgggcgtgtgggtgaccctgttcctggagttctggaagagaagacaggccgagctggagtacgagtgggacaccgtggagctgcagcaggaggagcaggccagacccgagtacgaggccagatgcacccacgtggtgatcaacgagatcacccaggaggaggagagaatccccttcaccgcctggggcaagtgcatcagaatcaccctgtgcgccagcgccgtgttcttctggatcctgctgatcatcgccagcgtgatcggcatcatcgtgtacagactgagcgtgttcatcgtgttcagcgccaagctgcccaagaacatcaacggcaccgaccccatccagaagtacctgaccccccagaccgccaccagcatcaccgccagcatcatcagcttcatcatcatcatgatcctgaacaccatctacgagaaggtggccatcatgatcaccaacttcgagctgcccagaacccagaccgactacgagaacagcctgaccatgaagatgttcctgttccagttcgtgaactactacagcagctgcttctacatcgccttcttcaagggcaagttcgtgggctaccccggcgaccccgtgtactggctgggcaagtacagaaacgaggagtgcgaccccggcggctgcctgctggagctgaccacccagctgaccatcatcatgggcggcaaggccatctggaacaacatccaggaggtgctgctgccctggatcatgaacctgatcggcagattccacagagtgagcggcagcgagaagatcacccccagatgggagcaggactaccacctgcagcccatgggcaagctgggcctgttctacgagtacctggagatgatcatccagttcggcttcgtgaccctgttcgtggccagcttccccctggcccccctgctggccctggtgaacaacatcctggagatcagagtggacgcctggaagctgaccacccagttcagaagactggtgcccgagaaggcccaggacatcggcgcctggcagcccatcatgcagggcatcgccatcctggccgtggtgaccaacgccatgatcatcgccttcaccagcgacatgatccccagactggtgtactactggagcttcagcgtgcccccctacggcgaccacaccagctacaccatggagggctacatcaacaacaccctgagcatcttcaaggtggccgacttcaagaacaagagcaagggcaacccctacagcgacctgggcaaccacaccacctgcagatacagagacttcagatacccccccggccacccccaggagtacaagcacaacatctactactggcacgtgatcgccgccaagctggccttcatcatcgtgatggagcacgtgatctacagcgtgaagttcttcatcagctacgccatccccgacgtgagcaagagaaccaagagcaagatccagagagagaagtacctgacccagaagctgctgcacgagaaccacctgaaggacatgaccaagaacatgggcgtgatcgccgagagaatgatcgaggccgtggacaacaacctgagacccaagagcgagtag

SEQ ID NO: 73011 - DNA, 2796 bp, synthetic construct
  misc_feature 1..2796: note = Description of Artificial Sequence: Synthetic coding sequence
  source 1..2796: mol_type = other DNA
atgaagaagatgagcagaaacgtgctgctgcagatggaggaggaggaggacgacgacgacggcgacatcggcgacgtgcccgccagcagaagacccttcctgaccccccacacccacctgcccagcagcctggtgctggagaacctgggccagaccatcgtgcccgacctgggcagcctggagagccagcacgacttcagaacccccgagttcgaggagttcaacggcaagcccgacagcctgttcttcaacgacggccagagaagaatcgacttcgtgctggtgtacgaggacgagagcagaaaggagaccaacaagaagggcaccaacgagaagcagagaagaaagagacaggcctacgagagcaacctgatctgccacggcctgcagctggaggccaccagaagcgtgctggacgacaagctggtgttcgtgaaggtgcacgccccctgggaggtgctgtgcacctacgccgagatcatgcacatcaagctgcccctgaagcccaacgacctgaagaacagaagcagcgccttcggcaccctgaactggttcaccaaggtgctgagcgtggacgagagcatcatcaagcccgagcaggagttcttcaccgcccccttcgagaagaacagaatgaacgacttctacatcgtggacagagacgccttcttcaaccccgccaccagaagcagaatcgtgtacttcatcctgagcagagtgaagtaccaggtgatcaacaacgtgagcaagttcggcatcaacagactggtgaacagcggcatctacaaggccgccttccccctgcacgactgcaagttcagaagacagagcgaggaccccagctgccccaacgagagatacctgctgtacagagagtgggcccaccccagaagcatctacaagaagcagcccctggacctgatcagaaagtactacggcgagaagatcggcatctacttcgcctggctgggctactacacccagatgctgctgctggccgccgtggtgggcgtggcctgcttcctgtacggctacctgaaccaggacaactgcacctggagcaaggaggtgtgccaccccgacatcggcggcaagatcatcatgtgcccccagtgcgacagactgtgccccttctggaagctgaacatcacctgcgagagcagcaagaagctgtgcatcttcgacagcttcggcaccctggtgttcgccgtgttcatgggcgtgtgggtgaccctgttcctggagttctggaagagaagacaggccgagctggagtacgagtgggacaccgtggagctgcagcaggaggagcaggccagacccgagtacgaggccagatgcacccacgtggtgatcaacgagatcacccaggaggaggagagaatccccttcaccgcctggggcaagtgcatcagaatcaccctgtgcgccagcgccgtgttcttctggatcctgctgatcatcgccagcgtgatcggcatcatcgtgtacagactgagcgtgttcatcgtgttcagcgccaagctgcccaagaacatcaacggcaccgaccccatccagaagtacctgaccccccagaccgccaccagcatcaccgccagcatcatcagcttcatcatcatcatgatcctgaacaccatctacgagaaggtggccatcatgatcaccaacttcgagctgcccagaacccagaccgactacgagaacagcctgaccatgaagatgttcctgttccagttcgtgaactactacagcagctgcttctacatcgccttcttcaagggcaagttcgtgggctaccccggcgaccccgtgtactggctgggcaagtacagaaacgaggagtgcgaccccggcggctgcctgctggagctgaccacccagctgaccatcatcatgggcggcaaggccatctggaacaacatccaggaggtgctgctgccctggatcatgaacctgatcggcagattccacagagtgagcggcagcgagaagatcacccccagatgggagcaggactaccacctgcagcccatgggcaagctgggcctgttctacgagtacctggagatgatcatccagttcggcttcgtgaccctgttcgtggccagcttccccctggcccccctgctggccctggtgaacaacatcctggagatcagagtggacgcctggaagctgaccacccagttcagaagactggtgcccgagaaggcccaggacatcggcgcctggcagcccatcatgcagggcatcgccatcctggccgtggtgaccaacgccatgatcatcgccttcaccagcgacatgatccccagactggtgtactactggagcttcagcgtgcccccctacggcgaccacaccagctacaccatggagggctacatcaacaacaccctgagcatcttcaaggtggccgacttcaagaacaagagcaagggcaacccctacagcgacctgggcaaccacaccacctgcagatacagagacttcagatacccccccggccacccccaggagtacaagcacaacatctactactggcacgtgatcgccgccaagctggccttcatcatcgtgatggagcacgtgatctacagcgtgaagttcttcatcagctacgccatccccgacgtgagcaagagaaccaagagcaagatccagagagagaagtacctgacccagaagctgctgcacgagaaccacctgaaggacatgaccaagaacatgggcgtgatcgccgagagaatgatcgaggccgtggacaacaacctgagacccaagagcgagtag

SEQ ID NO: 73012 - DNA, 501 bp, synthetic construct
  misc_feature 1..501: note = Description of Artificial Sequence: Synthetic coding sequence
  source 1..501: mol_type = other DNA
atgatgctgcacagcgccctgggcctgtgcctgctgctggtgaccgtgagcagcaacctggccatcgccatcaagaaggagaagagacccccccagaccctgagcagaggctggggcgacgacatcacctgggtgcagacctacgaggagggcctgttctacgcccagaagagcaagaagcccctgatggtgatccaccacctggaggactgccagtacagccaggccctgaagaaggtgttcgcccagaacgaggagatccaggagatggcccagaacaagttcatcatgctgaacctgatgcacgagaccaccgacaagaacctgagccccgacggccagtacgtgcccagaatcatgttcgtggaccccagcctgaccgtgagagccgacatcgccggcagatacagcaacagactgtacacctacgagcccagagacctgcccctgctgatcgagaacatgaagaaggccctgagactgatccagagcgagctgtag

SEQ ID NO: 73013 - DNA, 453 bp, synthetic construct
  misc_feature 1..453: note = Description of Artificial Sequence: Synthetic coding sequence
  source 1..453: mol_type = other DNA
atgggcgccgccgtgttcttcggctgcaccttcgtggccttcggccccgccttcgccctgttcctgatcaccgtggccggcgaccccctgagagtgatcatcctggtggccggcaaggccgacgagggcctggccagcctgagcgaggacggcagaagccccatcagcatcagacagatggcctacgtgagcggcctgagcttcggcatcatcagcggcgtgttcagcgtgatcaacatcctggccgacgccctgggccccggcgtggtgggcatccacggcgacagcccctactacttcctgaccagcgccttcctgaccgccgccatcatcctgctgcacaccttctggggcgtggtgttcttcgacgcctgcgagagaagaagatactgggccctgggcctggtggtgggcagccacctgctgaccagcggcctgaccttcctgaactag

SEQ ID NO: 73014 - DNA, 744 bp, synthetic construct
  misc_feature 1..744: note = Description of Artificial Sequence: Synthetic coding sequence
  source 1..744: mol_type = other DNA
atgggcgccgccgtgttcttcggctgcaccttcgtggccttcggccccgccttcgccctgttcctgatcaccgtggccggcgaccccctgagagtgatcatcctggtggccggcgccttcttctggctggtgagcctgctgctggccagcgtggtgtggttcatcctggtgcacgtgaccgacagaagcgacgccagactgcagtacggcctgctgatcttcggcgccgccgtgagcgtgctgctgcaggaggtgttcagattcgcctactacaagctgctgaagaaggccgacgagggcctggccagcctgagcgaggacggcagaagccccatcagcatcagacagatggcctacgtgagcggcctgagcttcggcatcatcagcggcgtgttcagcgtgatcaacatcctggccgacgccctgggccccggcgtggtgggcatccacggcgacagcccctactacttcctgaccagcgccttcctgaccgccgccatcatcctgctgcacaccttctggggcgtggtgttcttcgacgcctgcgagagaagaagatactgggccctgggcctggtggtgggcagccacctgctgaccagcggcctgaccttcctgaacccctggtacgaggccagcctgctgcccatctacgccgtgaccgtgagcatgggcctgtgggccttcatcaccgccggcggcagcctgagaagcatccagagaagcctgctgtgcaaggactag

SEQ ID NO: 73015 - DNA, 798 bp, synthetic construct
  misc_feature 1..798: note = Description of Artificial Sequence: Synthetic coding sequence
  source 1..798: mol_type = other DNA
atgggcgccgccgtgttcttcggctgcaccttcgtggccttcggccccgccttcgccctgttcctgatcaccgtggccggcgaccccctgagagtgatcatcctggtggccggcgccttcttctggctggtgagcctgctgctggccagcgtggtgtggttcatcctggtgcacgtgaccgacagaagcgacgccagactgcagtacggcctgctgatcttcggcgccgccgtgagcgtgctgctgcaggaggtgttcagattcgcctactacaagctgctgaagaaggccgacgagggcctggccagcctgagcgaggacggcagaagccccatcagcatcagacagatggcctacgtgagcggcctgagcttcggcatcatcagcggcgtgttcagcgtgatcaacatcctggccgacgccctgggccccggcgtggtgggcatccacggcgacagcccctactacttcctgaccagcgccttcctgaccgccgccatcatcctgctgcacaccttctggggcgtggtgttcttcgacgcctgcgagagaagaagatactgggccctgggcctggtggtgggcagccacctgctgaccagcggcctgaccttcctgaacccctggtacgaggccagcctgctgcccatctacgccgtgaccgtgagcatgggcctgtgggccttcatcaccgccggcggcagcctgagaagcatccagagaagcctgctgtgcagaagacaggaggacagcagagtgatggtgtacagcgccctgagaatcccccccgaggactag

SEQ ID NO: 73016 - DNA, 588 bp, synthetic construct
  misc_feature 1..588: note = Description of Artificial Sequence: Synthetic coding sequence
  source 1..588: mol_type = other DNA
atgggcgccgccgtgttcttcggctgcaccttcgtggccttcggccccgccttcgccctgttcctgatcaccgtggccggcgaccccctgagagtgatcatcctggtggccggcagatgcagcgccctgcccaccaccagctgcctgatcagcggcctgagcttcggcatcatcagcggcgtgttcagcgtgatcaacatcctggccgacgccctgggccccggcgtggtgggcatccacggcgacagcccctactacttcctgaccagcgccttcctgaccgccgccatcatcctgctgcacaccttctggggcgtggtgttcttcgacgcctgcgagagaagaagatactgggccctgggcctggtggtgggcagccacctgctgaccagcggcctgaccttcctgaacccctggtacgaggccagcctgctgcccatctacgccgtgaccgtgagcatgggcctgtgggccttcatcaccgccggcggcagcctgagaagcatccagagaagcctgctgtgcagaagacaggaggacagcagagtgatggtgtacagcgccctgagaatcccccccgaggactag

SEQ ID NO: 73017 - DNA, 774 bp, synthetic construct
  misc_feature 1..774: note = Description of Artificial Sequence: Synthetic coding sequence
  source 1..774: mol_type = other DNA
atgaccgccgccgtgttcttcggctgcgccttcatcgccttcggccccgccctggccctgtacgtgttcaccatcgccaccgagcccctgagaatcatcttcctgatcgccggcgccttcttctggctggtgagcctgctgatcagcagcctggtgtggttcatggccagagtgatcatcgacaacaaggacggccccacccagaagtacctgctgatcttcggcgccttcgtgagcgtgtacatccaggagatgttcagattcgcctactacaagctgctgaagaaggccagcgagggcctgaagagcatcaaccccggcgagaccgcccccagcatgagactgctggcctacgtgagcggcctgggcttcggcatcatgagcggcgtgttcagcttcgtgaacaccctgagcgacagcctgggccccggcaccgtgggcatccacggcgacagcccccagttcttcctgtacagcgccttcatgaccctggtgatcatcctgctgcacgtgttctggggcatcgtgttcttcgacggctgcgagaagaagaagtggggcatcctgctgatcgtgctgctgacccacctgctggtgagcgcccagaccttcatcagcagctactacggcatcaacctggccagcgccttcatcatcctggtgctgatgggcacctgggccttcctggccgccggcggcagctgcagaagcctgaagctgtgcctgctgtgccaggacaagaacttcctgctgtacaaccagagaagcagatag

SEQ ID NO: 73018 - DNA, 246 bp, synthetic construct
  misc_feature 1..246: note = Description of Artificial Sequence: Synthetic coding sequence
  source 1..246: mol_type = other DNA
atgaccgccgccgtgttcttcggctgcgccttcatcgccttcggccccgccctggccctgtacgtgttcaccatcgccaccgagcccctgagaatcatcttcctgatcgccggcagaagagtggagacctgcaagaacaccgaggcccccgactgcgccagccccagcggcagcctgagcttcctgctggtgggcgtgagcaccgacttcgtgccctgcctggtgcacggcaagagccactactag

SEQ ID NO: 73019 - DNA, 651 bp, synthetic construct
  misc_feature 1..651: note = Description of Artificial Sequence: Synthetic coding sequence
  source 1..651: mol_type = other DNA
atgaccgccgccgtgttcttcggctgcgccttcatcgccttcggccccgccctggccctgtacgtgttcaccatcgccaccgagcccctgagaatcatcttcctgatcgccggcgccttcttctggctggtgagcctgctgatcagcagcctggtgtggttcatggccagagtgatcatcgacaacaaggacggccccacccagaagtacctgctgatcttcggcgccttcgtgagcgtgtacatccaggagatgttcagattcgcctactacaagctgctgaagaaggccagcgagggcctgaagagcatcaaccccggcgagaccgcccccagcatgagactgctggcctacgccttcatgaccctggtgatcatcctgctgcacgtgttctggggcatcgtgttcttcgacggctgcgagaagaagaagtggggcatcctgctgatcgtgctgctgacccacctgctggtgagcgcccagaccttcatcagcagctactacggcatcaacctggccagcgccttcatcatcctggtgctgatgggcacctgggccttcctggccgccggcggcagctgcagaagcctgaagctgtgcctgctgtgccaggacaagaacttcctgctgtacaaccagagaagcagatag

SEQ ID NO: 73020 - DNA, 1695 bp, synthetic construct
  misc_feature 1..1695: note = Description of Artificial Sequence: Synthetic coding sequence
  source 1..1695: mol_type = other DNA
atggccaccgccgagagaagagccctgggcatcggcttccagtggctgagcctggccaccctggtgctgatctgcgccggccagggcggcagaagagaggacggcggccccgcctgctacggcggcttcgacctgtacttcatcctggacaagagcggcagcgtgctgcaccactggaacgagatctactacttcgtggagcagctggcccacaagttcatcagcccccagctgagaatgagcttcatcgtgttcagcaccagaggcaccaccctgatgaagctgaccgaggacagagagcagatcagacagggcctggaggagctgcagaaggtgctgcccggcggcgacacctacatgcacgagggcttcgagagagccagcgagcagatctactacgagaacagacagggctacagaaccgccagcgtgatcatcgccctgaccgacggcgagctgcacgaggacctgttcttctacagcgagagagaggccaacagaagcagagacctgggcgccatcgtgtactgcgtgggcgtgaaggacttcaacgagacccagctggccagaatcgccgacagcaaggaccacgtgttccccgtgaacgacggcttccaggccctgcagggcatcatccacagcatcctgaagaagagctgcatcgagatcctggccgccgagcccagcaccatctgcgccggcgagagcttccaggtggtggtgagaggcaacggcttcagacacgccagaaacgtggacagagtgctgtgcagcttcaagatcaacgacagcgtgaccctgaacgagaagcccttcagcgtggaggacacctacctgctgtgccccgcccccatcctgaaggaggtgggcatgaaggccgccctgcaggtgagcatgaacgacggcctgagcttcatcagcagcagcgtgatcatcaccaccacccactgcagcgacggcagcatcctggccatcgccctgctgatcctgttcctgctgctggccctggccctgctgtggtggttctggcccctgtgctgcaccgtgatcatcaaggaggtgccccccccccccgccgaggagagcgaggaggaggacgacgacggcctgcccaagaagaagtggcccaccgtggacgccagctactacggcggcagaggcgtgggcggcatcaagagaatggaggtgagatggggcgagaagggcagcaccgaggagggcgccaagctggagaaggccaagaacgccagagtgaagatgcccgagcaggagtacgagttccccgagcccagaaacctgaacaacaacatgagaagacccagcagccccagaaagtggtacagccccatcaagggcaagctggacgccctgtgggtgctgctgagaaagggctacgacagagtgagcgtgatgagaccccagcccggcgacaccggcagatgcatcaacttcaccagagtgaagaacaaccagcccgccaagtaccccctgaacaacgcctaccacaccagcagccccccccccgcccccatctacaccccccccccccccgccccccactgccccccccccccccccagcgcccccaccccccccatccccagcccccccagcaccctgcccccccccccccaggcccccccccccaacagagcccccccccccagcagacccccccccagacccagcgtgtag

SEQ ID NO: 73021 - DNA, 1107 bp, synthetic construct
  misc_feature 1..1107: note = Description of Artificial Sequence: Synthetic coding sequence
  source 1..1107: mol_type = other DNA
atggccaccgccgagagaagagccctgggcatcggcttccagtggctgagcctggccaccctggtgctgatctgcgccggccagggcggcagaagagaggacggcggccccgcctgctacggcggcttcgacctgtacttcatcctggacaagagcggcagcgtgctgcaccactggaacgagatctactacttcgtggagcagctggcccacaagttcatcagcccccagctgagaatgagcttcatcgtgttcagcaccagaggcaccaccctgatgaagctgaccgaggacagagagcagatcagacagggcctggaggagctgcagaaggtgctgcccggcggcgacacctacatgcacgagggcttcgagagagccagcgagcagatctactacgagaacagacagggctacagaaccgccagcgtgatcatcgccctgaccgacggcgagctgcacgaggacctgttcttctacagcgagagagaggccaacagaagcagagacctgggcgccatcgtgtactgcgtgggcgtgaaggacttcaacgagacccagctggccagaatcgccgacagcaaggaccacgtgttccccgtgaacgacggcttccaggccctgcagggcatcatccacagcatcctgaagaagagctgcatcgagatcctggccgccgagcccagcaccatctgcgccggcgagagcttccaggtggtggtgagaggcaacggcttcagacacgccagaaacgtggacagagtgctgtgcagcttcaagatcaacgacagcgtgaccctgaacgagaagcccttcagcgtggaggacacctacctgctgtgccccgcccccatcctgaaggaggtgggcatgaaggccgccctgcaggtgagcatgaacgacggcctgagcttcatcagcagcagcgtgatcatcaccaccacccactgcagcgacggcagcatcctggccatcgccctgctgatcctgttcctgctgctggccctggccctgctgtggtggttctggcccctgtgctgcaccgtgatcatcaaggaggtgccccccccccccgccgaggagagcgaggagaacaagatcaagtag

SEQ ID NO: 73022 - DNA, 1002 bp, synthetic construct
  misc_feature 1..1002: note = Description of Artificial Sequence: Synthetic coding sequence
  source 1..1002: mol_type = other DNA
atggccaccgccgagagaagagccctgggcatcggcttccagtggctgagcctggccaccctggtgctgatctgcgccggccagggcggcagaagagaggacggcggccccgcctgctacggcggcttcgacctgtacttcatcctggacaagagcggcagcgtgctgcaccactggaacgagatctactacttcgtggagcagctggcccacaagttcatcagcccccagctgagaatgagcttcatcgtgttcagcaccagaggcaccaccctgatgaagctgaccgaggacagagagcagatcagacagggcctggaggagctgcagaaggtgctgcccggcggcgacacctacatgcacgagggcttcgagagagccagcgagcagatctactacgagaacagacagggctacagaaccgccagcgtgatcatcgccctgaccgacggcgagctgcacgaggacctgttcttctacagcgagagagaggccaacagaagcagagacctgggcgccatcgtgtactgcgtgggcgtgaaggacttcaacgagacccagctggccagaatcgccgacagcaaggaccacgtgttccccgtgaacgacggcttccaggccctgcagggcatcatccacagcatcctgaagaagagctgcatcgagatcctggccgccgagcccagcaccatctgcgccggcgagagcttccaggtggtggtgagaggcaacggcttcagacacgccagaaacgtggacagagtgctgtgcagcttcaagatcaacgacagcgtgaccctgaacgagaagcccttcagcgtggaggacacctacctgctgtgccccgcccccatcctgaaggaggtgggcatgaaggccgccctgcaggtgagcatgaacgacggcctgagcttcatcagcagcagcgtgatcatcaccaccacccactgcagcctgcacaagatcgccagcggccccaccaccgccgcctgcatggagtag

SEQ ID NO: 73023 - DNA, 969 bp, synthetic construct
  misc_feature 1..969: note = Description of Artificial Sequence: Synthetic coding sequence
  source 1..969: mol_type = other DNA
atggtggccgagagaagccccgccagaagccccggcagctggctgttccccggcctgtggctgctggtgctgagcggccccggcggcctgctgagagcccaggagcagcccagctgcagaagagccttcgacctgtacttcgtgctggacaagagcggcagcgtggccaacaactggatcgagatctacaacttcgtgcagcagctggccgagagattcgtgagccccgagatgagactgagcttcatcgtgttcagcagccaggccaccatcatcctgcccctgaccggcgacagaggcaagatcagcaagggcctggaggacctgaagagagtgagccccgtgggcgagacctacatccacgagggcctgaagctggccaacgagcagatccagaaggccggcggcctgaagaccagcagcatcatcatcgccctgaccgacggcaagctggacggcctggtgcccagctacgccgagaaggaggccaagatcagcagaagcctgggcgccagcgtgtactgcgtgggcgtgctggacttcgagcaggcccagctggagagaatcgccgacagcaaggagcaggtgttccccgtgaagggcggcttccaggccctgaagggcatcatcaacagcatcctggcccagagctgcaccgagatcctggagctgcagcccagcagcgtgtgcgtgggcgaggagttccagatcgtgctgagcggcagaggcttcatgctgggcagcagaaacggcagcgtgctgtgcacctacaccgtgaacgagacctacaccaccagcgtgaagcccgtgagcgtgcagctgaacagcatgctgtgccccgcccccatcctgaacaaggccggcgagtggggcctgaccgtgacccaggccggcgtgaagtggcacgacctgacccactgcaccttcggcctgagcggcagcggcgacccccccaccagcgccagctag

SEQ ID NO: 73024 - DNA, 1470 bp, synthetic construct
  misc_feature 1..1470: note = Description of Artificial Sequence: Synthetic coding sequence
  source 1..1470: mol_type = other DNA
atggtggccgagagaagccccgccagaagccccggcagctggctgttccccggcctgtggctgctggtgctgagcggccccggcggcctgctgagagcccaggagcagcccagctgcagaagagccttcgacctgtacttcgtgctggacaagagcggcagcgtggccaacaactggatcgagatctacaacttcgtgcagcagctggccgagagattcgtgagccccgagatgagactgagcttcatcgtgttcagcagccaggccaccatcatcctgcccctgaccggcgacagaggcaagatcagcaagggcctggaggacctgaagagagtgagccccgtgggcgagacctacatccacgagggcctgaagctggccaacgagcagatccagaaggccggcggcctgaagaccagcagcatcatcatcgccctgaccgacggcaagctggacggcctggtgcccagctacgccgagaaggaggccaagatcagcagaagcctgggcgccagcgtgtactgcgtgggcgtgctggacttcgagcaggcccagctggagagaatcgccgacagcaaggagcaggtgttccccgtgaagggcggcttccaggccctgaagggcatcatcaacagcatcctggcccagagctgcaccgagatcctggagctgcagcccagcagcgtgtgcgtgggcgaggagttccagatcgtgctgagcggcagaggcttcatgctgggcagcagaaacggcagcgtgctgtgcacctacaccgtgaacgagacctacaccaccagcgtgaagcccgtgagcgtgcagctgaacagcatgctgtgccccgcccccatcctgaacaaggccggcgagaccctggacgtgagcgtgagcttcaacggcggcaagagcgtgatcagcggcagcctgatcgtgaccgccaccgagtgcagcaacggcatcgccgccatcatcgtgatcctggtgctgctgctgctgctgggcatcggcctgatgtggtggttctggcccctgtgctgcaaggtggtgatcaaggaccccccccccccccccgcccccgcccccaaggaggaggaggaggagcccctgcccaccaagaagtggcccaccgtggacgccagctactacggcggcagaggcgtgggcggcatcaagagaatggaggtgagatggggcgacaagggcagcaccgaggagggcgccagactggagaaggccaagaacgccgtggtgaagatccccgaggagaccgaggagcccatcagacccagaccccccagacccaagcccacccaccagcccccccagaccaagtggtacacccccatcaagggcagactggacgccctgtgggccctgctgagaagacagtacgacagagtgagcctgatgagaccccaggagggcgacgaggtgtgcatctgggagtgcatcgagaaggagctgaccgcctag

SEQ ID NO: 73025 - DNA, 1161 bp, synthetic construct
  misc_feature 1..1161: note = Description of Artificial Sequence: Synthetic coding sequence
  source 1..1161: mol_type = other DNA
atggtggccgagagaagccccgccagaagccccggcagctggctgttccccggcctgtggctgctggtgctgagcggccccggcggcctgctgagagcccaggagcagcccagctgcagaagagccttcgacctgtacttcgtgctggacaagagcggcagcgtggccaacaactggatcgagatctacaacttcgtgcagcagctggccgagagattcgtgagccccgagatgagactgagcttcatcgtgttcagcagccaggccaccatcatcctgcccctgaccggcgacagaggcaagatcagcaagggcctggaggacctgaagagagtgagccccgtgggcgagacctacatccacgagggcctgaagctggccaacgagcagatccagaaggccggcggcctgaagaccagcagcatcatcatcgccctgaccgacggcaagctggacggcctggtgcccagctacgccgagaaggaggccaagatcagcagaagcctgggcgccagcgtgtactgcgtgggcgtgctggacttcgagcaggcccagctggagagaatcgccgacagcaaggagcaggtgttccccgtgaagggcggcttccaggccctgaagggcatcatcaacagcagcaacggcatcgccgccatcatcgtgatcctggtgctgctgctgctgctgggcatcggcctgatgtggtggttctggcccctgtgctgcaaggtggtgatcaaggaccccccccccccccccgcccccgcccccaaggaggaggaggaggagcccctgcccaccaagaagtggcccaccgtggacgccagctactacggcggcagaggcgtgggcggcatcaagagaatggaggtgagatggggcgacaagggcagcaccgaggagggcgccagactggagaaggccaagaacgccgtggtgaagatccccgaggagaccgaggagcccatcagacccagaccccccagacccaagcccacccaccagcccccccagaccaagtggtacacccccatcaagggcagactggacgccctgtgggccctgctgagaagacagtacgacagagtgagcctgatgagaccccaggagggcgacgaggtgtgcatctgggagtgcatcgagaaggagctgaccgcctag

SEQ ID NO: 73026 - DNA, 1467 bp, synthetic construct
  misc_feature 1..1467: note = Description of Artificial Sequence: Synthetic coding sequence
  source 1..1467: mol_type = other DNA
atggtggccgagagaagccccgccagaagccccggcagctggctgttccccggcctgtggctgctggtgctgagcggccccggcggcctgctgagagcccaggagcagcccagctgcagaagagccttcgacctgtacttcgtgctggacaagagcggcagcgtggccaacaactggatcgagatctacaacttcgtgcagcagctggccgagagattcgtgagccccgagatgagactgagcttcatcgtgttcagcagccaggccaccatcatcctgcccctgaccggcgacagaggcaagatcagcaagggcctggaggacctgaagagagtgagccccgtgggcgagacctacatccacgagggcctgaagctggccaacgagcagatccagaaggccggcggcctgaagaccagcagcatcatcatcgccctgaccgacggcaagctggacggcctggtgcccagctacgccgagaaggaggccaagatcagcagaagcctgggcgccagcgtgtactgcgtgggcgtgctggacttcgagcaggcccagctggagagaatcgccgacagcaaggagcaggtgttccccgtgaagggcggcttccaggccctgaagggcatcatcaacagcatcctggcccagagctgcaccgagatcctggagctgcagcccagcagcgtgtgcgtgggcgaggagttccagatcgtgctgagcggcagaggcttcatgctgggcagcagaaacggcagcgtgctgtgcacctacaccgtgaacgagacctacaccaccagcgtgaagcccgtgagcgtgcagctgaacagcatgctgtgccccgcccccatcctgaacaaggccggcgagaccctggacgtgagcgtgagcttcaacggcggcaagagcgtgatcagcggcagcctgatcgtgaccgccaccgagtgcagcaacggcatcgccgccatcatcgtgatcctggtgctgctgctgctgctgggcatcggcctgatgtggtggttctggcccctgtgctgcaaggtggtgatcaaggaccccccccccccccccgcccccgcccccaaggaggaggaggaggagcccctgcccaccaagaagtggcccaccgtggacgccagctactacggcggcagaggcgtgggcggcatcaagagaatggaggtgagatggggcgacaagggcagcaccgaggagggcgccagactggagaaggccaagaacgccgtggtgaagatccccgaggagaccgaggagcccatcagacccagaccccccagacccaagcccacccaccagcccccccagaccaagtggtacacccccatcaagggcagactggacgccctgtgggccctgctgagaagacagtacgacagagtgagcctgatgagaccccaggagggcgacgagggcagatgcatcaacttcagcagagtgcccagccagtag

SEQ ID NO: 73027 - DNA, 2217 bp, synthetic construct
  misc_feature 1..2217: note = Description of Artificial Sequence: Synthetic coding sequence
  source 1..2217: mol_type = other DNA
atgagaggccccagcggcgccctgtggctgctgctggccctgagaaccgtgctgggcggcatggaggtgagatggtgcgccaccagcgaccccgagcagcacaagtgcggcaacatgagcgaggccttcagagaggccggcatccagcccagcctgctgtgcgtgagaggcaccagcgccgaccactgcgtgcagctgatcgccgcccaggaggccgacgccatcaccctggacggcggcgccatctacgaggccggcaaggagcacggcctgaagcccgtggtgggcgaggtgtacgaccaggaggtgggcaccagctactacgccgtggccgtggtgagaagaagcagccacgtgaccatcgacaccctgaagggcgtgaagagctgccacaccggcatcaacagaaccgtgggctggaacgtgcccgtgggctacctggtggagagcggcagactgagcgtgatgggctgcgacgtgctgaaggccgtgagcgactacttcggcggcagctgcgtgcccggcgccggcgagaccagctacagcgagagcctgtgcagactgtgcagaggcgacagcagcggcgagggcgtgtgcgacaagagccccctggagagatactacgactacagcggcgccttcagatgcctggccgagggcgccggcgacgtggccttcgtgaagcacagcaccgtgctggagaacaccgacggcaagaccctgcccagctggggccaggccctgctgagccaggacttcgagctgctgtgcagagacggcagcagagccgacgtgaccgagtggagacagtgccacctggccagagtgcccgcccacgccgtggtggtgagagccgacaccgacggcggcctgatcttcagactgctgaacgagggccagagactgttcagccacgagggcagcagcttccagatgttcagcagcgaggcctacggccagaaggacctgctgttcaaggacagcaccagcgagctggtgcccatcgccacccagacctacgaggcctggctgggccacgagtacctgcacgccatgaagggcctgctgtgcgaccccaacagactgcccccctacctgagatggtgcgtgctgagcacccccgagatccagaagtgcggcgacatggccgtggccttcagaagacagagactgaagcccgagatccagtgcgtgagcgccaagagcccccagcactgcatggagagaatccaggccgagcaggtggacgccgtgaccctgagcggcgaggacatctacaccgccggcaagacctacggcctggtgcccgccgccggcgagcactacgcccccgaggacagcagcaacagctactacgtggtggccgtggtgagaagagacagcagccacgccttcaccctggacgagctgagaggcaagagaagctgccacgccggcttcggcagccccgccggctgggacgtgcccgtgggcgccctgatccagagaggcttcatcagacccaaggactgcgacgtgctgaccgccgtgagcgagttcttcaacgccagctgcgtgcccgtgaacaaccccaagaactaccccagcagcctgtgcgccctgtgcgtgggcgacgagcagggcagaaacaagtgcgtgggcaacagccaggagagatactacggctacagaggcgccttcagatgcctggtggagaacgccggcgacgtggccttcgtgagacacaccaccgtgttcgacaacaccaacggccacaacagcgagccctgggccgccgagctgagaagcgaggactacgagctgctgtgccccaacggcgccagagccgaggtgagccagttcgccgcctgcaacctggcccagatccccccccacgccgtgatggtgagacccgacaccaacatcttcaccgtgtacggcctgctggacaaggcccaggacctgttcggcgacgaccacaacaagaacggcttcaagatgttcgacagcagcaactaccacggccaggacctgctgttcaaggacgccaccgtgagagccgtgcccgtgggcgagaagaccacctacagaggctggctgggcctggactacgtggccgccctggagggcatgagcagccagcagtgcagcggcgccgccgcccccgcccccggcgcccccctgctgcccctgctgctgcccgccctggccgccagactgctgccccccgccctgtag

SEQ ID NO: 73028 - DNA, 909 bp, synthetic construct
  misc_feature 1..909: note = Description of Artificial Sequence: Synthetic coding sequence
  source 1..909: mol_type = other DNA
atgagaggccccagcggcgccctgtggctgctgctggccctgagaaccgtgctgggcggcatggaggtgagatggtgcgccaccagcgaccccgagcagcacaagtgcggcaacatgagcgaggccttcagagaggccggcatccagcccagcctgctgtgcgtgagaggcaccagcgccgaccactgcgtgcagctgatcgccgcccaggaggccgacgccatcaccctggacggcggcgccatctacgaggccggcaaggagcacggcctgaagcccgtggtgggcgaggtgtacgaccaggaggtgggcaccagctactacgccgtggccgtggtgagaagaagcagccacgtgaccatcgacaccctgaagggcgtgaagagctgccacaccggcatcaacagaaccgtgggctggaacgtgcccgtgggctacctggtggagagcggcagactgagcgtgatgggctgcgacgtgctgaaggccgtgagcgactacttcggcggcagctgcgtgcccggcgccggcgagaccagctacagcgagagcctgtgcagactgtgcagaggcgacagcagcggcgagggcgtgtgcgacaagagccccctggagagatactacgactacagcggcgccttcagatgcctggccgagggcgccggcgacgtggccttcgtgaagcacagcaccgtgctggagaacaccgacgagagccccagcagaagacagacctggaccagaagcgaggaggaggagggcgagtgccccgcccacgaggaggccagaagaaccatgagaagcagcgccggccaggcctggaagtgggcccccgtgcacagaccccaggacgagagcgacaagggcgagttcggcaagagagccaagagcagagacatgctgggctag

SEQ ID NO: 73029 - DNA, 1395 bp, synthetic construct
  misc_feature 1..1395: note = Description of Artificial Sequence: Synthetic coding sequence
  source 1..1395: mol_type = other DNA
atggacttccagcacagacccggcggcaagaccggcagcggcggcgtggccagcagcagcgagagcaacagagacagaagagagagactgagacagctggccctggagaccatcgacatcaacaaggacccctacttcatgaagaaccacctgggcagctacgagtgcaagctgtgcctgaccctgcacaacaacgagggcagctacctggcccacacccagggcaagaagcaccagaccaacctggccagaagagccgccaaggaggccaaggaggcccccgcccagcccgcccccgagaaggtgaaggtggaggtgaagaagttcgtgaagatcggcagacccggctacaaggtgaccaagcagagagacagcgagatgggccagcagagcctgctgttccagatcgactaccccgagatcgccgagggcatcatgcccagacacagattcatgagcgcctacgagcagagaatcgagccccccgacagaagatggcagtacctgctgatggccgccgagccctacgagaccatcgccttcaaggtgcccagcagagagatcgacaaggccgagggcaagttctggacccactggaacagagagaccaagcagttcttcctgcagttccacttcaagatggagaagccccccgccccccccagcctgcccgccggcccccccggcgtgaagagaccccccccccccctgatgaacggcctgccccccagaccccccctgcccgagagcctgcccccccccccccccggcggcctgcccctgccccccatgccccccaccggccccgcccccagcggcccccccggccccccccagctgcccccccccgcccccggcgtgcacccccccgcccccgtggtgcacccccccgccagcggcgtgcacccccccgcccccggcgtgcacccccccgcccccggcgtgcacccccccgcccccggcgtgcacccccccaccagcggcgtgcacccccccgcccccggcgtgcacccccccgcccccggcgtgcacccccccgcccccggcgtgcacccccccgcccccggcgtgcacccccccgcccccggcgtgcaccccccccccagcgccggcgtgcacccccaggcccccggcgtgcaccccgccgcccccgccgtgcacccccaggcccccggcgtgcacccccccgcccccggcatgcacccccaggcccccggcgtgcacccccagccccccggcgtgcaccccagcgcccccggcgtgcacccccagccccccggcgtgcaccccagcaaccccggcgtgcacccccccacccccatgccccccatgctgagaccccccctgcccagcgagggccccggcaacatccccccccccccccccaccaactag

SEQ ID NO: 73030 - DNA, 1437 bp, synthetic construct
  misc_feature 1..1437: note = Description of Artificial Sequence: Synthetic coding sequence
  source 1..1437: mol_type = other DNA
atgctgggcagcctgggcctgtgggccctgctgcccaccgccgtggaggccccccccaacagaagaacctgcgtgttcttcgaggcccccggcgtgagaggcagcaccaagaccctgggcgagctgctggacaccggcaccgagctgcccagagccatcagatgcctgtacagcagatgctgcttcggcatctggaacctgacccaggacagagcccaggtggagatgcagggctgcagagacagcgacgagcccggctgcgagagcctgcactgcgaccccagccccagagcccaccccagccccggcagcaccctgttcacctgcagctgcggcaccgacttctgcaacgccaactacagccacctgcccccccccggcagccccggcacccccggcagccagggcccccaggccgcccccggcgagagcatctggatggccctggtgctgctgggcctgttcctgctgctgctgctgctgctgggcagcatcatcctggccctgctgcagagaaagaactacagagtgagaggcgagcccgtgcccgagcccagacccgacagcggcagagactggagcgtggagctgcaggagctgcccgagctgtgcttcagccaggtgatcagagagggcggccacgccgtggtgtgggccggccagctgcagggcaagctggtggccatcaaggccttcccccccagaagcgtggcccagttccaggccgagagagccctgtacgagctgcccggcctgcagcacgaccacatcgtgagattcatcaccgccagcagaggcggccccggcagactgctgagcggccccctgctggtgctggagctgcaccccaagggcagcctgtgccactacctgacccagtacaccagcgactggggcagcagcctgagaatggccctgagcctggcccagggcctggccttcctgcacgaggagagatggcagaacggccagtacaagcccggcatcgcccacagagacctgagcagccagaacgtgctgatcagagaggacggcagctgcgccatcggcgacctgggcctggccctggtgctgcccggcctgacccagccccccgcctggacccccacccagccccagggccccgccgccatcatggaggaccccgacggcctgagagagctgctggaggactgctgggacgccgaccccgaggccagactgaccgccgagtgcgtgcagcagagactggccgccctggcccacccccaggagagccaccccttccccgagagctgccccagaggctgcccccccctgtgccccgaggactgcaccagcatccccgcccccaccatcctgccctgcagaccccagagaagcgcctgccacttcagcgtgcagcagggcccctgcagcagaaacccccagcccgcctgcaccctgagccccgtgtag

SEQ ID NO: 73031 - DNA, 1437 bp, synthetic construct
  misc_feature 1..1437: note = Description of Artificial Sequence: Synthetic coding sequence
  source 1..1437: mol_type = other DNA
atgctgggcagcctgggcctgtgggccctgctgcccaccgccgtggaggccccccccaacagaagaacctgcgtgttcttcgaggcccccggcgtgagaggcagcaccaagaccctgggcgagctgctggacaccggcaccgagctgcccagagccatcagatgcctgtacagcagatgctgcttcggcatctggaacctgacccaggacagagcccaggtggagatgcagggctgcagagacagcgacgagcccggctgcgagagcctgcactgcgaccccagccccagagcccaccccagccccggcagcaccctgttcacctgcagctgcggcaccgacttctgcaacgccaactacagccacctgcccccccccggcagccccggcacccccggcagccagggcccccaggccgcccccggcgagagcatctggatggccctggtgctgctgggcctgttcctgctgctgctgctgctgctgggcagcatcatcctggccctgctgcagagaaagaactacagagtgagaggcgagcccgtgcccgagcccagacccgacagcggcagagactggagcgtggagctgcaggagctgcccgagctgtgcttcagccaggtgatcagagagggcggccacgccgtggtgtgggccggccagctgcagggcaagctggtggccatcaaggccttcccccccagaagcgtggcccagttccaggccgagagagccctgtacgagctgcccggcctgcagcacgaccacatcgtgagattcatcaccgccagcagaggcggccccggcagactgctgagcggccccctgctggtgctggagctgcaccccaagggcagcctgtgccactacctgacccagtacaccagcgactggggcagcagcctgagaatggccctgagcctggcccagggcctggccttcctgcacgaggagagatggcagaacggccagtacaagcccggcatcgcccacagagacctgagcagccagaacgtgctgatcagagaggacggcagctgcgccatcggcgacctgggcctggccctggtgctgcccggcctgacccagccccccgcctggacccccacccagccccagggccccgccgccatcatggaggccggcacccagagatacatggcccccgagctgctggacaagaccctggacctgcaggactggggcatggccctgagaagagccgacatctacagcctggccctgctgctgtgggagatcctgagcagatgccccgacctgagacccgccgtgcaccaccccagcaactggcccatgagacagaactgggccatccccctgcccctgatgagctacggcccctggcagtgcagaagaggcggcgtgcccaccagccacccccccggcgccgccctgccccagaccctgatgggctag

SEQ ID NO: 73032 - DNA, 1722 bp, synthetic construct
  misc_feature 1..1722: note = Description of Artificial Sequence: Synthetic coding sequence
  source 1..1722: mol_type = other DNA
atgctgggcagcctgggcctgtgggccctgctgcccaccgccgtggaggccccccccaacagaagaacctgcgtgttcttcgaggcccccggcgtgagaggcagcaccaagaccctgggcgagctgctggacaccggcaccgagctgcccagagccatcagatgcctgtacagcagatgctgcttcggcatctggaacctgacccaggacagagcccaggtggagatgcagggctgcagagacagcgacgagcccggctgcgagagcctgcactgcgaccccagccccagagcccaccccagccccggcagcaccctgttcacctgcagctgcggcaccgacttctgcaacgccaactacagccacctgcccccccccggcagccccggcacccccggcagccagggcccccaggccgcccccggcgagagcatctggatggccctggtgctgctgggcctgttcctgctgctgctgctgctgctgggcagcatcatcctggccctgctgcagagaaagaactacagagtgagaggcgagcccgtgcccgagcccagacccgacagcggcagagactggagcgtggagctgcaggagctgcccgagctgtgcttcagccaggtgatcagagagggcggccacgccgtggtgtgggccggccagctgcagggcaagctggtggccatcaaggccttcccccccagaagcgtggcccagttccaggccgagagagccctgtacgagctgcccggcctgcagcacgaccacatcgtgagattcatcaccgccagcagaggcggccccggcagactgctgagcggccccctgctggtgctggagctgcaccccaagggcagcctgtgccactacctgacccagtacaccagcgactggggcagcagcctgagaatggccctgagcctggcccagggcctggccttcctgcacgaggagagatggcagaacggccagtacaagcccggcatcgcccacagagacctgagcagccagaacgtgctgatcagagaggacggcagctgcgccatcggcgacctgggcctggccctggtgctgcccggcctgacccagccccccgcctggacccccacccagccccagggccccgccgccatcatggaggccggcacccagagatacatggcccccgagctgctggacaagaccctggacctgcaggactggggcatggccctgagaagagccgacatctacagcctggccctgctgctgtgggagatcctgagcagatgccccgacctgagacccgacagcagccccccccccttccagctggcctacgaggccgagctgggcaacacccccaccagcgacgagctgtgggccctggccgtgcaggagagaagaagaccctacatccccagcacctggagatgcttcgccaccgaccccgacggcctgagagagctgctggaggactgctgggacgccgaccccgaggccagactgaccgccgagtgcgtgcagcagagactggccgccctggcccacccccaggagagccaccccttccccgagagctgccccagaggctgcccccccctgtgccccgaggactgcaccagcatccccgcccccaccatcctgccctgcagaccccagagaagcgcctgccacttcagcgtgcagcagggcccctgcagcagaaacccccagcccgcctgcaccctgagccccgtgtag

SEQ ID NO: 73033 - DNA, 1347 bp, synthetic construct
  misc_feature 1..1347: note = Description of Artificial Sequence: Synthetic coding sequence
  source 1..1347: mol_type = other DNA
atgaagggcttcatcgacgacgccaactacagcgtgggcctgctggacgagggcaccaacctgggcaacgtgatcgacaactacgtgtacgagcacaccctgaccggcaagaacgccttcttcgtgggcgacctgggcaagatcgtgaagaagcacagccagtggcagaacgtggtggcccagatcaagcccttctacaccgtgaagtgcaacagcgcccccgccgtgctggagatcctggccgccctgggcaccggcttcgcctgcagcagcaagaacgagatggccctggtgcaggagctgggcgtgccccccgagaacatcatctacatcagcccctgcaagcaggtgagccagatcaagtacgccgccaaggtgggcgtgaacatcctgacctgcgacaacgagatcgagctgaagaagatcgccagaaaccaccccaacgccaaggtgctgctgcacatcgccaccgaggacaacatcggcggcgaggagggcaacatgaagttcggcaccaccctgaagaactgcagacacctgctggagtgcgccaaggagctggacgtgcagatcatcggcgtgaagttccacgtgagcagcgcctgcaaggagagccaggtgtacgtgcacgccctgagcgacgccagatgcgtgttcgacatggccggcgagatcggcttcaccatgaacatgctggacatcggcggcggcttcaccggcaccgagttccagctggaggaggtgaaccacgtgatcagccccctgctggacatctacttccccgagggcagcggcgtgaagatcatcagcgagcccggcagctactacgtgagcagcgccttcaccctggccgtgaacatcatcgccaagaaggtggtggagaacgacaagttccccagcggcgtggagaagaccggcagcgacgagcccgccttcatgtactacatgaacgacggcgtgtacggcagcttcgccagcaagctgagcgaggacctgaacaccatccccgaggtgcacaagaagtacaaggaggacgagcccctgttcaccagcagcctgtggggccccagctgcgacgagctggaccagatcgtggagagctgcctgctgcccgagctgaacgtgggcgactggctgatcttcgacaacatgggcgccgacagcttccacgagcccagcgccttcaacgacttccagagacccgccatctactacatgatgagcttcagcgactggtacgagatgcaggacgccggcatcaccagcgacagcatgatgaagaacttcttcttcgtgcccagctgcatccagctgagccaggaggacagcttcagcgccgaggcctag

SEQ ID NO: 73034 - DNA, 1347 bp, synthetic construct; identical to SEQ ID NO: 73033
  misc_feature 1..1347: note = Description of Artificial Sequence: Synthetic coding sequence
  source 1..1347: mol_type = other DNA

SEQ ID NO: 73035 - DNA, 102 bp, synthetic construct
  misc_feature 1..102: note = Description of Artificial Sequence: Synthetic coding sequence
  source 1..102: mol_type = other DNA
atgaagggcttcatcgacgacgccaactacagcgtgggcctgctggacgagggcaccaacctgggcaacgtgatcgacaactacgtgtacgagcacacctag

SEQ ID NO: 73036 - DNA, 294 bp, synthetic construct
  misc_feature 1..294: note = Description of Artificial Sequence: Synthetic coding sequence
  source 1..294: mol_type = other DNA
atgaagggcttcatcgacgacgccaactacagcgtgggcctgctggacgagggcaccaacctgggcaacgtgatcgacaactacgtgtacgagcacaccctgaccggcaagaacgccttcttcgtgggcgacctgggcaagatcgtgaagaagcacagccagtggcagaacgtggtggcccagatcaagcccttctacaccgtgaagtgcaacagcgcccccgccgtgctggagatcctggccgccctgggcaccggcttcgcctgcagcagcaagaacgagatggccctgtag

SEQ ID NO: 73037 - DNA, 780 bp, synthetic construct
  misc_feature 1..780: note = Description of Artificial Sequence: Synthetic coding sequence
  source 1..780: mol_type = other DNA
atgagaagagccgtggcctacatggccatcaagatcgaggtgcagggccaccagagcttcgccatccccagcggcaccttctggctgtggagaagcctgctgagccaggacaaggagcaccccagatacctgatccccgagctgtgcaagcagttctaccacctgggctgggtgaccggcaccggcggcggcatcagcctgaagcacggcgacgagatctacatcgcccccagcggcgtgcagaaggagagaatccagcccgaggacatgttcgtgtgcgacatcaacgagaaggacatcagcggccccagccccagcaagaagctgaagaagagccagtgcacccccctgttcatgaacgcctacaccatgagaggcgccggcgccgtgatccacacccacagcaaggccgccgtgatggccaccctgctgttccccggcagagagttcaagatcacccaccaggagatgatcaagggcatcaagaagtgcaccagcggcggctactacagatacgacgacatgctggtggtgcccatcatcgagaacacccccgaggagaaggacctgaaggacagaatggcccacgccatgaacgagtaccccgacagctgcgccgtgctggtgagaagacacggcgtgtacgtgtggggcgagacctgggagaaggccaagaccatgtgcgagtgctacgactacctgttcgacatcgccgtgagcatgaagaaggtgggcctggaccccagccagctgcccgtgggcgagaacggcatcgtgtag

SEQ ID NO: 73038 - DNA, 729 bp, synthetic construct
  misc_feature 1..729: note = Description of Artificial Sequence: Synthetic coding sequence
  source 1..729: mol_type = other DNA
atgagcggctgcgacgccagagagggcgactgctgcagcagaagatgcggcgcccaggacaaggagcaccccagatacctgatccccgagctgtgcaagcagttctaccacctgggctgggtgaccggcaccggcggcggcatcagcctgaagcacggcgacgagatctacatcgcccccagcggcgtgcagaaggagagaatccagcccgaggacatgttcgtgtgcgacatcaacgagaaggacatcagcggccccagccccagcaagaagctgaagaagagccagtgcacccccctgttcatgaacgcctacaccatgagaggcgccggcgccgtgatccacacccacagcaaggccgccgtgatggccaccctgctgttccccggcagagagttcaagatcacccaccaggagatgatcaagggcatcaagaagtgcaccagcggcggctactacagatacgacgacatgctggtggtgcccatcatcgagaacacccccgaggagaaggacctgaaggacagaatggcccacgccatgaacgagtaccccgacagctgcgccgtgctggtgagaagacacggcgtgtacgtgtggggcgagacctgggagaaggccaagaccatgtgcgagtgctacgactacctgttcgacatcgccgtgagcatgaagaaggtgggcctggaccccagccagctgcccgtgggcgagaacggcatcgtgtag

SEQ ID NO: 73039 - DNA, 234 bp, synthetic construct
  misc_feature 1..234: note = Description of Artificial Sequence: Synthetic coding sequence
  source 1..234: mol_type = other DNA
atgaacctgagactgtgcgtgcaggccctgctgctgctgtggctgagcctgaccgccgtgtgcggcggcagcctgatgcccctgcccgacggcaacggcctggaggacggcaacgtgagacacctggtgcagcccagaggcagcagaaacggccccggcccctggcagggcggcagaagaaagttcagaagacagagacccagactgagccacaagggccccatgcccttctag

SEQ ID NO: 73040 - DNA, 369 bp, synthetic construct
  misc_feature 1..369: note = Description of Artificial Sequence: Synthetic coding sequence
  source 1..369: mol_type = other DNA
atgagcgccacctggtgcagccccgagggccagggcatgggccagggccccggcagagaggtgggcggcaacagcgccgccagcggccccgccagccccatcagagacccctgcctgagcgaggccggcctgaagggcccccccagcgcccaccccagaagactgtgcctgctgcacagactggtgtgcttcagcggcggcctgaccagcatccagctgagccccagaacctgctgcagccaccagtgggcccagctgttcagccccgcctgcttcccccagtggagagcccccggctgcagcctggacgacagcagaagcctgaccagaatcagacccgtgcacctgcccggccccagcctggactag

SEQ ID NO: 73041 - DNA, 369 bp, synthetic construct; identical to SEQ ID NO: 73040
  misc_feature 1..369: note = Description of Artificial Sequence: Synthetic coding sequence
  source 1..369: mol_type = other DNA

SEQ ID NO: 73042 - DNA, 303 bp, synthetic construct
  misc_feature 1..303: note = Description of Artificial Sequence: Synthetic coding sequence
  source 1..303: mol_type = other DNA
atgaagctgctggccgccaccgtgctgctgctgaccatctgcagcctggagggcgccctggtgagaagacaggccaaggagccctgcgtggagagcctggtgagccagtacttccagaccgtgaccgactacggcaaggacctgatggagaaggtgaagagccccgagctgcaggccgaggccaagagctacttcgagaagagcaaggagcagctgacccccctgatcaagaaggccggcaccgagctggtgaacttcctgagctacttcgtggagctgggcacccagcccgccacccagtag

SEQ ID NO: 73043 - DNA, 1191 bp, synthetic construct
  misc_feature 1..1191: note = Description of Artificial Sequence: Synthetic coding sequence
  source 1..1191: mol_type = other DNA
atgttcctgaaggccgtggtgctgaccctggccctggtggccgtggccggcgccagagccgaggtgagcgccgaccaggtggccaccgtgatgtgggactacttcagccagctgagcaacaacgccaaggaggccgtggagcacctgcagaagagcgagctgacccagcagctgaacgccctgttccaggacaagctgggcgaggtgaacacctacgccggcgacctgcagaagaagctggtgcccttcgccaccgagctgcacgagagactggccaaggacagcgagaagctgaaggaggagatcggcaaggagctggaggagctgagagccagactgctgccccacgccaacgaggtgagccagaagatcggcgacaacctgagagagctgcagcagagactggagccctacgccgaccagctgagaacccaggtgagcacccaggccgagcagctgagaagacagctgaccccctacgcccagagaatggagagagtgctgagagagaacgccgacagcctgcaggccagcctgagaccccacgccgacgagctgaaggccaagatcgaccagaacgtggaggagctgaagggcagactgaccccctacgccgacgagttcaaggtgaagatcgaccagaccgtggaggagctgagaagaagcctggccccctacgcccaggacacccaggagaagctgaaccaccagctggagggcctgaccttccagatgaagaagaacgccgaggagctgaaggccagaatcagcgccagcgccgaggagctgagacagagactggcccccctggccgaggacgtgagaggcaacctgagaggcaacaccgagggcctgcagaagagcctggccgagctgggcggccacctggaccagcaggtggaggagttcagaagaagagtggagccctacggcgagaacttcaacaaggccctggtgcagcagatggagcagctgagacagaagctgggcccccacgccggcgacgtggagggccacctgagcttcctggagaaggacctgagagacaaggtgaacagcttcttcagcaccttcaaggagaaggagagccaggacaagaccctgagcctgcccgagctggagcagcagcaggagcagcagcaggagcagcagcaggagcaggtgcagatgctggcccccctggagagctag

SEQ ID NO: 73044 - DNA, 1281 bp, synthetic construct
  misc_feature 1..1281: note = Description of Artificial Sequence: Synthetic coding sequence
  source 1..1281: mol_type = other DNA
atggccatcgcccagctggccaccgagtacgtgttcagcgacttcctgctgaaggagcccaccgagcccaagttcaagggcctgagactggagctggccgtggacaagatggtgacctgcatcgccgtgggcctgcccctgctgctgatcagcctggccttcgcccaggagatcagcatcggcacccagatcagctgcttcagccccagcagcttcagctggagacaggccgccttcgtggacagctactgctgggccgccgtgcagcagaagaacagcctgcagagcgagagcggcaacctgcccctgtggctgcacaagttcttcccctacatcctgctgctgttcgccatcctgctgtacctgccccccctgttctggagattcgccgccgccccccacatctgcagcgacctgaagttcatcatggaggagctggacaaggtgtacaacagagccatcaaggccgccaagagcgccagagacctggacatgagagacggcgcctgcagcgtgcccggcgtgaccgagaacctgggccagagcctgtgggaggtgagcgagagccacttcaagtaccccatcgtggagcagtacctgaagaccaagaagaacagcaacaacctgatcatcaagtacatcagctgcagactgctgaccctgatcatcatcctgctggcctgcatctacctgggctactacttcagcctgagcagcctgagcgacgagttcgtgtgcagcatcaagagcggcatcctgagaaacgacagcaccgtgcccgaccagttccagtgcaagctgatcgccgtgggcatcttccagctgctgagcgtgatcaacctggtggtgtacgtgctgctggcccccgtggtggtgtacaccctgttcgtgcccttcagacagaagaccgacgtgctgaaggtgtacgagatcctgcccaccttcgacgtgctgcacttcaagagcgagggctacaacgacctgagcctgtacaacctgttcctggaggagaacatcagcgaggtgaagagctacaagtgcctgaaggtgctggagaacatcaagagcagcggccagggcatcgaccccatgctgctgctgaccaacctgggcatgatcaagatggacgtggtggacggcaagacccccatgagcgccgagatgagagaggagcagggcaaccagaccgccgagctgcagggcatgaacatcgacagcgagaccaaggccaacaacggcgagaagaacgccagacagagactgctggacagcagctgctag

SEQ ID NO: 73045 - DNA, 489 bp, synthetic construct
  misc_feature 1..489: note = Description of Artificial Sequence: Synthetic coding sequence
  source 1..489: mol_type = other DNA
atggccagcatggccgccgtgctgacctgggccctggccctgctgagcgccttcagcgccacccaggccagaaagggcttctgggactacttcagccagaccagcggcgacaagggcagagtggagcagatccaccagcagaagatggccagagagcccgccaccctgaaggacagcctggagcaggacctgaacaacatgaacaagttcctggagaagctgagacccctgagcggcagcgaggcccccagactgccccaggaccccgtgggcatgagaagacagctgcaggaggagctggaggaggtgaaggccagactgcagccctacatggccgaggcccacgagctggtgggctggaacctggagggcctgagacagcagctgaagccctacaccatggacctgatggagcaggtggccctgagagtgcaggagctgcaggagcagctgagagtggtgggcgaggacaccaaggcccagctgtag

SEQ ID NO: 73046 - DNA, 1101 bp, synthetic construct
  misc_feature 1..1101: note = Description of Artificial Sequence: Synthetic coding sequence
  source 1..1101: mol_type = other DNA
atggccagcatggccgccgtgctgacctgggccctggccctgctgagcgccttcagcgccacccaggccagaaagggcttctgggactacttcagccagaccagcggcgacaagggcagagtggagcagatccaccagcagaagatggccagagagcccgccaccctgaaggacagcctggagcaggacctgaacaacatgaacaagttcctggagaagctgagacccctgagcggcagcgaggcccccagactgccccaggaccccgtgggcatgagaagacagctgcaggaggagctggaggaggtgaaggccagactgcagccctacatggccgaggcccacgagctggtgggctggaacctggagggcctgagacagcagctgaagccctacaccatggacctgatggagcaggtggccctgagagtgcaggagctgcaggagcagctgagagtggtgggcgaggacaccaaggcccagctgctgggcggcgtggacgaggcctgggccctgctgcagggcctgcagagcagagtggtgcaccacaccggcagattcaaggagctgttccacccctacgccgagagcctggtgagcggcatcggcagacacgtgcaggagctgcacagaagcgtggccccccacgcccccgccagccccgccagactgagcagatgcgtgcaggtgctgagcagaaagctgaccctgaaggccaaggccctgcacgccagaatccagcagaacctggaccagctgagagaggagctgagcagagccttcgccggcaccggcaccgaggagggcgccggccccgacccccagatgctgagcgaggaggtgagacagagactgcaggccttcagacaggacacctacctgcagatcgccgccttcaccagagccatcgaccaggagaccgaggaggtgcagcagcagctggccccccccccccccggccacagcgccttcgcccccgagttccagcagaccgacagcggcaaggtgctgagcaagctgcaggccagactggacgacctgtgggaggacatcacccacagcctgcacgaccagggccacagccacctgggcgacccctag

SEQ ID NO: 73047 - DNA, 1074 bp, synthetic construct
  misc_feature 1..1074: note = Description of Artificial Sequence: Synthetic coding sequence
  source 1..1074: mol_type = other DNA
atgaacccccagatcagaaaccccatggagagaatgtacagagacaccttctacgacaacttcgagaacgagcccatcctgtacggcagaagctacacctggctgtgctacgaggtgaagatcaagagaggcagaagcaacctgctgtgggacaccggcgtgttcagaggccaggtgtacttcaagccccagtaccacgccgagatgtgcttcctgagctggttctgcggcaaccagctgcccgcctacaagtgcttccagatcacctggttcgtgagctggaccccctgccccgactgcgtggccaagctggccgagttcctgagcgagcaccccaacgtgaccctgaccatcagcgccgccagactgtactactactgggagagagactacagaagagccctgtgcagactgagccaggccggcgccagagtgaccatcatggactacgaggagttcgcctactgctgggagaacttcgtgtacaacgagggccagcagttcatgccctggtacaagttcgacgagaactacgccttcctgcacagaaccctgaaggagatcctgagatacctgatggaccccgacaccttcaccttcaacttcaacaacgaccccctggtgctgagaagaagacagacctacctgtgctacgaggtggagagactggacaacggcacctgggtgctgatggaccagcacatgggcttcctgtgcaacgagctggaccccgcccagatctacagagtgacctggttcatcagctggagcccctgcttcagctggggctgcgccggcgaggtgagagccttcctgcaggagaacacccacgtgagactgagaatcttcgccgccagaatctacgactacgaccccctgtacaaggaggccctgcagatgctgagagacgccggcgcccaggtgagcatcatgacctacgacgagttcgagtactgctgggacaccttcgtgtacagacagggctgccccttccagccctgggacggcctggaggagcacagccaggccctgagcggcagactgagagccatcctgcagaaccagggcaactag

SEQ ID NO: 73048 - DNA, 306 bp, synthetic construct
  misc_feature 1..306: note = Description of Artificial Sequence: Synthetic coding sequence
  source 1..306: mol_type = other DNA
atgaagccccacttcagaaacaccgtggagagaatgtacagagacaccttcagctacaacttctacaacagacccatcctgagcagaagaaacaccgtgtggctgtgctacgaggtgaagaccaagggccccagcagacccagactggacgccaagatcttcagaggccaggtgcccagaagcttcatcagagcccccttccaggtgctgagcagccccttcggccagtgcgcccccccccacggcaccgcccaggtgcagtggcccccccagctgaccgccggcagagagcagggcagaccctag

SEQ ID NO: 73049 - DNA, 381 bp, synthetic construct
  misc_feature 1..381: note = Description of Artificial Sequence: Synthetic coding sequence
  source 1..381: mol_type = other DNA
atggccagcgccagcacccagcccgccgccctgagcgccgagcaggccaaggtggtgctggccgaggtgatccaggccttcagcgcccccgagaacgccgtgagaatggacgaggccagagacaacgcctgcaacgacatgggcaagatgctgcagttcgtgctgcccgtggccacccagatccagcaggaggtgatcaaggcctacggcttcagctgcgacggcgagggcgtgctgaagttcgccagactggtgaagagctacgaggcccaggaccccgagatcgccagcctgagcggcaagctgaaggccctgttcctgccccccatgaccctgcccccccacggccccgccgccggcggcagcgtggccgccagctag

SEQ ID NO: 73050 - DNA, 675 bp, synthetic construct
  misc_feature 1..675: note = Description of Artificial Sequence: Synthetic coding sequence
  source 1..675: mol_type = other DNA
atggcccagaaggaggaggccgccgtggccaccgaggccgccagccagaacggcgaggacctggagaacctggacgaccccgagaagctgaaggagctgatcgagctgccccccttcgagatcgtgaccggcgagagactgcccgccaacttcttcaagttccagttcagaaacgtggagtacagcagcggcagaaacaagaccttcctgtgctacgtggtggaggcccagggcaagggcggccaggtgcaggccagcagaggctacctggaggacgagcacgccgccgcccacgccgaggaggccttcttcaacaccatcctgcccgccttcgaccccgccctgagatacaacgtgacctggtacgtgagcagcagcccctgcgccgcctgcgccgacagaatcatcaagaccctgagcaagaccaagaacctgagactgctgatcctggtgggcagactgttcatgtgggaggagcccgagatccaggccgccctgaagaagctgaaggaggccggctgcaagctgagaatcatgaagccccaggacttcgagtacgtgtggcagaacttcgtggagcaggaggagggcgagagcaaggccttccagccctgggaggacatccaggagaacttcctgtactacgaggagaagctggccgacatcctgaagtag

SEQ ID NO: 73051 - DNA, 393 bp, synthetic construct
  misc_feature 1..393: note = Description of Artificial Sequence: Synthetic coding sequence
  source 1..393: mol_type = other DNA
atggcccagaaggaggaggccgccgtggccaccgaggccgccagccagaacggcgaggacctggagaacctggacgaccccgagaagctgaaggagctgatcgagctgccccccttcgagatcgtgaccggcgagagactgcccgccaacttcttcaagttccagttcagaaacgtggagtacagcagcggcagaaagctgagcagcacccccagctgccagcccagcacccagccctgcggcaccatgagccccggcatgtgcccccccgcccccgtgcagagagtgctgaccgccctgagcaagcccctggccagacccagaacctgcgtgtgcagcttctggtgggtggacagcagctgcggcagaagcagaagaagcagactgctgtag

SEQ ID NO: 73052 - DNA, 600 bp, synthetic construct
  misc_feature 1..600: note = Description of Artificial Sequence: Synthetic coding sequence
  source 1..600: mol_type = other DNA
atggaggccagccccgccagcggccccagacacctgatggacccccacatcttcaccagcaacttcaacaacggcatcggcagacacaagacctacctgtgctacgaggtggagagactggacaacggcaccagcgtgaagatggaccagcacagaggcttcctgcacaaccaggccaagaacctgctgtgcggcttctacggcagacacgccgagctgagattcctggacctggtgcccagcctgcagctggaccccgcccagatctacagagtgacctggttcatcagctggagcccctgcttcagctggggctgcgccggcgaggtgagagccttcctgcaggagaacacccacgtgagactgagaatcttcgccgccagaatctacgactacgaccccctgtacaaggaggccctgcagatgctgagagacgccggcgcccaggtgagcatcatgacctacgacgagttcaagcactgctgggacaccttcgtggaccaccagggctgccccttccagccctgggacggcctggacgagcacagccaggccctgagcggcagactgagagccatcctgcagaaccagggcaactag

SEQ ID NO: 73053 - DNA, 600 bp, synthetic construct; identical to SEQ ID NO: 73052
  misc_feature 1..600: note = Description of Artificial Sequence: Synthetic coding sequence
  source 1..600: mol_type = other DNA

SEQ ID NO: 73054 - DNA, 1149 bp, synthetic construct
  misc_feature 1..1149: note = Description of Artificial Sequence: Synthetic coding sequence
  source 1..1149: mol_type = other DNA
atgaacccccagatcagaaaccccatggagagaatgtacagagacaccttctacgacaacttcgagaacgagcccatcctgtacggcagaagctacacctggctgtgctacgaggtgaagatcaagagaggcagaagcaacctgctgtgggacaccggcgtgttcagaggccaggtgtacttcaagccccagtaccacgccgagatgtgcttcctgagctggttctgcggcaaccagctgcccgcctacaagtgcttccagatcacctggttcgtgagctggaccccctgccccgactgcgtggccaagctggccgagttcctgagcgagcaccccaacgtgaccctgaccatcagcgccgccagactgtactactactgggagagagactacagaagagccctgtgcagactgagccaggccggcgccagagtgaccatcatggactacgaggagttcgcctactgctgggagaacttcgtgtacaacgagggccagcagttcatgccctggtacaagttcgacgagaactacgccttcctgcacagaaccctgaaggagatcctgagatacctgatggaccccgacaccttcaccttcaacttcaacaacgaccccctggtgctgagaagaagacagacctacctgtgctacgaggtggagagactggacaacggcacctgggtgctgatggaccagcacatgggcttcctgtgcaacgaggccaagaacctgctgtgcggcttctacggcagacacgccgagctgagattcctggacctggtgcccagcctgcagctggaccccgcccagatctacagagtgacctggttcatcagctggagcccctgcttcagctggggctgcgccggcgaggtgagagccttcctgcaggagaacacccacgtgagactgagaatcttcgccgccagaatctacgactacgaccccctgtacaaggaggccctgcagatgctgagagacgccggcgcccaggtgagcatcatgacctacgacgagttcgagtactgctgggacaccttcgtgtacagacagggctgccccttccagccctgggacggcctggaggagcacagccaggccctgagcggcagactgagagccatcctgcagaaccagggcaactag

SEQ ID NO: 73055 - DNA, 573 bp, synthetic construct
  misc_feature 1..573: note = Description of Artificial Sequence: Synthetic coding sequence
  source 1..573: mol_type = other DNA
atgaacccccagatcagaaaccccatgaaggccatgtaccccggcaccttctacttccagttcaagaacctgtgggaggccaacgacagaaacgagacctggctgtgcttcaccgtggagggcatcaagagaagaagcgtggtgagctggaagaccggcgtgttcagaaaccaggtggacagcgagacccactgccacgccgagagatgcttcctgagctggttctgcgacgacatcctgagccccaacaccaagtaccaggtgacctggtacaccagctggagcccctgccccgactgcgccggcgaggtggccgagttcctggccagacacagcaacgtgaacctgaccatcttcaccgccagactgtactacttccagtacccctgctaccaggagggcctgagaagcctgagccaggagggcgtggccgtggagatcatggactacgaggacttcaagtactgctgggagaacttcgtgtacaacgacaacgagcccttcaagccctggaagggcctgaagaccaacttcagactgctgaagagaagactgagagagagcctgcagtag

SEQ ID NO: 73056 - DNA, 1122 bp, synthetic construct
  misc_feature 1..1122: note = Description of Artificial Sequence: Synthetic coding sequence
  source 1..1122: mol_type = other DNA
atgaagccccacttcagaaacaccgtggagagaatgtacagagacaccttcagctacaacttctacaacagacccatcctgagcagaagaaacaccgtgtggctgtgctacgaggtgaagaccaagggccccagcagacccagactggacgccaagatcttcagaggccaggtgtacagccagcccgagcaccacgccgagatgtgcttcctgagctggttctgcggcaaccagctgcccgcctacaagtgcttccagatcacctggttcgtgagctggaccccctgccccgactgcgtggccaagctggccgagttcctggccgagcaccccaacgtgaccctgaccatcagcgccgccagactgtactactactgggagagagactacagaagagccctgtgcagactgagccaggccggcgccagagtgaagatcatggacgacgaggagttcgcctactgctgggagaacttcgtgtacagcgagggccagcccttcatgccctggtacaagttcgacgacaactacgccttcctgcacagaaccctgaaggagatcctgagaaaccccatggaggccatgtacccccacatcttctacttccacttcaagaacctgagaaaggcctacggcagaaacgagagctggctgtgcttcaccatggaggtggtgaagcaccacagccccgtgagctggaagagaggcgtgttcagaaaccaggtggaccccgagacccactgccacgccgagagatgcttcctgagctggttctgcgacgacatcctgagccccaacaccaactacgaggtgacctggtacaccagctggagcccctgccccgagtgcgccggcgaggtggccgagttcctggccagacacagcaacgtgaacctgaccatcttcaccgccagactgtactacttctgggacaccgactaccaggagggcctgagaagcctgagccaggagggcgccagcgtggagatcatgggctacaaggacttcaagtactgctgggagaacttcgtgtacaacgacgacgagcccttcaagccctggaagggcctgaagtacaacttcctgttcctggacagcaagctgcaggagatcctggagtag

SEQ ID NO: 73057 - DNA, 1155 bp, synthetic construct
  misc_feature 1..1155: note = Description of Artificial Sequence: Synthetic coding sequence
  source 1..1155: mol_type = other DNA
atgaagccccacttcagaaacaccgtggagagaatgtacagagacaccttcagctacaacttctacaacagacccatcctgagcagaagaaacaccgtgtggctgtgctacgaggtgaagaccaagggccccagcagaccccccctggacgccaagatcttcagaggccaggtgtacagcgagctgaagtaccaccccgagatgagattcttccactggttcagcaagtggagaaagctgcacagagaccaggagtacgaggtgacctggtacatcagctggagcccctgcaccaagtgcaccagagacatggccaccttcctggccgaggaccccaaggtgaccctgaccatcttcgtggccagactgtactacttctgggaccccgactaccaggaggccctgagaagcctgtgccagaagagagacggccccagagccaccatgaagatcatgaactacgacgagttccagcactgctggagcaagttcgtgtacagccagagagagctgttcgagccctggaacaacctgcccaagtactacatcctgctgcacatcatgctgggcgagatcctgagacacagcatggacccccccaccttcaccttcaacttcaacaacgagccctgggtgagaggcagacacgagacctacctgtgctacgaggtggagagaatgcacaacgacacctgggtgctgctgaaccagagaagaggcttcctgtgcaaccaggccccccacaagcacggcttcctggagggcagacacgccgagctgtgcttcctggacgtgatccccttctggaagctggacctggaccaggactacagagtgacctgcttcaccagctggagcccctgcttcagctgcgcccaggagatggccaagttcatcagcaagaacaagcacgtgagcctgtgcatcttcaccgccagaatctacgacgaccagggcagatgccaggagggcctgagaaccctggccgaggccggcgccaagatcagcatcatgacctacagcgagttcaagcactgctgggacaccttcgtggaccaccagggctgccccttccagccctgggacggcctggacgagcacagccaggacctgagcggcagactgagagccatcctgcagaaccaggagaactag

SEQ ID NO: 73058 - DNA, 1155 bp, synthetic construct; identical to SEQ ID NO: 73057
  misc_feature 1..1155: note = Description of Artificial Sequence: Synthetic coding sequence
  source 1..1155: mol_type = other DNA

SEQ ID NO: 73059 - DNA, 549 bp, synthetic construct
  misc_feature 1..549: note = Description of Artificial Sequence: Synthetic coding sequence
  source 1..549: mol_type = other DNA
atggccctgctgaccgccgagaccttcagactgcagttcaacaacaagagaagactgagaagaccctactaccccagaaaggccctgctgtgctaccagctgaccccccagaacggcagcacccccaccagaggctacttcgagaacaagaagaagtgccacgccgagatctgcttcatcaacgagatcaagagcatgggcctggacgagacccagtgctaccaggtgacctgctacctgacctggagcccctgcagcagctgcgcctgggagctggtggacttcatcaaggcccacgaccacctgaacctgggcatcttcgccagcagactgtactaccactggtgcaagccccagcagaagggcctgagactgctgtgcggcagccaggtgcccgtggaggtgatgggcttccccaagttcgccgactgctgggagaacttcgtggaccacgagaagcccctgagcttcaacccctacaagatgctggaggagctggacaagaacagcagagccatcaagagaagactggagagaatcaagagctag

SEQ ID NO: 73060 - DNA, 603 bp, synthetic construct
  misc_feature 1..603: note = Description of Artificial Sequence: Synthetic coding sequence
  source 1..603: mol_type = other DNA
atggccctgctgaccgccgagaccttcagactgcagttcaacaacaagagaagactgagaagaccctactaccccagaaaggccctgctgtgctaccagctgaccccccagaacggcagcacccccaccagaggctacttcgagaacaagaagaagtgccacgccgagatctgcttcatcaacgagatcaagagcatgggcctggacgagacccagtgctaccaggtgacctgctacctgacctggagcccctgcagcagctgcgcctgggagctggtggacttcatcaaggcccacgaccacctgaacctgggcatcttcgccagcagactgtactaccactggtgcaagccccagcagaagggcctgagactgctgtgcggcagccaggtgcccgtggaggtgatgggcttccccaagttcgccgactgctgggagaacttcgtggaccacgagaagcccctgagcttcaacccctacaagatgctggaggagctggacaagaacagcagagccatcaagagaagactggagagaatcaagatccccggcgtgagagcccagggcagatacatggacatcctgtgcgacgccgaggtgtag

SEQ ID NO: 73061 - DNA, 465 bp, synthetic construct
  misc_feature 1..465: note = Description of Artificial Sequence: Synthetic coding sequence
  source 1..465: mol_type = other DNA
atggccctgctgaccgccgagaccttcagactgcagttcaacaacaagagaagactgagaagaccctactaccccagaaaggccctgctgtgctaccagctgaccccccagaacggcagcacccccaccagaggctacttcgagaacaagaagaagtgccacgccgagatctgcttcatcaacgagatcaagagcatgggcctggacgagacccagtgctaccaggtgacctgctacctgacctggagcccctgcagcagctgcgcctgggagctggtggacttcatcaaggcccacgaccacctgaacctgggcatcttcgccagcagactgtactaccactggtgcaagccccagcagaagggcctgagactgctgtgcggcagccaggtgcccgtggaggtgatgggcttccccaacagcagaggcacctgcgccggcagcctgcacggctacatcgtgtag

SEQ ID NO: 73062 - DNA, 552 bp, synthetic construct
  misc_feature 1..552: note = Description of Artificial Sequence: Synthetic coding sequence
  source 1..552: mol_type = other DNA
atggccctgctgaccgccgagaccttcagactgcagttcaacaacaagagaagactgagaagaccctactaccccagaaaggccctgctgtgctaccagctgaccccccagaacggcagcacccccaccagaggctacttcgagaacaagaagaagtgccacgccgagatctgcttcatcaacgagatcaagagcatgggcctggacgagacccagtgctaccaggtgacctgctacctgacctggagcccctgcagcagctgcgcctgggagctggtggacttcatcaaggcccacgaccacctgaacctgggcatcttcgccagcagactgtactaccactggtgcaagccccagcagaagggcctgagactgctgtgcggcagccaggtgcccgtggaggtgatgggcttccccaagttcgccgactgctgggagaacttcgtggaccacgagaagcccctgagcttcaacccctacaagatgctggaggagctggacaagaacagcagagccatcaagagaagactggagagaatcaagcagagctag

SEQ ID NO: 73063 - DNA, 1104 bp, synthetic construct
  misc_feature 1..1104: note = Description of Artificial Sequence: Synthetic coding sequence
  source 1..1104: mol_type = other DNA
atggagcccatctacgaggagtacctggccaaccacggcaccatcgtgaagccctactactggctgagcttcagcctggactgcagcaactgcccctaccacatcagaaccggcgaggaggccagagtgagcctgaccgagttctgccagatcttcggcttcccctacggcaccaccttcccccagaccaagcacctgaccttctacgagctgaagaccagcagcggcagcctggtgcagaagggccacgccagcagctgcaccggcaactacatccaccccgagagcatgctgttcgagatgaacggctacctggacagcgccatctacaacaacgacagcatcagacacatcatcctgtacagcaacaacagcccctgcaacgaggccaaccactgctgcatcagcaagatgtacaacttcctgatcacctaccccggcatcaccctgagcatctacttcagccagctgtaccacaccgagatggacttccccgccagcgcctggaacagagaggccctgagaagcctggccagcctgtggcccagagtggtgctgagccccatcagcggcggcatctggcacagcgtgctgcacagcttcatcagcggcgtgagcggcagccacgtgttccagcccatcctgaccggcagagccctggccgacagacacaacgcctacgagatcaacgccatcaccggcgtgaagccctacttcaccgacgtgctgctgcagaccaagagaaaccccaacaccaaggcccaggaggccctggagagctaccccctgaacaacgccttccccggccagttcttccagatgcccagcggccagctgcagcccaacctgccccccgacctgagagcccccgtggtgttcgtgctggtgcccctgagagacctgccccccatgcacatgggccagaaccccaacaagcccagaaacatcgtgagacacctgaacatgccccagatgagcttccaggagaccaaggacctgggcagactgcccaccggcagaagcgtggagatcgtggagatcaccgagcagttcgccagcagcaaggaggccgacgagaagaagaagaagaagggcaagaagtag

SEQ ID NO: 73064 - DNA, 252 bp, synthetic construct
  misc_feature 1..252: note = Description of Artificial Sequence: Synthetic coding sequence
  source 1..252: mol_type = other DNA
atgagactgttcctgagcctgcccgtgctggtggtggtgctgagcatcgtgctggagggccccgcccccgcccagggcacccccgacgtgagcagcgccctggacaagctgaaggagttcggcaacaccctggaggacaaggccagagagctgatcagcagaatcaagcagagcgagctgagcgccaagatgagagagtggttcagcgagaccttccagaaggtgaaggagaagctgaagatcgacagctag

SEQ ID NO: 73065 - DNA, 306 bp, synthetic construct
  misc_feature 1..306: note = Description of Artificial Sequence: Synthetic coding sequence
  source 1..306: mol_type = other DNA
atgggcaccagactgctgcccgccctgttcctggtgctgctggtgctgggcttcgaggtgcagggcacccagcagccccagcaggacgagatgcccagccccaccttcctgacccaggtgaaggagagcctgagcagctactgggagagcgccaagaccgccgcccagaacctgtacgagaagacctacctgcccgccgtggacgagaagctgagagacctgtacagcaagagcaccgccgccatgagcacctacaccggcatcttcaccgaccaggtgctgagcgtgctgaagggcgaggagtag

SEQ ID NO: 73066 - DNA, 384 bp, synthetic construct
  misc_feature 1..384: note = Description of Artificial Sequence: Synthetic coding sequence
  source 1..384: mol_type = other DNA
atgagcctgctgagaaacagactgcaggccctgcccgccctgtgcctgtgcgtgctggtgctggcctgcatcggcgcctgccagcccgaggcccaggagggcaccctgagccccccccccaagctgaagatgagcagatggagcctggtgagaggcagaatgaaggagctgctggagaccgtggtgaacagaaccagagacggctggcagtggttctggagccccagcaccttcagaggcttcatgcagacctactacgacgaccacctgagagacctgggccccctgaccaaggcctggttcctggagagcaaggacagcctgctgaagaagacccacagcctgtgccccagactggtgtgcggcgacaaggaccagggctag

SEQ ID NO: 73067 - DNA, 1101 bp, synthetic construct; identical to SEQ ID NO: 73046
  misc_feature 1..1101: note = Description of Artificial Sequence: Synthetic coding sequence
  source 1..1101: mol_type = other DNA

SEQ ID NO: 73068 - DNA, 354 bp, synthetic construct
  misc_feature 1..354: note = Description of Artificial Sequence: Synthetic coding sequence
  source 1..354: mol_type = other DNA
atgggcacctggggcgccccccacagaaccctgccctgcagaaacagaggcgccatgcagcccagagtgctgctggtggtggccctgctggccctgctggccagcgccagagccagcgaggccgaggacgccagcctgctgagcttcatgcagggctacatgaagcacgccaccaagaccgccaaggacgccctgagcagcgtgcaggagagccaggtggcccagcaggccagaggctgggtgaccgacggcttcagcagcctgaaggactactggagcaccgtgaaggacaagttcagcgagttctgggacctggaccccgaggtgagacccaccagcgccgtggccgcctag

SEQ ID NO: 73069 - DNA, 168 bp, synthetic construct
  misc_feature 1..168: note = Description of Artificial Sequence: Synthetic coding sequence
  source 1..168: mol_type = other DNA
atgcagcccagagtgctgctggtggtggccctgctggccctgctggccagcgccagagccagcgaggccgaggacgccagcctgctgagcttcatgcagggctacatgaagcacgccaccaagaccgccaaggacgccctgagcagcgtgcaggagagccaggtgtag

SEQ ID NO: 73070 - DNA, 384 bp, synthetic construct; identical to SEQ ID NO: 73066
  misc_feature 1..384: note = Description of Artificial Sequence: Synthetic coding sequence
  source 1..384: mol_type = other DNA

SEQ ID NO: 73071 - DNA, 384 bp, synthetic construct; identical to SEQ ID NO: 73066
  misc_feature 1..384: note = Description of Artificial Sequence: Synthetic coding sequence
  source 1..384: mol_type = other DNA

SEQ ID NO: 73072 - DNA, 570 bp, synthetic construct
  misc_feature 1..570: note = Description of Artificial Sequence: Synthetic coding sequence
  source 1..570: mol_type = other DNA
atggtgatgctgctgctgctgctgagcgccctggccggcctgttcggcgccgccgagggccaggccttccacctgggcaagtgccccaacccccccgtgcaggagaacttcgacgtgaacaagtacctgggcagatggtacgagatcgagaagatccccaccaccttcgagaacggcagatgcatccaggccaactacagcctgatggagaacggcaagatcaaggtgctgaaccaggagctgagagccgacggcaccgtgaaccagatcgagggcgaggccacccccgtgaacctgaccgagcccgccaagctggaggtgaagttcagctggttcatgcccagcgccccctactggatcctggccaccgactacgagaactacgccctggtgtacagctgcacctgcatcatccagctgttccacgtggacttcgcctggatcctggccagaaaccccaacctgccccccgagaccgtggacagcctgaagaacatcctgaccagcaacaacatcgacgtgaagaagatgaccgtgaccgaccaggtgaactgccccaagctgagctag

SEQ ID NO: 73073 - DNA, 450 bp, synthetic construct
  misc_feature 1..450: note = Description of Artificial Sequence: Synthetic coding sequence
  source 1..450: mol_type = other DNA
atggtgatgctgctgctgctgctgagcgccctggccggcctgttcggcgccgccgagggccaggccttccacctgggcaagtgccccaacccccccgtgcaggagaacttcgacgtgaacaagtacctgggcagatggtacgagatcgagaagatccccaccaccttcgagaacggcagatgcatccaggccaactacagcctgatggagaacggcaagatcaaggtgctgaaccaggagctgagagccgacggcaccgtgaaccagatcgagggcgaggccacccccgtgaacctgaccgagcccgccaagctggaggtgaagttcagctggttcatgcccagcgccccctactggatcctggccaccgactacgagaactacgccctggtgtacagctgcacctgcatcatccagctgttccacgtggacttcgcctggatcctgtag

SEQ ID NO: 73074 - DNA, 954 bp, synthetic construct
  misc_feature 1..954: note = Description of Artificial Sequence: Synthetic coding sequence
  source 1..954: mol_type = other DNA
atgaaggtgctgtgggccgccctgctggtgaccttcctggccggctgccaggccaaggtggagcaggccgtggagaccgagcccgagcccgagctgagacagcagaccgagtggcagagcggccagagatgggagctggccctgggcagattctgggactacctgagatgggtgcagaccctgagcgagcaggtgcaggaggagctgctgagcagccaggtgacccaggagctgagagccctgatggacgagaccatgaaggagctgaaggcctacaagagcgagctggaggagcagctgacccccgtggccgaggagaccagagccagactgagcaaggagctgcaggccgcccaggccagactgggcgccgacatggaggacgtgtgcggcagactggtgcagtacagaggcgaggtgcaggccatgctgggccagagcaccgaggagctgagagtgagactggccagccacctgagaaagctgagaaagagactgctgagagacgccgacgacctgcagaagagactggccgtgtaccaggccggcgccagagagggcgccgagagaggcctgagcgccatcagagagagactgggccccctggtggagcagggcagagtgagagccgccaccgtgggcagcctggccggccagcccctgcaggagagagcccaggcctggggcgagagactgagagccagaatggaggagatgggcagcagaaccagagacagactggacgaggtgaaggagcaggtggccgaggtgagagccaagctggaggagcaggcccagcagatcagactgcaggccgaggccttccaggccagactgaagagctggttcgagcccctggtggaggacatgcagagacagtgggccggcctggtggagaaggtgcaggccgccgtgggcaccagcgccgcccccgtgcccagcgacaaccactag

SEQ ID NO: 73075 - DNA, 660 bp, synthetic construct
  misc_feature 1..660: note = Description of Artificial Sequence: Synthetic coding sequence
  source 1..660: mol_type = other DNA
atgaaggtgctgtgggccgccctgctggtgaccttcctggccggctgccaggccaaggtggagcaggccgtggagaccgagcccgagcccgagctgagacagcagaccgagtggcagagcggccagagatgggagctggccctgggcagattctgggactacctgagatgggtgcagaccctgagcgagcaggtgcaggaggagctgctgagcagccaggtgacccaggagctgagagccctgatggacgagaccatgaaggagctgaaggcctacaagagcgagctggaggagcagctgacccccgtggccgaggagaccagagccagactgagcaaggagctgcaggccgcccaggccagactgggcgccgacatggaggacgtgtgcggcagactggtgcagtacagaggcgaggtgcaggccatgctgggccagagcaccgaggagctgagagtgagactggccagccacctgagaaagctgagaaagagactgctgagagacgccgacgacctgcagaagagactggccgtgtaccaggccggcgccagagagggcgccgagagaggcctgagcgccatcagagagagactgggccccctggtggagcagggcagagtgagagccgccaccgtgggcagcctggccggccagtag

SEQ ID NO: 73076 - DNA, 867 bp, synthetic construct
  misc_feature 1..867: note = Description of Artificial Sequence: Synthetic coding sequence
  source 1..867: mol_type = other DNA
gaggtgaaggacgtgctgccccaggagcccgtgagaagcgccgtgggcggcaccggcatgagcagcggcgccagcagaaagagctgggaccccggcaacccctggccccccgactggcccatcaccggcagaaagatgaaggtgctgtgggccgccctgctggtgaccttcctggccggctgccaggccaaggtggagcaggccgtggagaccgagcccgagcccgagctgagacagcagaccgagtggcagagcggccagagatgggagctggccctgggcagattctgggactacctgagatgggtgcagaccctgagcgagcaggtgcaggaggagctgctgagcagccaggtgacccaggagctgagagccctgatggacgagaccatgaaggagctgaaggcctacaagagcgagctggaggagcagctgacccccgtggccgaggagaccagagccagactgagcaaggagctgcaggccgcccaggccagactgggcgccgacatggaggacgtgtgcggcagactggtgcagtacagaggcgaggtgcaggccatgctgggccagagcaccgaggagctgagagtgagactggccagccacctgagaaagctgagaaagagactgctgagagacgccgacgacctgcagaagagactggccgtgtaccaggccggcgccagagagggcgccgagagaggcctgagcgccatcagagagagactgggccccctggtggagcagggcagagtgagagccgccaccgtgggcagcctggccggccagcccctgcaggagagagcccaggcctggggcgagagactgagagccagaatggaggagatgggcagcagaacctag

SEQ ID NO: 73077 - DNA, 651 bp, synthetic construct
  misc_feature 1..651: note = Description of Artificial Sequence: Synthetic coding sequence
  source 1..651: mol_type = other DNA
atgaaggtgctgtgggccgccctgctggtgaccttcctggccggctgccaggccaaggtggagcaggccgtggagaccgagcccgagcccgagctgagacagcagaccgagtggcagagcggccagagatgggagctggccctgggcagattctgggactacctgagatgggtgcagaccctgagcgagcaggtgcaggaggagctgctgagcagccaggtgacccaggagctgagagccctgatggacgagaccatgaaggagctgaaggcctacaagagcgagctggaggagcagctgacccccgtggccgaggagaccagagccagactgagcaaggagctgcaggccgcccaggccagactgggcgccgacatggaggacgtgtgcggcagactggtgcagtacagaggcgaggtgcaggccatgctgggccagagcaccgaggagctgagagtgagactggccagccacctgagaaagctgagaaagagactgctgagagacgccgacgacctgcagaagagactggccgtgtaccaggccggcgccagagagggcgccgagagaggcctgagcgccatcagagagagactgggccccctggtggagcagggcagagtgagagccgccaccgtgggcagcctgtag

SEQ ID NO: 73078 - DNA, 10593 bp, synthetic construct
  misc_feature 1..10593: note = Description of Artificial Sequence: Synthetic coding sequence
  source 1..10593: mol_type = other DNA
atggccaaggaggaggacgaggagaagaaggccaagaagggcaagaagggcaagaaggcccccgagcccgagaagcccaagagaagcctgaagggcaccagcagactgttcatgggcttcagagacagaacccccaagatcagcaagaagggccagttcagaagcgccagcgccttcttctggggcctgcacaccggcccccagaagaccaagagaaagagaaaggccagaaccgtgctgaagagcaccagcaagctgatgacccagatgagaatgggcaagaagaagagagccatgaagggcaagaagcccagcttcatggtgatcagattccccggcagaagaggctacggcagactgagacccagagccagaagcctgagcaaggccagcaccgccatcaactggctgaccaagaagttcctgctgaagaaggccgaggagagcggcagcgagcaggccaccgtggacgcctggctgcagagaagcagcagcagaatgggcagcagaaagctgcccttccccagcggcgccgagatcctgagacccggcggcagactgagaagattccccagaagcagaagcatctacgccagcggcgagcccctgggcttcctgcccttcgaggacgaggcccccttccaccacagcggcagcagaaagagcctgtacggcctggagggcttccaggacctgggcgagtactacgactaccacagagacggcgacgactactacgacagacagagcctgcacagatacgaggagcaggagccctacctggccggcctgggcccctacagccccgcctggcccccctacggcgaccactactacggctacccccccgaggacccctacgactactaccaccccgactactacggcggccccttcgaccccggctacacctacggctacggctacgacgactacgagcccccctacgccccccccagcggctacagcagcccctacagctaccacgacggctacgagggcgaggcccacccctacggctactacctggacccctacgccccctacgacgccccctaccccccctacgacctgccctaccacaccccctacgacgtgccctacttcgacccctacggcgtgcactacaccgtgccctacgccgagggcgtgtacggcggcggcgacgaggccatctacccccccgaggtgccctacttctaccccgaggagagcgccagcgccttcgtgtacccctgggtgcccccccccatccccagcccccacaacccctacgcccacgccatggacgacatcgccgagctggaggagcccgaggacgccggcgtggagagacagggcaccagcttcagactgcccagcgccgccttcttcgagcagcagggcatggacaagcccgccagaagcaagctgagcctgatcagaaagttcagactgttccccagaccccaggtgaagctgttcggcaaggagaagctggaggtgcccctgccccccagcctggacatccccctgcccctgggcgacgccgacgaggaggaggacgaggaggagctgccccccgtgagcgccgtgccctacggccaccccttctggggcttcctgacccccagacagagaaacctgcagagagccctgagcgccttcggcgcccacagaggcctgggcttcggccccgagttcggcagacccgtgcccagacccgccaccagcctggccagattcctgaagaagaccctgagcgagaagaagcccatcgccagactgagaggcagccagaaggccagagccggcggccccgccgtgagagaggccgcctacaagagattcggctacaagctggccggcatggaccccgagaagcccggcacccccatcgtgctgagaagagcccagcccagagccagaagcagcaacgacgccagaagaccccccgccccccagcccgcccccagaaccctgagccactggagcgccctgctgagcccccccgtgccccccagaccccccagcagcggccccccccccgccccccccctgagccccgccctgagcggcctgcccagacccgccagcccctacggcagcctgagaagacacccccccccctgggccgcccccgcccacgtgccccccgccccccaggccagctggtgggccttcgtggagccccccgccgtgagccccgaggtgccccccgacctgctggccttccccggccccagacccagcttcagaggcagcagaagaagaggcgccgccttcggcttccccggcgccagccccagagccagcagaagaagagcctggagccccctggccagcccccagcccagcctgagaagcagccccggcctgggctactgcagccccctggccccccccagcccccagctgagcctgagaaccggccccttccagccccccttcctgccccccgccagaagacccagaagcctgcaggagagccccgcccccagaagagccgccggcagactgggcccccccggcagccccctgcccggcagccccagaccccccagcccccccctgggcctgtgccacagccccagaagaagcagcctgaacctgcccagcagactgccccacacctggagaagactgagcgagccccccaccagagccgtgaagccccaggtgagactgcccttccacagaccccccagagccggcgcctggagagcccccctggagcacagagagagccccagagagcccgaggacagcgagaccccctggaccgtgccccccctggcccccagctgggacgtggacatgccccccacccagagaccccccagcccctggcccggcggcgccggcagcagaagaggcttcagcagacccccccccgtgcccgagaaccccttcctgcagctgctgggccccgtgcccagccccaccctgcagcccgaggaccccgccgccgacatgaccagagtgttcctgggcagacaccacgagcccggccccggccagctgaccaagagcgccggccccacccccgagaagcccgaggaggaggccaccctgggcgacccccagctgcccgccgagaccaagccccccacccccgccccccccaaggacgtgaccccccccaaggacatcaccccccccaaggacgtgctgcccgagcagaagaccctgagacccagcctgagctaccccctggccgcctgcgaccagaccagagccacctggcccccctggcacagatggggcaccctgccccaggccgccgcccccctggcccccatcagagcccccgagcccctgcccaagggcggcgagagaagacaggccgcccccggcagattcgccgtggtgatgcccagagtgcagaagctgagcagcttccagagagtgggccccgccaccctgaagccccaggtgcagcccatccaggaccccaagcccagagcctgcagcctgagatggagctgcctgtggctgagagccgacgcctacggcccctggcccagagtgcacacccacccccagagctgccacctgggccccggcgccgcctgcctgagcctgagaggcagctgggaggaggtgggcccccccagctggagaaacaagatgcacagcatcagaaacctgcccagcatgagattcagagagcagcacggcgaggacggcgtggaggacatgacccagctggaggacctgcaggagaccaccgtgctgagcaacctgaagatcagattcgagagaaacctgatctacacctacatcggcagcatcctggtgagcgtgaacccctaccagatgttcggcatctacggccccgagcaggtgcagcagtacaacggcagagccctgggcgagaaccccccccacctgttcgccgtggccaacctggccttcgccaagatgctggacgccaagcagaaccagtgcatcatcatcagcggcgagagcggcagcggcaagaccgaggccaccaagctgatcctgagatacctggccgccatgaaccagaagagagaggtgatgcagcagatcaagatcctggaggccacccccctgctggagagcttcggcaacgccaagaccgtgagaaacgacaacagcagcagattcggcaagttcgtggagatcttcctggagggcggcgtgatcagcggcgccatcaccagccagtacctgctggagaagagcagaatcgtgttccaggccaagaacgagagaaactaccacatcttctacgagctgctggccggcctgcccgcccagctgagacaggccttcagcctgcaggaggccgagacctactactacctgaaccagggcggcaactgcgagatcgccggcaagagcgacgccgacgacttcagaagactgctggccgccatggaggtgctgggcttcagcagcgaggaccaggacagcatcttcagaatcctggccagcatcctgcacctgggcaacgtgtacttcgagaagtacgagaccgacgcccaggaggtggccagcgtggtgagcgccagagagatccaggccgtggccgagctgctgcagatcagccccgagggcctgcagaaggccatcaccttcaaggtgaccgagaccatgagagagaagatcttcacccccctgaccgtggagagcgccgtggacgccagagacgccatcgccaaggtgctgtacgccctgctgttcagctggctgatcaccagagtgaacgccctggtgagccccagacaggacaccctgagcatcgccatcctggacatctacggcttcgaggacctgagcttcaacagcttcgagcagctgtgcatcaactacgccaacgagaacctgcagtacctgttcaacaagatcgtgttccaggaggagcaggaggagtacatcagagagcagatcgactggcaggagatcaccttcgccgacaaccagccctgcatcaacctgatcagcctgaagccctacggcatcctgagaatcctggacgaccagtgctgcttcccccaggccaccgaccacaccttcctgcagaagtgccactaccaccacggcgccaaccccctgtacagcaagcccaagatgcccctgcccgagttcaccatcaagcactacgccggcaaggtgacctaccaggtgcacaagttcctggacaagaaccacgaccaggtgagacaggacgtgctggacctgttcgtgagaagcagaaccagagtggtggcccacctgttcagcagccacgccccccaggccgccccccagagactgggcaagagcagcagcgtgaccagactgtacaaggcccacaccgtggccgccaagttccagcagagcctgctggacctggtggagaagatggagagatgcaaccccctgttcatgagatgcctgaagcccaaccacaagaaggagcccggcctgttcgagcccgacgtggtgatggcccagctgagatacagcggcgtgctggagaccgtgagaatcagaaaggagggcttccccgtgagactgcccttccagggcttcatcgacagatactgctgcctggtggccctgaagcacgacctgcccgccaacggcgacatgtgcgtgagcgtgctgagcagactgtgcaaggtgatgcccaacatgtacagagtgggcgtgagcaagctgttcctgaaggagcacctgtaccagctgctggagagcatgagagagcacgtgctgaacctggccgccctgaccctgcagagatgcctgagaggcttcttcatcaagagaagattcagaagcctgagacacaagatcatcctgctgcagagcagagccagaggctacctggccagacagagataccagcagatgagaagaagcctggtgaagttcagaagcctggtgcacgcctacgtgagcagaagaagatacctgaagctgagagccgagtggagatgccaggtggagggcgccctgctgtgggagcaggaggagctgagcaagagagaggtggtggccgtgggccacctggaggtgcccgccgagctggccggcctgctgcaggccgtggccggcctgggcctggcccaggtgccccaggtggcccccgtgagaacccccagactgcaggccgagcccagagtgaccctgcccctggacatcaacaactaccccatggccaagttcgtgcagtgccacttcaaggagcccgccttcggcatgctgaccgtgcccctgagaacccccctgacccagctgcccgccgagcaccacgccgaggccgtgagcatcttcaagctgatcctgagattcatgggcgacccccacctgcacggcgccagagagaacatcttcggcaactacatcgtgcagaagggcctggccgtgcccgagctgagagacgagatcctggcccagctggccaaccaggtgtggcacaaccacaacgcccacaacgccgagagaggctggctgctgctggccgcctgcctgagcggcttcgcccccagcccctgcttcaacaagtacctgctgaagttcgtgagcgactacggcagaaacggcttccaggccgtgtgccagcacagactgatgcaggccatgggcagagcccagcagcagggcagcggcgccgccagaaccctgccccccacccagctggagtggaccgccacctacgagaaggccagcatggccctggacgtgggctgcttcaacggcgaccagttcagctgccccgtgcacagctggagcaccggcgaggaggtggccggcgacatcctgagacacagaggcctggccgacggctggagaggctggaccgtggccatgaagaacggcgtgcagtgggccgagctggccggccacgactacgtgctggacctggtgagcgacctggagctgctgagagacttccccagacagaagagctacttcatcgtgggcaccgagggccccgccgccagcagaggcggccccaaggtggtgttcggcaacagctgggacagcgacgaggacatgagcaccagaccccagccccaggagcacatgcccaaggtgctggacagcgacggctacagcagccacaaccaggacggcaccaacggcgagaccgaggcccagagaggcaccgccacccaccaggagagcgacagcctgggcgagcccgccgtgccccacaagggcctggactgctacctggacagcctgttcgaccccgtgctgagctacggcgacgccgacctggagaagcccaccgccatcgcctacagaatgaagggcggcggccagcccggcggcggcagcagcagcggcaccgaggacacccccagaagaccccccgagcccaagcccatccccggcctggacgccagcaccctggccctgcagcaggccttcatccacaagcaggccgtgctgctggccagagagatgaccctgcaggccaccgccctgcagcagcagcccctgagcgccgccctgagaagcctgcccgccgagaagccccccgcccccgaggcccagcccaccagcgtgggcaccggcccccccgccaagcccgtgctgctgagagccacccccaagcccctggcccccgcccccctggccaaggcccccagactgcccatcaagcccgtggccgcccccgtgctggcccaggaccaggccagccccgagaccaccagccccagccccgagctggtgagatacagcaccctgaacagcgagcacttcccccagcccacccagcagatcaagaacatcgtgagacagtaccagcagcccttcagaggcggcagacccgaggccctgagaaaggacggcggcaaggtgttcatgaagagacccgacccccacgaggaggccctgatgatcctgaagggccagatgacccacctggccgccgcccccggcacccaggtgagcagagaggccgtggccctggtgaagcccgtgaccagcgcccccagacccagcatggcccccaccagcgccctgcccagcagaagcctggagccccccgaggagctgacccagaccagactgcacagactgatcaaccccaacttctacggctaccaggacgccccctggaagatcttcctgagaaaggaggtgttctaccccaaggacagctacagccaccccgtgcagctggacctgctgttcagacagatcctgcacgacaccctgagcgaggcctgcctgagaatcagcgaggacgagagactgagaatgaaggccctgttcgcccagaaccagctggacacccagaagcccctggtgaccgagagcgtgaagagagccgtggtgagcaccgccagagacacctgggaggtgtacttcagcagaatcttccccgccaccggcagcgtgggcaccggcgtgcagctgctggccgtgagccacgtgggcatcaagctgctgagaatggtgaagggcggccaggaggccggcggccagctgagagtgctgagagcctacagcttcgccgacatcctgttcgtgaccatgcccagccagaacatgctggagttcaacctggccagcgagaaggtgatcctgttcagcgccagagcccaccaggtgaagaccctggtggacgacttcatcctggagctgaagaaggacagcgactacgtggtggccgtgagaaacttcctgcccgaggaccccgccctgctggccttccacaagggcgacatcatccacctgcagcccctggagccccccagagtgggctacagcgccggctgcgtggtgagaagaaaggtggtgtacctggaggagctgagaagaagaggccccgacttcggctggagattcggcaccatccacggcagagtgggcagattccccagcgagctggtgcagcccgccgccgcccccgacttcctgcagctgcccaccgagcccggcagaggcagagccgccgccgtggccgccgccgtggccagcgccgccgccgcccaggaggtgggcagaagaagagagggcccccccgtgagagccagaagcgccgaccacggcgaggacgccctggccctgcccccctacaccatgctggagttcgcccagaagtacttcagagacccccagagaagaccccaggacggcctgagactgaagagcaaggagcccagagagagcagaaccctggaggacatgctgtgcttcaccaagacccccctgcaggagagcctgatcgagctgagcgacagcagcctgagcaagatggccaccgacatgttcctggccgtgatgagattcatgggcgacgcccccctgaagggccagagcgacctggacgtgctgtgcaacctgctgaagctgtgcggcgaccacgaggtgatgagagacgagtgctactgccaggtggtgaagcagatcaccgacaacaccagcagcaagcaggacagctgccagagaggctggagactgctgtacatcgtgaccgcctaccacagctgcagcgaggtgctgcacccccacctgaccagattcctgcaggacgtgagcagaacccccggcctgcccttccagggcatcgccaaggcctgcgagcagaacctgcagaagaccctgagattcggcggcagactggagctgcccagcagcatcgagctgagagccatgctggccggcagaagcagcaagagacagctgttcctgctgcccggcggcctggagagacacctgaagatcaagacctgcaccgtggccctggacgtggtggaggagatctgcgccgagatggccctgaccagacccgaggccttcaacgagtacgtgatcttcgtggtgaccaacagaggccagcacgtgtgccccctgagcagaagagcctacatcctggacgtggccagcgagatggagcaggtggacggcggctacatgctgtggttcagaagagtgctgtgggaccagcccctgaagttcgagaacgagctgtacgtgaccatgcactacaaccaggtgctgcccgactacctgaagggcctgttcagcagcgtgcccgccagcagacccagcgagcagctgctgcagcaggtgagcaagctggccagcctgcagcacagagccaaggaccacttctacctgcccagcgtgagagaggtgcaggagtacatccccgcccagctgtacagaaccaccgccggcagcacctggctgaacctggtgagccagcacagacagcagacccaggccctgagcccccaccaggccagagcccagttcctgggcctgctgagcgccctgcccatgttcggcagcagcttcttcttcatccagagctgcagcaacatcgccgtgcccgccccctgcatcctggccatcaaccacaacggcctgaacttcctgagcaccgagacccacgagctgatggtgaagttccccctgaaggagatccagagcaccagaacccagagacccaccgccaacagcagctacccctacgtggagatcgccctgggcgacgtggccgcccagagaaccctgcagctgcagctggagcagggcctggagctgtgcagagtggtggccgtgcacgtggagaacctgctgagcgcccacgagaagagactgaccctgccccccagcgagatcaccctgctgtag

SEQ ID NO: 73079 - DNA, 840 bp, synthetic construct
  misc_feature 1..840: note = Description of Artificial Sequence: Synthetic coding sequence
  source 1..840: mol_type = other DNA
atgttcagagccccctgccacagactgagagccagaggcaccagaaaggccagagccggcgcctggagaggctgcaccttcccctgcctgggcaagggcatggagagacccgccgccagagagccccacggccccgacgccctgagaagattccagggcctgctgctggacagaagaggcagactgcacggccaggtgctgagactgagagaggtggccagaagactggagagactgagaagaagaagcctggtggccaacgtggccggcagcagcctgagcgccaccggcgccctggccgccatcgtgggcctgagcctgagccccgtgaccctgggcaccagcctgctggtgagcgccgtgggcctgggcgtggccaccgccggcggcgccgtgaccatcaccagcgacctgagcctgatcttctgcaacagcagagagctgagaagagtgcaggagatcgccgccacctgccaggaccagatgagagagatcctgagctgcctggagttcttctgcagatggcagggctgcggcgacagacagctgctgcagtgcggcagaaacgccagcatcgccctgtacaacagcgtgtacttcatcgtgttcttcggcagcagaggcttcctgatccccagaagagccgagggcgacaccaaggtgagccaggccgtgctgaaggccaagatccagaagctggccgagagcctggagagctgcaccggcgccctggacgagctgagcgagcagctggagagcagagtgcagctgtgcaccaagagcagcagaggccacgacctgaagatcagcgccgaccagagagccggcctgttcttctag

SEQ ID NO: 73080 - DNA, 747 bp, synthetic construct
  misc_feature 1..747: note = Description of Artificial Sequence: Synthetic coding sequence
  source 1..747: mol_type = other DNA
atgggcatggagagacccgccgccagagagccccacggccccgacgccctgagaagattccagggcctgctgctggacagaagaggcagactgcacggccaggtgctgagactgagagaggtggccagaagactggagagactgagaagaagaagcctggtggccaacgtggccggcagcagcctgagcgccaccggcgccctggccgccatcgtgggcctgagcctgagccccgtgaccctgggcaccagcctgctggtgagcgccgtgggcctgggcgtggccaccgccggcggcgccgtgaccatcaccagcgacctgagcctgatcttctgcaacagcagagagctgagaagagtgcaggagatcgccgccacctgccaggaccagatgagagagatcctgagctgcctggagttcttctgcagatggcagggctgcggcgacagacagctgctgcagtgcggcagaaacgccagcatcgccctgtacaacagcgtgtacttcatcgtgttcttcggcagcagaggcttcctgatccccagaagagccgagggcgacaccaaggtgagccaggccgtgctgaaggccaagatccagaagctggccgagagcctggagagctgcaccggcgccctggacgagctgagcgagcagctggagagcagagtgcagctgtgcaccaagagcagcagaggccacgacctgaagatcagcgccgaccagagagccggcctgttcttctag

SEQ ID NO: 73081 - DNA, 1245 bp, synthetic construct
  misc_feature 1..1245: note = Description of Artificial Sequence: Synthetic coding sequence
  source 1..1245: mol_type = other DNA
atgagattcaagagccacaccgtggagctgagaagaccctgcagcgacatggagggcgccgccctgctgagagtgagcgtgctgtgcatctggatgagcgccctgttcctgggcgtgggcgtgagagccgaggaggccggcgccagagtgcagcagaacgtgcccagcggcaccgacaccggcgacccccagagcaagcccctgggcgactgggccgccggcaccatggaccccgagagcagcatcttcatcgaggacgccatcaagtacttcaaggagaaggtgagcacccagaacctgctgctgctgctgaccgacaacgaggcctggaacggcttcgtggccgccgccgagctgcccagaaacgaggccgacgagctgagaaaggccctggacaacctggccagacagatgatcatgaaggacaagaactggcacgacaagggccagcagtacagaaactggttcctgaaggagttccccagactgaagagcgagctggaggacaacatcagaagactgagagccctggccgacggcgtgcagaaggtgcacaagggcaccaccatcgccaacgtggtgagcggcagcctgagcatcagcagcggcatcctgaccctggtgggcatgggcctggcccccttcaccgagggcggcagcctggtgctgctggagcccggcatggagctgggcatcaccgccgccctgaccggcatcaccagcagcaccatggactacggcaagaagtggtggacccaggcccaggcccacgacctggtgatcaagagcctggacaagctgaaggaggtgagagagttcctgggcgagaacatcagcaacttcctgagcctggccggcaacacctaccagctgaccagaggcatcggcaaggacatcagagccctgagaagagccagagccaacctgcagagcgtgccccacgccagcgccagcagacccagagtgaccgagcccatcagcgccgagagcggcgagcaggtggagagagtgaacgagcccagcatcctggagatgagcagaggcgtgaagctgaccgacgtggcccccgtgagcttcttcctggtgctggacgtggtgtacctggtgtacgagagcaagcacctgcacgagggcgccaagagcgagaccgccgaggagctgaagaaggtggcccaggagctggaggagaagctgaacatcctgaacaacaactacaagatcctgcaggccgaccaggagctgtag

SEQ ID NO: 73082 - DNA, 834 bp, synthetic construct
  misc_feature 1..834: note = Description of Artificial Sequence: Synthetic coding sequence
  source 1..834: mol_type = other DNA
atgatcatgaaggacaagaactggcacgacaagggccagcagtacagaaactggttcctgaaggagttccccagactgaagagcgagctggaggacaacatcagaagactgagagccctggccgacggcgtgcagaaggtgcacaagggcaccaccatcgccaacgtggtgagcggcagcctgagcatcagcagcggcatcctgaccctggtgggcatgggcctggcccccttcaccgagggcggcagcctggtgctgctggagcccggcatggagctgggcatcaccgccgccctgaccggcatcaccagcagcaccatggactacggcaagaagtggtggacccaggcccaggcccacgacctggtgatcaagagcctggacaagctgaaggaggtgagagagttcctgggcgagaacatcagcaacttcctgagcctggccggcaacacctaccagctgaccagaggcatcggcaaggacatcagagccctgagaagagccagagccaacctgcagagcgtgccccacgccagcgccagcagacccagagtgaccgagcccatcagcgccgagagcggcgagcaggtggagagagtgaacgagcccagcatcctggagatgagcagaggcgtgaagctgaccgacgtggcccccgtgagcttcttcctggtgctggacgtggtgtacctggtgtacgagagcaagcacctgcacgagggcgccaagagcgagaccgccgaggagctgaagaaggtggcccaggagctggaggagaagctgaacatcctgaacaacaactacaagatcctgcaggccgaccaggagctgtag

SEQ ID NO: 73083 - DNA, 1197 bp, synthetic construct
  misc_feature 1..1197: note = Description of Artificial Sequence: Synthetic coding sequence
  source 1..1197: mol_type = other DNA
atggagggcgccgccctgctgagagtgagcgtgctgtgcatctggatgagcgccctgttcctgggcgtgggcgtgagagccgaggaggccggcgccagagtgcagcagaacgtgcccagcggcaccgacaccggcgacccccagagcaagcccctgggcgactgggccgccggcaccatggaccccgagagcagcatcttcatcgaggacgccatcaagtacttcaaggagaaggtgagcacccagaacctgctgctgctgctgaccgacaacgaggcctggaacggcttcgtggccgccgccgagctgcccagaaacgaggccgacgagctgagaaaggccctggacaacctggccagacagatgatcatgaaggacaagaactggcacgacaagggccagcagtacagaaactggttcctgaaggagttccccagactgaagagcgagctggaggacaacatcagaagactgagagccctggccgacggcgtgcagaaggtgcacaagggcaccaccatcgccaacgtggtgagcggcagcctgagcatcagcagcggcatcctgaccctggtgggcatgggcctggcccccttcaccgagggcggcagcctggtgctgctggagcccggcatggagctgggcatcaccgccgccctgaccggcatcaccagcagcaccatggactacggcaagaagtggtggacccaggcccaggcccacgacctggtgatcaagagcctggacaagctgaaggaggtgagagagttcctgggcgagaacatcagcaacttcctgagcctggccggcaacacctaccagctgaccagaggcatcggcaaggacatcagagccctgagaagagccagagccaacctgcagagcgtgccccacgccagcgccagcagacccagagtgaccgagcccatcagcgccgagagcggcgagcaggtggagagagtgaacgagcccagcatcctggagatgagcagaggcgtgaagctgaccgacgtggcccccgtgagcttcttcctggtgctggacgtggtgtacctggtgtacgagagcaagcacctgcacgagggcgccaagagcgagaccgccgaggagctgaagaaggtggcccaggagctggaggagaagctgaacatcctgaacaacaactacaagatcctgcaggccgaccaggagctgtag

SEQ ID NO: 73084 - DNA, 1197 bp, synthetic construct; identical to SEQ ID NO: 73083
  misc_feature 1..1197: note = Description of Artificial Sequence: Synthetic coding sequence
  source 1..1197: mol_type = other DNA

SEQ ID NO: 73085 - DNA, 1197 bp, synthetic construct; identical to SEQ ID NO: 73083
  misc_feature 1..1197: note = Description of Artificial Sequence: Synthetic coding sequence
  source 1..1197: mol_type = other DNA

SEQ ID NO: 73086 - DNA, 1197 bp, synthetic construct; identical to SEQ ID NO: 73083
  misc_feature 1..1197: note = Description of Artificial Sequence: Synthetic coding sequence
  source 1..1197: mol_type = other DNA

SEQ ID NO: 73087 - DNA, 1143 bp, synthetic construct
  misc_feature 1..1143: note = Description of Artificial Sequence: Synthetic coding sequence
  source 1..1143: mol_type = other DNA
atggagggcgccgccctgctgagagtgagcgtgctgtgcatctgggtgcagcagaacgtgcccagcggcaccgacaccggcgacccccagagcaagcccctgggcgactgggccgccggcaccatggaccccgagagcagcatcttcatcgaggacgccatcaagtacttcaaggagaaggtgagcacccagaacctgctgctgctgctgaccgacaacgaggcctggaacggcttcgtggccgccgccgagctgcccagaaacgaggccgacgagctgagaaaggccctggacaacctggccagacagatgatcatgaaggacaagaactggcacgacaagggccagcagtacagaaactggttcctgaaggagttccccagactgaagagcgagctggaggacaacatcagaagactgagagccctggccgacggcgtgcagaaggtgcacaagggcaccaccatcgccaacgtggtgagcggcagcctgagcatcagcagcggcatcctgaccctggtgggcatgggcctggcccccttcaccgagggcggcagcctggtgctgctggagcccggcatggagctgggcatcaccgccgccctgaccggcatcaccagcagcaccatggactacggcaagaagtggtggacccaggcccaggcccacgacctggtgatcaagagcctggacaagctgaaggaggtgagagagttcctgggcgagaacatcagcaacttcctgagcctggccggcaacacctaccagctgaccagaggcatcggcaaggacatcagagccctgagaagagccagagccaacctgcagagcgtgccccacgccagcgccagcagacccagagtgaccgagcccatcagcgccgagagcggcgagcaggtggagagagtgaacgagcccagcatcctggagatgagcagaggcgtgaagctgaccgacgtggcccccgtgagcttcttcctggtgctggacgtggtgtacctggtgtacgagagcaagcacctgcacgagggcgccaagagcgagaccgccgaggagctgaagaaggtggcccaggagctggaggagaagctgaacatcctgaacaacaactacaagatcctgcaggccgaccaggagctgtag

SEQ ID NO: 73088 - DNA, 483 bp, synthetic construct
  misc_feature 1..483: note = Description of Artificial Sequence: Synthetic coding sequence
  source 1..483: mol_type = other DNA
atggagggcgccgccctgctgagagtgagcgtgctgtgcatctggatgagcgccctgttcctgggcgtgggcgtgagagccgaggaggccggcgccagagtgcagcagaacgtgcccagcggcaccgacaccggcgacccccagagcaagcccctgggcgactgggccgccggcaccatggaccccgagagcagcatcttcatcgaggacgccatcaagtacttcaaggagaaggtgagcacccagaacctgctgctgctgctgaccgacaacgaggcctggaacggcttcgtggccgccgccgagctgcccagaaacgaggccgacgagctgagaaaggccctggacaacctggccagacagatgatcatgaaggacaagaactggcacgacaagggccagcagtacagaaactggttcctgaaggagttccccagactgaagagcgagctggaggacaacatcagaagactgagagcctag

SEQ ID NO: 73089 - DNA, 426 bp, synthetic construct
  misc_feature 1..426: note = Description of Artificial Sequence: Synthetic coding sequence
  source 1..426: mol_type = other DNA
atggagggcgccgccctgctgagagtgagcgtgctgtgcatctggatgagcgccctgttcctgggcgtgggcgtgagagccgaggaggccggcgccagagtgcagcagaacgtgcccagcggcaccgacaccggcgacccccagagcaagcccctgggcgactgggccgccggcaccatggaccccggccccgccggcagcagaggcgacagcggcgagccctgcaccctgagacccgcctgcagaggccagagacagcacggcggcgccagcagaatcagcgccgagggccccgcccccatgcccagaagaagaacccccagcaccgcccacctgagagtgcccaagaccagcagaagaaacctgctgtgcatgagagccgtgagcctgctgagaatgcccctgagcatcagcagaaagaagtag

SEQ ID NO: 73090 - DNA, 357 bp, synthetic construct
  misc_feature 1..357: note = Description of Artificial Sequence: Synthetic coding sequence
  source 1..357: mol_type = other DNA
atgagattcaagagccacaccgtggagctgagaagcaccctgagccagcccctgttcagctgcagcagaagaagaccctgcagcgacatggagggcgccgccctgctgagagtgagcgtgctgtgcatctggatgagcgccctgttcctgggcgtgggcgtgagagccgaggaggccggcgccagagtgcagcagaacgtgcccagcggcaccgacaccggcgacccccagagcaagcccctgggcgactgggccgccggcaccatggaccccgagagcagcatcttcatcgaggacgccatcaagtacttcaaggagaaggtgagcacccagaacctgctgctgctgctgacctag

SEQ ID NO: 73091 - DNA, 426 bp, synthetic construct; identical to SEQ ID NO: 73089
  misc_feature 1..426: note = Description of Artificial Sequence: Synthetic coding sequence
  source 1..426: mol_type = other DNA

SEQ ID NO: 73092 - DNA, 1014 bp, synthetic construct
  misc_feature 1..1014: note = Description of Artificial Sequence: Synthetic coding sequence
  source 1..1014: mol_type = other DNA
atgaaccccgagagcagcatcttcatcgaggactacctgaagtacttccaggaccaggtgagcagagagaacctgctgcagctgctgaccgacgacgaggcctggaacggcttcgtggccgccgccgagctgcccagagacgaggccgacgagctgagaaaggccctgaacaagctggccagccacatggtgatgaaggacaagaacagacacgacaaggaccagcagcacagacagtggttcctgaaggagttccccagactgaagagagagctggaggaccacatcagaaagctgagagccctggccgaggaggtggagcaggtgcacagaggcaccaccatcgccaacgtggtgagcaacagcgtgggcaccaccagcggcatcctgaccctgctgggcctgggcctggcccccttcaccgagggcatcagcttcgtgctgctggacaccggcatgggcctgggcgccgccgccgccgtggccggcatcacctgcagcgtggtggagctggtgaacaagctgagagccagagcccaggccagaaacctggaccagagcggcaccaacgtggccaaggtgatgaaggagttcgtgggcggcaacacccccaacgtgctgaccctggtggacaactggtaccaggtgacccagggcatcggcagaaacatcagagccatcagaagagccagagccaacccccagctgggcgcctacgccccccccccccacatcatcggcagaatcagcgccgagggcggcgagcaggtggagagagtggtggagggccccgcccaggccatgagcagaggcaccatgatcgtgggcgccgccaccggcggcatcctgctgctgctggacgtggtgagcctggcctacgagagcaagcacctgctggagggcgccaagagcgagagcgccgaggagctgaagaagagagcccaggagctggagggcaagctgaacttcctgaccaagatccacgagatgctgcagcccggccaggaccagtag

SEQ ID NO: 73093 - DNA, 1014 bp, synthetic construct; identical to SEQ ID NO: 73092
  misc_feature 1..1014: note = Description of Artificial Sequence: Synthetic coding sequence
  source 1..1014: mol_type = other DNA

SEQ ID NO: 73094 - DNA, 1350 bp, synthetic construct
  misc_feature 1..1350: note = Description of Artificial Sequence: Synthetic coding sequence
  source 1..1350: mol_type = other DNA
atgcacagctggacctgggacccccacagcagcgagcagctggacctggcccagagcctgagcgaggaggaccccctgagcagcctgagaggcagcatccagccccagccccccgccgaggcccccgacaagggcggcagccaggccaacaacgaccccggcggctgggaccccggctgcagcagcagccaggtgctgggcagaaccagaggcccctgcctgggcgtgagagtgagagaggaggaggccggcaccagagtgaaggagaacctgcccgtgtggaccgtgaccggcgagctgcagggcaagcccctgggcaaccccgccgccggcaccatgaaccccgagagcagcatcttcatcgaggactacctgaagtacttccaggaccaggtgagcagagagaacctgctgcagctgctgaccgacgacgaggcctggaacggcttcgtggccgccgccgagctgcccagagacgaggccgacgagctgagaaaggccctgaacaagctggccagccacatggtgatgaaggacaagaacagacacgacaaggaccagcagcacagacagtggttcctgaaggagttccccagactgaagagagagctggaggaccacatcagaaagctgagagccctggccgaggaggtggagcaggtgcacagaggcaccaccatcgccaacgtggtgagcaacagcgtgggcaccaccagcggcatcctgaccctgctgggcctgggcctggcccccttcaccgagggcatcagcttcgtgctgctggacaccggcatgggcctgggcgccgccgccgccgtggccggcatcacctgcagcgtggtggagctggtgaacaagctgagagccagagcccaggccagaaacctggaccagagcggcaccaacgtggccaaggtgatgaaggagttcgtgggcggcaacacccccaacgtgctgaccctggtggacaactggtaccaggtgacccagggcatcggcagaaacatcagagccatcagaagagccagagccaacccccagctgggcgcctacgccccccccccccacatcatcggcagaatcagcgccgagggcggcgagcaggtggagagagtggtggagggccccgcccaggccatgagcagaggcaccatgatcgtgggcgccgccaccggcggcatcctgctgctgctggacgtggtgagcctggcctacgagagcaagcacctgctggagggcgccaagagcgagagcgccgaggagctgaagaagagagcccaggagctggagggcaagctgaacttcctgaccaagatccacgagatgctgcagcccggccaggaccagtag

SEQ ID NO: 73095 - DNA, 225 bp, synthetic construct
  misc_feature 1..225: note = Description of Artificial Sequence: Synthetic coding sequence
  source 1..225: mol_type = other DNA
atgaaccccgagagcagcatcttcatcgaggactacctgaagtacttccaggaccaggtgagcagagagaacctgctgcagctgctgaccgacgacgaggcctggaacggcttcgtggccgccgccgagctgcccagagacgaggccgacgagctgagaaaggccctgaacaagctggccagccacatggtgatgaaggacaagaacagacacgacaaggactag

SEQ ID NO: 73096 - DNA, 387 bp, synthetic construct
  misc_feature 1..387: note = Description of Artificial Sequence: Synthetic coding sequence
  source 1..387: mol_type = other DNA
atgaaccccgagagcagcatcttcatcgaggactacctgaagtacttccaggaccaggtgagcagagagaacctgctgcagctgctgaccgacgacgaggcctggaacggcttcgtggccgccgccgagctgcccagagacgaggccgacgagctgagaaaggccctgaacaagctggccagccacatggtgatgaaggacaagaacagacacgacaaggaccagcagcacagacagtggttcctgaaggagttccccagactgaagagagagctggaggaccacatcagaaagctgagagccctggccgaggaggtggagcaggtgcacagaggcaccaccatcgccaacgtggtgagcaacagcgtgggcaccaccagcggctag

SEQ ID NO: 73097 - DNA, 1209 bp, synthetic construct
  misc_feature 1..1209: note = Description of Artificial Sequence: Synthetic coding sequence
  source 1..1209: mol_type = other DNA
atgggcctgggccagggctggggctgggaggccagctgcttcgcctgcctgatcagaagctgctgccaggtggtgaccttcaccttccccttcggcttccagggcatcagccagagcctggagaacgtgagcggctactacgccgacgccagactggaggtgggcagcacccagctgagaaccgccggcagctgcagccacagcttcaagagaagcttcctggagaagaagagattcaccgaggaggccaccaagtacttcagagagagagtgagccccgtgcacctgcagatcctgctgaccaacaacgaggcctggaagagattcgtgaccgccgccgagctgcccagagacgaggccgacgccctgtacgaggccctgaagaagctgagaacctacgccgccatcgaggacgagtacgtgcagcagaaggacgagcagttcagagagtggttcctgaaggagttcccccaggtgaagagaaagatccaggagagcatcgagaagctgagagccctggccaacggcatcgaggaggtgcacagaggctgcaccatcagcaacgtggtgagcagcagcaccggcgccgccagcggcatcatgagcctggccggcctggtgctggcccccttcaccgccggcaccagcctggccctgaccgccgccggcgtgggcctgggcgccgccagcgccgtgaccggcatcaccaccagcatcgtggagcacagctacaccagcagcgccgaggccgaggccagcagactgaccgccaccagcatcgacagactgaaggtgttcaaggaggtgatgagagacatcacccccaacctgctgagcctgctgaacaactactacgaggccacccagaccatcggcagcgagatcagagccatcagacaggccagagccagagccagactgcccgtgaccacctggagaatcagcgccggcagcggcggccaggccgagagaaccatcgccggcaccaccagagccgtgagcagaggcgccagaatcctgagcgccaccaccagcggcatcttcctggccctggacgtggtgaacctggtgtacgagagcaagcacctgcacgagggcgccaagagcgccagcgccgaggagctgagaagacaggcccaggagctggaggagaacctgatggagctgacccagatctaccagagactgaacccctgccacacccactag

SEQ ID NO: 73098 - DNA, 609 bp, synthetic construct
  misc_feature 1..609: note = Description of Artificial Sequence: Synthetic coding sequence
  source 1..609: mol_type = other DNA
atgagcctggccggcctggtgctggcccccttcaccgccggcaccagcctggccctgaccgccgccggcgtgggcctgggcgccgccagcgccgtgaccggcatcaccaccagcatcgtggagcacagctacaccagcagcgccgaggccgaggccagcagactgaccgccaccagcatcgacagactgaaggtgttcaaggaggtgatgagagacatcacccccaacctgctgagcctgctgaacaactactacgaggccacccagaccatcggcagcgagatcagagccatcagacaggccagagccagagccagactgcccgtgaccacctggagaatcagcgccggcagcggcggccaggccgagagaaccatcgccggcaccaccagagccgtgagcagaggcgccagaatcctgagcgccaccaccagcggcatcttcctggccctggacgtggtgaacctggtgtacgagagcaagcacctgcacgagggcgccaagagcgccagcgccgaggagctgagaagacaggcccaggagctggaggagaacctgatggagctgacccagatctaccagagactgaacccctgccacacccactag

SEQ ID NO: 73099 - DNA, 609 bp, synthetic construct; identical to SEQ ID NO: 73098
  misc_feature 1..609: note = Description of Artificial Sequence: Synthetic coding sequence
  source 1..609: mol_type = other DNA

SEQ ID NO: 73100 - DNA, 996 bp, synthetic construct
  misc_feature 1..996: note = Description of Artificial Sequence: Synthetic coding sequence
  source 1..996: mol_type = other DNA
atggacagcgagaagaagagattcaccgaggaggccaccaagtacttcagagagagagtgagccccgtgcacctgcagatcctgctgaccaacaacgaggcctggaagagattcgtgaccgccgccgagctgcccagagacgaggccgacgccctgtacgaggccctgaagaagctgagaacctacgccgccatcgaggacgagtacgtgcagcagaaggacgagcagttcagagagtggttcctgaaggagttcccccaggtgaagagaaagatccaggagagcatcgagaagctgagagccctggccaacggcatcgaggaggtgcacagaggctgcaccatcagcaacgtggtgagcagcagcaccggcgccgccagcggcatcatgagcctggccggcctggtgctggcccccttcaccgccggcaccagcctggccctgaccgccgccggcgtgggcctgggcgccgccagcgccgtgaccggcatcaccaccagcatcgtggagcacagctacaccagcagcgccgaggccgaggccagcagactgaccgccaccagcatcgacagactgaaggtgttcaaggaggtgatgagagacatcacccccaacctgctgagcctgctgaacaactactacgaggccacccagaccatcggcagcgagatcagagccatcagacaggccagagccagagccagactgcccgtgaccacctggagaatcagcgccggcagcggcggccaggccgagagaaccatcgccggcaccaccagagccgtgagcagaggcgccagaatcctgagcgccaccaccagcggcatcttcctggccctggacgtggtgaacctggtgtacgagagcaagcacctgcacgagggcgccaagagcgccagcgccgaggagctgagaagacaggcccaggagctggaggagaacctgatggagctgacccagatctaccagagactgaacccctgccacacccactag

SEQ ID NO: 73101 - DNA, 609 bp, synthetic construct; identical to SEQ ID NO: 73098
  misc_feature 1..609: note = Description of Artificial Sequence: Synthetic coding sequence
  source 1..609: mol_type = other DNA

SEQ ID NO: 73102 - DNA, 324 bp, synthetic construct
  misc_feature 1..324: note = Description of Artificial Sequence: Synthetic coding sequence
  source 1..324: mol_type = other DNA
atgggcagctgggtgcagctgatcaccagcgtgggcaccagcggcctgttcctgggcgtgagagtgagagaggagggcgccggcatgagatgcagcaagaccatccaggccggccagtggctggacagcagcaagggccccctgggccccagccccccccccgtgcccaccgccggctacagcagcagcttctgcgtgcactacgtgaacctgctgcccggcgtgctggtgctgagcgtgaccagccagtacccccacctgagcatggccctgtgccagctggccgcccacgactggcccagactgagctgcgtgtgcgtgtag

SEQ ID NO: 73103 - DNA, 1044 bp, synthetic construct
  misc_feature 1..1044: note = Description of Artificial Sequence: Synthetic coding sequence
  source 1..1044: mol_type = other DNA
atgggcagctgggtgcagctgatcaccagcgtgggcgtgcagcagaaccaccccggctggaccgtggccggccagttccaggagaagaagagattcaccgaggaggtgatcgagtacttccagaagaaggtgagccccgtgcacctgaagatcctgctgaccagcgacgaggcctggaagagattcgtgagagtggccgagctgcccagagaggaggccgacgccctgtacgaggccctgaagaacctgaccccctacgtggccatcgaggacaaggacatgcagcagaaggagcagcagttcagagagtggttcctgaagttcccccagatcagatggaagatccaggagagcatcgagagactgagagtgatcgccaacgagatcgagaaggtgcacagaggctgcgtgatcgccaacgtggtgagcggcagcaccggcatcctgagcgtgatcggcgtgatgctggcccccttcaccgccggcctgagcctgagcatcaccgccgccggcgtgggcctgggcatcgccagcgccaccgccggcatcgccagcagcatcgtggagaacacctacaccagaagcgccgagctgaccgccagcagactgaccgccaccagcaccgaccagctggaggccctgagagacatcctgagagacatcacccccaacgtgctgagcttcgccctggacttcgacgaggccaccaagatgatcgccaacgacgtgcacaccctgagaagaagcaaggccaccgtgggcagacccctgatcgcctggagatacgtgcccatcaacgtggtggagaccctgagaaccagaggcgcccccaccagaatcgtgagaaaggtggccagaaacctgggcaaggccaccagcggcgtgctggtggtgctggacgtggtgaacctggtgcaggacagcctggacctgcacaagggcgccaagagcgagagcgccgagagcctgagacagtgggcccaggagctggaggagaacctgaacgagctgacccacatccaccagagcctgaaggccggctag

SEQ ID NO: 73104 - DNA, 1053 bp, synthetic construct
  misc_feature 1..1053: note = Description of Artificial Sequence: Synthetic coding sequence
  source 1..1053: mol_type = other DNA
atggagggcgccgccctgctgaagatcttcgtggtgtgcatctgggtgcagcagaaccaccccggctggaccgtggccggccagttccaggagaagaagagattcaccgaggaggtgatcgagtacttccagaagaaggtgagccccgtgcacctgaagatcctgctgaccagcgacgaggcctggaagagattcgtgagagtggccgagctgcccagagaggaggccgacgccctgtacgaggccctgaagaacctgaccccctacgtggccatcgaggacaaggacatgcagcagaaggagcagcagttcagagagtggttcctgaagttcccccagatcagatggaagatccaggagagcatcgagagactgagagtgatcgccaacgagatcgagaaggtgcacagaggctgcgtgatcgccaacgtggtgagcggcagcaccggcatcctgagcgtgatcggcgtgatgctggcccccttcaccgccggcctgagcctgagcatcaccgccgccggcgtgggcctgggcatcgccagcgccaccgccggcatcgccagcagcatcgtggagaacacctacaccagaagcgccgagctgaccgccagcagactgaccgccaccagcaccgaccagctggaggccctgagagacatcctgagagacatcacccccaacgtgctgagcttcgccctggacttcgacgaggccaccaagatgatcgccaacgacgtgcacaccctgagaagaagcaaggccaccgtgggcagacccctgatcgcctggagatacgtgcccatcaacgtggtggagaccctgagaaccagaggcgcccccaccagaatcgtgagaaaggtggccagaaacctgggcaaggccaccagcggcgtgctggtggtgctggacgtggtgaacctggtgcaggacagcctggacctgcacaagggcgccaagagcgagagcgccgagagcctgagacagtgggcccaggagctggaggagaacctgaacgagctgacccacatccaccagagcctgaaggccggctag

SEQ ID NO: 73105 - DNA, 393 bp, synthetic construct
  misc_feature 1..393: note = Description of Artificial Sequence: Synthetic coding sequence
  source 1..393: mol_type = other DNA
atggagggcgccgccctgctgaagatcttcgtggtgtgcatctgggtgcagcagaaccaccccggctggaccgtggccggccagttccaggagaagaagagattcaccgaggaggtgatcgagtacttccagaagaaggtgagccccgtgcacctgaagatcctgctgaccagcgacgaggcctggaagagattcgtgagagtggccgagctgcccagagaggaggccgacgccctgtacgaggccctgaagaacctgaccccctacgtggccatcgaggacaaggacatgcagcagaaggagcagcagttcagagagtggttcctgaaggtgagcagcaaccagatggaggacagcggcgtgcacagaaaggccagctgccactgcaagtag

SEQ ID NO: 73106 - DNA, 384 bp, synthetic construct
  misc_feature 1..384: note = Description of Artificial Sequence: Synthetic coding sequence
  source 1..384: mol_type = other DNA
atgggcagctgggtgcagctgatcaccagcgtgggcgtgcagcagaaccaccccggctggaccgtggccggccagttccaggagaagaagagattcaccgaggaggtgatcgagtacttccagaagaaggtgagccccgtgcacctgaagatcctgctgaccagcgacgaggcctggaagagattcgtgagagtggccgagctgcccagagaggaggccgacgccctgtacgaggccctgaagaacctgaccccctacgtggccatcgaggacaaggacatgcagcagaaggagcagcagttcagagagtggttcctgaaggtgagcagcaaccagatggaggacagcggcgtgcacagaaaggccagctgccactgcaagtag

SEQ ID NO: 73107 - DNA, 198 bp, synthetic construct
  misc_feature 1..198: note = Description of Artificial Sequence: Synthetic coding sequence
  source 1..198: mol_type = other DNA
atgggcagctgggtgcagctgatcaccagcgtgggcgtgcagcagaaccaccccggctggaccgtggccggccagttccaggagaagaagagattcaccgaggaggtgatcgagtacttccagaagaaggtgagccccgtgcacctgaagatcctgctgaccagcgacgaggcctggaagagattcgtgagagtgtag

SEQ ID NO: 73108 - DNA, 384 bp, synthetic construct; identical to SEQ ID NO: 73106
  misc_feature 1..384: note = Description of Artificial Sequence: Synthetic coding sequence
  source 1..384: mol_type = other DNA

SEQ ID NO: 73109 - DNA, 183 bp, synthetic construct
  misc_feature 1..183: note = Description of Artificial Sequence: Synthetic coding sequence
  source 1..183: mol_type = other DNA
atgggcagctgggtgcagctgatcaccagcgtgggcgtgcagcagaaccaccccggctggaccgtggccggccagttccaggagaagaagagattcaccgaggaggtgatcgagtacttccagaagaaggtgagccccgtgcacctgaagatcctgctgaccagcgacgaggcctggaagtag

SEQ ID NO: 73110 - DNA, 219 bp, synthetic construct
  misc_feature 1..219: note = Description of Artificial Sequence: Synthetic coding sequence
  source 1..219: mol_type = other DNA
atgggcagctgggtgcagctgatcaccagcgtgggcgtgcagcagaaccaccccggctggaccgtggccggccagttccaggagaagaagagattcaccgaggaggtgatcgagtacttccagaagaaggtgagccccgtgcacctgaagatcctgctgaccagcgacgaggcctggaagagattcgtgagagtggccgagctgcccagagaggagtag

SEQ ID NO: 73111 - DNA, 213 bp, synthetic construct
  misc_feature 1..213: note = Description of Artificial Sequence: Synthetic coding sequence
  source 1..213: mol_type = other DNA
atgggcagctgggtgcagctgatcaccagcgtgggcgtgcagcagaaccaccccggctggaccgtggccggccagttccaggagaagaagagattcaccgaggaggtgatcgagtacttccagaagaaggtgagccccgtgcacctgaagatcctgctgaccagcgacgaggcctggaagagattcgtgagagtggccgagctgcccagatag

SEQ ID NO: 73112 - DNA, 1302 bp, synthetic construct
  misc_feature 1..1302: note = Description of Artificial Sequence: Synthetic coding sequence
  source 1..1302: mol_type = other DNA
atgccctgcggcaagcagggcaacctgcaggtgcccggcagcaaggtgctgcccggcctgggcgagggctgcaaggagatgtggctgagaaaggtgatctacggcggcgaggtgtggggcaagagccccgagcccgagttccccagcctggtgaacctgtgccagagctggaagatcaacaacctgatgagcaccgtgcacagcgacgaggccggcatgctgagctacttcctgttcgaggagctgatgagatgcgacaaggacagcatgcccgacggcaacctgagcgaggaggagaagctgttcctgagctacttccccctgcacaagttcgagctggagcagaacatcaaggagctgaacaccctggccgaccaggtggacaccacccacgagctgctgaccaagaccagcctggtggccagcagcagcggcgccgtgagcggcgtgatgaacatcctgggcctggccctggcccccgtgaccgccggcggcagcctgatgctgagcgccaccggcaccggcctgggcgccgccgccgccatcaccaacatcgtgaccaacgtgctggagaacagaagcaacagcgccgccagagacaaggccagcagactgggccccctgaccaccagccacgaggccttcggcggcatcaactggagcgagatcgaggccgccggcttctgcgtgaacaagtgcgtgaaggccatccagggcatcaaggacctgcacgcctaccagatggccaagagcaacagcggcttcatggccatggtgaagaacttcgtggccaagagacacatccccttctggaccgccagaggcgtgcagagagccttcgagggcaccaccctggccatgaccaacggcgcctgggtgatgggcgccgccggcgccggcttcctgctgatgaaggacatgagcagcttcctgcagagctggaagcacctggaggacggcgccagaaccgagaccgccgaggagctgagagccctggccaagaagctggagcaggagctggacagactgacccagcaccacagacacctgccccagaaggccagccagacctgcagcagcagcagaggcagagccgtgagaggcagcagagtggtgaagcccgagggcagcagaagccccctgccctggcccgtggtggagcaccagcccagactgggccccggcgtggccctgagaacccccaagagaaccgtgagcgcccccagaatgctgggccaccagcccgccccccccgcccccgccagaaagggcagacaggcccccggcagacacagacagtag

SEQ ID NO: 73113 - DNA, 1032 bp, synthetic construct
  misc_feature 1..1032: note = Description of Artificial Sequence: Synthetic coding sequence
  source 1..1032: mol_type = other DNA
atggacaaccaggccgagagagagagcgaggccggcgtgggcctgcagagagacgaggacgacgcccccctgtgcgaggacgtggagctgcaggacggcgacctgagccccgaggagaagatcttcctgagagagttccccagactgaaggaggacctgaagggcaacatcgacaagctgagagccctggccgacgacatcgacaagacccacaagaagttcaccaaggccaacatggtggccaccagcaccgccgtgatcagcggcgtgatgagcctgctgggcctggccctggcccccgccaccggcggcggcagcctgctgctgagcaccgccggccagggcctggccaccgccgccggcgtgaccagcatcgtgagcggcaccctggagagaagcaagaacaaggaggcccaggccagagccgaggacatcctgcccacctacgaccaggaggacagagaggacgaggaggagaaggccgactacgtgaccgccgccggcaagatcatctacaacctgagaaacaccctgaagtacgccaagaagaacgtgagagccttctggaagctgagagccaaccccagactggccaacgccaccaagagactgctgaccaccggccaggtgagcagcagaagcagagtgcaggtgcagaaggccttcgccggcaccaccctggccatgaccaagaacgccagagtgctgggcggcgtgatgagcgccttcagcctgggctacgacctggccaccctgagcaaggagtggaagcacctgaaggagggcgccagaaccaagttcgccgaggagctgagagccaaggccctggagctggagagaaagctgaccgagctgacccagctgtacaagagcctgcagcagaaggtgagaagcagagccagaggcgtgggcaaggacctgaccggcacctgcgagaccgaggcctactggaaggagctgagagagcacgtgtggatgtggctgtggctgtgcgtgtgcctgtgcgtgtgcgtgtacgtgcagttcacctag

SEQ ID NO: 73114 - DNA, 540 bp, synthetic construct
  misc_feature 1..540: note = Description of Artificial Sequence: Synthetic coding sequence
  source 1..540: mol_type = other DNA
atgttcaaggtgatccagagaagcgtgggccccgccagcctgagcctgctgaccttcaaggtgtacgccgcccccaagaaggacagcccccccaagaacagcgtgaaggtggacgagctgagcctgtacagcgtgcccgagggccagagcaagtacgtggaggaggccagaagccagctggaggagagcatcagccagctgagacactactgcgagccctacaccacctggtgccagaccgccatgaccatcagcaagatgcacctgctgttcttccccagactgggcgtgatcggcttcgccggcctgatcggcctgctgctggccagaggcagcaagatcaagaagctggtgtacccccccggcttcatgggcctggccgccagcctgtactacccccagcaggccatcgtgttcgcccaggtgagcggcgagagactgtacgactggggcctgagaggctacatcgtgatcgaggacctgtggaaggagaacttccagaagcccggcaacgtgaagaacagccccggcaccaagtag

SEQ ID NO: 73115 - DNA, 597 bp, synthetic construct
  misc_feature 1..597: note = Description of Artificial Sequence: Synthetic coding sequence
  source 1..597: mol_type = other DNA
atgttcaaggtgatccagagaagcgtgggccccgccagcctgagcctgctgaccttcaaggtgtacgccgcccccaagaaggacagcccccccaagaacagcgtgaaggtggacgagctgagcctgtacagcgtgcccgagggccagagcaagtacgtggaggaggccagaagccagctggaggagagcatcagccagctgagacactactgcgagccctacaccacctggtgccaggagacctacagccagaccaagcccaagatgcagagcctggtgcagtggggcctggacagctacgactacctgcagaacgccccccccggcttcttccccagactgggcgtgatcggcttcgccggcctgatcggcctgctgctggccagaggcagcaagatcaagaagctggtgtacccccccggcttcatgggcctggccgccagcctgtactacccccagcaggccatcgtgttcgcccaggtgagcggcgagagactgtacgactggggcctgagaggctacatcgtgatcgaggacctgtggaaggagaacttccagaagcccggcaacgtgaagaacagccccggcaccaagtag

SEQ ID NO: 73116 - DNA, 537 bp, synthetic construct
  misc_feature 1..537: note = Description of Artificial Sequence: Synthetic coding sequence
  source 1..537: mol_type = other DNA
gtgtacgccgcccccaagaaggacagcccccccaagaacagcgtgaaggtggacgagctgagcctgtacagcgtgcccgagggccagagcaagtacgtggaggaggccagaagccagctggaggagagcatcagccagctgagacactactgcgagccctacaccacctggtgccaggagacctacagccagaccaagcccaagatgcagagcctggtgcagtggggcctggacagctacgactacctgcagaacgccccccccggcttcttccccagactgggcgtgatcggcttcgccggcctgatcggcctgctgctggccagaggcagcaagatcaagaagctggtgtacccccccggcttcatgggcctggccgccagcctgtactacccccagcaggccatcgtgttcgcccaggtgagcggcgagagactgtacgactggggcctgagaggctacatcgtgatcgaggacctgtggaaggagaacttccagaagcccggcaacgtgaagaacagccccggcaccaagtag

SEQ ID NO: 73117 - DNA, 1332 bp, synthetic construct
  misc_feature 1..1332: note = Description of Artificial Sequence: Synthetic coding sequence
  source 1..1332: mol_type = other DNA
atggacagactgggccccttcagcaacgaccccagcgacaagcccccctgcagaggctgcagcagctacctgatggagccctacatcaagtgcgccgagtgcggccccccccccttcttcctgtgcctgcagtgcttcaccagaggcttcgagtacaagaagcaccagagcgaccacacctacgagatcatgaccagcgacttccccgtgctggaccccagctggaccgcccaggaggagatggccctgctggaggccgtgatggactgcggcttcggcaactggcaggacgtggccaaccagatgtgcaccaagaccaaggaggagtgcgagaagcactacatgaagcacttcatcaacaaccccctgttcgccagcaccctgctgaacctgaagcaggccgaggaggccaagaccgccgacaccgccatccccttccacagcaccgacgacccccccagacccaccttcgacagcctgctgagcagagacatggccggctacatgcccgccagagccgacttcatcgaggagttcgacaactacgccgagtgggacctgagagacatcgacttcgtggaggacgacagcgacatcctgcacgccctgaagatggccgtggtggacatctaccacagcagactgaaggagagacagagaagaaagaagatcatcagagaccacggcctgatcaacctgagaaagttccagctgatggagagaagataccccaaggaggtgcaggacctgtacgagaccatgagaagattcgccagaatcgtgggccccgtggagcacgacaagttcatcgagagccacgccctggagttcgagctgagaagagagatcaagagactgcaggagtacagaaccgccggcatcaccaacttctgcagcgccagaacctacgaccacctgaagaagaccagagaggaggagagactgaagagaaccatgctgagcgaggtgctgcagtacatccaggacagcagcgcctgccagcagtggctgagaagacaggccgacatcgacagcggcctgagccccagcatccccatggccagcaacagcggcagaagaagcgccccccccctgaacctgaccggcctgcccggcaccgagaagctgaacgagaaggagaaggagctgtgccagatggtgagactggtgcccggcgcctacctggagtacaagagcgccctgctgaacgagtgcaacaagcagggcggcctgagactggcccaggccagagccctgatcaagatcgacgtgaacaagaccagaaagatctacgacttcctgatcagagagggctacatcaccaagggctag

SEQ ID NO: 73118 - DNA, 978 bp, synthetic construct
  misc_feature 1..978: note = Description of Artificial Sequence: Synthetic coding sequence
  source 1..978: mol_type = other DNA
atggtgcccagagaggcccccgagagcgcccagtgcctgtgccccagcctgaccatccccaacgccaaggacgtgctgagaaagagacacaagagaagaagcagacagcaccagagattcatggccagaaaggccctgctgcaggagcagggcctgctgagcatgccccccgagcccggcagcagccccctgcccacccccttcggcgccgccaccgccaccgaggccgccagcagcggcaagcagtgcctgagagccggcagcggcagcgccccctgcagcagaagacccgcccccggcaaggccagcggccccctgcccagcaagtgcgtggccatcgactgcgagatggtgggcaccggccccagaggcagagtgagcgagctggccagatgcagcatcgtgagctaccacggcaacgtgctgtacgacaagtacatcagacccgagatgcccatcgccgactacagaaccagatggagcggcatcaccagacagcacatgagaaaggccgtgcccttccaggtggcccagaaggagatcctgaagctgctgaagggcaaggtggtggtgggccacgccctgcacaacgacttccaggccctgaagtacgtgcaccccagaagccagaccagagacaccacctacgtgcccaacttcctgagcgagcccggcctgcacaccagagccagagtgagcctgaaggacctggccctgcagctgctgcacaagaagatccaggtgggccagcacggccacagcagcgtggaggacgccaccaccgccatggagctgtacagactggtggaggtgcagtgggagcagcaggaggccagaagcctgtggacctgccccgaggacagagagcccgacagcagcaccgacatggagcagtacatggaggaccagtactggcccgacgacctggcccacggcagcagaggcggcgccagagaggcccaggacagaagaaactag

SEQ ID NO: 73119 - DNA, 984 bp, synthetic construct
  misc_feature 1..984: note = Description of Artificial Sequence: Synthetic coding sequence
  source 1..984: mol_type = other DNA
atggtgcccagagaggcccccgagagcgcccagtgcctgtgccccagcctgaccatccccaacgccaaggacgtgctgagaaagagacacaagagaagaagcagacagcaccagagattcatggccagaaaggccctgctgcaggagcagggcctgctgagcatgccccccgagcccggcagcagccccctgcccacccccttcggcgccgccaccgccaccgaggccgccagcagcggcaagcagtgcctgagagccggcagcggcagcgccccctgcagcagaagacccgcccccggcaaggccagcggccccctgcccagcaagtgcgtggccatcgactgcgagatggtgggcaccggccccagaggcagagtgagcgagctggccagatgcagcatcgtgagctaccacggcaacgtgctgtacgacaagtacatcagacccgagatgcccatcgccgactacagaaccagatggagcggcatcaccagacagcacatgagaaaggccgtgcccttccaggtggcccagaaggagatcctgaagctgctgaagggcaaggtggtggtgggccacgccctgcacaacgacttccaggccctgaagtacgtgcaccccagaagccagaccagagacaccacctacgtgcccaacttcctgagcgagcccggcctgcacaccagagccagagtgagcctgaaggacctggccctgcagctgctgcacaagaagatccaggtgggccagcacggccacagcagcgtggaggacgccaccaccgccatggagctgtacagactggtggaggtgcagtgggagcagcaggaggccagaagcctgtggacctgccccgaggacagagagcccgacagcagcaccgacatggagcagtacatggaggaccagagcacccagtactgggccctgaagcagaagagcgagaagcaggacagcggcctgaacagcggcgccttcgtgtag

SEQ ID NO: 73120 - DNA, 1515 bp, synthetic construct
  misc_feature 1..1515: note = Description of Artificial Sequence: Synthetic coding sequence
  source 1..1515: mol_type = other DNA
atgcccaccgtggaggagctgtacagaaactacggcatcctggccgacgccaccgagcaggtgggccagcacaaggacgcctaccaggtgatcctggacggcgtgaagggcggcaccaaggagaagagactggccgcccagttcatccccaagttcttcaagcacttccccgagctggccgacagcgccatcaacgcccagctggacctgtgcgaggacgaggacgtgagcatcagaagacaggccatcaaggagctgccccagttcgccaccggcgagaacctgcccagagtggccgacatcctgacccagctgctgcagaccgacgacagcgccgagttcaacctggtgaacaacgccctgctgagcatcttcaagatggacgccaagggcaccctgggcggcctgttcagccagatcctgcagggcgaggacatcgtgagagagagagccatcaagttcctgagcaccaagctgaagaccctgcccgacgaggtgctgaccaaggaggtggaggagctgatcctgaccgagagcaagaaggtgctggaggacgtgaccggcgaggagttcgtgctgttcatgaagatcctgagcggcctgaagagcctgcagaccgtgagcggcagacagcagctggtggagctggtggccgagcaggccgacctggagcagaccttcaaccccagcgaccccgactgcgtggacagactgctgcagtgcaccagacaggccgtgcccctgttcagcaagaacgtgcacagcaccagattcgtgacctacttctgcgagcaggtgctgcccaacctgggcaccctgaccacccccgtggagggcctggacatccagctggaggtgctgaagctgctggccgagatgagcagcttctgcggcgacatggagaagctggagaccaacctgagaaagctgttcgacaagctgctggagtacatgcccctgccccccgaggaggccgagaacggcgagaacgccggcaacgaggagcccaagctgcagttcagctacgtggagtgcctgctgtacagcttccaccagctgggcagaaagctgcccgacttcctgaccgccaagctgaacgccgagaagctgaaggacttcaagatcagactgcagtacttcgccagaggcctgcaggtgtacatcagacagctgagactggccctgcagggcaagaccggcgaggccctgaagaccgaggagaacaagatcaaggtggtggccctgaagatcaccaacaacatcaacgtgctgatcaaggacctgttccacatcccccccagctacaagagcaccgtgaccctgagctggaagcccgtgcagaaggtggagatcggccagaagagagccagcgaggacaccaccagcggcagcccccccaagaagagcagcgccggccccaagagagacgccagacagatctacaacccccccagcggcaagtacagcagcaacctgggcaacttcaactacgagagaagcctgcagggcaagtag

SEQ ID NO: 73121 - DNA, 1353 bp, synthetic construct
  misc_feature 1..1353: note = Description of Artificial Sequence: Synthetic coding sequence
  source 1..1353: mol_type = other DNA
atgcccaccgtggaggagctgtacagaaactacggcatcctggccgacgccaccgagcaggtgggccagatcagaagacaggccatcaaggagctgccccagttcgccaccggcgagaacctgcccagagtggccgacatcctgacccagctgctgcagaccgacgacagcgccgagttcaacctggtgaacaacgccctgctgagcatcttcaagatggacgccaagggcaccctgggcggcctgttcagccagatcctgcagggcgaggacatcgtgagagagagagccatcaagttcctgagcaccaagctgaagaccctgcccgacgaggtgctgaccaaggaggtggaggagctgatcctgaccgagagcaagaaggtgctggaggacgtgaccggcgaggagttcgtgctgttcatgaagatcctgagcggcctgaagagcctgcagaccgtgagcggcagacagcagctggtggagctggtggccgagcaggccgacctggagcagaccttcaaccccagcgaccccgactgcgtggacagactgctgcagtgcaccagacaggccgtgcccctgttcagcaagaacgtgcacagcaccagattcgtgacctacttctgcgagcaggtgctgcccaacctgggcaccctgaccacccccgtggagggcctggacatccagctggaggtgctgaagctgctggccgagatgagcagcttctgcggcgacatggagaagctggagaccaacctgagaaagctgttcgacaagctgctggagtacatgcccctgccccccgaggaggccgagaacggcgagaacgccggcaacgaggagcccaagctgcagttcagctacgtggagtgcctgctgtacagcttccaccagctgggcagaaagctgcccgacttcctgaccgccaagctgaacgccgagaagctgaaggacttcaagatcagactgcagtacttcgccagaggcctgcaggtgtacatcagacagctgagactggccctgcagggcaagaccggcgaggccctgaagaccgaggagaacaagatcaaggtggtggccctgaagatcaccaacaacatcaacgtgctgatcaaggacctgttccacatcccccccagctacaagagcaccgtgaccctgagctggaagcccgtgcagaaggtggagatcggccagaagagagccagcgaggacaccaccagcggcagcccccccaagaagagcagcgccggccccaagagagacgccagacagatctacaacccccccagcggcaagtacagcagcaacctgggcaacttcaactacgagagaagcctgcagggcaagtag

SEQ ID NO: 73122 - DNA, 1575 bp, synthetic construct
  misc_feature 1..1575: note = Description of Artificial Sequence: Synthetic coding sequence
  source 1..1575: mol_type = other DNA
atgcccaccgtggaggagctgtacagaaactacggcatcctggccgacgccaccgagcaggtgggccagcacaaggacgcctaccaggtgatcctggacggcgtgaagggcggcaccaaggagaagagactggccgcccagttcatccccaagttcttcaagcacttccccgagctggccgacagcgccatcaacgcccagctggacctgtgcgaggacgaggacgtgagcatcagaagacaggccatcaaggagctgccccagttcgccaccggcgagaacctgcccagagtggccgacatcctgacccagctgctgcagaccgacgacagcgccgagttcaacctggtgaacaacgccctgctgagcatcttcaagatggacgccaagggcaccctgggcggcctgttcagccagatcctgcagggcgaggacatcgtgagagagagagccatcaagttcctgagcaccaagctgaagaccctgcccgacgaggtgctgaccaaggaggtggaggagctgatcctgaccgagagcaagaaggtgctggaggacgtgaccggcgaggagttcgtgctgttcatgaagatcctgagcggcctgaagagcctgcagaccgtgagcggcagacagcagctggtggagctggtggccgagcaggccgacctggagcagaccttcaaccccagcgaccccgactgcgtggacagactgctgcagtgcaccagacaggccgtgcccctgttcagcaagaacgtgcacagcaccagattcgtgacctacttctgcgagcaggtgctgcccaacctgggcaccctgaccacccccgtggagggcctggacatccagctggaggtgctgaagctgctggccgagatgagcagcttctgcggcgacatggagaagctggagaccaacctgagaaagctgttcgacaagctgctggagtacatgcccctgccccccgaggaggccgagaacggcgagaacgccggcaacgaggagcccaagctgcagttcagctacgtggagtgcctgctgtacagcttccaccagctgggcagaaagctgcccgacttcctgaccgccaagctgaacgccgagaagctgaaggacttcaagatcagactgcagtacttcgccagaggcctgcaggtgtacatcagacagctgagactggccctgcagggcaagaccggcgaggccctgaagaccgaggagaacaagatcaaggtggtggccctgaagatcaccaacaacatcaacgtgctgatcaaggacctgttccacatcccccccagctacaagagcaccgtgaccctgagctggaagcccgtgcagaaggtggagatcggccagaagagagccagcgaggacaccaccagcggcagcccccccaagaagagcagcgccggccccaagagagacgccagacagatctacaacccccccagcggcaagtacagcagcaacctgggcaacttcaactacgagcagagaggcgccttcagaggcagcagaggcggcagaggctggggcaccagaggcaacagaagcagaggcagactgtactag

SEQ ID NO: 73123 - DNA, 1533 bp, synthetic construct
  misc_feature 1..1533: note = Description of Artificial Sequence: Synthetic coding sequence
  source 1..1533: mol_type = other DNA
atgcccaccgtggaggagctgtacagaaactacggcatcctggccgacgccaccgagcaggtgggccagcacaaggacgcctaccaggtgatcctggacggcgtgaagggcggcaccaaggagaagagactggccgcccagttcatccccaagttcttcaagcacttccccgagctggccgacagcgccatcaacgcccagctggacctgtgcgaggacgaggacgtgagcatcagaagacaggccatcaaggagctgccccagttcgccaccggcgagaacctgcccagagtggccgacatcctgacccagctgctgcagaccgacgacagcgccgagttcaacctggtgaacaacgccctgctgagcatcttcaagatggacgccaagggcaccctgggcggcctgttcagccagatcctgcagggcgaggacatcgtgagagagagagccatcaagttcctgagcaccaagctgaagaccctgcccgacgaggtgctgaccaaggaggtggaggagctgatcctgaccgagagcaagaaggtgctggaggacgtgaccggcgaggagttcgtgctgttcatgaagatcctgagcggcctgaagagcctgcagaccgtgagcggcagacagcagctggtggagctggtggccgagcaggccgacctggagcagaccttcaaccccagcgaccccgactgcgtggacagactgctgcagtgcaccagacaggccgtgcccctgttcagcaagaacgtgcacagcaccagattcgtgacctacttctgcgagcaggtgctgcccaacctgggcaccctgaccacccccgtggagggcctggacatccagctggaggtgctgaagctgctggccgagatgagcagcttctgcggcgacatggagaagctggagaccaacctgagaaagctgttcgacaagctgctggagtacatgcccctgccccccgaggaggccgagaacggcgagaacgccggcaacgaggagcccaagctgcagttcagctacgtggagtgcctgctgtacagcttccaccagctgggcagaaagctgcccgacttcctgaccgccaagctgaacgccgagaagctgaaggacttcaagatcagactgcagtacttcgccagaggcctgcaggtgtacatcagacagctgagactggccctgcagggcaagaccggcgaggccctgaagaccgaggagaacaagatcaaggtggtggccctgaagatcaccaacaacatcaacgtgctgatcaaggacctgttccacatcccccccagctacaagagcaccgtgaccctgagctggaagcccgtgcagaaggtggagatcggccagaagagagccagcgaggacaccaccagcggcagcccccccaagaagagcagcgccggccccaagagagacgccagacagatctacaacccccccagcggcaagtacagcagcaacctgggcaacttcaactacggcgagagattcagactgggcaccagaaacatgagagactag

SEQ ID NO: 73124 - DNA, 1089 bp, synthetic construct
  misc_feature 1..1089: note = Description of Artificial Sequence: Synthetic coding sequence
  source 1..1089: mol_type = other DNA
atgcaggccgagagaggcgccagaggcggcagaggcagaagacccggcagaggcagacccggcggcgacagacacagcgagagacccggcgccgccgccgccgtggccagaggcggcggcggcggcggcggcggcgacggcggcggcagaagaggcagaggcagaggcagaggcttcagaggcgccagaggcggcagaggcggcggcggcgcccccagaggcagcagaagagagcccggcggctggggcgccggcgccagcgcccccgtggaggacgacagcgacgccgagacctacggcgaggagaacgacgagcagggcaactacagcaagagaaagatcgtgagcaactgggacagataccaggacatcgagaaggaggtgaacaacgagagcggcgagagccagagaggcaccgacttcagcgtgctgctgagcagcgccggcgacagcttcagccagttcagattcgccgaggagaaggagtgggacagcgaggccagctgccccaagcagaacagcgccttctacgtggacagcgagctgctggtgagagccctgcaggagctgcccctgtgcctgagactgaacgtggccgccgagctggtgcagggcaccgtgcccctggaggtgccccaggtgaagcccaagagaaccgacgacggcaagggcctgggcatgcagctgaagggccccctgggccccggcggcagaggccccatcttcgagctgaagagcgtggccgccggctgccccgtgctgctgggcaaggacaaccccagccccggccccagcagagacagccagaagcccaccagccccctgcagagcgccggcgaccacctggaggaggagctggacctgctgctgaacctggacgcccccatcaaggagggcgacaacatcctgcccgaccagaccagccaggacctgaagagcaaggaggacggcgaggtggtgcaggaggaggaggtgtgcgccaagcccagcgtgaccgaggagaagaacatggagcccgagcagcccagcaccagcaagaacgtgaccgaggaggagctggaggactggctggacagcatgatcagctag

SEQ ID NO: 73125 - DNA, 4125 bp, synthetic construct
  misc_feature 1..4125: note = Description of Artificial Sequence: Synthetic coding sequence
  source 1..4125: mol_type = other DNA
atgagcagcagcttcttcaaccccagcttcgccttcagcagccacttcgaccccgacggcgcccccctgagcgagctgagctggcccagcagcctggccgtggtggccgtgagcttcagcggcctgttcgccgtgatcgtgctgatgctggcctgcctgtgctgcaagaagggcggcatcggcttcaaggagttcgagaacgccgagggcgacgagtacgccgccgacctggcccagggcagccccgccaccgccgcccagaacggccccgacgtgtacgtgctgcccctgaccgaggtgagcctgcccatggccaagcagcccggcagaagcgtgcagctgctgaagagcaccgacgtgggcagacacagcctgctgtacctgaaggagatcggcagaggctggttcggcaaggtgttcctgggcgaggtgaacagcggcatcagcagcgcccaggtggtggtgaaggagctgcaggccagcgccagcgtgcaggagcagatgcagttcctggaggaggtgcagccctacagagccctgaagcacagcaacctgctgcagtgcctggcccagtgcgccgaggtgaccccctacctgctggtgatggagttctgccccctgggcgacctgaagggctacctgagaagctgcagagtggccgagagcatggcccccgaccccagaaccctgcagagaatggcctgcgaggtggcctgcggcgtgctgcacctgcacagaaacaacttcgtgcacagcgacctggccctgagaaactgcctgctgaccgccgacctgaccgtgaagatcggcgactacggcctggcccactgcaagtacagagaggactacttcgtgaccgccgaccagctgtgggtgcccctgagatggatcgcccccgagctggtggacgaggtgcacagcaacctgctggtggtggaccagaccaagagcggcaacgtgtggagcctgggcgtgaccatctgggagctgttcgagctgggcacccagccctacccccagcacagcgaccagcaggtgctggcctacaccgtgagagagcagcagctgaagctgcccaagccccagctgcagctgaccctgagcgacagatggtacgaggtgatgcagttctgctggctgcagcccgagcagagacccaccgccgaggaggtgcacctgctgctgagctacctgtgcgccaagggcgccaccgaggccgaggaggagttcgagagaagatggagaagcctgagacccggcggcggcggcgtgggccccggccccggcgccgccggccccatgctgggcggcgtggtggagctggccgccgccagcagcttccccctgctggagcagttcgccggcgacggcttccacgccgacggcgacgacgtgctgaccgtgaccgagaccagcagaggcctgaacttcgagtacaagtgggaggccggcagaggcgccgaggccttccccgccaccctgagccccggcagaaccgccagactgcaggagctgtgcgcccccgacggcgccccccccggcgtggtgcccgtgctgagcgcccacagccccagcctgggcagcgagtacttcatcagactggaggaggccgcccccgccgccggccacgaccccgactgcgccggctgcgcccccagcccccccgccaccgccgaccaggacgacgacagcgacggcagcaccgccgccagcctggccatggagcccctgctgggccacggcccccccgtggacgtgccctggggcagaggcgaccactaccccagaagaagcctggccagagaccccctgtgccccagcagaagccccagccccagcgccggccccctgagcctggccgagggcggcgccgaggacgccgactggggcgtggccgccttctgccccgccttcttcgaggaccccctgggcaccagccccctgggcagcagcggcgccccccccctgcccctgaccggcgaggacgagctggaggaggtgggcgccagaagagccgcccagagaggccactggagaagcaacgtgagcgccaacaacaacagcggcagcagatgccccgagagctgggaccccgtgagcgccggcggccacgccgagggctgccccagccccaagcagacccccagagccagccccgagcccggctaccccggcgagcccctgctgggcctgcaggccgccagcgcccaggagcccggctgctgccccggcctgccccacctgtgcagcgcccagggcctggcccccgccccctgcctggtgacccccagctggaccgagaccgccagcagcggcggcgaccacccccaggccgagcccaagctggccaccgaggccgagggcaccaccggccccagactgcccctgcccagcgtgcccagccccagccaggagggcgcccccctgcccagcgaggaggccagcgcccccgacgcccccgacgccctgcccgacagccccacccccgccaccggcggcgaggtgagcgccatcaagctggccagcgccctgaacggcagcagcagcagccccgaggtggaggcccccagcagcgaggacgaggacaccgccgaggccaccagcggcatcttcaccgacaccagcagcgacggcctgcaggccagaagacccgacgtggtgcccgccttcagaagcctgcagaagcaggtgggcacccccgacagcctggacagcctggacatccccagcagcgccagcgacggcggctacgaggtgttcagccccagcgccaccggccccagcggcggccagcccagagccctggacagcggctacgacaccgagaactacgagagccccgagttcgtgctgaaggaggcccaggagggctgcgagccccaggccttcgccgagctggccagcgagggcgagggccccggccccgagaccagactgagcaccagcctgagcggcctgaacgagaagaacccctacagagacagcgcctacttcagcgacctggaggccgaggccgaggccaccagcggccccgagaagaagtgcggcggcgacagagcccccggccccgagctgggcctgcccagcaccggccagcccagcgagcaggtgtgcctgagacccggcgtgagcggcgaggcccagggcagcggccccggcgaggtgctgccccccctgctgcagctggagggcagcagccccgagcccagcacctgccccagcggcctggtgcccgagccccccgagccccagggccccgccaaggtgagacccggccccagccccagctgcagccagttcttcctgctgacccccgtgcccctgagaagcgagggcaacagcagcgagttccagggcccccccggcctgctgagcggccccgccccccagaagagaatgggcggccccggcacccccagagcccccctgagactggccctgcccggcctgcccgccgccctggagggcagacccgaggaggaggaggaggacagcgaggacagcgacgagagcgacgaggagctgagatgctacagcgtgcaggagcccagcgaggacagcgaggaggaggcccccgccgtgcccgtggtggtggccgagagccagagcgccagaaacctgagaagcctgctgaagatgcccagcctgctgagcgagaccttctgcgaggacctggagagaaagaagaaggccgtgagcttcttcgacgacgtgaccgtgtacctgttcgaccaggagagccccaccagagagctgggcgagcccttccccggcgccaaggagagcccccccaccttcctgagaggcagccccggcagccccagcgcccccaacagaccccagcaggccgacggcagccccaacggcagcaccgccgaggagggcggcggcttcgcctgggacgacgacttccccctgatgaccgccaaggccgccttcgccatggccctggaccccgccgcccccgcccccgccgcccccacccccacccccgcccccttcagcagattcaccgtgagccccgcccccaccagcagattcagcatcacccacgtgagcgacagcgacgccgagagcaagagaggccccgaggccggcgccggcggcgagagcaaggaggcctag

SEQ ID NO: 73126 - DNA, 2640 bp, synthetic construct
  misc_feature 1..2640: note = Description of Artificial Sequence: Synthetic coding sequence
  source 1..2640: mol_type = other DNA
atgagcagcagcttcttcaaccccagcttcgccttcagcagccacttcgaccccgacggcgcccccctgagcgagctgagctggcccagcagcctggccgtggtggccgtgagcttcagcggcctgttcgccgtgatcgtgctgatgctggcctgcctgtgctgcaagaagggcggcatcggcttcaaggagttcgagaacgccgagggcgacgagtacgccgccgacctggcccagggcagccccgccaccgccgcccagaacggccccgacgtgtacgtgctgcccctgaccgaggtgagcctgcccatggccaagcagcccggcagaagcgtgcagctgctgaagagcaccgacgtgggcagacacagcctgctgtacctgaaggagatcggcagaggctggttcggcaaggtgttcctgggcgaggtgaacagcggcatcagcagcgcccaggtggtggtgaaggagctgcaggccagcgccagcgtgcaggagcagatgcagttcctggaggaggtgcagccctacagagccctgaagcacagcaacctgctgcagtgcctggcccagtgcgccgaggtgaccccctacctgctggtgatggagttctgccccctgggcgacctgaagggctacctgagaagctgcagagtggccgagagcatggcccccgaccccagaaccctgcagagaatggcctgcgaggtggcctgcggcgtgctgcacctgcacagaaacaacttcgtgcacagcgacctggccctgagaaactgcctgctgaccgccgacctgaccgtgaagatcggcgactacggcctggcccactgcaagtacagagaggactacttcgtgaccgccgaccagctgtgggtgcccctgagatggatcgcccccgagctggtggacgaggtgcacagcaacctgctggtggtggaccagaccaagagcggcaacgtgtggagcctgggcgtgaccatctgggagctgttcgagctgggcacccagccctacccccagcacagcgaccagcaggtgctggcctacaccgtgagagagcagcagctgaagctgcccaagccccagctgcagctgaccctgagcgacagatggtacgaggtgatgcagttctgctggctgcagcccgagcagagacccaccgccgaggaggtgcacctgctgctgagctacctgtgcgccaagggcgccaccgaggccgaggaggagttcgagagaagatggagaagcctgagacccggcggcggcggcgtgggccccggccccggcgccgccggccccatgctgggcggcgtggtggagctggccgccgccagcagcttccccctgctggagcagttcgccggcgacggcttccacgccgacggcgacgacgtgctgaccgagctgtgcgcccccgacggcgccccccccggcgtggtgcccgtgctgagcgcccacagccccagcctgggcagcgagtacttcatcagactggaggaggccgcccccgccgccggccacgaccccgactgcgccggctgcgcccccagcccccccgccaccgccgaccaggacgacgacagcgacggcagcaccgccgccagcctggccatggagcccctgctgggccacggcccccccgtggacgtgccctggggcagaggcgaccactaccccagaagaagcctggccagagaccccctgtgccccagcagaagccccagccccagcgccggccccctgagcctggccgagggcggcgccgaggacgccgactggggcgtggccgccttctgccccgccttcttcgaggaccccctgggcaccagccccctgggcagcagcggcgccccccccctgcccctgaccggcgaggacgagctggaggaggtgggcgccagaagagccgcccagagaggccactggagaagcaacgtgagcgccaacaacaacagcggcagcagatgccccgagagctgggaccccgtgagcgccggcggccacgccgagggctgccccagccccaagcagacccccagagccagccccgagcccggctaccccggcgagcccctgctgggcctgcaggccgccagcgcccaggagcccggctgctgccccggcctgccccacctgtgcagcgcccagggcctggcccccgccccctgcctggtgacccccagctggaccgagaccgccagcagcggcggcgaccacccccaggccgagcccaagctggccaccgaggccgagggcaccaccggccccagactgcccctgcccagcgtgcccagccccagccaggagggcgcccccctgcccagcgaggaggccagcgcccccgacgcccccgacgccctgcccgacagccccacccccgccaccggcggcgaggtgagcgccatcaagctggccagcgccctgaacggcagcagcagcagccccgaggtggaggcccccagcagcgaggacgaggacaccgccgaggccaccagcggcatcttcaccgacaccagcagcgacggcctgcaggccagaagacccgacgtggtgcccgccttcagaagcctgcagaagcagtggccccagagagaggagagcctgcccagactgtgcctgctgctgagacccagaggctag

SEQ ID NO: 73127 - DNA, 3984 bp, synthetic construct
  misc_feature 1..3984: note = Description of Artificial Sequence: Synthetic coding sequence
  source 1..3984: mol_type = other DNA
tgacaccaggtgaaggtgcagggctgctggggcagatggagatggcaggagttcgagaacgccgagggcgacgagtacgccgccgacctggcccagggcagccccgccaccgccgcccagaacggccccgacgtgtacgtgctgcccctgaccgaggtgagcctgcccatggccaagcagcccggcagaagcgtgcagctgctgaagagcaccgacgtgggcagacacagcctgctgtacctgaaggagatcggcagaggctggttcggcaaggtgttcctgggcgaggtgaacagcggcatcagcagcgcccaggtggtggtgaaggagctgcaggccagcgccagcgtgcaggagcagatgcagttcctggaggaggtgcagccctacagagccctgaagcacagcaacctgctgcagtgcctggcccagtgcgccgaggtgaccccctacctgctggtgatggagttctgccccctgggcgacctgaagggctacctgagaagctgcagagtggccgagagcatggcccccgaccccagaaccctgcagagaatggcctgcgaggtggcctgcggcgtgctgcacctgcacagaaacaacttcgtgcacagcgacctggccctgagaaactgcctgctgaccgccgacctgaccgtgaagatcggcgactacggcctggcccactgcaagtacagagaggactacttcgtgaccgccgaccagctgtgggtgcccctgagatggatcgcccccgagctggtggacgaggtgcacagcaacctgctggtggtggaccagaccaagagcggcaacgtgtggagcctgggcgtgaccatctgggagctgttcgagctgggcacccagccctacccccagcacagcgaccagcaggtgctggcctacaccgtgagagagcagcagctgaagctgcccaagccccagctgcagctgaccctgagcgacagatggtacgaggtgatgcagttctgctggctgcagcccgagcagagacccaccgccgaggaggtgcacctgctgctgagctacctgtgcgccaagggcgccaccgaggccgaggaggagttcgagagaagatggagaagcctgagacccggcggcggcggcgtgggccccggccccggcgccgccggccccatgctgggcggcgtggtggagctggccgccgccagcagcttccccctgctggagcagttcgccggcgacggcttccacgccgacggcgacgacgtgctgaccgtgaccgagaccagcagaggcctgaacttcgagtacaagtgggaggccggcagaggcgccgaggccttccccgccaccctgagccccggcagaaccgccagactgcaggagctgtgcgcccccgacggcgccccccccggcgtggtgcccgtgctgagcgcccacagccccagcctgggcagcgagtacttcatcagactggaggaggccgcccccgccgccggccacgaccccgactgcgccggctgcgcccccagcccccccgccaccgccgaccaggacgacgacagcgacggcagcaccgccgccagcctggccatggagcccctgctgggccacggcccccccgtggacgtgccctggggcagaggcgaccactaccccagaagaagcctggccagagaccccctgtgccccagcagaagccccagccccagcgccggccccctgagcctggccgagggcggcgccgaggacgccgactggggcgtggccgccttctgccccgccttcttcgaggaccccctgggcaccagccccctgggcagcagcggcgccccccccctgcccctgaccggcgaggacgagctggaggaggtgggcgccagaagagccgcccagagaggccactggagaagcaacgtgagcgccaacaacaacagcggcagcagatgccccgagagctgggaccccgtgagcgccggcggccacgccgagggctgccccagccccaagcagacccccagagccagccccgagcccggctaccccggcgagcccctgctgggcctgcaggccgccagcgcccaggagcccggctgctgccccggcctgccccacctgtgcagcgcccagggcctggcccccgccccctgcctggtgacccccagctggaccgagaccgccagcagcggcggcgaccacccccaggccgagcccaagctggccaccgaggccgagggcaccaccggccccagactgcccctgcccagcgtgcccagccccagccaggagggcgcccccctgcccagcgaggaggccagcgcccccgacgcccccgacgccctgcccgacagccccacccccgccaccggcggcgaggtgagcgccatcaagctggccagcgccctgaacggcagcagcagcagccccgaggtggaggcccccagcagcgaggacgaggacaccgccgaggccaccagcggcatcttcaccgacaccagcagcgacggcctgcaggccagaagacccgacgtggtgcccgccttcagaagcctgcagaagcaggtgggcacccccgacagcctggacagcctggacatccccagcagcgccagcgacggcggctacgaggtgttcagccccagcgccaccggccccagcggcggccagcccagagccctggacagcggctacgacaccgagaactacgagagccccgagttcgtgctgaaggaggcccaggagggctgcgagccccaggccttcgccgagctggccagcgagggcgagggccccggccccgagaccagactgagcaccagcctgagcggcctgaacgagaagaacccctacagagacagcgcctacttcagcgacctggaggccgaggccgaggccaccagcggccccgagaagaagtgcggcggcgacagagcccccggccccgagctgggcctgcccagcaccggccagcccagcgagcaggtgtgcctgagacccggcgtgagcggcgaggcccagggcagcggccccggcgaggtgctgccccccctgctgcagctggagggcagcagccccgagcccagcacctgccccagcggcctggtgcccgagccccccgagccccagggccccgccaaggtgagacccggccccagccccagctgcagccagttcttcctgctgacccccgtgcccctgagaagcgagggcaacagcagcgagttccagggcccccccggcctgctgagcggccccgccccccagaagagaatgggcggccccggcacccccagagcccccctgagactggccctgcccggcctgcccgccgccctggagggcagacccgaggaggaggaggaggacagcgaggacagcgacgagagcgacgaggagctgagatgctacagcgtgcaggagcccagcgaggacagcgaggaggaggcccccgccgtgcccgtggtggtggccgagagccagagcgccagaaacctgagaagcctgctgaagatgcccagcctgctgagcgagaccttctgcgaggacctggagagaaagaagaaggccgtgagcttcttcgacgacgtgaccgtgtacctgttcgaccaggagagccccaccagagagctgggcgagcccttccccggcgccaaggagagcccccccaccttcctgagaggcagccccggcagccccagcgcccccaacagaccccagcaggccgacggcagccccaacggcagcaccgccgaggagggcggcggcttcgcctgggacgacgacttccccctgatgaccgccaaggccgccttcgccatggccctggaccccgccgcccccgcccccgccgcccccacccccacccccgcccccttcagcagattcaccgtgagccccgcccccaccagcagattcagcatcacccacgtgagcgacagcgacgccgagagcaagagaggccccgaggccggcgccggcggcgagagcaaggaggcctag

SEQ ID NO: 73128 - DNA, 417 bp, synthetic construct
  misc_feature 1..417: note = Description of Artificial Sequence: Synthetic coding sequence
  source 1..417: mol_type = other DNA
atggaggaggaggccgagaccgaggagcagcagagattcagctaccagcagagactgaaggccgccgtgcactacaccgtgggctgcctgtgcgaggaggtggccctggacaaggagatgcagttcagcaagcagaccatcgccgccatcagcgagctgaccttcagacagtgcgagaacttcgccaaggacctggagatgttcgccagacacgccaagagaaccaccatcaacaccgaggacgtgaagctgctggccagaagaagcaacagcctgctgaagtacatcaccgacaagagcgaggagatcgcccagatcaacctggagagaaaggcccagaagaagaagaagagcgaggacggcagcaagaacagcagacagcccgccgaggccggcgtggtggagagcgagaactag

SEQ ID NO: 73129 - DNA, 495 bp, synthetic construct
  misc_feature 1..495: note = Description of Artificial Sequence: Synthetic coding sequence
  source 1..495: mol_type = other DNA
atggaggaggaggccgagaccgaggagcagcagagattcagctaccagcagagactgaaggccgccgtgcactacaccgtgggctgcctgtgcgaggaggtggccctggacaaggagatgcagttcagcaagcagaccatcgccgccatcagcgagctgaccttcagacagtgcgagaacttcgccaaggacctggagatgttcgccagacacgccaagagaaccaccatcaacaccgaggacgtgaagctgctggccagaagaagcaacagcctgcacatgcaggaggccgccggcatcagaaagagcagcctgctgaccttcctggcctggtggttcgagtggaccagccaggccagcgccggccccctgatcggcgaggaggccagagaggtggccagaagacaggagggcgcccccccccagcagagcgccagaagagacagaatgccctgcagaaacttcttctggaagaccttcagcagctgcaagtag

SEQ ID NO: 73130 - DNA, 234 bp, synthetic construct
  misc_feature 1..234: note = Description of Artificial Sequence: Synthetic coding sequence
  source 1..234: mol_type = other DNA
atggaggaggaggccgagaccgaggagcagcagagattcagctaccagcagagactgaaggccgccgtgcactacaccgtgggctgcctgtgcgaggaggtggccctggacaaggagatgcagttcagcaagcagaccatcgccgccatcagcgagctgaccttcagacagtgcgagaacttcgccaaggacctggagatgttcgccagcatctgcagaaagagacaggagtag

SEQ ID NO: 73131 - DNA, 921 bp, synthetic construct
  misc_feature 1..921: note = Description of Artificial Sequence: Synthetic coding sequence
  source 1..921: mol_type = other DNA
atgagcaacgtgaacctgagcgtgagcgacttctggagagtgatgatgagagtgtgctggctggtgagacaggacagcagacaccagagaatcagactgccccacctggaggccgtggtgatcggcagaggccccgagaccaagatcaccgacaagaagtgcagcagacagcaggtgcagctgaaggccgagtgcaacaagggctacgtgaaggtgaagcaggtgggcgtgaaccccaccagcatcgacagcgtggtgatcggcaaggaccaggaggtgaagctgcagcccggccaggtgctgcacatggtgaacgagctgtacccctacatcgtggagttcgaggaggaggccaagaaccccggcctggagacccacagaaagagaaagagaagcggcaacagcgacagcatcgagagagacgccgcccaggaggccgaggccggcaccggcctggagcccggcagcaacagcggccagtgcagcgtgcccctgaagaagggcaaggacgcccccatcaagaaggagagcctgggccactggagccagggcctgaagatcagcatgcaggaccccaagatgcaggtgtacaaggacgagcaggtggtggtgatcaaggacaagtaccccaaggccagataccactggctggtgctgccctggaccagcatcagcagcctgaaggccgtggccagagagcacctggagctgctgaagcacatgcacaccgtgggcgagaaggtgatcgtggacttcgccggcagcagcaagctgagattcagactgggctaccacgccatccccagcatgagccacgtgcacctgcacgtgatcagccaggacttcgacagcccctgcctgaagaacaagaagcactggaacagcttcaacaccgagtacttcctggagagccaggagtag

SEQ ID NO: 73132 - DNA, 1014 bp, synthetic construct
  misc_feature 1..1014: note = Description of Artificial Sequence: Synthetic coding sequence
  source 1..1014: mol_type = other DNA
atgagcaacgtgaacctgagcgtgagcgacttctggagagtgatgatgagagtgtgctggctggtgagacaggacagcagacaccagagaatcagactgccccacctggaggccgtggtgatcggcagaggccccgagaccaagatcaccgacaagaagtgcagcagacagcaggtgcagctgaaggccgagtgcaacaagggctacgtgaaggtgaagcaggtgggcgtgaaccccaccagcatcgacagcgtggtgatcggcaaggaccaggaggtgaagctgcagcccggccaggtgctgcacatggtgaacgagctgtacccctacatcgtggagttcgaggaggaggccaagaaccccggcctggagacccacagaaagagaaagagaagcggcaacagcgacagcatcgagagagacgccgcccaggaggccgaggccggcaccggcctggagcccggcagcaacagcggccagtgcagcgtgcccctgaagaagggcaaggacgcccccatcaagaagaaggtgtacaaggacgagcaggtggtggtgatcaaggacaagtaccccaaggccagataccactggctggtgctgccctggaccagcatcagcagcctgaaggccgtggccagagagcacctggagctgctgaagcacatgcacaccgtgggcgagaaggtgatcgtggacttcgccggcagcagcaagctgagattcagactgggctaccacgccatccccagcatgagccacgtgcacctgcacgtgatcagccaggacttcgacagcccctgcctgaagaacaagaagcactggaacagcttcaacaccgagtacttcctggagagccaggccgtgatcgagatggtgcaggaggccggcagagtgaccgtgagagacggcatgcccgagctgctgaagctgcccctgagatgccacgagtgccagcagctgctgcccagcatcccccagctgaaggagcacctgagaaagcactggacccagtag

SEQ ID NO: 73133 - DNA, 1029 bp, synthetic construct
  misc_feature 1..1029: note = Description of Artificial Sequence: Synthetic coding sequence
  source 1..1029: mol_type = other DNA
atgatgagagtgtgctggctggtgagacaggacagcagacaccagagaatcagactgccccacctggaggccgtggtgatcggcagaggccccgagaccaagatcaccgacaagaagtgcagcagacagcaggtgcagctgaaggccgagtgcaacaagggctacgtgaaggtgaagcaggtgggcgtgaaccccaccagcatcgacagcgtggtgatcggcaaggaccaggaggtgaagctgcagcccggccaggtgctgcacatggtgaacgagctgtacccctacatcgtggagttcgaggaggaggccaagaaccccggcctggagacccacagaaagagaaagagaagcggcaacagcgacagcatcgagagagacgccgcccaggaggccgaggccggcaccggcctggagcccggcagcaacagcggccagtgcagcgtgcccctgaagaagggcaaggacgcccccatcaagaaggagagcctgggccactggagccagggcctgaagatcagcatgcaggaccccaagatgcaggtgtacaaggacgagcaggtggtggtgatcaaggacaagtaccccaaggccagataccactggctggtgctgccctggaccagcatcagcagcctgaaggccgtggccagagagcacctggagctgctgaagcacatgcacaccgtgggcgagaaggtgatcgtggacttcgccggcagcagcaagctgagattcagactgggctaccacgccatccccagcatgagccacgtgcacctgcacgtgatcagccaggacttcgacagcccctgcctgaagaacaagaagcactggaacagcttcaacaccgagtacttcctggagagccaggccgtgatcgagatggtgcaggaggccggcagagtgaccgtgagagacggcatgcccgagctgctgaagctgcccctgagatgccacgagtgccagcagctgctgcccagcatcccccagctgaaggagcacctgagaaagcactggacccagtag

SEQ ID NO: 73134 - DNA, 1071 bp, synthetic construct
  misc_feature 1..1071: note = Description of Artificial Sequence: Synthetic coding sequence
  source 1..1071: mol_type = other DNA
atgagcaacgtgaacctgagcgtgagcgacttctggagagtgatgatgagagtgtgctggctggtgagacaggacagcagacaccagagaatcagactgccccacctggaggccgtggtgatcggcagaggccccgagaccaagatcaccgacaagaagtgcagcagacagcaggtgcagctgaaggccgagtgcaacaagggctacgtgaaggtgaagcaggtgggcgtgaaccccaccagcatcgacagcgtggtgatcggcaaggaccaggaggtgaagctgcagcccggccaggtgctgcacatggtgaacgagctgtacccctacatcgtggagttcgaggaggaggccaagaaccccggcctggagacccacagaaagagaaagagaagcggcaacagcgacagcatcgagagagacgccgcccaggaggccgaggccggcaccggcctggagcccggcagcaacagcggccagtgcagcgtgcccctgaagaagggcaaggacgcccccatcaagaaggagagcctgggccactggagccagggcctgaagatcagcatgcaggaccccaagatgcaggtgtacaaggacgagcaggtggtggtgatcaaggacaagtaccccaaggccagataccactggctggtgctgccctggaccagcatcagcagcctgaaggccgtggccagagagcacctggagctgctgaagcacatgcacaccgtgggcgagaaggtgatcgtggacttcgccggcagcagcaagctgagattcagactgggctaccacgccatccccagcatgagccacgtgcacctgcacgtgatcagccaggacttcgacagcccctgcctgaagaacaagaagcactggaacagcttcaacaccgagtacttcctggagagccaggccgtgatcgagatggtgcaggaggccggcagagtgaccgtgagagacggcatgcccgagctgctgaagctgcccctgagatgccacgagtgccagcagctgctgcccagcatcccccagctgaaggagcacctgagaaagcactggacccagtag

SEQ ID NO: 73135 - DNA, 921 bp, synthetic construct; identical to SEQ ID NO: 73131
  misc_feature 1..921: note = Description of Artificial Sequence: Synthetic coding sequence
  source 1..921: mol_type = other DNA

SEQ ID NO: 73136 - DNA, 855 bp, synthetic construct
  misc_feature 1..855: note = Description of Artificial Sequence: Synthetic coding sequence
  source 1..855: mol_type = other DNA
atgagcaacgtgaacctgagcgtgagcgacttctggagagtgatgatgagagtgtgctggctggtgagacaggacagcagacaccagagaatcagactgccccacctggaggccgtggtgatcggcagaggccccgagaccaagatcaccgacaagaagtgcagcagacagcaggtgcagctgaaggccgagtgcaacaagggctacgtgaaggtgaagcaggtgggcgtgaaccccaccagcatcgacagcgtggtgatcggcaaggaccaggaggtgaagctgcagcccggccaggtgctgcacatggagagcctgggccactggagccagggcctgaagatcagcatgcaggaccccaagatgcaggtgtacaaggacgagcaggtggtggtgatcaaggacaagtaccccaaggccagataccactggctggtgctgccctggaccagcatcagcagcctgaaggccgtggccagagagcacctggagctgctgaagcacatgcacaccgtgggcgagaaggtgatcgtggacttcgccggcagcagcaagctgagattcagactgggctaccacgccatccccagcatgagccacgtgcacctgcacgtgatcagccaggacttcgacagcccctgcctgaagaacaagaagcactggaacagcttcaacaccgagtacttcctggagagccaggccgtgatcgagatggtgcaggaggccggcagagtgaccgtgagagacggcatgcccgagctgctgaagctgcccctgagatgccacgagtgccagcagctgctgcccagcatcccccagctgaaggagcacctgagaaagcactggacccagtag

SEQ ID NO: 73137 - DNA, 579 bp, synthetic construct
  misc_feature 1..579: note = Description of Artificial Sequence: Synthetic coding sequence
  source 1..579: mol_type = other DNA
atgatgagagtgtgctggctggtgagacaggacagcagacaccagagaatcagactgccccacctggaggccgtggtgatcggcagaggccccgagaccaagatcaccgacaagaagtgcagcagacagcaggtgcagctgaaggccgagtgcaacaagggctacgtgaaggtgaagcaggtgggcgtgaaccccaccagcatcgacagcgtggtgatcggcaaggaccaggaggtgaagctgcagcccggccaggtgctgcacatggtgaacgagctgtacccctacatcgtggagttcgaggaggaggccaagaaccccggcctggagacccacagaaagagaaagagaagcggcaacagcgacagcatcgagagagacgccgcccaggaggccgaggccggcaccggcctggagcccggcagcaacagcggccagtgcagcgtgcccctgaagaagggcaaggacgcccccatcaagaaggagagcctgggccactggagccagggcctgaagatcagcatgcaggaccccaagatgcagccctgcaccagcagctgcgaccagcccggcttctag

SEQ ID NO: 73138 - DNA, 1029 bp, synthetic construct; identical to SEQ ID NO: 73133
  misc_feature 1..1029: note = Description of Artificial Sequence: Synthetic coding sequence
  source 1..1029: mol_type = other DNA

SEQ ID NO: 73139 - DNA, 909 bp, synthetic construct
  misc_feature 1..909: note = Description of Artificial Sequence: Synthetic coding sequence
  source 1..909: mol_type = other DNA
atgagcaacgtgaacctgagcgtgagcgacttctggagagtgatgatgagagtgtgctggctggtgagacaggacagcagacaccagagaatcagactgccccacctggaggccgtggtgatcggcagaggccccgagaccaagatcaccgacaagaagtgcagcagacagcaggagttcgaggaggaggccaagaaccccggcctggagacccacagaaagagaaagagaagcggcaacagcgacagcatcgagagagacgccgcccaggaggccgaggccggcaccggcctggagcccggcagcaacagcggccagtgcagcgtgcccctgaagaagggcaaggacgcccccatcaagaaggagagcctgggccactggagccagggcctgaagatcagcatgcaggaccccaagatgcaggtgtacaaggacgagcaggtggtggtgatcaaggacaagtaccccaaggccagataccactggctggtgctgccctggaccagcatcagcagcctgaaggccgtggccagagagcacctggagctgctgaagcacatgcacaccgtgggcgagaaggtgatcgtggacttcgccggcagcagcaagctgagattcagactgggctaccacgccatccccagcatgagccacgtgcacctgcacgtgatcagccaggacttcgacagcccctgcctgaagaacaagaagcactggaacagcttcaacaccgagtacttcctggagagccaggccgtgatcgagatggtgcaggaggccggcagagtgaccgtgagagacggcatgcccgagctgctgaagctgcccctgagatgccacgagtgccagcagctgctgcccagcatcccccagctgaaggagcacctgagaaagcactggacccagtag

SEQ ID NO: 73140 - DNA, 1029 bp, synthetic construct; identical to SEQ ID NO: 73133
  misc_feature 1..1029: note = Description of Artificial Sequence: Synthetic coding sequence
  source 1..1029: mol_type = other DNA

SEQ ID NO: 73141 - DNA, 687 bp, synthetic construct
  misc_feature 1..687: note = Description of Artificial Sequence: Synthetic coding sequence
  source 1..687: mol_type = other DNA
atgtacatcatcgcccagtgcgtgggcgccatcgtggccaccgccatcctgagcggcatcaccagcagcctgaccggcaacagcctgggcagaaacgacctggccgacggcgtgaacagcggccagggcctgggcatcgagatcatcggcaccctgcagctggtgctgtgcgtgctggccaccaccgacagaagaagaagagacctgggcggcagcgcccccctggccatcggcctgagcgtggccctgggccacctgctggccatcgactacaccggctgcggcatcaaccccgccagaagcttcggcagcgccgtgatcacccacaacttcagcaaccactggatcttctgggtgggccccttcatcggcggcgccctggccgtgctgatctacgacttcatcctggcccccagaagcagcgacctgaccgacagagtgaaggtgtggaccagcggccaggtggaggagtacgacctggacgccgacgacatcaacagcagaagcttcctgggcaccaagatctaccagttcacccacagcctggaggtggtggaggaggtgaaggagagagacccccccgccagcagacccagcgagcacgacggcagatgcgccagaaagagccccctggcccccaagctgctgaccgacagccccgcccaggtgcccggcatcctgccctag

SEQ ID NO: 73142 - DNA, 810 bp, synthetic construct
  misc_feature 1..810: note = Description of Artificial Sequence: Synthetic coding sequence
  source 1..810: mol_type = other DNA
atggccagcgagttcaagaagaagctgttctggagagccgtggtggccgagttcctggccaccaccctgttcgtgttcatcagcatcggcagcgccctgggcttcaagtaccccgtgggcaacaaccagaccgccgtgcaggacaacgtgaaggtgagcctggccttcggcctgagcatcgccaccctggcccagagcgtgggccacatcagcggcgcccacctgaaccccgccgtgaccctgggcctgctgctgagctgccagatcagcatcttcagagccctgatgtacatcatcgcccagtgcgtgggcgccatcgtggccaccgccatcctgagcggcatcaccagcagcctgaccggcaacagcctgggcagaaacgacctggccgacggcgtgaacagcggccagggcctgggcatcgagatcatcggcaccctgcagctggtgctgtgcgtgctggccaccaccgacagaagaagaagagacctgggcggcagcgcccccctggccatcggcctgagcgtggccctgggccacctgctggccatcgactacaccggctgcggcatcaaccccgccagaagcttcggcagcgccgtgatcacccacaacttcagcaaccactggatcttctgggtgggccccttcatcggcggcgccctggccgtgctgatctacgacttcatcctggcccccagaagcagcgacctgaccgacagagtgaaggtgtggaccagcggccaggtggaggagtacgacctggacgccgacgacatcaacagcagagtggagatgaagcccaagtag

SEQ ID NO: 73143 - DNA, 657 bp, synthetic construct
  misc_feature 1..657: note = Description of Artificial Sequence: Synthetic coding sequence
  source 1..657: mol_type = other DNA
atgttctggaccttcggctacgaggccgtgagccccgccggccccagccacctgttcgccagcctgctgctgggcgtgctgctgaccatcaccttcatgcccggcgccagacccctgcccctggtgctggtgccccagaacaccctggcctggatgcagctggacgccaaggcccccgcccaccccagacccctgcagctgctgggcagagtgggccccggcagcagacagctggccgacggcgtgaacagcggccagggcctgggcatcgagatcatcggcaccctgcagctggtgctgtgcgtgctggccaccaccgacagaagaagaagagacctgggcggcagcgcccccctggccatcggcctgagcgtggccctgggccacctgctggccatcgactacaccggctgcggcatcaaccccgccagaagcttcggcagcgccgtgatcacccacaacttcagcaaccactggatcttctgggtgggccccttcatcggcggcgccctggccgtgctgatctacgacttcatcctggcccccagaagcagcgacctgaccgacagagtgaaggtgtggaccagcggccaggtggaggagtacgacctggacgccgacgacatcaacagcagagtggagatgaagcccaagtag

SEQ ID NO: 73144 - DNA, 465 bp, synthetic construct
  misc_feature 1..465: note = Description of Artificial Sequence: Synthetic coding sequence
  source 1..465: mol_type = other DNA
atgcagagcggcatgggctggaacgtgctggacttctggctggccgacggcgtgaacagcggccagggcctgggcatcgagatcatcggcaccctgcagctggtgctgtgcgtgctggccaccaccgacagaagaagaagagacctgggcggcagcgcccccctggccatcggcctgagcgtggccctgggccacctgctggccatcgactacaccggctgcggcatcaaccccgccagaagcttcggcagcgccgtgatcacccacaacttcagcaaccactggatcttctgggtgggccccttcatcggcggcgccctggccgtgctgatctacgacttcatcctggcccccagaagcagcgacctgaccgacagagtgaaggtgtggaccagcggccaggtggaggagtacgacctggacgccgacgacatcaacagcagagtggagatgaagcccaagtag

SEQ ID NO: 73145 - DNA, 765 bp, synthetic construct
  misc_feature 1..765: note = Description of Artificial Sequence: Synthetic coding sequence
  source 1..765: mol_type = other DNA
atggccagcgagttcaagaagaagctgttctggagagccgtggtggccgagttcctggccaccaccctgttcgtgttcatcagcatcggcagcgccctgggcttcaagtaccccgtgggcaacaaccagaccgccgtgcaggacaacgtgaaggtgagcctggccttcggcctgagcatcgccaccctggcccagagcgtgggccacatcagcggcgcccacctgaaccccgccgtgaccctgggcctgctgctgagctgccagatcagcatcgtggccaccgccatcctgagcggcatcaccagcagcctgaccggcaacagcctgggcagaaacgacctggccgacggcgtgaacagcggccagggcctgggcatcgagatcatcggcaccctgcagctggtgctgtgcgtgctggccaccaccgacagaagaagaagagacctgggcggcagcgcccccctggccatcggcctgagcgtggccctgggccacctgctggccatcgactacaccggctgcggcatcaaccccgccagaagcttcggcagcgccgtgatcacccacaacttcagcaaccactggatcttctgggtgggccccttcatcggcggcgccctggccgtgctgatctacgacttcatcctggcccccagaagcagcgacctgaccgacagagtgaaggtgtggaccagcggccaggtggaggagtacgacctggacgccgacgacatcaacagcagagtggagatgaagcccaagtag

SEQ ID NO: 73146 - DNA, 990 bp, synthetic construct
  misc_feature 1..990: note = Description of Artificial Sequence: Synthetic coding sequence
  source 1..990: mol_type = other DNA
atgtgccaggtgggctgcttcctgaagacccccagattccccatctgggtggtgtgcagcgagagccacttcagcatcctgttcagcctgcagcccggcctgctgagagactggagaaccgagagactgttcgacctgtactactacgacggcctggccaaccagcaggagcagatcagactgaccatcgacaccacccagaccatcagcgaggacaccgacaacgacctggtgccccccctggagctgtgcatcagaaccaacatcggcagcgccctgggcttcaagtaccccgtgggcaacaaccagaccgccgtgcaggacaacgtgaaggtgagcctggccttcggcctgagcatcgccaccctggcccagagcgtgggccacatcagcggcgcccacctgaaccccgccgtgaccctgggcctgctgctgagctgccagatcagcatcttcagagccctgatgtacatcatcgcccagtgcgtgggcgccatcgtggccaccgccatcctgagcggcatcaccagcagcctgaccggcaacagcctgggcagaaacgacctggccgacggcgtgaacagcggccagggcctgggcatcgagatcatcggcaccctgcagctggtgctgtgcgtgctggccaccaccgacagaagaagaagagacctgggcggcagcgcccccctggccatcggcctgagcgtggccctgggccacctgctggccatcgactacaccggctgcggcatcaaccccgccagaagcttcggcagcgccgtgatcacccacaacttcagcaaccactggatcttctgggtgggccccttcatcggcggcgccctggccgtgctgatctacgacttcatcctggcccccagaagcagcgacctgaccgacagagtgaaggtgtggaccagcggccaggtggaggagtacgacctggacgccgacgacatcaacagcagagtggagatgaagcccaagtag

SEQ ID NO: 73147 - DNA, 561 bp, synthetic construct
  misc_feature 1..561: note = Description of Artificial Sequence: Synthetic coding sequence
  source 1..561: mol_type = other DNA
atgcccggcgccagacccctgcccctggtgctggtgccccagaacaccctggcctggatgcagctggacgccaaggcccccgcccaccccagacccctgcagctgctgggcagagtgggccccggcagcagacagctggccgacggcgtgaacagcggccagggcctgggcatcgagatcatcggcaccctgcagctggtgctgtgcgtgctggccaccaccgacagaagaagaagagacctgggcggcagcgcccccctggccatcggcctgagcgtggccctgggccacctgctggccatcgactacaccggctgcggcatcaaccccgccagaagcttcggcagcgccgtgatcacccacaacttcagcaaccactggatcttctgggtgggccccttcatcggcggcgccctggccgtgctgatctacgacttcatcctggcccccagaagcagcgacctgaccgacagagtgaaggtgtggaccagcggccaggtggaggagtacgacctggacgccgacgacatcaacagcagagtggagatgaagcccaagtag

SEQ ID NO: 73148 - DNA, 816 bp, synthetic construct
  misc_feature 1..816: note = Description of Artificial Sequence: Synthetic coding sequence
  source 1..816: mol_type = other DNA
atgagccccctgctgggcctgagaagcgagctgcaggacacctgcaccagcctgggcctgatgctgagcgtggtgctgctgatgggcctggccagagtggtggccagacagcagctgcacagacccgtggcccacgccttcgtgctggagttcctggccaccttccagctgtgctgctgcacccacgagctgcagctgctgagcgagcagcaccccgcccaccccacctggaccctgaccctggtgtacttcttcagcctggtgcacggcctgaccctggtgggcaccagcagcaacccctgcggcgtgatgatgcagatgatgctgggcggcatgagccccgagaccggcgccgtgagactgctggcccagctggtgagcgccctgtgcagcagatactgcaccagcgccctgtggagcctgggcctgacccagtaccacgtgagcgagagaagcttcgcctgcaagaaccccatcagagtggacctgctgaaggccgtgatcaccgaggccgtgtgcagcttcctgttccacagcgccctgctgcacttccaggaggtgagaaccaagctgagaatccacctgctggccgccctgatcaccttcctggtgtacgccggcggcagcctgaccggcgccgtgttcaaccccgccctggccctgagcctgcacttcatgtgcttcgacgaggccttcccccagttcttcatcgtgtactggctggcccccagcctgggcatcctgctgatgatcctgatgttcagcttcttcctgccctggctgcacaacaaccacaccatcaacaagaaggagtag

SEQ ID NO: 73149 - DNA, 888 bp, synthetic construct
  misc_feature 1..888: note = Description of Artificial Sequence: Synthetic coding sequence
  source 1..888: mol_type = other DNA
atggccggcctgaacgtgagcctgagcttcttcttcgccaccttcgccctgtgcgaggccgccagaagagccagcaaggccctgctgcccgtgggcgcctacgaggtgttcgccagagaggccatgagaaccctggtggagctgggcccctgggccggcgacttcggccccgacctgctgctgaccctgctgttcctgctgttcctggcccacggcgtgaccctggacggcgccagcgccaaccccaccgtgagcctgcaggagttcctgatggccgagcagagcctgcccggcaccctgctgaagctggccgcccagggcctgggcatgcaggccgcctgcaccctgatgagactgtgctgggcctgggagctgagcgacctgcacctgctgcagagcctgatggcccagagctgcagcagcgccctgagaaccagcgtgccccacggcgccctggtggaggccgcctgcgccttctgcttccacctgaccctgctgcacctgagacacagcccccccgcctacagcggccccgccgtggccctgctggtgaccgtgaccgcctacaccgccggccccttcaccagcgccttcttcaaccccgccctggccgccagcgtgaccttcgcctgcagcggccacaccctgctggagtacgtgcaggtgtactggctgggccccctgaccggcatggtgctggccgtgctgctgcaccagggcagactgccccacctgttccagagaaacctgttctacggccagaagaacaagtacagagcccccagaggcaagcccgcccccgccagcggcgacacccagacccccgccaagggcagcagcgtgagagagcccggcagaagcggcgtggagggcccccacagcagctag

SEQ ID NO: 73150 - DNA, 798 bp, synthetic construct
  misc_feature 1..798: note = Description of Artificial Sequence: Synthetic coding sequence
  source 1..798: mol_type = other DNA
aaccagcccgcccccgccctgagcccccaggtgagctgcagacacagcagcagcggcggccccggcagatggcaggagttcctgatggccgagcagagcctgcccggcaccctgctgaagctggccgcccagggcctgggcatgcaggccgcctgcaccctgatgagactgtgctgggcctgggagctgagcgacctgcacctgctgcagagcctgatggcccagagctgcagcagcgccctgagaaccagcgtgccccacggcgccctggtggaggccgcctgcgccttctgcttccacctgaccctgctgcacctgagacacagcccccccgcctacagcggccccgccgtggccctgctggtgaccgtgaccgcctacaccgccggccccttcaccagcgccttcttcaaccccgccctggccgccagcgtgaccttcgcctgcagcggccacaccctgctggagtacgtgcaggtgtactggctgggccccctgaccgaggagcagcacggcgaggtgatggagccccccctgggccccagaagcggcgacagcggcccctggctgcagagacccagatggagcccccacctgctgctgcacctgctgagcgacaccagactgcacctgaccgaggtgcccgagggccagctgggcagctacggcatcctggaggccttcttcagcttctgctggctgtacaccggcgaggtgagcggcgccatgccccagccccccctgggcggcaaggacagaagctggggcagcctgagacacctggccctgagatggtag

SEQ ID NO: 73151 - DNA, 924 bp, synthetic construct
  misc_feature 1..924: note = Description of Artificial Sequence: Synthetic coding sequence
  source 1..924: mol_type = other DNA
atggccggcctgaacgtgagcctgagcttcttcttcgccaccttcgccctgtgcgaggccgccagaagagccagcaaggccctgctgcccgtgggcgcctacgaggtgttcgccagagaggccgtgggcgccgtgcagctgggcccctgctgcctggagatgagaaccctggtggagctgggcccctgggccggcgacttcggccccgacctgctgctgaccctgctgttcctgctgttcctggcccacggcgtgaccctggacggcgccagcgccaaccccaccgtgagcctgcaggagttcctgatggccgagcagagcctgcccggcaccctgctgaagctggccgcccagggcctgggcatgcaggccgcctgcaccctgatgagactgtgctgggcctgggagctgagcgacctgcacctgctgcagagcctgatggcccagagctgcagcagcgccctgagaaccagcgtgccccacggcgccctggtggaggccgcctgcgccttctgcttccacctgaccctgctgcacctgagacacagcccccccgcctacagcggccccgccgtggccctgctggtgaccgtgaccgcctacaccgccggccccttcaccagcgccttcttcaaccccgccctggccgccagcgtgaccttcgcctgcagcggccacaccctgctggagtacgtgcaggtgtactggctgggccccctgaccggcatggtgctggccgtgctgctgcaccagggcagactgccccacctgttccagagaaacctgttctacggccagaagaacaagtacagagcccccagaggcaagcccgcccccgccagcggcgacacccagacccccgccaagggcagcagcgtgagagagcccggcagaagcggcgtggagggcccccacagcagctag

SEQ ID NO: 73152 - DNA, 816 bp, synthetic construct
  misc_feature 1..816: note = Description of Artificial Sequence: Synthetic coding sequence
  source 1..816: mol_type = other DNA
atgtgggagctgagaagcatcgccttcagcagagccgtgttcgccgagttcctggccaccctgctgttcgtgttcttcggcctgggcagcgccctgaactggccccaggccctgcccagcgtgctgcagatcgccatggccttcggcctgggcatcggcaccctggtgcaggccctgggccacatcagcggcgcccacatcaaccccgccgtgaccgtggcctgcctggtgggctgccacgtgagcgtgctgagagccgccttctacgtggccgcccagctgctgggcgccgtggccggcgccgccctgctgcacgagatcacccccgccgacatcagaggcgacctggccgtgaacgccctgagcaacagcaccaccgccggccaggccgtgaccgtggagctgttcctgaccctgcagctggtgctgtgcatcttcgccagcaccgacgagagaagaggcgagaaccccggcacccccgccctgagcatcggcttcagcgtggccctgggccacctgctgggcatccactacaccggctgcagcatgaaccccgccagaagcctggcccccgccgtggtgaccggcaagttcgacgaccactgggtgttctggatcggccccctggtgggcgccatcctgggcagcctgctgtacaactacgtgctgttcccccccgccaagagcctgagcgagagactggccgtgctgaagggcctggagcccgacaccgactgggaggagagagaggtgagaagaagacagagcgtggagctgcacagcccccagagcctgcccagaggcaccaaggcctag

SEQ ID NO: 73153 - DNA, 879 bp, synthetic construct
  misc_feature 1..879: note = Description of Artificial Sequence: Synthetic coding sequence
  source 1..879: mol_type = other DNA
atgggcagacagaaggagctggtgagcagatgcggcgagatgctgcacatcagatacagactgctgagacaggccctggccgagtgcctgggcaccctgatcctggtgatgttcggctgcggcagcgtggcccaggtggtgctgagcagaggcacccacggcggcttcctgaccatcaacctggccttcggcttcgccgtgaccctgggcatcctgatcgccggccaggtgagcggcgcccacctgaaccccgccgtgaccttcgccatgtgcttcctggccagagagccctggatcaagctgcccatctacaccctggcccagaccctgggcgccttcctgggcgccggcatcgtgttcggcctgtactacgacgccatctggcacttcgccgacaaccagctgttcgtgagcggccccaacggcaccgccggcatcttcgccacctaccccagcggccacctggacatgatcaacggcttcttcgaccagttcatcggcaccgccagcctgatcgtgtgcgtgctggccatcgtggacccctacaacaaccccgtgcccagaggcctggaggccttcaccgtgggcctggtggtgctggtgatcggcaccagcatgggcttcaacagcggctacgccgtgaaccccgccagagacttcggccccagactgttcaccgccctggccggctggggcagcgccgtgttcaccaccggccagcactggtggtgggtgcccatcgtgagccccctgctgggcagcatcgccggcgtgttcgtgtaccagctgatgatcggctgccacctggagcagcccccccccagcaacgaggaggagaacgtgaagctggcccacgtgaagcacaaggagcagatctag

SEQ ID NO: 73154 - DNA, 840 bp, synthetic construct
  misc_feature 1..840: note = Description of Artificial Sequence: Synthetic coding sequence
  source 1..840: mol_type = other DNA
atgggcagacagaaggagctggtgagcagatgcggcgagatgctgcacatcagatacagactgctgagacaggccctggccgagtgcctgggcaccctgatcctggtgatgttcggctgcggcagcgtggcccaggtggtgctgagcagaggcacccacggcggcttcctgaccatcaacctggccttcggcttcgccgtgaccctgggcatcctgatcgccggccaggtgagcggcgcccacctgaaccccgccgtgaccttcgccatgtgcttcctggccagagagccctggatcaagctgcccatctacaccctggcccagaccctgggcgccttcctgggcgccggcatcgtgttcggcctgtactacgacgccatctggcacttcgccgacaaccagctgttcgtgagcggccccaacggcaccgccggcatcttcgccacctaccccagcggccacctggacatgatcaacggcttcttcgaccaggacagacccgccctggtggtgggcgcccacagagtgcccacccccggcctgcactgcggctgcctgagagtgcccgccgacgacagactgccccccggcgccgcccccaccctgcagagaggcagagagtgcgaggccggcccctgcgaggcccagggcgccgacctgagcggccagggcagccccctgagatgccccggcctggagcaccccctgaccgtgcagggccccctgcccagaagccccctgcacgacccccccttccaggccaaggagctgcccatctacccccaccccaccaccgcccccagcggcttccccctggacctggcccagatcgccccctag

SEQ ID NO: 73155 - DNA, 972 bp, synthetic construct
  misc_feature 1..972: note = Description of Artificial Sequence: Synthetic coding sequence
  source 1..972: mol_type = other DNA
atgagcgacagacccaccgccagaagatggggcaagtgcggccccctgtgcaccagagagaacatcatggtggccttcaagggcgtgtggacccaggccttctggaaggccgtgaccgccgagttcctggccatgctgatcttcgtgctgctgagcctgggcagcaccatcaactggggcggcaccgagaagcccctgcccgtggacatggtgctgatcagcctgtgcttcggcctgagcatcgccaccatggtgcagtgcttcggccacatcagcggcggccacatcaaccccgccgtgaccgtggccatggtgtgcaccagaaagatcagcatcgccaagagcgtgttctacatcgccgcccagtgcctgggcgccatcatcggcgccggcatcctgtacctggtgaccccccccagcgtggtgggcggcctgggcgtgaccatggtgcacggcaacctgaccgccggccacggcctgctggtggagctgatcatcaccttccagctggtgttcaccatcttcgccagctgcgacagcaagagaaccgacgtgaccggcagcatcgccctggccatcggcttcagcgtggccatcggccacctgttcgccatcaactacaccggcgccagcatgaaccccgccagaagcttcggccccgccgtgatcatgggcaactgggagaaccactggatctactgggtgggccccatcatcggcgccgtgctggccggcggcctgtacgagtacgtgttctgccccgacgtggagttcaagagaagattcaaggaggccttcagcaaggccgcccagcagaccaagggcagctacatggaggtggaggacaacagaagccaggtggagaccgacgacctgatcctgaagcccggcgtggtgcacgtgatcgacgtggacagaggcgaggagaagaagggcaaggaccagagcggcgaggtgctgagcagcgtgtag

SEQ ID NO: 73156 - DNA, 660 bp, synthetic construct
  misc_feature 1..660: note = Description of Artificial Sequence: Synthetic coding sequence
  source 1..660: mol_type = other DNA
tgcaccctggccggcgagggcatgagcgacagacccaccgccagaagatggggcaagtgcggccccctgtgcaccagagagaacatcatggtggccttcaagggcgtgtggacccaggccttctggaaggccgtgaccgccgagttcctggccatgctgatcttcgtgctgctgagcctgggcagcaccatcaactggggcggcaccgagaagcccctgcccgtggacatggtgctgatcagcctgtgcttcggcctgagcatcgccaccatggtgcagtgcttcggccacatcagcggcggccacatcaaccccgccgtgaccgtggccatggtgtgcaccagaaagatcagcatcgccaagagcgtgttctacatcgccgcccagtgcgtgggccccatcatcggcgccgtgctggccggcggcctgtacgagtacgtgttctgccccgacgtggagttcaagagaagattcaaggaggccttcagcaaggccgcccagcagaccaagggcagctacatggaggtggaggacaacagaagccaggtggagaccgacgacctgatcctgaagcccggcgtggtgcacgtgatcgacgtggacagaggcgaggagaagaagggcaaggaccagagcggcgaggtgctgagcagcgtgtag

SEQ ID NO: 73157 - DNA, 912 bp, synthetic construct
  misc_feature 1..912: note = Description of Artificial Sequence: Synthetic coding sequence
  source 1..912: mol_type = other DNA
atgagcgacagacccaccgccagaagatggggcaagtgcggccccctgtgcaccagagagaacatcatggtggccttcaagggcgtgtggacccaggccttctggaaggccgtgaccgccgagttcctggccatgctgatcttcgtgctgctgagcctgggcagcaccatcaactggggcggcaccgagaagcccctgcccgtggacatggtgctgatcagcctgtgcttcggcctgagcatcgccaccatggtgtgcaccagaaagatcagcatcgccaagagcgtgttctacatcgccgcccagtgcctgggcgccatcatcggcgccggcatcctgtacctggtgaccccccccagcgtggtgggcggcctgggcgtgaccatggtgcacggcaacctgaccgccggccacggcctgctggtggagctgatcatcaccttccagctggtgttcaccatcttcgccagctgcgacagcaagagaaccgacgtgaccggcagcatcgccctggccatcggcttcagcgtggccatcggccacctgttcgccatcaactacaccggcgccagcatgaaccccgccagaagcttcggccccgccgtgatcatgggcaactgggagaaccactggatctactgggtgggccccatcatcggcgccgtgctggccggcggcctgtacgagtacgtgttctgccccgacgtggagttcaagagaagattcaaggaggccttcagcaaggccgcccagcagaccaagggcagctacatggaggtggaggacaacagaagccaggtggagaccgacgacctgatcctgaagcccggcgtggtgcacgtgatcgacgtggacagaggcgaggagaagaagggcaaggaccagagcggcgaggtgctgagcagcgtgtag

SEQ ID NO: 73158 - DNA, 849 bp, synthetic construct
  misc_feature 1..849: note = Description of Artificial Sequence: Synthetic coding sequence
  source 1..849: mol_type = other DNA
atggacgccgtggagcccggcggcagaggctgggccagcatgctggcctgcagactgtggaaggccatcagcagagccctgttcgccgagttcctggccaccggcctgtacgtgttcttcggcgtgggcagcgtgatgagatggcccaccgccctgcccagcgtgctgcagatcgccatcaccttcaacctggtgaccgccatggccgtgcaggtgacctggaaggccagcggcgcccacgccaaccccgccgtgaccctggccttcctggtgggcagccacatcagcctgcccagagccgtggcctacgtggccgcccagctggtgggcgccaccgtgggcgccgccctgctgtacggcgtgatgcccggcgacatcagagagaccctgggcatcaacgtggtgagaaacagcgtgagcaccggccaggccgtggccgtggagctgctgctgaccctgcagctggtgctgtgcgtgttcgccagcaccgacagcagacagaccagcggcagccccgccaccatgatcggcatcagcgtggccctgggccacctgatcggcatccacttcaccggctgcagcatgaaccccgccagaagcttcggccccgccatcatcatcggcaagttcaccgtgcactgggtgttctgggtgggccccctgatgggcgccctgctggccagcctgatctacaacttcgtgctgttccccgacaccaagaccctggcccagagactggccatcctgaccggcaccgtggaggtgggcaccggcgccggcgccggcgccgagcccctgaagaaggagagccagcccggcagcggcgccgtggagatggagagcgtgtag

SEQ ID NO: 73159 - DNA, 1029 bp, synthetic construct
  misc_feature 1..1029: note = Description of Artificial Sequence: Synthetic coding sequence
  source 1..1029: mol_type = other DNA
atggtgcaggccagcggccacagaagaagcaccagaggcagcaagatggtgagctggagcgtgatcgccaagatccaggagatcctgcagagaaagatggtgagagagttcctggccgagttcatgagcacctacgtgatgatggtgttcggcctgggcagcgtggcccacatggtgctgaacaagaagtacggcagctacctgggcgtgaacctgggcttcggcttcggcgtgaccatgggcgtgcacgtggccggcagaatcagcggcgcccacatgaacgccgccgtgaccttcgccaactgcgccctgggcagagtgccctggagaaagttccccgtgtacgtgctgggccagttcctgggcagcttcctggccgccgccaccatctacagcctgttctacaccgccatcctgcacttcagcggcggccagctgatggtgaccggccccgtggccaccgccggcatcttcgccacctacctgcccgaccacatgaccctgtggagaggcttcctgaacgaggcctggctgaccggcatgctgcagctgtgcctgttcgccatcaccgaccaggagaacaaccccgccctgcccggcaccgaggccctggtgatcggcatcctggtggtgatcatcggcgtgagcctgggcatgaacaccggctacgccatcaaccccagcagagacctgccccccagaatcttcaccttcatcgccggctggggcaagcaggtgttcagcaacggcgagaactggtggtgggtgcccgtggtggcccccctgctgggcgcctacctgggcggcatcatctacctggtgttcatcggcagcaccatccccagagagcccctgaagctggaggacagcgtggcctacgaggaccacggcatcaccgtgctgcccaagatgggcagccacgagcccaccatcagccccctgacccccgtgagcgtgagccccgccaacagaagcagcgtgcaccccgccccccccctgcacgagagcatggccctggagcacttctag

SEQ ID NO: 73160 - DNA, 651 bp, synthetic construct
  misc_feature 1..651: note = Description of Artificial Sequence: Synthetic coding sequence
  source 1..651: mol_type = other DNA
atggtgctgaacaagaagtacggcagctacctgggcgtgaacctgggcttcggcttcggcgtgaccatgggcgtgcacgtggccggcagaatcagcggcgcccacatgaacgccgccgtgaccttcgccaactgcgccctgggcagagtgccctggagaaagttccccgtgtacgtgctgggccagttcctgggcagcttcctggccgccgccaccatctacagcctgttctacaccgccatcctgcacttcagcggcggccagctgatggtgaccggccccgtggccaccgccggcatcttcgccacctacctgcccgaccacatgaccctgtggagaggcttcctgaacgaggcctggctgaccggcatgctgcagctgtgcctgttcgccatcaccgaccaggagaacaaccccgccctgcccggcaccgaggccctggtgatcggcatcctggtggtgatcatcggcgtgagcctgggcatgaacaccggctacgccatcaaccccagcagagacctgccccccagaatcttcaccttcatcgccggctggggcaagcaggtgttcagatggcaccacctgcccggcctgcactggctgcaccaccccaccggcgcccccgagatcggcggcttctgcggcgtgtag

SEQ ID NO: 73161 - DNA, 582 bp, synthetic construct
  misc_feature 1..582: note = Description of Artificial Sequence: Synthetic coding sequence
  source 1..582: mol_type = other DNA
atgggctgggccaccttcaccgaccagggcgaggagggcctggagcccagcggcccctggaagaccagccacaccagagcccacatgaacgccgccgtgaccttcgccaactgcgccctgggcagagtgccctggagaaagttccccgtgtacgtgctgggccagttcctgggcagcttcctggccgccgccaccatctacagcctgttctacaccgccatcctgcacttcagcggcggccagctgatggtgaccggccccgtggccaccgccggcatcttcgccacctacctgcccgaccacatgaccctgtggagaggcttcctgaacgaggcctggctgaccggcatgctgcagctgtgcctgttcgccatcaccgaccaggagaacaaccccgccctgcccggcaccgaggccctggtgatcggcatcctggtggtgatcatcggcgtgagcctgggcatgaacaccggctacgccatcaaccccagcagagacctgccccccagaatcttcaccttcatcgccggctggggcaagcaggtgttcagatactgcccctgccccggccccttcctgtag

SEQ ID NO: 73162 - DNA, 771 bp, synthetic construct
  misc_feature 1..771: note = Description of Artificial Sequence: Synthetic coding sequence
  source 1..771: mol_type = other DNA
atgggcagcggccactgcctgagaagcaccagaggcagcaagatggtgagctggagcgtgatcgccaagatccaggagatcctgcagagaaagatggtgagagagttcctggccgagttcatgagcacctacgtgatgatggtgttcggcctgggcagcgtggcccacatggtgctgaacaagaagtacggcagctacctgggcgtgaacctgggcttcggcttcggcgtgaccatgggcgtgcacgtggccggcagaatcagcggcgcccacatgaacgccgccgtgaccttcgccaactgcgccctgggcagagtgccctggagaaagttccccgtgtacgtgctgggccagttcctgggcagcttcctggccgccgccaccatctacagcctgttctacaccgccatcctgcacttcagcggcggccagctgatggtgaccggccccgtggccaccgccggcatcttcgccacctacctgcccgaccacatgaccctgtggagaggcttcctgaacgaggcctggctgaccggcatgctgcagctgtgcctgttcgccatcaccgaccaggagaacaaccccgccctgcccggcaccgaggccctggtgatcggcatcctggtggtgatcatcggcgtgagcctgggcatgaacaccggctacgccatcaaccccagcagagacctgccccccagaatcttcaccttcatcgccggctggggcaagcaggtgttcagatactgcccctgccccggccccttcctgtag

SEQ ID NO: 73163 - DNA, 1026 bp, synthetic construct
  misc_feature 1..1026: note = Description of Artificial Sequence: Synthetic coding sequence
  source 1..1026: mol_type = other DNA
atgggcagcggccactgcctgagaagcaccagaggcagcaagatggtgagctggagcgtgatcgccaagatccaggagatcctgcagagaaagatggtgagagagttcctggccgagttcatgagcacctacgtgatgatggtgttcggcctgggcagcgtggcccacatggtgctgaacaagaagtacggcagctacctgggcgtgaacctgggcttcggcttcggcgtgaccatgggcgtgcacgtggccggcagaatcagcggcgcccacatgaacgccgccgtgaccttcgccaactgcgccctgggcagagtgccctggagaaagttccccgtgtacgtgctgggccagttcctgggcagcttcctggccgccgccaccatctacagcctgttctacaccgccatcctgcacttcagcggcggccagctgatggtgaccggccccgtggccaccgccggcatcttcgccacctacctgcccgaccacatgaccctgtggagaggcttcctgaacgaggcctggctgaccggcatgctgcagctgtgcctgttcgccatcaccgaccaggagaacaaccccgccctgcccggcaccgaggccctggtgatcggcatcctggtggtgatcatcggcgtgagcctgggcatgaacaccggctacgccatcaaccccagcagagacctgccccccagaatcttcaccttcatcgccggctggggcaagcaggtgttcagcaacggcgagaactggtggtgggtgcccgtggtggcccccctgctgggcgcctacctgggcggcatcatctacctggtgttcatcggcagcaccatccccagagagcccctgaagctggaggacagcgtggcctacgaggaccacggcatcaccgtgctgcccaagatgggcagccacgagcccaccatcagccccctgacccccgtgagcgtgagccccgccaacagaagcagcgtgcaccccgccccccccctgcacgagagcatggccctggagcacttctag

SEQ ID NO: 73164 - DNA, 513 bp, synthetic construct
  misc_feature 1..513: note = Description of Artificial Sequence: Synthetic coding sequence
  source 1..513: mol_type = other DNA
atgaacgccgccgtgaccttcgccaactgcgccctgggcagagtgccctggagaaagttccccgtgtacgtgctgggccagttcctgggcagcttcctggccgccgccaccatctacagcctgttctacaccgccatcctgcacttcagcggcggccagctgatggtgaccggccccgtggccaccgccggcatcttcgccacctacctgcccgaccacatgaccctgtggagaggcttcctgaacgaggcctggctgaccggcatgctgcagctgtgcctgttcgccatcaccgaccaggagaacaaccccgccctgcccggcaccgaggccctggtgatcggcatcctggtggtgatcatcggcgtgagcctgggcatgaacaccggctacgccatcaaccccagcagagacctgccccccagaatcttcaccttcatcgccggctggggcaagcaggtgttcagcaacggcgagaactggtggtgggtgcccgtggtggcccccctgtag

SEQ ID NO: 73165 - DNA, 426 bp, synthetic construct
  misc_feature 1..426: note = Description of Artificial Sequence: Synthetic coding sequence
  source 1..426: mol_type = other DNA
ctgttctacaccgccatcctgcacttcagcggcggccagctgatggtgaccggccccgtggccaccgccggcatcttcgccacctacctgcccgaccacatgaccctgtggagaggcttcctgaacgaggcctggctgaccggcatgctgcagctgtgcctgttcgccatcaccgaccaggagaacaaccccgccctgcccggcaccgaggccctggtgatcggcatcctggtggtgatcatcggcgtgagcctgggcatgaacaccggctacgccatcaaccccagcagagacctgccccccagaatcttcaccttcatcgccggctggggcaagcaggtgttcagatggcaccacctgcccggcctgcactggctgcaccaccccaccggcgcccccgagatcggcggcttctgcggcgtgtag

SEQ ID NO: 73166 - DNA, 498 bp, synthetic construct
  misc_feature 1..498: note = Description of Artificial Sequence: Synthetic coding sequence
  source 1..498: mol_type = other DNA
atgaacgccgccgtgaccttcgccaactgcgccctgggcagagtgccctggagaaagttccccgtgtacgtgctgggccagttcctgggcagcttcctggccgccgccaccatctacagcctgttctacaccgccatcctgcacttcagcggcggccagctgatggtgaccggccccgtggccaccgccggcatcttcgccacctacctgcccgaccacatgaccctgtggagaggcttcctgaacgaggcctggctgaccggcatgctgcagctgtgcctgttcgccatcaccgaccaggagaacaaccccgccctgcccggcaccgaggccctggtgatcggcatcctggtggtgatcatcggcgtgagcctgggcatgaacaccggctacgccatcaaccccagcagagacctgccccccagaatcttcaccttcatcgccggctggggcaagcaggtgttcagatactgcccctgccccggccccttcctgtag

SEQ ID NO: 73167 - DNA, 774 bp, synthetic construct
  misc_feature 1..774: note = Description of Artificial Sequence: Synthetic coding sequence
  source 1..774: mol_type = other DNA
atggtgcaggccagcggccacagaagaagcaccagaggcagcaagatggtgagctggagcgtgatcgccaagatccaggagatcctgcagagaaagatggtgagagagttcctggccgagttcatgagcacctacgtgatgatggtgttcggcctgggcagcgtggcccacatggtgctgaacaagaagtacggcagctacctgggcgtgaacctgggcttcggcttcggcgtgaccatgggcgtgcacgtggccggcagaatcagcggcgcccacatgaacgccgccgtgaccttcgccaactgcgccctgggcagagtgccctggagaaagttccccgtgtacgtgctgggccagttcctgggcagcttcctggccgccgccaccatctacagcctgttctacaccgccatcctgcacttcagcggcggccagctgatggtgaccggccccgtggccaccgccggcatcttcgccacctacctgcccgaccacatgaccctgtggagaggcttcctgaacgaggcctggctgaccggcatgctgcagctgtgcctgttcgccatcaccgaccaggagaacaaccccgccctgcccggcaccgaggccctggtgatcggcatcctggtggtgatcatcggcgtgagcctgggcatgaacaccggctacgccatcaaccccagcagagacctgccccccagaatcttcaccttcatcgccggctggggcaagcaggtgttcagatactgcccctgccccggccccttcctgtag

SEQ ID NO: 73168 - DNA, 426 bp, synthetic construct
  misc_feature 1..426: note = Description of Artificial Sequence: Synthetic coding sequence
  source 1..426: mol_type = other DNA
atgaacgccgccgtgaccttcgccaactgcgccctgggcagagtgccctggagaaagttccccgtgtacgtgctgggccagttcctgggcagcttcctggccgccgccaccatctacagcctgttctacagcgtggccgacagagacgcccccgccgtgagcctgagacaccacggccccggcgagcagcccagcaccgccagaaacagaggcgccggcgacagacaccccagaggccaccacagaggcgtgccctggcacgagcacagaatctgccaccagcccgtgcccggccccgcccccccccacctgcacctgcactgctggctgggccagaccggcctgcaggtgctgcccctgcccagacccatccccctgagcttcagcgtgggccccctgtgcgtggagggctggggcgtgatgtag

SEQ ID NO: 73169 - DNA, 1602 bp, synthetic construct
  misc_feature 1..1602: note = Description of Artificial Sequence: Synthetic coding sequence
  source 1..1602: mol_type = other DNA
atgggcagcagatgcctgaacccccccccccccgcccacagcgacaccaccggcaaggacagcttcggcaacatcagaggcgccgagaccggccagggcgccagcgcctgcagcgtgaccagcgccagagtgacctgcggcgccggcagcgagccccacagccacagaaaccccggcatcagcgcccaggtgggcctggcccccagctacggcgccgccagaggcagaagaagacccctggccctgcagcagagcccccaggagagaagacacgtgggctggaacagcaccagaggcctgctgcccgccagcctgcccggcaccgccagcagccagagcgccagcgccaccgccagcgccgccctgcccctgaaggtgaccggccccctggccagaaaccccacccccccctggaccgccgccgccgccctggccaccagaggccagagacccgagaagggcctgttccccggccccgcccccttcagcctgggcaagagaaagagaggcagaggcagaacctgggagagaagaagaagagtgagcatcgagaccagcacctgcttcagacccggctgcgagagactgggcgccgccgccggcgccaacctgagccagctggccagcagccagagacccctgagagagagatgggtgctgtacaccatcatcatggccgccgccggcgcccccgacggcatggaggagcccggcatggacaccgaggccgagaccgtggccaccgaggcccccgccagacccgtgaactgcctggaggccgaggccgccgccggcgccgccgccgaggacagcggcgccgccagaggcagcctgcagcccgcccccgcccagccccccggcgaccccgccgcccaggccagcgtgagcaacggcgaggacgccggcggcggcgccggcagagagctggtggacctgaagatcatctggaacaagaccaagcacgacgtgaagttccccctggacagcaccggcagcgagctgaagcagaagatccacagcatcaccggcctgccccccgccatgcagaaggtgatgtacaagggcctggtgcccgaggacaagaccctgagagagatcaaggtgaccagcggcgccaagatcatggtggtgggcagcaccatcaacgacgtgctggccgtgaacacccccaaggacgccgcccagcaggacgccaaggccgaggagaacaagaaggagcccctgtgcagacagaagcagcacagaaaggtgctggacaagggcaagcccgaggacgtgatgcccagcgtgaagggcgcccaggagagactgcccaccgtgcccctgagcggcatgtacaacaagagcggcggcaaggtgagactgaccttcaagctggagcaggaccagctgtggatcggcaccaaggagagaaccgagaagctgcccatgggcagcatcaagaacgtggtgagcgagcccatcgagggccacgaggactaccacatgatggccttccagctgggccccaccgaggccagctactactgggtgtactgggtgcccacccagtacgtggacgccatcaaggacaccgtgctgggcaagtggcagtacttctag

SEQ ID NO: 73170 - DNA, 9198 bp, synthetic construct
  misc_feature 1..9198: note = Description of Artificial Sequence: Synthetic coding sequence
  source 1..9198: mol_type = other DNA
atggaggagaagcagcagatcatcctggccaaccaggacggcggcaccgtggccggcgccgcccccaccttcttcgtgatcctgaagcagcccggcaacggcaagaccgaccagggcatcctggtgaccaaccaggacgcctgcgccctggccagcagcgtgagcagccccgtgaagagcaagggcaagatctgcctgcccgccgactgcaccgtgggcggcatcaccgtgaccctggacaacaacagcatgtggaacgagttctaccacagaagcaccgagatgatcctgaccaagcagggcagaagaatgttcccctactgcagatactggatcaccggcctggacagcaacctgaagtacatcctggtgatggacatcagccccgtggacaaccacagatacaagtggaacggcagatggtgggagcccagcggcaaggccgagccccacgtgctgggcagagtgttcatccaccccgagagccccagcaccggccactactggatgcaccagcccgtgagcttctacaagctgaagctgaccaacaacaccctggaccaggagggccacatcatcctgcacagcatgcacagatacctgcccagactgcacctggtgcccgccgagaaggccgtggaggtgatccagctgaacggccccggcgtgcacaccttcaccttcccccagaccgagttcttcgccgtgaccgcctaccagaacatccagatcacccagctgaagatcgactacaaccccttcgccaagggcttcagagacgacggcctgaacaacaagccccagagagacggcaagcagaagaacagcagcgaccaggagggcaacaacatcagcagcagcagcggccacagagtgagactgaccgagggccagggcagcgagatccagcccggcgacctggaccccctgagcagaggccacgagaccagcggcaagggcctggagaagaccagcctgaacatcaagagagacttcctgggcttcatggacaccgacagcgccctgagcgaggtgccccagctgaagcaggagatcagcgagtgcctgatcgccagcagcttcgaggacgacagcagagtggccagccccctggaccagaacggcagcttcaacgtggtgatcaaggaggagcccctggacgactacgactacgagctgggcgagtgccccgagggcgtgaccgtgaagcaggaggagaccgacgaggagaccgacgtgtacagcaacagcgacgacgaccccatcctggagaagcagctgaagagacacaacaaggtggacaaccccgaggccgaccacctgagcagcaagtggctgcccagcagccccagcggcgtggccaaggccaagatgttcaagctggacaccggcaagatgcccgtggtgtacctggagccctgcgccgtgaccagaagcaccgtgaagatcagcgagctgcccgacaacatgctgagcaccagcagaaaggacaagagcagcatgctggccgagctggagtacctgcccacctacatcgagaacagcaacgagaccgccttctgcctgggcaaggagagcgagaacggcctgagaaagcacagccccgacctgagagtggtgcagaagtaccccctgctgaaggagccccagtggaagtaccccgacatcagcgacagcatcagcaccgagagaatcctggacgacagcaaggacagcgtgggcgacagcctgagcggcaaggaggacctgggcagaaagagaaccaccatgctgaagatcgccaccgccgccaaggtggtgaacgccaaccagaacgccagccccaacgtgcccggcaagagaggcagacccagaaagctgaagctgtgcaaggccggcagaccccccaagaacaccggcaagagcctgatcagcaccaagaacacccccgtgagccccggcagcaccttccccgacgtgaagcccgacctggaggacgtggacggcgtgctgttcgtgagcttcgagagcaaggaggccctggacatccacgccgtggacggcaccaccgaggagagcagcagcctgcaggccagcaccaccaacgacagcggctacagagccagaatcagccagctggagaaggagctgatcgaggacctgaagaccctgagacacaagcaggtgatccaccccggcctgcaggaggtgggcctgaagctgaacagcgtggaccccaccatgagcatcgacctgaagtacctgggcgtgcagctgcccctggcccccgccaccagcttccccttctggaacctgaccggcaccaaccccgccagccccgacgccggcttccccttcgtgagcagaaccggcaagaccaacgacttcaccaagatcaagggctggagaggcaagttccacagcgccagcgccagcagaaacgagggcggcaacagcgagagcagcctgaagaacagaagcgccttctgcagcgacaagctggacgagtacctggagaacgagggcaagctgatggagaccagcatgggcttcagcagcaacgcccccaccagccccgtggtgtaccagctgcccaccaagagcaccagctacgtgagaaccctggacagcgtgctgaagaagcagagcaccatcagccccagcaccagctacagcctgaagccccacagcgtgccccccgtgagcagaaaggccaagagccagaacagacaggccaccttcagcggcagaaccaagagcagctacaagagcatcctgccctaccccgtgagccccaagcagaagtacagccacgtgatcctgggcgacaaggtgaccaagaacagcagcggcatcatcagcgagaaccaggccaacaacttcgtggtgcccaccctggacgagaacatcttccccaagcagatcagcctgagacaggcccagcagcagcagcagcagcagcagggcagcagaccccccggcctgagcaagagccaggtgaagctgatggacctggaggactgcgccctgtgggagggcaagcccagaacctacatcaccgaggagagagccgacgtgagcctgaccaccctgctgaccgcccaggccagcctgaagaccaagcccatccacaccatcatcagaaagagagcccccccctgcaacaacgacttctgcagactgggctgcgtgtgcagcagcctggccctggagaagagacagcccgcccactgcagaagacccgactgcatgttcggctgcacctgcctgaagagaaaggtggtgctggtgaagggcggcagcaagaccaagcacttccagagaaaggccgcccacagagaccccgtgttctacgacaccctgggcgaggaggccagagaggaggaggagggcatcagagaggaggaggagcagctgaaggagaagaagaagagaaagaagctggagtacaccatctgcgagaccgagcccgagcagcccgtgagacactaccccctgtgggtgaaggtggagggcgaggtggaccccgagcccgtgtacatccccacccccagcgtgatcgagcccatgaagcccctgctgctgccccagcccgaggtgctgagccccaccgtgaagggcaagctgctgaccggcatcaagagccccagaagctacacccccaagcccaaccccgtgatcagagaggaggacaaggaccccgtgtacctgtacttcgagagcatgatgacctgcgccagagtgagagtgtacgagagaaagaaggaggaccagagacagcccagcagcagcagcagccccagccccagcttccagcagcagaccagctgccacagcagccccgagaaccacaacaacgccaaggagcccgacagcgagcagcagcccctgaagcagctgacctgcgacctggaggacgacagcgacaagctgcaggagaagagctggaagagcagctgcaacgagggcgagagcagcagcaccagctacatgcaccagagaagccccggcggccccaccaagctgatcgagatcatcagcgactgcaactgggaggaggacagaaacaagatcctgagcatcctgagccagcacatcaacagcaacatgccccagagcctgaaggtgggcagcttcatcatcgagctggccagccagagaaagagcagaggcgagaagaacccccccgtgtacagcagcagagtgaagatcagcatgcccagctgccaggaccaggacgacatggccgagaagagcggcagcgagacccccgacggccccctgagccccggcaagatggaggacatcagccccgtgcagaccgacgccctggacagcgtgagagagagactgcacggcggcaagggcctgcccttctacgccggcctgagccccgccggcaagctggtggcctacaagagaaagcccagcagcagcaccagcggcctgatccaggtggccagcaacgccaaggtggccgccagcagaaagcccagaaccctgctgcccagcaccagcaacagcaagatggccagcagcagcggcaccgccaccaacagacccggcaagaacctgaaggccttcgtgcccgccaagagacccatcgccgccagacccagccccggcggcgtgttcacccagttcgtgatgagcaaggtgggcgccctgcagcagaagatccccggcgtgagcaccccccagaccctggccggcacccagaagttcagcatcagacccagccccgtgatggtggtgacccccgtggtgagcagcgagcccgtgcaggtgtgcagccccgtgaccgccgccgtgaccaccaccaccccccaggtgttcctggagaacaccaccgccgtgacccccatgaccgccatcagcgacgtggagaccaaggagaccacctacagcagcggcgccaccaccaccggcgtggtggaggtgagcgagaccaacaccagcaccagcgtgaccagcacccagagcaccgccaccgtgaacctgaccaagaccaccggcatcaccacccccgtggccagcgtggccttccccaagagcctggtggccagccccagcaccatcaccctgcccgtggccagcaccgccagcaccagcctggtggtggtgaccgccgccgccagcagcagcatggtgaccacccccaccagcagcctgggcagcgtgcccatcatcctgagcggcatcaacggcagcccccccgtgagccagagacccgagaacgccgcccagatccccgtggccaccccccaggtgagccccaacaccgtgaagagagccggccccagactgctgctgatccccgtgcagcagggcagccccaccctgagacccgtgagcaacacccagctgcagggccacagaatggtgctgcagcccgtgagaagccccagcggcatgaacctgttcagacaccccaacggccagatcgtgcagctgctgcccctgcaccagctgagaggcagcaacacccagcccaacctgcagcccgtgatgttcagaaaccccggcagcgtgatgggcatcagactgcccgcccccagcaagcccagcgagaccccccccagcagcaccagcagcagcgccttcagcgtgatgaaccccgtgatccaggccgtgggcagcagcagcgccgtgaacgtgatcacccaggcccccagcctgctgagcagcggcgccagcttcgtgagccaggccggcaccctgaccctgagaatcagcccccccgagccccagagcttcgccagcaagaccggcagcgagaccaagatcacctacagcagcggcggccagcccgtgggcaccgccagcctgatccccctgcagagcggcagcttcgccctgctgcagctgcccggccagaagcccgtgcccagcagcatcctgcagcacgtggccagcctgcagatgaagagagagagccagaaccccgaccagaaggacgagaccaacagcatcaagagagagcaggagaccaagaaggtgctgcagagcgagggcgaggccgtggaccccgaggccaacgtgatcaagcagaacagcggcgccgccaccagcgaggagaccctgaacgacagcctggaggacagaggcgaccacctggacgaggagtgcctgcccgaggagggctgcgccaccgtgaagcccagcgagcacagctgcatcaccggcagccacaccgaccaggactacaaggacgtgaacgaggagtacggcgccagaaacagaaagagcagcaaggagaaggtggccgtgctggaggtgagaaccatcagcgagaaggccagcaacaagaccgtgcagaacctgagcaaggtgcagcaccagaagctgggcgacgtgaaggtggagcagcagaagggcttcgacaaccccgaggagaacagcagcgagttccccgtgaccttcaaggaggagagcaagttcgagctgagcggcagcaaggtgatggagcagcagagcaacctgcagcccgaggccaaggagaaggagtgcggcgacagcctggagaaggacagagagagatggagaaagcacctgaagggccccctgaccagaaagtgcgtgggcgccagccaggagtgcaagaaggaggccgacgagcagctgatcaaggagaccaagacctgccaggagaacagcgacgtgttccagcaggagcagggcatcagcgacctgctgggcaagagcggcatcaccgaggacgccagagtgctgaagaccgagtgcgacagctggagcagaatcagcaaccccagcgccttcagcatcgtgcccagaagagccgccaagagcagcagaggcaacggccacttccagggccacctgctgctgcccggcgagcagatccagcccaagcaggagaagaagggcggcagaagcagcgccgacttcaccgtgctggacctggaggaggacgacgaggacgacaacgagaagaccgacgacagcatcgacgagatcgtggacgtggtgagcgactaccagagcgaggaggtggacgacgtggagaagaacaactgcgtggagtacatcgaggacgacgaggagcacgtggacatcgagaccgtggaggagctgagcgaggagatcaacgtggcccacctgaagaccaccgccgcccacacccagagcttcaagcagcccagctgcacccacatcagcgccgacgagaaggccgccgagagaagcagaaaggccccccccatccccctgaagctgaagcccgactactggagcgacaagctgcagaaggaggccgaggccttcgcctactacagaagaacccacaccgccaacgagagaagaagaagaggcgagatgagagacctgttcgagaagctgaagatcaccctgggcctgctgcacagcagcaaggtgagcaagagcctgatcctgaccagagccttcagcgagatccagggcctgaccgaccaggccgacaagctgatcggccagaagaacctgctgaccagaaagagaaacatcctgatcagaaaggtgagcagcctgagcggcaagaccgaggaggtggtgctgaagaagctggagtacatctacgccaagcagcaggccctggaggcccagaagagaaagaagaagatgggcagcgacgagttcgacatcagccccagaatcagcaagcagcaggagggcagcagcgccagcagcgtggacctgggccagatgttcatcaacaacagaagaggcaagcccctgatcctgagcagaaagaaggaccaggccaccgagaacaccagccccctgaacaccccccacaccagcgccaacctggtgatgaccccccagggccagctgctgaccctgaagggccccctgttcagcggccccgtggtggccgtgagccccgacctgctggagagcgacctgaagccccaggtggccggcagcgccgtggccctgcccgagaacgacgacctgttcatgatgcccagaatcgtgaacgtgaccagcctggccaccgagggcggcctggtggacatgggcggcagcaagtacccccacgaggtgcccgacagcaagcccagcgaccacctgaaggacaccgtgagaaacgaggacaacagcctggaggacaagggcagaatcagcagcagaggcaacagagacggcagagtgaccctgggccccacccaggtgttcctggccaacaaggacagcggctacccccagatcgtggacgtgagcaacatgcagaaggcccaggagttcctgcccaagaagatcagcggcgacatgagaggcatccagtacaagtggaaggagagcgagagcagaggcgagagagtgaagagcaaggacagcagcttccacaagctgaagatgaaggacctgaaggacagcagcatcgagatggagctgagaaaggtgaccagcgccatcgaggaggccgccctggacagcagcgagctgctgaccaacatggaggacgaggacgacaccgacgagaccctgaccagcctgctgaacgagatcgccttcctgaaccagcagctgaacgacgacagcgtgggcctggccgagctgcccagcagcatggacaccgagttccccggcgacgccagaagagccttcatcagcaaggtgccccccggcagcagagccaccttccaggtggagcacctgggcaccggcctgaaggagctgcccgacgtgcagggcgagagcgacagcatcagccccctgctgctgcacctggaggacgacgacttcagcgagaacgagaagcagctggccgagcccgccagcgagcccgacgtgctgaagatcgtgatcgacagcgagatcaaggacagcctgctgagcaacaagaaggccatcgacggcggcaagaacaccagcggcctgcccgccgagcccgagagcgtgagcagcccccccaccctgcacatgaagaccggcctggagaacagcaacagcaccgacaccctgtggagacccatgcccaagctggcccccctgggcctgaaggtggccaaccccagcagcgacgccgacggccagagcctgaaggtgatgccctgcctggcccccatcgccgccaaggtgggcagcgtgggccacaagatgaacctgaccggcaacgaccaggagggcagagagagcaaggtgatgcccaccctggcccccgtggtggccaagctgggcaacagcggcgccagccccagcagcgccggcaagtag

SEQ ID NO: 73171 - DNA, 888 bp, synthetic construct
  misc_feature 1..888: note = Description of Artificial Sequence: Synthetic coding sequence
  source 1..888: mol_type = other DNA
atgcagcccgagggcgccgagaagggcaagagcttcaagcagagactggtgctgaagagcagcctggccaaggagaccctgagcgagttcctgggcaccttcatcctgatcgtgctgggctgcggctgcgtggcccaggccatcctgagcagaggcagattcggcggcgtgatcaccatcaacgtgggcttcagcatggccgtggccatggccatctacgtggccggcggcgtgagcggcggccacatcaaccccgccgtgagcctggccatgtgcctgttcggcagaatgaagtggttcaagctgcccttctacgtgggcgcccagttcctgggcgccttcgtgggcgccgccaccgtgttcggcatctactacgacggcctgatgagcttcgccggcggcaagctgctgatcgtgggcgagaacgccaccgcccacatcttcgccacctaccccgccccctacctgagcctggccaacgccttcgccgaccaggtggtggccaccatgatcctgctgatcatcgtgttcgccatcttcgacagcagaaacctgggcgcccccagaggcctggagcccatcgccatcggcctgctgatcatcgtgatcgccagcagcctgggcctgaacagcggctgcgccatgaaccccgccagagacctgagccccagactgttcaccgccctggccggctggggcttcgaggtgttcagagccggcaacaacttctggtggatccccgtggtgggccccctggtgggcgccgtgatcggcggcctgatctacgtgctggtgatcgagatccaccaccccgagcccgacagcgtgttcaagaccgagcagagcgaggacaagcccgagaagtacgagctgagcgtgatcatgtag

SEQ ID NO: 73172 - DNA, 1992 bp, synthetic construct
  misc_feature 1..1992: note = Description of Artificial Sequence: Synthetic coding sequence
  source 1..1992: mol_type = other DNA
atgggcagatacagaatcagagtggccaccggcgcctggctgttcagcggcagctacaacagagtgcagctgtggctggtgggcaccagaggcgaggccgagctggagctgcagctgagacccgccagaggcgaggaggaggagttcgaccacgacgtggccgaggacctgggcctgctgcagttcgtgagactgagaaagcaccactggctggtggacgacgcctggttctgcgacagaatcaccgtgcagggccccggcgcctgcgccgaggtggccttcccctgctacagatgggtgcagggcgaggacatcctgagcctgcccgagggcaccgccagactgcccggcgacaacgccctggacatgttccagaagcacagagagaaggagctgaaggacagacagcagatctactgctgggccacctggaaggagggcctgcccctgaccatcgccgccgacagaaaggacgacctgccccccaacatgagattccacgaggagaagagactggacttcgagtggaccctgaaggccggcgccctggagatggccctgaagagagtgtacaccctgctgagcagctggaactgcctggaggacttcgaccagatcttctggggccagaagagcgccctggccgagaaggtgagacagtgctggcaggacgacgagctgttcagctaccagttcctgaacggcgccaaccccatgctgctgagaagaagcaccagcctgcccagcagactggtgctgcccagcggcatggaggagctgcaggcccagctggagaaggagctgcagaacggcagcctgttcgaggccgacttcatcctgctggacggcatccccgccaacgtgatcagaggcgagaagcagtacctggccgcccccctggtgatgctgaagatggagcccaacggcaagctgcagcccatggtgatccagatccagccccccaaccccagcagccccacccccaccctgttcctgcccagcgacccccccctggcctggctgctggccaagagctgggtgagaaacagcgacttccagctgcacgagatccagtaccacctgctgaacacccacctggtggccgaggtgatcgccgtggccaccatgagatgcctgcccggcctgcaccccatcttcaagttcctgatcccccacatcagatacaccatggagatcaacaccagagccagaacccagctgatcagcgacggcggcatcttcgacaaggccgtgagcaccggcggcggcggccacgtgcagctgctgagaagagccgccgcccagctgacctactgcagcctgtgcccccccgacgacctggccgacagaggcctgctgggcctgcccggcgccctgtacgcccacgacgccctgagactgtgggagatcatcgccagatacgtggagggcatcgtgcacctgttctaccagagagacgacatcgtgaagggcgaccccgagctgcaggcctggtgcagagagatcaccgaggtgggcctgtgccaggcccaggacagaggcttccccgtgagcttccagagccagagccagctgtgccacttcctgaccatgtgcgtgttcacctgcaccgcccagcacgccgccatcaaccagggccagctggactggtacgcctgggtgcccaacgccccctgcaccatgagaatgcccccccccaccaccaaggaggacgtgaccatggccaccgtgatgggcagcctgcccgacgtgagacaggcctgcctgcagatggccatcagctggcacctgagcagaagacagcccgacatggtgcccctgggccaccacaaggagaagtacttcagcggccccaagcccaaggccgtgctgaaccagttcagaaccgacctggagaagctggagaaggagatcaccgccagaaacgagcagctggactggccctacgagtacctgaagcccagctgcatcgagaacagcgtgaccatctag

SEQ ID NO: 73173 - DNA, 2106 bp, synthetic construct
  misc_feature 1..2106: note = Description of Artificial Sequence: Synthetic coding sequence
  source 1..2106: mol_type = other DNA
atggccacctacaaggtgagagtggccaccggcaccgacctgctgagcggcaccagagacagcatcagcctgaccatcgtgggcacccagggcgagagccacaagcagctgctgaaccacttcggcagagacttcgccaccggcgccgtgggccagtacaccgtgcagtgcccccaggacctgggcgagctgatcatcatcagactgcacaaggagagatacgccttcttccccaaggacccctggtactgcaactacgtgcagatctgcgcccccaacggcagaatctaccacttccccgcctaccagtggatggacggctacgagaccctggccctgagagaggccaccggcaagaccaccgccgacgacagcctgcccgtgctgctggagcacagaaaggaggagatcagagccaagcaggacttctaccactggagagtgttcctgcccggcctgcccagctacgtgcacatccccagctacagaccccccgtgagaagacacagaaaccccaacagacccgagtggaacggctacatccccggcttccccatcctgatcaacttcaaggccaccaagttcctgaacctgaacctgagatacagcttcctgaagaccgccagcttcttcgtgagactgggccccatggccctggccttcaaggtgagaggcctgctggactgcaagcacagctggaagagactgaaggacatcagaaagatcttccccggcaagaagagcgtggtgagcgagtacgtggccgagcactgggccgaggacaccttcttcggctaccagtacctgaacggcgtgaaccccggcctgatcagaagatgcaccagaatccccgacaagttccccgtgaccgacgacatggtggcccccttcctgggcgagggcacctgcctgcaggccgagctggagaagggcaacatctacctggccgactacagaatcatggagggcatccccaccgtggagctgagcggcagaaagcagcaccactgcgcccccctgtgcctgctgcacttcggccccgagggcaagatgatgcccatcgccatccagctgagccagacccccggccccgactgccccatcttcctgcccagcgacagcgagtgggactggctgctggccaagacctgggtgagatacgccgagttctacagccacgaggccatcgcccacctgctggagacccacctgatcgccgaggccttctgcctggccctgctgagaaacctgcccatgtgccaccccctgtacaagctgctgatcccccacaccagatacaccgtgcagatcaacagcatcggcagagccgtgctgctgaacgagggcggcctgagcgccaagggcatgagcctgggcgtggagggcttcgccggcgtgatggtgagagccctgagcgagctgacctacgacagcctgtacctgcccaacgacttcgtggagagaggcgtgcaggacctgcccggctactactacagagacgacagcctggccgtgtggaacgccctggagaagtacgtgaccgagatcatcacctactactaccccagcgacgccgccgtggagggcgaccccgagctgcagagctgggtgcaggagatcttcaaggagtgcctgctgggcagagagagcagcggcttccccagatgcctgagaaccgtgcccgagctgatcagatacgtgaccatcgtgatctacacctgcagcgccaagcacgccgccgtgaacaccggccagatggagttcaccgcctggatgcccaacttccccgccagcatgagaaacccccccatccagaccaagggcctgaccaccctggagaccttcatggacaccctgcccgacgtgaagaccacctgcatcaccctgctggtgctgtggaccctgagcagagagcccgacgacagaagacccctgggccacttccccgacatccacttcgtggaggaggcccccagaagaagcatcgaggccttcagacagagactgaaccagatcagccacgacatcagacagagaaacaagtgcctgcccatcccctactactacctggaccccgtgctgatcgagaacagcatcagcatctag

SEQ ID NO: 73174 - DNA, 1989 bp, synthetic construct
  misc_feature 1..1989: note = Description of Artificial Sequence: Synthetic coding sequence
  source 1..1989: mol_type = other DNA
atgggcctgtacagaatcagagtgagcaccggcgccagcctgtacgccggcagcaacaaccaggtgcagctgtggctggtgggccagcacggcgaggccgccctgggcaagagactgtggcccgccagaggcaaggagaccgagctgaaggtggaggtgcccgagtacctgggccccctgctgttcgtgaagctgagaaagagacacctgctgaaggacgacgcctggttctgcaactggatcagcgtgcagggccccggcgccggcgacgaggtgagattcccctgctacagatgggtggagggcaacggcgtgctgagcctgcccgagggcaccggcagaaccgtgggcgaggacccccagggcctgttccagaagcacagagaggaggagctggaggagagaagaaagctgtacagatggggcaactggaaggacggcctgatcctgaacatggccggcgccaagctgtacgacctgcccgtggacgagagattcctggaggacaagagagtggacttcgaggtgagcctggccaagggcctggccgacctggccatcaaggacagcctgaacgtgctgacctgctggaaggacctggacgacttcaacagaatcttctggtgcggccagagcaagctggccgagagagtgagagacagctggaaggaggacgccctgttcggctaccagttcctgaacggcgccaaccccgtggtgctgagaagaagcgcccacctgcccgccagactggtgttcccccccggcatggaggagctgcaggcccagctggagaaggagctggagggcggcaccctgttcgaggccgacttcagcctgctggacggcatcaaggccaacgtgatcctgtgcagccagcagcacctggccgcccccctggtgatgctgaagctgcagcccgacggcaagctgctgcccatggtgatccagctgcagctgcccagaaccggcagcccccccccccccctgttcctgcccaccgacccccccatggcctggctgctggccaagtgctgggtgagaagcagcgacttccagctgcacgagctgcagagccacctgctgagaggccacctgatggccgaggtgatcgtggtggccaccatgagatgcctgcccagcatccaccccatcttcaagctgatcatcccccacctgagatacaccctggagatcaacgtgagagccagaaccggcctggtgagcgacatgggcatcttcgaccagatcatgagcaccggcggcggcggccacgtgcagctgctgaagcaggccggcgccttcctgacctacagcagcttctgcccccccgacgacctggccgacagaggcctgctgggcgtgaagagcagcttctacgcccaggacgccctgagactgtgggagatcatctacagatacgtggagggcatcgtgagcctgcactacaagaccgacgtggccgtgaaggacgaccccgagctgcagacctggtgcagagagatcaccgagatcggcctgcagggcgcccaggacagaggcttccccgtgagcctgcaggccagagaccaggtgtgccacttcgtgaccatgtgcatcttcacctgcaccggccagcacgccagcgtgcacctgggccagctggactggtacagctgggtgcccaacgccccctgcaccatgagactgcccccccccaccaccaaggacgccaccctggagaccgtgatggccaccctgcccaacttccaccaggccagcctgcagatgagcatcacctggcagctgggcagaagacagcccgtgatggtggccgtgggccagcacgaggaggagtacttcagcggccccgagcccaaggccgtgctgaagaagttcagagaggagctggccgccctggacaaggagatcgagatcagaaacgccaagctggacatgccctacgagtacctgagacccagcgtggtggagaacagcgtggccatctag

SEQ ID NO: 73175 - DNA, 2055 bp, synthetic construct
  misc_feature 1..2055: note = Description of Artificial Sequence: Synthetic coding sequence
  source 1..2055: mol_type = other DNA
atgctgaagagaaacgagagccagtggctggcccagagaagaagaagcgagaccagcctgagcaagatgggcctgtacagaatcagagtgagcaccggcgccagcctgtacgccggcagcaacaaccaggtgcagctgtggctggtgggccagcacggcgaggccgccctgggcaagagactgtggcccgccagaggcaaggagaccgagctgaaggtggaggtgcccgagtacctgggccccctgctgttcgtgaagctgagaaagagacacctgctgaaggacgacgcctggttctgcaactggatcagcgtgcagggccccggcgccggcgacgaggtgagattcccctgctacagatgggtggagggcaacggcgtgctgagcctgcccgagggcaccggcagaaccgtgggcgaggacccccagggcctgttccagaagcacagagaggaggagctggaggagagaagaaagctgtacagatggggcaactggaaggacggcctgatcctgaacatggccggcgccaagctgtacgacctgcccgtggacgagagattcctggaggacaagagagtggacttcgaggtgagcctggccaagggcctggccgacctggccatcaaggacagcctgaacgtgctgacctgctggaaggacctggacgacttcaacagaatcttctggtgcggccagagcaagctggccgagagagtgagagacagctggaaggaggacgccctgttcggctaccagttcctgaacggcgccaaccccgtggtgctgagaagaagcgcccacctgcccgccagactggtgttcccccccggcatggaggagctgcaggcccagctggagaaggagctggagggcggcaccctgttcgaggccgacttcagcctgctggacggcatcaaggccaacgtgatcctgtgcagccagcagcacctggccgcccccctggtgatgctgaagctgcagcccgacggcaagctgctgcccatggtgatccagctgcagctgcccagaaccggcagcccccccccccccctgttcctgcccaccgacccccccatggcctggctgctggccaagtgctgggtgagaagcagcgacttccagctgcacgagctgcagagccacctgctgagaggccacctgatggccgaggtgatcgtggtggccaccatgagatgcctgcccagcatccaccccatcttcaagctgatcatcccccacctgagatacaccctggagatcaacgtgagagccagaaccggcctggtgagcgacatgggcatcttcgaccagatcatgagcaccggcggcggcggccacgtgcagctgctgaagcaggccggcgccttcctgacctacagcagcttctgcccccccgacgacctggccgacagaggcctgctgggcgtgaagagcagcttctacgcccaggacgccctgagactgtgggagatcatctacagatacgtggagggcatcgtgagcctgcactacaagaccgacgtggccgtgaaggacgaccccgagctgcagacctggtgcagagagatcaccgagatcggcctgcagggcgcccaggacagaggcttccccgtgagcctgcaggccagagaccaggtgtgccacttcgtgaccatgtgcatcttcacctgcaccggccagcacgccagcgtgcacctgggccagctggactggtacagctgggtgcccaacgccccctgcaccatgagactgcccccccccaccaccaaggacgccaccctggagaccgtgatggccaccctgcccaacttccaccaggccagcctgcagatgagcatcacctggcagctgggcagaagacagcccgtgatggtggccgtgggccagcacgaggaggagtacttcagcggccccgagcccaaggccgtgctgaagaagttcagagaggagctggccgccctggacaaggagatcgagatcagaaacgccaagctggacatgccctacgagtacctgagacccagcgtggtggagaacagcgtggccatctag

SEQ ID NO: 73176 - DNA, 1989 bp, synthetic construct; identical to SEQ ID NO: 73174
  misc_feature 1..1989: note = Description of Artificial Sequence: Synthetic coding sequence
  source 1..1989: mol_type = other DNA

SEQ ID NO: 73177 - DNA, 486 bp, synthetic construct
  misc_feature 1..486: note = Description of Artificial Sequence: Synthetic coding sequence
  source 1..486: mol_type = other DNA
atggaccaggagaccgtgggcaacgtggtgctgctggccatcgtgaccctgatcagcgtggtgcagaacggcttcttcgcccacaaggtggagcacgagagcagaacccagaacggcagaagcttccagagaaccggcaccctggccttcgagagagtgtacaccgccaaccagaactgcgtggacgcctaccccaccttcctggccgtgctgtggagcgccggcctgctgtgcagccaggtgcccgccgccttcgccggcctgatgtacctgttcgtgagacagaagtacttcgtgggctacctgggcgagagaacccagagcacccccggctacatcttcggcaagagaatcatcctgttcctgttcctgatgagcgtggccggcatcttcaactactacctgatcttcttcttcggcagcgacttcgagaactacatcaagaccatcagcaccaccatcagccccctgctgctgatcccctag

SEQ ID NO: 73178 - DNA, 2532 bp, synthetic construct
  misc_feature 1..2532: note = Description of Artificial Sequence: Synthetic coding sequence
  source 1..2532: mol_type = other DNA
atgcccagaggcgccttcagaccctgcctgcccgccctgtacttcgccttcctgacctgccccacccccgagcagagaatgagcggcacccaggcccccgacatccacctgggcgagcccgccagaggcaccggctgcgtgagaggcaagcagaccagcatcagagtgcaggactgcggcagaagagaggaggccagagccgccagcagagagctgagaagagagaaggcccaggagcaccccagagagagctgggcccacccccagccctaccccgccccccagcccctggccctgagacccgagacccagccctgccccgcctgcagaagcagcccccccggcagactgctgctgagacccgccctgcccggccaccccttcctgctgcccatcatggccgtgtacagactgtgcgtgaccaccggcccctacctgagagccggcaccctggacaacatcagcgtgaccctggtgggcacctgcggcgagagccccaagcagagactggacagaatgggcagagacttcgcccccggcagcgtgcagaagtacaaggtgagatgcaccgccgagctgggcgagctgctgctgctgagagtgcacaaggagagatacgccttcttcagaaaggacagctggtactgcagcagaatctgcgtgaccgagcccgacggcagcgtgagccacttcccctgctaccagtggatcgagggctactgcaccgtggagctgagacccggcaccgccagaaccatctgccaggacagcctgcccctgctgctggaccacagaaccagagagctgagagccagacaggagtgctacagatggaagatctacgcccccggcttcccctgcatggtggacgtgaacagcttccaggagatggagagcgacaagaagttcgccctgaccaagaccaccacctgcgtggaccagggcgacagcagcggcaacagatacctgcccggcttccccatgaagatcgacatccccagcctgatgtacatggagcccaacgtgagatacagcgccaccaagaccatcagcctgctgttcaacgccatccccgccagcctgggcatgaagctgagaggcctgctggacagaaagggcagctggaagaagctggacgacatgcagaacatcttctggtgccacaagaccttcaccaccaagtacgtgaccgagcactggtgcgaggaccacttcttcggctaccagtacctgaacggcgtgaaccccgtgatgctgcactgcatcagcagcctgcccagcaagctgcccgtgaccaacgacatggtggcccccctgctgggccaggacacctgcctgcagaccgagctggagagaggcaacatcttcctggccgactactggatcctggccgaggcccccacccactgcctgaacggcagacagcagtacgtggccgcccccctgtgcctgctgtggctgagcccccagggcgccctggtgcccctggccatccagctgagccagacccccggccccgacagccccatcttcctgcccaccgacagcgagtgggactggctgctggccaagacctgggtgagaaacagcgagttcctggtgcacgagaacaacacccacttcctgtgcacccacctgctgtgcgaggccttcgccatggccaccctgagacagctgcccctgtgccaccccatctacaagctgctgctgccccacaccagatacaccctgcaggtgaacaccatcgccagagccaccctgctgaaccccgagggcctggtggaccaggtgaccagcatcggcagacagggcctgatctacctgatgagcaccggcctggcccacttcacctacaccaacttctgcctgcccgacagcctgagagccagaggcgtgctggccatccccaactaccactacagagacgacggcctgaagatctgggccgccatcgagagcttcgtgagcgagatcgtgggctactactaccccagcgacgccagcgtgcagcaggacagcgagctgcaggcctggaccggcgagatcttcgcccaggccttcctgggcagagagagcagcggcttccccagcagactgtgcacccccggcgagatggtgaagttcctgaccgccatcatcttcaactgcagcgcccagcacgccgccgtgaacagcggccagcacgacttcggcgcctggatgcccaacgcccccagcagcatgagacagccccccccccagaccaagggcaccaccaccctgaagacctacctggacaccctgcccgaggtgaacatcagctgcaacaacctgctgctgttctggctggtgagccaggagcccaaggaccagagacccctgggcacctaccccgacgagcacttcaccgaggaggcccccagaagaagcatcgccgccttccagagcagactggcccagatcagcagagacatccaggagagaaaccagggcctggccctgccctacacctacctggacccccccctgatcgagaacagcgtgagcatctag

SEQ ID NO: 73179 - DNA, 2604 bp, synthetic construct
  misc_feature 1..2604: note = Description of Artificial Sequence: Synthetic coding sequence
  source 1..2604: mol_type = other DNA
atgggcagaaacagaagctggggcaccctgggcagcggcagaaccagcacccccggccaccagagcggccccctgaccagaagaagagccgtgagccagctgtacagaagatacctgctgttcagcatcagcgccagcgaccccagcctgagaagcggcacccaggcccccgacatccacctgggcgagcccgccagaggcaccggctgcgtgagaggcaagcagaccagcatcagagtgcaggactgcggcagaagagaggaggccagagccgccagcagagagctgagaagagagaaggcccaggagcaccccagagagagctgggcccacccccagccctaccccgccccccagcccctggccctgagacccgagacccagccctgccccgcctgcagaagcagcccccccggcagactgctgctgagacccgccctgcccggccaccccttcctgctgcccatcatggccgtgtacagactgtgcgtgaccaccggcccctacctgagagccggcaccctggacaacatcagcgtgaccctggtgggcacctgcggcgagagccccaagcagagactggacagaatgggcagagacttcgcccccggcagcgtgcagaagtacaaggtgagatgcaccgccgagctgggcgagctgctgctgctgagagtgcacaaggagagatacgccttcttcagaaaggacagctggtactgcagcagaatctgcgtgaccgagcccgacggcagcgtgagccacttcccctgctaccagtggatcgagggctactgcaccgtggagctgagacccggcaccgccagaaccatctgccaggacagcctgcccctgctgctggaccacagaaccagagagctgagagccagacaggagtgctacagatggaagatctacgcccccggcttcccctgcatggtggacgtgaacagcttccaggagatggagagcgacaagaagttcgccctgaccaagaccaccacctgcgtggaccagggcgacagcagcggcaacagatacctgcccggcttccccatgaagatcgacatccccagcctgatgtacatggagcccaacgtgagatacagcgccaccaagaccatcagcctgctgttcaacgccatccccgccagcctgggcatgaagctgagaggcctgctggacagaaagggcagctggaagaagctggacgacatgcagaacatcttctggtgccacaagaccttcaccaccaagtacgtgaccgagcactggtgcgaggaccacttcttcggctaccagtacctgaacggcgtgaaccccgtgatgctgcactgcatcagcagcctgcccagcaagctgcccgtgaccaacgacatggtggcccccctgctgggccaggacacctgcctgcagaccgagctggagagaggcaacatcttcctggccgactactggatcctggccgaggcccccacccactgcctgaacggcagacagcagtacgtggccgcccccctgtgcctgctgtggctgagcccccagggcgccctggtgcccctggccatccagctgagccagacccccggccccgacagccccatcttcctgcccaccgacagcgagtgggactggctgctggccaagacctgggtgagaaacagcgagttcctggtgcacgagaacaacacccacttcctgtgcacccacctgctgtgcgaggccttcgccatggccaccctgagacagctgcccctgtgccaccccatctacaagctgctgctgccccacaccagatacaccctgcaggtgaacaccatcgccagagccaccctgctgaaccccgagggcctggtggaccaggtgaccagcatcggcagacagggcctgatctacctgatgagcaccggcctggcccacttcacctacaccaacttctgcctgcccgacagcctgagagccagaggcgtgctggccatccccaactaccactacagagacgacggcctgaagatctgggccgccatcgagagcttcgtgagcgagatcgtgggctactactaccccagcgacgccagcgtgcagcaggacagcgagctgcaggcctggaccggcgagatcttcgcccaggccttcctgggcagagagagcagcggcttccccagcagactgtgcacccccggcgagatggtgaagttcctgaccgccatcatcttcaactgcagcgcccagcacgccgccgtgaacagcggccagcacgacttcggcgcctggatgcccaacgcccccagcagcatgagacagccccccccccagaccaagggcaccaccaccctgaagacctacctggacaccctgcccgaggtgaacatcagctgcaacaacctgctgctgttctggctggtgagccaggagcccaaggaccagagacccctgggcacctaccccgacgagcacttcaccgaggaggcccccagaagaagcatcgccgccttccagagcagactggcccagatcagcagagacatccaggagagaaaccagggcctggccctgccctacacctacctggacccccccctgatcgagaacagcgtgagcatctag

SEQ ID NO: 73180 - DNA, 2136 bp, synthetic construct
  misc_feature 1..2136: note = Description of Artificial Sequence: Synthetic coding sequence
  source 1..2136: mol_type = other DNA
atggccgtgtacagactgtgcgtgaccaccggcccctacctgagagccggcaccctggacaacatcagcgtgaccctggtgggcacctgcggcgagagccccaagcagagactggacagaatgggcagagacttcgcccccggcagcgtgcagaagtacaaggtgagatgcaccgccgagctgggcgagctgctgctgctgagagtgcacaaggagagatacgccttcttcagaaaggacagctggtactgcagcagaatctgcgtgaccgagcccgacggcagcgtgagccacttcccctgctaccagtggatcgagggctactgcaccgtggagctgagacccggcaccgccagaaccatctgccaggacagcctgcccctgctgctggaccacagaaccagagagctgagagccagacaggagtgctacagatggaagatctacgcccccggcttcccctgcatggtggacgtgaacagcttccaggagatggagagcgacaagaagttcgccctgaccaagaccaccacctgcgtggaccagggcgacagcagcggcaacagatacctgcccggcttccccatgaagatcgacatccccagcctgatgtacatggagcccaacgtgagatacagcgccaccaagaccatcagcctgctgttcaacgccatccccgccagcctgggcatgaagctgagaggcctgctggacagaaagggcagctggaagaagctggacgacatgcagaacatcttctggtgccacaagaccttcaccaccaagtacgtgaccgagcactggtgcgaggaccacttcttcggctaccagtacctgaacggcgtgaaccccgtgatgctgcactgcatcagcagcctgcccagcaagctgcccgtgaccaacgacatggtggcccccctgctgggccaggacacctgcctgcagaccgagctggagagaggcaacatcttcctggccgactactggatcctggccgaggcccccacccactgcctgaacggcagacagcagtacgtggccgcccccctgtgcctgctgtggctgagcccccagggcgccctggtgcccctggccatccagctgagccagacccccggccccgacagccccatcttcctgcccaccgacagcgagtgggactggctgctggccaagacctgggtgagaaacagcgagttcctggtgcacgagaacaacacccacttcctgtgcacccacctgctgtgcgaggccttcgccatggccaccctgagacagctgcccctgtgccaccccatctacaagctgctgctgccccacaccagatacaccctgcaggtgaacaccatcgccagagccaccctgctgaaccccgagggcctggtggaccaggtgaccagcatcggcagacagggcctgatctacctgatgagcaccggcctggcccacttcacctacaccaacttctgcctgcccgacagcctgagagccagaggcgtgctggccatccccaactaccactacagagacgacggcctgaagatctgggccgccatcgagagcttcgtgagcgagatcgtgggctactactaccccagcgacgccagcgtgcagcaggacagcgagctgcaggcctggaccggcgagatcttcgcccaggccttcctgggcagagagagcagcggcttccccagcagactgtgcacccccggcgagatggtgaagttcctgaccgccatcatcttcaactgcagcgcccagcacgccgccgtgaacagcggccagcacgacttcggcgcctggatgcccaacgcccccagcagcatgagacagccccccccccagaccaagggcaccaccaccctgaagacctacctggacaccctgcccgaggtgaacatcagctgcaacaacctgctgctgttctggctggtgagccaggagcccaaggaccagagacccctgggcacctaccccgacgagcacttcaccgaggaggcccccagaagaagcatcgccgccttccagagcagactggcccagatcagcagagacatccaggagagaaaccagggcctggccctgccctacacctacctggacccccccctgatcgagaacagcgtgagcatctag

SEQ ID NO: 73181 - DNA, 759 bp, synthetic construct
  misc_feature 1..759: note = Description of Artificial Sequence: Synthetic coding sequence
  source 1..759: mol_type = other DNA
atggagccccagagcatgaagggccagaagagacccttcggcggcccctggagactgaaggtgctgggcggccccccctggctgagaagaaccctgcccaagctgggcagacccaaggaggcccccgtggccagaatgagcacccagagcacccaccccctgaagcccgaggcccccagactgccccccggcatccccgagagccccagctgccagagaagacacaccctgcccgccagcgagttcagatgcctgacccccgaggacgccgtgagcgccttcgagatcgagagagaggccttcatcagcgtgctgggcgtgtgccccctgtacctggacgagatcagacacttcctgaccctgtgccccgagctgagcctgggctggttcgaggagggctgcctggtggccttcatcatcggcagcctgtgggacaaggagagactgatgcaggagagcctgaccctgcacagaagcggcggccacatcgcccacctgcacgtgctggccgtgcacagagccttcagacagcagggcagaggccccatcctgctgtggagatacctgcaccacctgggcagccagcccgccgtgagaagagccgccctgatgtgcgaggacgccctggtgcccttctacgagagattcagcttccacgccgtgggcccctgcgccatcaccgtgggcagcctgaccttcatggagctgcactgcagcctgagaggccaccccttcctgagaagaaacagcggctgctag

SEQ ID NO: 73182 - DNA, 624 bp, synthetic construct
  misc_feature 1..624: note = Description of Artificial Sequence: Synthetic coding sequence
  source 1..624: mol_type = other DNA
atgagcacccagagcacccaccccctgaagcccgaggcccccagactgccccccggcatccccgagagccccagctgccagagaagacacaccctgcccgccagcgagttcagatgcctgacccccgaggacgccgtgagcgccttcgagatcgagagagaggccttcatcagcgtgctgggcgtgtgccccctgtacctggacgagatcagacacttcctgaccctgtgccccgagctgagcctgggctggttcgaggagggctgcctggtggccttcatcatcggcagcctgtgggacaaggagagactgatgcaggagagcctgaccctgcacagaagcggcggccacatcgcccacctgcacgtgctggccgtgcacagagccttcagacagcagggcagaggccccatcctgctgtggagatacctgcaccacctgggcagccagcccgccgtgagaagagccgccctgatgtgcgaggacgccctggtgcccttctacgagagattcagcttccacgccgtgggcccctgcgccatcaccgtgggcagcctgaccttcatggagctgcactgcagcctgagaggccaccccttcctgagaagaaacagcggctgctag

SEQ ID NO: 73183 - DNA, 1536 bp, synthetic construct
  misc_feature 1..1536: note = Description of Artificial Sequence: Synthetic coding sequence
  source 1..1536: mol_type = other DNA
atggtgctgctggccgccgccgtgtgcaccaaggccggcaaggccatcgtgagcagacagttcgtggagatgaccagaaccagaatcgagggcctgctggccgccttccccaagctgatgaacaccggcaagcagcacaccttcgtggagaccgagagcgtgagatacgtgtaccagcccatggagaagctgtacatggtgctgatcaccaccaagaacagcaacatcctggaggacctggagaccctgagactgttcagcagagtgatccccgagtactgcagagccctggaggagaacgagatcagcgagcactgcttcgacctgatcttcgccttcgacgagatcgtggccctgggctacagagagaacgtgaacctggcccagatcagaaccttcaccgagatggacagccacgaggagaaggtgttcagagccgtgagagagacccaggagagagaggccaaggccgagatgagaagaaaggccaaggagctgcagcaggccagaagagacgccgagagacagggcaagaaggcccccggcttcggcggcttcggcagcagcgccgtgagcggcggcagcaccgccgccatgatcaccgagaccatcatcgagaccgacaagcccaaggtggcccccgcccccgccagacccagcggccccagcaaggccctgaagctgggcgccaagggcaaggaggtggacaacttcgtggacaagctgaagagcgagggcgagaccatcatgagcagcagcatgggcaagagaaccagcgaggccaccaagatgcacgccccccccatcaacatggagagcgtgcacatgaagatcgaggagaagatcaccctgacctgcggcagagacggcggcctgcagaacatggagctgcacggcatgatcatgctgagaatcagcgacgacaagtacggcagaatcagactgcacgtggagaacgaggacaagaagggcgtgcagctgcagacccaccccaacgtggacaagaagctgttcaccgccgagagcctgatcggcctgaagaaccccgagaagagcttccccgtgaacagcgacgtgggcgtgctgaagtggagactgcagaccaccgaggagagcttcatccccctgaccatcaactgctggcccagcgagagcggcaacggctgcgacgtgaacatcgagtacgagctgcaggaggacaacctggagctgaacgacgtggtgatcaccatccccctgcccagcggcgtgggcgcccccgtgatcggcgagatcgacggcgagtacagacacgacagcagaagaaacaccctggagtggtgcctgcccgtgatcgacgccaagaacaagagcggcagcctggagttcagcatcgccggccagcccaacgacttcttccccgtgcaggtgagcttcgtgagcaagaagaactactgcaacatccaggtgaccaaggtgacccaggtggacggcaacagccccgtgagattcagcaccgagaccaccttcctggtggacaagtacgagatcctgtag

SEQ ID NO: 73184 - DNA, 1659 bp, synthetic construct
  misc_feature 1..1659: note = Description of Artificial Sequence: Synthetic coding sequence
  source 1..1659: mol_type = other DNA
atggccgagtgcaacctggtggccatcctgatcagcagcatcgacaaccccctggacaagaacctggacaacggcggcaacagctgcctggacttcagacccctgaacagcttcagccagccccaggtgctgctggccgccgccgtgtgcaccaaggccggcaaggccatcgtgagcagacagttcgtggagatgaccagaaccagaatcgagggcctgctggccgccttccccaagctgatgaacaccggcaagcagcacaccttcgtggagaccgagagcgtgagatacgtgtaccagcccatggagaagctgtacatggtgctgatcaccaccaagaacagcaacatcctggaggacctggagaccctgagactgttcagcagagtgatccccgagtactgcagagccctggaggagaacgagatcagcgagcactgcttcgacctgatcttcgccttcgacgagatcgtggccctgggctacagagagaacgtgaacctggcccagatcagaaccttcaccgagatggacagccacgaggagaaggtgttcagagccgtgagagagacccaggagagagaggccaaggccgagatgagaagaaaggccaaggagctgcagcaggccagaagagacgccgagagacagggcaagaaggcccccggcttcggcggcttcggcagcagcgccgtgagcggcggcagcaccgccgccatgatcaccgagaccatcatcgagaccgacaagcccaaggtggcccccgcccccgccagacccagcggccccagcaaggccctgaagctgggcgccaagggcaaggaggtggacaacttcgtggacaagctgaagagcgagggcgagaccatcatgagcagcagcatgggcaagagaaccagcgaggccaccaagatgcacgccccccccatcaacatggagagcgtgcacatgaagatcgaggagaagatcaccctgacctgcggcagagacggcggcctgcagaacatggagctgcacggcatgatcatgctgagaatcagcgacgacaagtacggcagaatcagactgcacgtggagaacgaggacaagaagggcgtgcagctgcagacccaccccaacgtggacaagaagctgttcaccgccgagagcctgatcggcctgaagaaccccgagaagagcttccccgtgaacagcgacgtgggcgtgctgaagtggagactgcagaccaccgaggagagcttcatccccctgaccatcaactgctggcccagcgagagcggcaacggctgcgacgtgaacatcgagtacgagctgcaggaggacaacctggagctgaacgacgtggtgatcaccatccccctgcccagcggcgtgggcgcccccgtgatcggcgagatcgacggcgagtacagacacgacagcagaagaaacaccctggagtggtgcctgcccgtgatcgacgccaagaacaagagcggcagcctggagttcagcatcgccggccagcccaacgacttcttccccgtgcaggtgagcttcgtgagcaagaagaactactgcaacatccaggtgaccaaggtgacccaggtggacggcaacagccccgtgagattcagcaccgagaccaccttcctggtggacaagtacgagatcctgtag

SEQ ID NO: 73185 - DNA, 1272 bp, synthetic construct
  misc_feature 1..1272: note = Description of Artificial Sequence: Synthetic coding sequence
  source 1..1272: mol_type = other DNA
atgatccccgagtactgcagagccctggaggagaacgagatcagcgagcactgcttcgacctgatcttcgccttcgacgagatcgtggccctgggctacagagagaacgtgaacctggcccagatcagaaccttcaccgagatggacagccacgaggagaaggtgttcagagccgtgagagagacccaggagagagaggccaaggccgagatgagaagaaaggccaaggagctgcagcaggccagaagagacgccgagagacagggcaagaaggcccccggcttcggcggcttcggcagcagcgccgtgagcggcggcagcaccgccgccatgatcaccgagaccatcatcgagaccgacaagcccaaggtggcccccgcccccgccagacccagcggccccagcaaggccctgaagctgggcgccaagggcaaggaggtggacaacttcgtggacaagctgaagagcgagggcgagaccatcatgagcagcagcatgggcaagagaaccagcgaggccaccaagatgcacgccccccccatcaacatggagagcgtgcacatgaagatcgaggagaagatcaccctgacctgcggcagagacggcggcctgcagaacatggagctgcacggcatgatcatgctgagaatcagcgacgacaagtacggcagaatcagactgcacgtggagaacgaggacaagaagggcgtgcagctgcagacccaccccaacgtggacaagaagctgttcaccgccgagagcctgatcggcctgaagaaccccgagaagagcttccccgtgaacagcgacgtgggcgtgctgaagtggagactgcagaccaccgaggagagcttcatccccctgaccatcaactgctggcccagcgagagcggcaacggctgcgacgtgaacatcgagtacgagctgcaggaggacaacctggagctgaacgacgtggtgatcaccatccccctgcccagcggcgtgggcgcccccgtgatcggcgagatcgacggcgagtacagacacgacagcagaagaaacaccctggagtggtgcctgcccgtgatcgacgccaagaacaagagcggcagcctggagttcagcatcgccggccagcccaacgacttcttccccgtgcaggtgagcttcgtgagcaagaagaactactgcaacatccaggtgaccaaggtgacccaggtggacggcaacagccccgtgagattcagcaccgagaccaccttcctggtggacaagtacgagatcctgtag

SEQ ID NO: 73186 - DNA, 570 bp, synthetic construct
  misc_feature 1..570: note = Description of Artificial Sequence: Synthetic coding sequence
  source 1..570: mol_type = other DNA
atggtgctgctggccgccgccgtgtgcaccaaggccggcaaggccatcgtgagcagacagttcgtggagatgaccagaaccagaatcgagggcctgctggccgccttccccaagctgatgaacaccggcaagcagcacaccttcgtggagaccgagagcgtgagatacgtgtaccagcccatggagaagctgtacatggtgctgatcaccaccaagaacagcaacatcctggaggacctggagaccctgagactgttcagcagagtgatccccgagtactgcagagccctggaggagaacgagatcagcgagcactgcttcgacctgatcttcgccttcgacgagatcgtggccctgggctacagagagaacgtgaacctggcccagatcagaaccttcaccgagatggacagccacgaggagaaggtgttcagagccgtgagagagacccaggagagagaggccaaggccgagatgagaagaaaggccaaggagctgcagcaggcccagagcgtgggcatcaccggcatgagccaccacgcccagctgctgctgtacttcaacccctag

SEQ ID NO: 73187 - DNA, 2223 bp, synthetic construct
  misc_feature 1..2223: note = Description of Artificial Sequence: Synthetic coding sequence
  source 1..2223: mol_type = other DNA
atgaccgtgaagctggacttcgaggagtgcctgaaggacagccccagattcagagccagcatcgagctggtggaggccgaggtgagcgagctggagaccagactggagaagctgctgaagctgggcaccggcctgctggagagcggcagacactacctggccgccagcagagccttcgtggtgggcatctgcgacctggccagactgggcccccccgagcccatgatggccgagtgcctggagaagttcaccgtgagcctgaaccacaagctggacagccacgccgagctgctggacgccacccagcacaccctgcagcagcagatccagaccctggtgaaggagggcctgagaggcttcagagaggccagaagagacttctggagaggcgccgagagcctggaggccgccctgacccacaacgccgaggtgcccagaagaagagcccaggaggccgaggaggccggcgccgccctgagaaccgccagagccggctacagaggcagagccctggactacgccctgcagatcaacgtgatcgaggacaagagaaagttcgacatcatggagttcgtgctgagactggtggaggcccaggccacccacttccagcagggccacgaggagctgagcagactgagccagtacagaaaggagctgggcgcccagctgcaccagctggtgctgaacagcgccagagagaagagagacatggagcagagacacgtgctgctgaagcagaaggagctgggcggcgaggagcccgagcccagcctgagagagggccccggcggcctggtgatggagggccacctgttcaagagagccagcaacgccttcaagacctggagcagaagatggttcaccatccagagcaaccagctggtgtaccagaagaagtacaaggaccccgtgaccgtggtggtggacgacctgagactgtgcaccgtgaagctgtgccccgacagcgagagaagattctgcttcgaggtggtgagcaccagcaagagctgcctgctgcaggccgacagcgagagactgctgcagctgtgggtgagcgccgtgcagagcagcatcgccagcgccttcagccaggccagactggacgacagccccagaggccccggccagggcagcggccacctggccatcggcagcgccgccaccctgggcagcggcggcatggccagaggcagagagcccggcggcgtgggccacgtggtggcccaggtgcagagcgtggacggcaacgcccagtgctgcgactgcagagagcccgcccccgagtgggccagcatcaacctgggcgtgaccctgtgcatccagtgcagcggcatccacagaagcctgggcgtgcacttcagcaaggtgagaagcctgaccctggacagctgggagcccgagctggtgaagctgatgtgcgagctgggcaacgtgatcatcaaccagatctacgaggccagagtggaggccatggccgtgaagaagcccggccccagctgcagcagacaggagaaggaggcctggatccacgccaagtacgtggagaagaagttcctgaccaagctgcccgagatcagaggcagaagaggcggcagaggcagacccagaggccagccccccgtgccccccaagcccagcatcagacccagacccggcagcctgagaagcaagcccgagccccccagcgaggacctgggcagcctgcaccccggcgccctgctgttcagagccagcggccacccccccagcctgcccaccatggccgacgccctggcccacggcgccgacgtgaactgggtgaacggcggccaggacaacgccacccccctgatccaggccaccgccgccaacagcctgctggcctgcgagttcctgctgcagaacggcgccaacgtgaaccaggccgacagcgccggcagaggccccctgcaccacgccaccatcctgggccacaccggcctggcctgcctgttcctgaagagaggcgccgacctgggcgccagagacagcgagggcagagaccccctgaccatcgccatggagaccgccaacgccgacatcgtgaccctgctgagactggccaagatgagagaggccgaggccgcccagggccaggccggcgacgagacctacctggacatcttcagagacttcagcctgatggccagcgacgaccccgagaagctgagcagaagaagccacgacctgcacaccctgtag

SEQ ID NO: 73188 - DNA, 2337 bp, synthetic construct
  misc_feature 1..2337: note = Description of Artificial Sequence: Synthetic coding sequence
  source 1..2337: mol_type = other DNA
atgaagatgaccgtggacttcgaggagtgcctgaaggacagccccagattcagagccgccctggaggaggtggagggcgacgtggccgagctggagctgaagctggacaagctggtgaagctgtgcatcgccatgatcgacaccggcaaggccttctgcgtggccaacaagcagttcatgaacggcatcagagacctggcccagtacagcagcaacgacgccgtggtggagaccagcctgaccaagttcagcgacagcctgcaggagatgatcaacttccacaccatcctgttcgaccagacccagagaagcatcaaggcccagctgcagaacttcgtgaaggaggacctgagaaagttcaaggacgccaagaagcagttcgagaaggtgagcgaggagaaggagaacgccctggtgaagaacgcccaggtgcagagaaacaagcagcacgaggtggaggaggccaccaacatcctgaccgccaccagaaagtgcttcagacacatcgccctggactacgtgctgcagatcaacgtgctgcagagcaagagaagaagcgagatcctgaagagcatgctgagcttcatgtacgcccacctggccttcttccaccagggctacgacctgttcagcgagctgggcccctacatgaaggacctgggcgcccagctggacagactggtggtggacgccgccaaggagaagagagagatggagcagaagcacagcaccatccagcagaaggacttcagcagcgacgacagcaagctggagtacaacgtggacgccgccaacggcatcgtgatggagggctacctgttcaagagagccagcaacgccttcaagacctggaacagaagatggttcagcatccagaacaaccagctggtgtaccagaagaagttcaaggacaaccccaccgtggtggtggaggacctgagactgtgcaccgtgaagcactgcgaggacatcgagagaagattctgcttcgaggtggtgagccccaccaagagctgcatgctgcaggccgacagcgagaagctgagacaggcctggatcaaggccgtgcagaccagcatcgccaccgcctacagagagaagggcgacgagagcgagaagctggacaagaagagcagccccagcaccggcagcctggacagcggcaacgagagcaaggagaagctgctgaagggcgagagcgccctgcagagagtgcagtgcatccccggcaacgccagctgctgcgactgcggcctggccgaccccagatgggccagcatcaacctgggcatcaccctgtgcatcgagtgcagcggcatccacagaagcctgggcgtgcacttcagcaaggtgagaagcctgaccctggacacctgggagcccgagctgctgaagctgatgtgcgagctgggcaacgacgtgatcaacagagtgtacgaggccaacgtggagaagatgggcatcaagaagccccagcccggccagagacaggagaaggaggcctacatcagagccaagtacgtggagagaaagttcgtggacaagtacagcatcagcctgagcccccccgagcagcagaagaagttcgtgagcaagagcagcgaggagaagagactgagcatcagcaagttcggccccggcgaccaggtgagagccagcgcccagagcagcgtgagaagcaacgacagcggcatccagcagagcagcgacgacggcagagagagcctgcccagcaccgtgagcgccaacagcctgtacgagcccgagggcgagagacaggacagcagcatgttcctggacagcaagcacctgaaccccggcctgcagctgtacagagccagctacgagaagaacctgcccaagatggccgaggccctggcccacggcgccgacgtgaactgggccaacagcgaggagaacaaggccacccccctgatccaggccgtgctgggcggcagcctggtgacctgcgagttcctgctgcagaacggcgccaacgtgaaccagagagacgtgcagggcagaggccccctgcaccacgccaccgtgctgggccacaccggccaggtgtgcctgttcctgaagagaggcgccaaccagcacgccaccgacgaggagggcaaggaccccctgagcatcgccgtggaggccgccaacgccgacatcgtgaccctgctgagactggccagaatgaacgaggagatgagagagagcgagggcctgtacggccagcccggcgacgagacctaccaggacatcttcagagacttcagccagatggccagcaacaaccccgagaagctgaacagattccagcaggacagccagaagttctag

SEQ ID NO: 73189 - DNA, 3618 bp, synthetic construct
  misc_feature 1..3618: note = Description of Artificial Sequence: Synthetic coding sequence
  source 1..3618: mol_type = other DNA
atgaccaagaaggaggagcccccccccagcagagtgcccagagccgtgagagtggccagcctgctgagcgagggcgaggagctgagcggcgacgaccagggcgacgaggaggaggacgaccacgcctacgagggcgtgcccaacggcggctggcacaccagcagcctgagcctgagcctgcccagcaccatcgccgccccccaccccatggacggcccccccggcggcagcacccccgtgacccccgtgatcaaggccggctggctggacaagaaccccccccagggcagctacatctaccagaagagatgggtgagactggacaccgaccacctgagatacttcgacagcaacaaggacgcctacagcaagagattcatcagcgtggcctgcatcagccacgtggccgccatcggcgaccagaagttcgaggtgatcaccaacaacagaaccttcgccttcagagccgagagcgacgtggagagaaaggagtggatgcaggccctgcagcaggccatggccgagcagagagccagagccagactgagcagcgcctacctgctgggcgtgcccggcagcgagcagcccgacagagccggcagcctggagctgagaggcttcaagaacaagctgtacgtggccgtggtgggcgacaaggtgcagctgtacaagaacctggaggagtaccacctgggcatcggcatcaccttcatcgacatgagcgtgggcaacgtgaaggaggtggacagaagaagcttcgacctgaccaccccctacagaatcttcagcttcagcgccgacagcgagctggagaaggagcagtggctggaggccatgcagggcgccatcgccgaggccctgagcaccagcgaggtggccgagagaatctgggccgccgcccccaacagattctgcgccgactgcggcgccccccagcccgactgggccagcatcaacctgtgcgtggtgatctgcaagagatgcgccggcgagcacagaggcctgggcgccggcgtgagcaaggtgagaagcctgaagatggacagaaaggtgtggaccgagaccctgatcgagctgttcctgcagctgggcaacggcgccggcaacagattctgggccgccaacgtgccccccagcgaggccctgcagcccagcagcagccccagcaccagaagatgccacctggaggccaagtacagagagggcaagtacagaagataccaccccctgttcggcaaccaggaggagctggacaaggccctgtgcgccgccgtgaccaccaccgacctggccgagacccaggccctgctgggctgcggcgccggcatcaactgcttcagcggcgaccccgaggcccccacccccctggccctggccgagcaggccggccagaccctgcagatggagttcctgagaaacaacagaaccaccgaggtgcccagactggacagcatgaagcccctggagaagcactacagcgtggtgctgcccaccgtgagccacagcggcttcctgtacaagaccgccagcgccggcaagctgctgcaggacagaagagccagagaggagttcagcagaagatggtgcgtgctgggcgacggcgtgctgagctacttcgagaacgagagagccgtgacccccaacggcgagatcagagccagcgagatcgtgtgcctggccgtgcccccccccgacacccacggcttcgagcacaccttcgaggtgtacaccgagggcgagagactgtacctgttcggcctggagagcgccgagcaggcccacgagtgggtgaagtgcatcgccaaggccttcgtgccccccctggccgaggacctgctggccagagacttcgagagactgggcagactgccctacaaggccggcctgagcctgcagagagcccaggagggctggttcagcctgagcggcagcgagctgagagccgtgttccccgagggcccctgcgaggagcccctgcagctgagaaagctgcaggagctgagcatccagggcgacagcgagaaccaggtgctggtgctggtggagagaagaagaaccctgtacatccagggcgagagaagactggacttcatgggctggctgggcgccatccagaaggccgccgccagcatgggcgacaccctgagcgagcagcagctgggcgacagcgacatccccgtgatcgtgtacagatgcgtggactacatcacccagtgcggcctgaccagcgagggcatctacagaaagtgcggccagaccagcaagacccagagactgctggagagcctgagacaggacgccagaagcgtgcacctgaaggagggcgagcagcacgtggacgacgtgagcagcgccctgaagagattcctgagagacctgcccgacggcctgttcaccagagcccagagactgacctggctggaggccagcgagatcgaggacgaggaggagaaggtgagcagatacagagagctgctggtgagactgccccccgtgaacagagccaccgtgaaggccctgatcagccacctgtactgcgtgcagtgcttcagcgacaccaaccagatgaacgtgcacaacctggccatcgtgttcggccccaccctgttccagaccgacggccaggactacaaggccggcagagtggtggaggacctgatcaaccactacgtggtggtgttcagcgtggacgaggaggagctgagaaagcagagagaggagatcaccgccatcgtgaagatgagagtggccggcaccgccagcggcacccagcacgccggcgacttcatctgcaccgtgtacctggaggagaagaaggccgagaccgagcagcacatcaaggtgcccgccagcatgaccgccgaggagctgaccctggagatcctggacagaagaaacgtgggcatcagagagaaggactactggacctgcttcgaggtgaacgagagagaggaggccgagagacccctgcacttcgccgagaaggtgctgcccatcctgcacggcctgggcaccgacagccacctggtggtgaagaagcaccaggccatggaggccatgctgctgtacctggccagcagagtgggcgacaccaagcacggcatgatgaagttcagagaggacagaagcctgctgggcctgggcctgcccagcggcggcttccacgacagatacttcatcctgaacagcagctgcctgagactgtacaaggaggtgagaagccagagaccctggagcggcgcccccgagaccagccacagacccgagaaggagtggcccatcaagagcctgaaggtgtacctgggcgtgaagaagaagctgagaccccccacctgctggggcttcaccgtggtgcacgagaccgagaagcacgagaagcagcagtggtacctgtgctgcgacacccagatggagctgagagagtggttcgccaccttcctgttcgtgcagcacgacggcctggtgtggcccagcgagcccagcagagtgagcagagccgtgcccgaggtgagactgggcagcgtgagcctgatccccctgagaggcagcgagaacgagatgagaagaagcgtggccgccttcaccgccgaccccctgagcctgctgagaaacgtgtag

SEQ ID NO: 73190 - DNA, 1884 bp, synthetic construct
  misc_feature 1..1884: note = Description of Artificial Sequence: Synthetic coding sequence
  source 1..1884: mol_type = other DNA
aagtgctgggccgtgtgggtgggcgccgtgtggaccgagggcgcctggcagcccagagtgggcgtgatctgcggcctgaagggcagaatgaccctgagcggcagcagaggccaggaggagcccccccccagcagagtgcccagagccgtgagagtggccagcctgctgagcgagggcgaggagctgagcggcgacgaccagggcgacgaggaggaggacgaccacgcctacgagggcgtgcccaacggcggctggcacaccagcagcctgagcctgagcctgcccagcaccatcgccgccccccaccccatggacggcccccccggcggcagcacccccgtgacccccgtgatcaaggccggctggctggacaagaaccccccccagggcagctacatctaccagaagagatgggtgagactggacaccgaccacctgagatacttcgacagcaacaaggacgcctacagcaagagattcatcagcgtggcctgcatcagccacgtggccgccatcggcgaccagaagttcgaggtgatcaccaacaacagaaccttcgccttcagagccgagagcgacgtggagagaaaggagtggatgcaggccctgcagcaggccatggccgagcagagagccagagccagactgagcagcgcctacctgctgggcgtgcccggcagcgagcagcccgacagagccggcagcctggagctgagaggcttcaagaacaagctgtacgtggccgtggtgggcgacaaggtgcagctgtacaagaacctggaggagtaccacctgggcatcggcatcaccttcatcgacatgagcgtgggcaacgtgaaggaggtggacagaagaagcttcgacctgaccaccccctacagaatcttcagcttcagcgccgacagcgagctggagaaggagcagtggctggaggccatgcagggcgccatcgccgaggccctgagcaccagcgaggtggccgagagaatctgggccgccgcccccaacagattctgcgccgactgcggcgccccccagcccgactgggccagcatcaacctgtgcgtggtgatctgcaagagatgcgccggcgagcacagaggcctgggcgccggcgtgagcaaggtgagaagcctgaagatggacagaaaggtgtggaccgagaccctgatcgagctgttcctgcagctgggcaacggcgccggcaacagattctgggccgccaacgtgccccccagcgaggccctgcagcccagcagcagccccagcaccagaagatgccacctggaggccaagtacagagagggcaagtacagaagataccaccccctgttcggcaaccaggaggagctggacaaggccctgtgcgccgccgtgaccaccaccgacctggccgagacccaggccctgctgggctgcggcgccggcatcaactgcttcagcggcgaccccgaggcccccacccccctggccctggccgagcaggccggccagaccctgcagatggagttcctgagaaacaacagaaccaccgaggtgcccagactggacagcatgaagcccctggagaagcactacagcgtggtgctgcccaccgtgagccacagcggcttcctgtacaagaccgccagcgccggcaagctgctgcaggacagaagagccagagaggagttcagcagaagatggtgcgtgctgggcgacggcgtgctgagctacttcgagaacgagagagccgtgacccccaacggcgagatcagagccagcgagatcgtgtgcctggccgtgcccccccccgacacccacggcttcgagcacaccttcgaggtgtacaccgagggcgagagactgtacctgtgggccggcgagtgcggcgccggcagctag

SEQ ID NO: 73191 - DNA, 4320 bp, synthetic construct
  misc_feature 1..4320: note = Description of Artificial Sequence: Synthetic coding sequence
  source 1..4320: mol_type = other DNA
atggccgaggccggcgacgccgccctgagcgtggccgagtggctgagagccctgcacctggagcagtacaccggcctgttcgagcagcacggcctggtgtgggccaccgagtgccagggcctgagcgacaccagactgatggacatgggcatgctgctgcccggccacagaagaagaatcctggccggcctgctgagagcccacaccagccccgcccccgcccccagacccacccccagacccgtgcccatgaagagacacatcttcagaagcccccccgtgcccgccaccccccccgagcccctgcccaccaccaccgaggacgagggcctgcccgccgccccccccatcccccccagaagaagctgcctgccccccacctgcttcaccacccccagcaccgccgcccccgaccccgtgctgccccccctgcccgccaagagacacctggccgagctgagcgtgccccccgtgccccccagaaccggcccccccagactgctggtgagcctgcccaccaaggaggaggagagcctgctgcccagcctgagcagccccccccagccccagagcgaggagcccctgagcaccctgccccagggccccccccagccccccagcccccccccctgcccccccgagatcccccccaagcccgtgagactgttccccgagttcgacgacagcgactacgacgaggtgcccgaggagggccccggcgcccccgccagagtgatgaccaagaaggaggagcccccccccagcagagtgcccagagccgtgagagtggccagcctgctgagcgagggcgaggagctgagcggcgacgaccagggcgacgaggaggaggacgaccacgcctacgagggcgtgcccaacggcggctggcacaccagcagcctgagcctgagcctgcccagcaccatcgccgccccccaccccatggacggcccccccggcggcagcacccccgtgacccccgtgatcaaggccggctggctggacaagaaccccccccagggcagctacatctaccagaagagatgggtgagactggacaccgaccacctgagatacttcgacagcaacaaggacgcctacagcaagagattcatcagcgtggcctgcatcagccacgtggccgccatcggcgaccagaagttcgaggtgatcaccaacaacagaaccttcgccttcagagccgagagcgacgtggagagaaaggagtggatgcaggccctgcagcaggccatggccgagcagagagccagagccagactgagcagcgcctacctgctgggcgtgcccggcagcgagcagcccgacagagccggcagcctggagctgagaggcttcaagaacaagctgtacgtggccgtggtgggcgacaaggtgcagctgtacaagaacctggaggagtaccacctgggcatcggcatcaccttcatcgacatgagcgtgggcaacgtgaaggaggtggacagaagaagcttcgacctgaccaccccctacagaatcttcagcttcagcgccgacagcgagctggagaaggagcagtggctggaggccatgcagggcgccatcgccgaggccctgagcaccagcgaggtggccgagagaatctgggccgccgcccccaacagattctgcgccgactgcggcgccccccagcccgactgggccagcatcaacctgtgcgtggtgatctgcaagagatgcgccggcgagcacagaggcctgggcgccggcgtgagcaaggtgagaagcctgaagatggacagaaaggtgtggaccgagaccctgatcgagctgttcctgcagctgggcaacggcgccggcaacagattctgggccgccaacgtgccccccagcgaggccctgcagcccagcagcagccccagcaccagaagatgccacctggaggccaagtacagagagggcaagtacagaagataccaccccctgttcggcaaccaggaggagctggacaaggccctgtgcgccgccgtgaccaccaccgacctggccgagacccaggccctgctgggctgcggcgccggcatcaactgcttcagcggcgaccccgaggcccccacccccctggccctggccgagcaggccggccagaccctgcagatggagttcctgagaaacaacagaaccaccgaggtgcccagactggacagcatgaagcccctggagaagcactacagcgtggtgctgcccaccgtgagccacagcggcttcctgtacaagaccgccagcgccggcaagctgctgcaggacagaagagccagagaggagttcagcagaagatggtgcgtgctgggcgacggcgtgctgagctacttcgagaacgagagagccgtgacccccaacggcgagatcagagccagcgagatcgtgtgcctggccgtgcccccccccgacacccacggcttcgagcacaccttcgaggtgtacaccgagggcgagagactgtacctgttcggcctggagagcgccgagcaggcccacgagtgggtgaagtgcatcgccaaggccttcgtgccccccctggccgaggacctgctggccagagacttcgagagactgggcagactgccctacaaggccggcctgagcctgcagagagcccaggagggctggttcagcctgagcggcagcgagctgagagccgtgttccccgagggcccctgcgaggagcccctgcagctgagaaagctgcaggagctgagcatccagggcgacagcgagaaccaggtgctggtgctggtggagagaagaagaaccctgtacatccagggcgagagaagactggacttcatgggctggctgggcgccatccagaaggccgccgccagcatgggcgacaccctgagcgagcagcagctgggcgacagcgacatccccgtgatcgtgtacagatgcgtggactacatcacccagtgcggcctgaccagcgagggcatctacagaaagtgcggccagaccagcaagacccagagactgctggagagcctgagacaggacgccagaagcgtgcacctgaaggagggcgagcagcacgtggacgacgtgagcagcgccctgaagagattcctgagagacctgcccgacggcctgttcaccagagcccagagactgacctggctggaggccagcgagatcgaggacgaggaggagaaggtgagcagatacagagagctgctggtgagactgccccccgtgaacagagccaccgtgaaggccctgatcagccacctgtactgcgtgcagtgcttcagcgacaccaaccagatgaacgtgcacaacctggccatcgtgttcggccccaccctgttccagaccgacggccaggactacaaggccggcagagtggtggaggacctgatcaaccactacgtggtggtgttcagcgtggacgaggaggagctgagaaagcagagagaggagatcaccgccatcgtgaagatgagagtggccggcaccgccagcggcacccagcacgccggcgacttcatctgcaccgtgtacctggaggagaagaaggccgagaccgagcagcacatcaaggtgcccgccagcatgaccgccgaggagctgaccctggagatcctggacagaagaaacgtgggcatcagagagaaggactactggacctgcttcgaggtgaacgagagagaggaggccgagagacccctgcacttcgccgagaaggtgctgcccatcctgcacggcctgggcaccgacagccacctggtggtgaagaagcaccaggccatggaggccatgctgctgtacctggccagcagagtgggcgacaccaagcacggcatgatgaagttcagagaggacagaagcctgctgggcctgggcctgcccagcggcggcttccacgacagatacttcatcctgaacagcagctgcctgagactgtacaaggaggtgagaagccacagacccgagaaggagtggcccatcaagagcctgaaggtgtacctgggcgtgaagaagaagctgagaccccccacctgctggggcttcaccgtggtgcacgagaccgagaagcacgagaagcagcagtggtacctgtgctgcgacacccagatggagctgagagagtggttcgccaccttcctgttcgtgcagcacgacggcctggtgtggcccagcgagcccagcagagtgagcagagccgtgcccgaggtgagactgggcagcgtgagcctgatccccctgagaggcagcgagaacgagatgagaagaagcgtggccgccttcaccgccgaccccctgagcctgctgagaaacgtgtag

SEQ ID NO: 73192 - DNA, 3633 bp, synthetic construct
  misc_feature 1..3633: note = Description of Artificial Sequence: Synthetic coding sequence
  source 1..3633: mol_type = other DNA
atgaccctgagcggcagcagaggccaggaggagcccccccccagcagagtgcccagagccgtgagagtggccagcctgctgagcgagggcgaggagctgagcggcgacgaccagggcgacgaggaggaggacgaccacgcctacgagggcgtgcccaacggcggctggcacaccagcagcctgagcctgagcctgcccagcaccatcgccgccccccaccccatggacggcccccccggcggcagcacccccgtgacccccgtgatcaaggccggctggctggacaagaaccccccccagggcagctacatctaccagaagagatgggtgagactggacaccgaccacctgagatacttcgacagcaacaaggacgcctacagcaagagattcatcagcgtggcctgcatcagccacgtggccgccatcggcgaccagaagttcgaggtgatcaccaacaacagaaccttcgccttcagagccgagagcgacgtggagagaaaggagtggatgcaggccctgcagcaggccatggccgagcagagagccagagccagactgagcagcgcctacctgctgggcgtgcccggcagcgagcagcccgacagagccggcagcctggagctgagaggcttcaagaacaagctgtacgtggccgtggtgggcgacaaggtgcagctgtacaagaacctggaggagtaccacctgggcatcggcatcaccttcatcgacatgagcgtgggcaacgtgaaggaggtggacagaagaagcttcgacctgaccaccccctacagaatcttcagcttcagcgccgacagcgagctggagaaggagcagtggctggaggccatgcagggcgccatcgccgaggccctgagcaccagcgaggtggccgagagaatctgggccgccgcccccaacagattctgcgccgactgcggcgccccccagcccgactgggccagcatcaacctgtgcgtggtgatctgcaagagatgcgccggcgagcacagaggcctgggcgccggcgtgagcaaggtgagaagcctgaagatggacagaaaggtgtggaccgagaccctgatcgagctgttcctgcagctgggcaacggcgccggcaacagattctgggccgccaacgtgccccccagcgaggccctgcagcccagcagcagccccagcaccagaagatgccacctggaggccaagtacagagagggcaagtacagaagataccaccccctgttcggcaaccaggaggagctggacaaggccctgtgcgccgccgtgaccaccaccgacctggccgagacccaggccctgctgggctgcggcgccggcatcaactgcttcagcggcgaccccgaggcccccacccccctggccctggccgagcaggccggccagaccctgcagatggagttcctgagaaacaacagaaccaccgaggtgcccagactggacagcatgaagcccctggagaagcactacagcgtggtgctgcccaccgtgagccacagcggcttcctgtacaagaccgccagcgccggcaagctgctgcaggacagaagagccagagaggagttcagcagaagatggtgcgtgctgggcgacggcgtgctgagctacttcgagaacgagagagccgtgacccccaacggcgagatcagagccagcgagatcgtgtgcctggccgtgcccccccccgacacccacggcttcgagcacaccttcgaggtgtacaccgagggcgagagactgtacctgttcggcctggagagcgccgagcaggcccacgagtgggtgaagtgcatcgccaaggccttcgtgccccccctggccgaggacctgctggccagagacttcgagagactgggcagactgccctacaaggccggcctgagcctgcagagagcccaggagggctggttcagcctgagcggcagcgagctgagagccgtgttccccgagggcccctgcgaggagcccctgcagctgagaaagctgcaggagctgagcatccagggcgacagcgagaaccaggtgctggtgctggtggagagaagaagaaccctgtacatccagggcgagagaagactggacttcatgggctggctgggcgccatccagaaggccgccgccagcatgggcgacaccctgagcgagcagcagctgggcgacagcgacatccccgtgatcgtgtacagatgcgtggactacatcacccagtgcggcctgaccagcgagggcatctacagaaagtgcggccagaccagcaagacccagagactgctggagagcctgagacaggacgccagaagcgtgcacctgaaggagggcgagcagcacgtggacgacgtgagcagcgccctgaagagattcctgagagacctgcccgacggcctgttcaccagagcccagagactgacctggctggaggccagcgagatcgaggacgaggaggagaaggtgagcagatacagagagctgctggtgagactgccccccgtgaacagagccaccgtgaaggccctgatcagccacctgtactgcgtgcagtgcttcagcgacaccaaccagatgaacgtgcacaacctggccatcgtgttcggccccaccctgttccagaccgacggccaggactacaaggccggcagagtggtggaggacctgatcaaccactacgtggtggtgttcagcgtggacgaggaggagctgagaaagcagagagaggagatcaccgccatcgtgaagatgagagtggccggcaccgccagcggcacccagcacgccggcgacttcatctgcaccgtgtacctggaggagaagaaggccgagaccgagcagcacatcaaggtgcccgccagcatgaccgccgaggagctgaccctggagatcctggacagaagaaacgtgggcatcagagagaaggactactggacctgcttcgaggtgaacgagagagaggaggccgagagacccctgcacttcgccgagaaggtgctgcccatcctgcacggcctgggcaccgacagccacctggtggtgaagaagcaccaggccatggaggccatgctgctgtacctggccagcagagtgggcgacaccaagcacggcatgatgaagttcagagaggacagaagcctgctgggcctgggcctgcccagcggcggcttccacgacagatacttcatcctgaacagcagctgcctgagactgtacaaggaggtgagaagccagagaccctggagcggcgcccccgagaccagccacagacccgagaaggagtggcccatcaagagcctgaaggtgtacctgggcgtgaagaagaagctgagaccccccacctgctggggcttcaccgtggtgcacgagaccgagaagcacgagaagcagcagtggtacctgtgctgcgacacccagatggagctgagagagtggttcgccaccttcctgttcgtgcagcacgacggcctggtgtggcccagcgagcccagcagagtgagcagagccgtgcccgaggtgagactgggcagcgtgagcctgatccccctgagaggcagcgagaacgagatgagaagaagcgtggccgccttcaccgccgaccccctgagcctgctgagaaacgtgtag

SEQ ID NO: 73193 - DNA, 4353 bp, synthetic construct
  misc_feature 1..4353: note = Description of Artificial Sequence: Synthetic coding sequence
  source 1..4353: mol_type = other DNA
atggccgaggccggcgacgccgccctgagcgtggccgagtggctgagagccctgcacctggagcagtacaccggcctgttcgagcagcacggcctggtgtgggccaccgagtgccagggcctgagcgacaccagactgatggacatgggcatgctgctgcccggccacagaagaagaatcctggccggcctgctgagagcccacaccagccccgcccccgcccccagacccacccccagacccgtgcccatgaagagacacatcttcagaagcccccccgtgcccgccaccccccccgagcccctgcccaccaccaccgaggacgagggcctgcccgccgccccccccatcccccccagaagaagctgcctgccccccacctgcttcaccacccccagcaccgccgcccccgaccccgtgctgccccccctgcccgccaagagacacctggccgagctgagcgtgccccccgtgccccccagaaccggcccccccagactgctggtgagcctgcccaccaaggaggaggagagcctgctgcccagcctgagcagccccccccagccccagagcgaggagcccctgagcaccctgccccagggccccccccagccccccagcccccccccctgcccccccgagatcccccccaagcccgtgagactgttccccgagttcgacgacagcgactacgacgaggtgcccgaggagggccccggcgcccccgccagagtgatgaccaagaaggaggagcccccccccagcagagtgcccagagccgtgagagtggccagcctgctgagcgagggcgaggagctgagcggcgacgaccagggcgacgaggaggaggacgaccacgcctacgagggcgtgcccaacggcggctggcacaccagcagcctgagcctgagcctgcccagcaccatcgccgccccccaccccatggacggcccccccggcggcagcacccccgtgacccccgtgatcaaggccggctggctggacaagaaccccccccagggcagctacatctaccagaagagatgggtgagactggacaccgaccacctgagatacttcgacagcaacaaggacgcctacagcaagagattcatcagcgtggcctgcatcagccacgtggccgccatcggcgaccagaagttcgaggtgatcaccaacaacagaaccttcgccttcagagccgagagcgacgtggagagaaaggagtggatgcaggccctgcagcaggccatggccgagcagagagccagagccagactgagcagcgcctacctgctgggcgtgcccggcagcgagcagcccgacagagccggcagcctggagctgagaggcttcaagaacaagctgtacgtggccgtggtgggcgacaaggtgcagctgtacaagaacctggaggagtaccacctgggcatcggcatcaccttcatcgacatgagcgtgggcaacgtgaaggaggtggacagaagaagcttcgacctgaccaccccctacagaatcttcagcttcagcgccgacagcgagctggagaaggagcagtggctggaggccatgcagggcgccatcgccgaggccctgagcaccagcgaggtggccgagagaatctgggccgccgcccccaacagattctgcgccgactgcggcgccccccagcccgactgggccagcatcaacctgtgcgtggtgatctgcaagagatgcgccggcgagcacagaggcctgggcgccggcgtgagcaaggtgagaagcctgaagatggacagaaaggtgtggaccgagaccctgatcgagctgttcctgcagctgggcaacggcgccggcaacagattctgggccgccaacgtgccccccagcgaggccctgcagcccagcagcagccccagcaccagaagatgccacctggaggccaagtacagagagggcaagtacagaagataccaccccctgttcggcaaccaggaggagctggacaaggccctgtgcgccgccgtgaccaccaccgacctggccgagacccaggccctgctgggctgcggcgccggcatcaactgcttcagcggcgaccccgaggcccccacccccctggccctggccgagcaggccggccagaccctgcagatggagttcctgagaaacaacagaaccaccgaggtgcccagactggacagcatgaagcccctggagaagcactacagcgtggtgctgcccaccgtgagccacagcggcttcctgtacaagaccgccagcgccggcaagctgctgcaggacagaagagccagagaggagttcagcagaagatggtgcgtgctgggcgacggcgtgctgagctacttcgagaacgagagagccgtgacccccaacggcgagatcagagccagcgagatcgtgtgcctggccgtgcccccccccgacacccacggcttcgagcacaccttcgaggtgtacaccgagggcgagagactgtacctgttcggcctggagagcgccgagcaggcccacgagtgggtgaagtgcatcgccaaggccttcgtgccccccctggccgaggacctgctggccagagacttcgagagactgggcagactgccctacaaggccggcctgagcctgcagagagcccaggagggctggttcagcctgagcggcagcgagctgagagccgtgttccccgagggcccctgcgaggagcccctgcagctgagaaagctgcaggagctgagcatccagggcgacagcgagaaccaggtgctggtgctggtggagagaagaagaaccctgtacatccagggcgagagaagactggacttcatgggctggctgggcgccatccagaaggccgccgccagcatgggcgacaccctgagcgagcagcagctgggcgacagcgacatccccgtgatcgtgtacagatgcgtggactacatcacccagtgcggcctgaccagcgagggcatctacagaaagtgcggccagaccagcaagacccagagactgctggagagcctgagacaggacgccagaagcgtgcacctgaaggagggcgagcagcacgtggacgacgtgagcagcgccctgaagagattcctgagagacctgcccgacggcctgttcaccagagcccagagactgacctggctggaggccagcgagatcgaggacgaggaggagaaggtgagcagatacagagagctgctggtgagactgccccccgtgaacagagccaccgtgaaggccctgatcagccacctgtactgcgtgcagtgcttcagcgacaccaaccagatgaacgtgcacaacctggccatcgtgttcggccccaccctgttccagaccgacggccaggactacaaggccggcagagtggtggaggacctgatcaaccactacgtggtggtgttcagcgtggacgaggaggagctgagaaagcagagagaggagatcaccgccatcgtgaagatgagagtggccggcaccgccagcggcacccagcacgccggcgacttcatctgcaccgtgtacctggaggagaagaaggccgagaccgagcagcacatcaaggtgcccgccagcatgaccgccgaggagctgaccctggagatcctggacagaagaaacgtgggcatcagagagaaggactactggacctgcttcgaggtgaacgagagagaggaggccgagagacccctgcacttcgccgagaaggtgctgcccatcctgcacggcctgggcaccgacagccacctggtggtgaagaagcaccaggccatggaggccatgctgctgtacctggccagcagagtgggcgacaccaagcacggcatgatgaagttcagagaggacagaagcctgctgggcctgggcctgcccagcggcggcttccacgacagatacttcatcctgaacagcagctgcctgagactgtacaaggaggtgagaagccagagaccctggagcggcgcccccgagaccagccacagacccgagaaggagtggcccatcaagagcctgaaggtgtacctgggcgtgaagaagaagctgagaccccccacctgctggggcttcaccgtggtgcacgagaccgagaagcacgagaagcagcagtggtacctgtgctgcgacacccagatggagctgagagagtggttcgccaccttcctgttcgtgcagcacgacggcctggtgtggcccagcgagcccagcagagtgagcagagccgtgcccgaggtgagactgggcagcgtgagcctgatccccctgagaggcagcgagaacgagatgagaagaagcgtggccgccttcaccgccgaccccctgagcctgctgagaaacgtgtag

SEQ ID NO: 73194 - DNA, 3402 bp, synthetic construct
  misc_feature 1..3402: note = Description of Artificial Sequence: Synthetic coding sequence
  source 1..3402: mol_type = other DNA
atgaccaagaaggaggagcccccccccagcagagtgcccagagccgtgagagtggccagcctgctgagcgagggcgaggagctgagcggcgacgaccagggcgacgaggaggaggacgaccacgcctacgagggcgtgcccaacggcggctggcacaccagcagcctgagcctgagcctgcccagcaccatcgccgccccccaccccatggacggcccccccggcggcagcacccccgtgacccccgtgatcaaggccggctggctggacaagaaccccccccagggcagctacatctaccagaagagatgggtgagactggacaccgaccacctgagatacttcgacagcaacaaggacgcctacagcaagagattcatcagcgtggcctgcatcagccacgtggccgccatcggcgaccagaagttcgaggtgatcaccaacaacagaaccttcgccttcagagccgagagcgacgtggagagaaaggagtggatgcaggccctgcagcaggccatggccgagcagagagccagagccagactgagcagcgcctacctgctgggcgtgcccggcagcgagcagcccgacagagccggcagcctggagctgagaggcttcaagaacaagctgtacgtggccgtggtgggcgacaaggtgcagctgtacaagaacctggaggagtaccacctgggcatcggcatcaccttcatcgacatgagcgtgggcaacgtgaaggaggtggacagaagaagcttcgacctgaccaccccctacagaatcttcagcttcagcgccgacagcgagctggagaaggagcagtggctggaggccatgcagggcgccatcgccgaggccctgagcaccagcgaggtggccgagagaatctgggccgccgcccccaacagattctgcgccgactgcggcgccccccagcccgactgggccagcatcaacctgtgcgtggtgatctgcaagagatgcgccggcgagcacagaggcctgggcgccggcgtgagcaaggtgagaagcctgaagatggacagaaaggtgtggaccgagaccctgatcgaggccctgtgcgccgccgtgaccaccaccgacctggccgagacccaggccctgctgggctgcggcgccggcatcaactgcttcagcggcgaccccgaggcccccacccccctggccctggccgagcaggccggccagaccctgcagatggagttcctgagaaacaacagaaccaccgaggtgcccagactggacagcatgaagcccctggagaagcactacagcgtggtgctgcccaccgtgagccacagcggcttcctgtacaagaccgccagcgccggcaagctgctgcaggacagaagagccagagaggagttcagcagaagatggtgcgtgctgggcgacggcgtgctgagctacttcgagaacgagagagccgtgacccccaacggcgagatcagagccagcgagatcgtgtgcctggccgtgcccccccccgacacccacggcttcgagcacaccttcgaggtgtacaccgagggcgagagactgtacctgttcggcctggagagcgccgagcaggcccacgagtgggtgaagtgcatcgccaaggccttcgtgccccccctggccgaggacctgctggccagagacttcgagagactgggcagactgccctacaaggccggcctgagcctgcagagagcccaggagggctggttcagcctgagcggcagcgagctgagagccgtgttccccgagggcccctgcgaggagcccctgcagctgagaaagctgcaggagctgagcatccagggcgacagcgagaaccaggtgctggtgctggtggagagaagaagaaccctgtacatccagggcgagagaagactggacttcatgggctggctgggcgccatccagaaggccgccgccagcatgggcgacaccctgagcgagcagcagctgggcgacagcgacatccccgtgatcgtgtacagatgcgtggactacatcacccagtgcggcctgaccagcgagggcatctacagaaagtgcggccagaccagcaagacccagagactgctggagagcctgagacaggacgccagaagcgtgcacctgaaggagggcgagcagcacgtggacgacgtgagcagcgccctgaagagattcctgagagacctgcccgacggcctgttcaccagagcccagagactgacctggctggaggccagcgagatcgaggacgaggaggagaaggtgagcagatacagagagctgctggtgagactgccccccgtgaacagagccaccgtgaaggccctgatcagccacctgtactgcgtgcagtgcttcagcgacaccaaccagatgaacgtgcacaacctggccatcgtgttcggccccaccctgttccagaccgacggccaggactacaaggccggcagagtggtggaggacctgatcaaccactacgtggtggtgttcagcgtggacgaggaggagctgagaaagcagagagaggagatcaccgccatcgtgaagatgagagtggccggcaccgccagcggcacccagcacgccggcgacttcatctgcaccgtgtacctggaggagaagaaggccgagaccgagcagcacatcaaggtgcccgccagcatgaccgccgaggagctgaccctggagatcctggacagaagaaacgtgggcatcagagagaaggactactggacctgcttcgaggtgaacgagagagaggaggccgagagacccctgcacttcgccgagaaggtgctgcccatcctgcacggcctgggcaccgacagccacctggtggtgaagaagcaccaggccatggaggccatgctgctgtacctggccagcagagtgggcgacaccaagcacggcatgatgaagttcagagaggacagaagcctgctgggcctgggcctgcccagcggcggcttccacgacagatacttcatcctgaacagcagctgcctgagactgtacaaggaggtgagaagccacagacccgagaaggagtggcccatcaagagcctgaaggtgtacctgggcgtgaagaagaagctgagaccccccacctgctggggcttcaccgtggtgcacgagaccgagaagcacgagaagcagcagtggtacctgtgctgcgacacccagatggagctgagagagtggttcgccaccttcctgttcgtgcagcacgacggcctggtgtggcccagcgagcccagcagagtgagcagagccgtgcccgaggtgagactgggcagcgtgagcctgatccccctgagaggcagcgagaacgagatgagaagaagcgtggccgccttcaccgccgaccccctgagcctgctgagaaacgtgtag

SEQ ID NO: 73195 - DNA, 4320 bp, synthetic construct; identical to SEQ ID NO: 73191
  misc_feature 1..4320: note = Description of Artificial Sequence: Synthetic coding sequence
  source 1..4320: mol_type = other DNA

SEQ ID NO: 73196 - DNA, 5115 bp, synthetic construct
  misc_feature 1..5115: note = Description of Artificial Sequence: Synthetic coding sequence
  source 1..5115: mol_type = other DNA
atgagcagcgtgagcgaggtgaacgtggacatcaaggacttcctgatgagcatcaacctggagcagtacctgctgcacttccacgagagcggcttcaccaccgtgaaggactgcgccgccatcaacgacagcctgctgcagaagatcggcatcagccccaccggccacagaagaagaatcctgaagcagctgcagatcatcctgagcaagatgcaggacatccccatctacgccaacgtgcacaagaccaagaagaacgacgaccccagcaaggactaccacgtgcccagcagcgaccagaacatctgcatcgagctgagcaacagcggcagcgtgcagaccagcagccccccccagctggagaccgtgagaaagaacctggaggacagcgacgccagcgtggagagaagccagtacccccagagcgacgacaagctgagcccccccaagagagacttccccaccgccgaggagccccacctgaacctgggcagcctgaacgacagcctgttcggcagcgacaacatcaagatcgagagcctgatcaccaagaagaccgtggaccacaccgtggaggagcagcagaccgagaaggtgaagctgatcaccgagaacctgagcaagctgcccaacgccgacagcgagtgcctgagcttcgtgggctgcagcaccagcggcaccaacagcggcaacggcaccaacggcctgctggagggcagcccccccagccccttcttcaagttccagggcgagatgatcgtgaacgacctgtacgtgcccagcagccccatcctggcccccgtgagaagcagaagcaagctggtgagcagacccagcagaagcttcctgctgagacacagacccgtgcccgagatccccggcagcaccaagggcgtgagcggcagctacttcagagagagaagaaacgtggccaccagcaccgagaagagcgtggcctggcagaacagcaacgaggagaacagcagcagcatcttcccctacggcgagaccttcctgttccagagactggagaacagcaagaagagaagcatcaagaacgagttcctgacccagggcgaggccctgaagggcgaggccgccaccgccaccaacagcttcatcatcaagagcagcatctacgacaacagaaaggagaagatcagcgaggacaaggtggaggacatctggatccccagagaggacaagaacaacttcctgatcgacaccgccagcgagagcgagtacagcaccgtggaggagtgcttccagagcctgagaagaaagaacagcaaggccagcaagagcagaacccagaaggccctgatcctggacagcgtgaacagacacagctaccccctgagcagcaccagcggcaacgccgacagcagcgccgtgagcagccaggccatcagcccctacgcctgcttctacggcgccagcgccaagaaggtgaagagcggctggctggacaagctgagcccccagggcaagagaatgttccagaagagatgggtgaagttcgacggcctgagcatcagctactacaacaacgagaaggagatgtacagcaagggcatcatccccctgagcgccatcagcaccgtgagagtgcagggcgacaacaagttcgaggtggtgaccacccagagaaccttcgtgttcagagtggagaaggaggaggagagaaacgactggatcagcatcctgctgaacgccctgaagagccagagcctgaccagccagagccaggccgtggtgacccccgagaagtgcggctacctggagctgagaggctacaaggccaagatcttcaccgtgctgagcggcaacagcgtgtggctgtgcaagaacgagcaggacttcaagagcggcctgggcatcaccatcatccccatgaacgtggccaacgtgaagcaggtggacagaaccgtgaagcagagcttcgagatcatcaccccctacagaagcttcagcttcaccgccgagaccgagaaggagaagcaggactggatcgaggccgtgcagcagagcatcgccgagaccctgagcgactacgaggtggccgagaagatctggttcaacgagagcaacagaagctgcgccgactgcaaggcccccgaccccgactgggccagcatcaacctgtgcgtggtgatctgcaagaagtgcgccggccagcacagaagcctgggccccaaggacagcaaggtgagaagcctgaagatggacgccagcatctggagcaacgagctgatcgagctgttcatcgtgatcggcaacaagagagccaacgacttctgggccggcaacctgcagaaggacgaggagctgcacatggacagccccgtggagaagagaaagaacttcatcacccagaagtacaaggagggcaagttcagaaagaccctgctggccagcctgaccaaggaggagctgaacaaggccctgtgcgccgccgtggtgaagcccgacgtgctggagaccatggccctgctgttcagcggcgccgacgtgatgtgcgccaccggcgaccccgtgcacagcaccccctacctgctggccaagaaggccggccagagcctgcagatggagttcctgtaccacaacaagttcagcgacttcccccagcacgacatccacagcgagggcgtgctgagccaggagagcagccagagcaccttcctgtgcgacttcctgtaccaggcccccagcgccgccagcaagctgagcagcgagaagaagctgctggaggagaccaacaagaagtggtgcgtgctggagggcggcttcctgagctactacgagaacgacaagagcaccacccccaacggcaccatcaacatcaacgaggtgatctgcctggccatccacaaggaggacttctacctgaacaccggccccatcttcatcttcgagatctacctgcccagcgagagagtgttcctgttcggcgccgagaccagccaggcccagagaaagtggaccgaggccatcgccaagcacttcgtgcccctgttcgccgagaacctgaccgaggccgactacgacctgatcggccagctgttctacaaggactgccacgccctggaccagtggagaaagggctggttcgccatggacaagagcagcctgcacttctgcctgcagatgcaggaggtgcagggcgacagaatgcacctgagaagactgcaggagctgaccatcagcaccatggtgcagaacggcgagaagctggacgtgctgctgctggtggagaagggcagaaccctgtacatccacggccacaccaagctggacttcaccgtgtggcacaccgccatcgagaaggccgccggcaccgacggcaacgccctgcaggaccagcagctgagcaagaacgacgtgcccatcatcgtgaacagctgcatcgccttcgtgacccagtacggcctgggctgcaagtacatctaccagaagaacggcgaccccctgcacatcagcgagctgctggagagcttcaagaaggacgccagaagcttcaagctgagagccggcaagcaccagctggaggacgtgaccgccgtgctgaagagcttcctgagcgacatcgacgacgccctgctgaccaaggagctgtacccctactggatcagcgccctggacacccaggacgacaaggagagaatcaagaagtacggcgccttcatcagaagcctgcccggcgtgaacagagccaccctggccgccatcatcgagcacctgtacagagtgcagaagtgcagcgagatcaaccacatgaacgcccacaacctggccctggtgttcagcagctgcctgttccagaccaagggccagaccagcgaggaggtgaacgtgatcgaggacctgatcaacaactacgtggagatcttcgaggtgaaggaggaccaggtgaagcagatggacatcgagaacagcttcatcaccaagtggaaggacacccaggtgagccaggccggcgacctgctgatcgaggtgtacgtggagagaaaggagcccgactgcagcatcatcatcagaatcagccccgtgatggaggccgaggagctgaccaacgacatcctggccatcaagaacatcatccccaccaagggcgacatctgggccaccttcgaggtgatcgagaacgaggagctggagagacccctgcactacaaggagaacgtgctggagcaggtgctgagatggagcagcctggccgagcccggcagcgcctacctggtggtgaagagattcctgaccgccgacaccatcaagcactgcagcgacagaagcaccctgggcagcatcaaggagggcatcctgaagatcaaggaggagcccagcaagatcctgagcggcaacaagttccaggacagatacttcgtgctgagagacggcttcctgttcctgtacaaggacgtgaagagcagcaagcacgacaagatgttcagcctgagcagcatgaagttctacagaggcgtgaagaagaagatgaagccccccaccagctggggcctgaccgcctacagcgagaagcaccactggcacctgtgctgcgacagcagcagaacccagaccgagtggatgaccagcatcttcatcgcccagcacgagtacgacatctggccccccgccggcaaggagagaaagagaagcatcaccaagaaccccaagatcggcggcctgcccctgatccccatccagcacgagggcaacgccaccctggccagaaagaacatcgagagcgccagagccgagctggagagactgagactgagcgagaagtgcgacaaggagagcgtggacagcagcctgaaggagagagccagcatggtggcccactgcctggagcacaaggacgacaagctgagaaacagacccagaaagcacagaagcttcaactgcctggaggacaccgagcccgaggcccccctgggccagcccaagggccacaagggcctgaagaccctgagaaagaccgaggacagaaacagcaaggccaccctggacagcgaccacaagctgcccagcagagtgatcgaggagctgaacgtggtgctgcagagaagcagaaccctgcccaaggagctgcaggacgagcagatcctgaagtag

SEQ ID NO: 73197 - DNA, 144 bp, synthetic construct
  misc_feature 1..144: note = Description of Artificial Sequence: Synthetic coding sequence
  source 1..144: mol_type = other DNA
atgagcagcgtgagcgaggtgaacgtggacatcaaggacttcctgatgagcatcaacctggagcagtacctgctgcacttccacgagagcggcttcaccaccgtgaaggactgcgccgccatcaacgacagcctgctgcagtag

SEQ ID NO: 73198 - DNA, 3399 bp, synthetic construct
  misc_feature 1..3399: note = Description of Artificial Sequence: Synthetic coding sequence
  source 1..3399: mol_type = other DNA
atgagaagcagcgccagcagactgagcagcttcagcagcagagacagcctgtggaacagaatgcccgaccagatcagcgtgagcgagttcatcgccgagaccaccgaggactacaacagccccaccaccagcagcttcaccaccagactgcacaactgcagaaacaccgtgaccctgctggaggaggccctggaccaggacagaaccgccctgcagaaggtgaagaagagcgtgaaggccatctacaacagcggccaggaccacgtgcagaacgaggagaactacgcccaggtgctggacaagttcggcagcaacttcctgagcagagacaaccccgacctgggcaccgccttcgtgaagttcagcaccctgaccaaggagctgagcaccctgctgaagaacctgctgcagggcctgagccacaacgtgatcttcaccctggacagcctgctgaagggcgacctgaagggcgtgaagggcgacctgaagaagcccttcgacaaggcctggaaggactacgagaccaagttcaccaagatcgagaaggagaagagagagcacgccaagcagcacggcatgatcagaaccgagatcaccggcgccgagatcgccgaggagatggagaaggagagaagactgttccagctgcagatgtgcgagtacctgatcaaggtgaacgagatcaagaccaagaagggcgtggacctgctgcagaacctgatcaagtactaccacgcccagtgcaacttcttccaggacggcctgaagaccgccgacaagctgaagcagtacatcgagaagctggccgccgacctgtacaacatcaagcagacccaggacgaggagaagaagcagctgaccgccctgagagacctgatcaagagcagcctgcagctggaccagaaggaggccagacaggacagccagagcagacagggcggctacagcatgcaccagctgcagggcaacaaggagtacggcagcgagaagaagggctacctgctgaagaagagcgacggcatcagaaaggtgtggcagagaagaaagtgcagcgtgaagaacggcatcctgaccatcagccacgccaccagcaacagacagcccgccaagctgaacctgctgacctgccaggtgaagcccaacgccgaggacaagaagagcttcgacctgatcagccacaacagaacctaccacttccaggccgaggacgagcaggactacgtggcctggatcagcgtgctgaccaacagcaaggaggaggccctgaccatggccttcagaggcgagcagagcgccggcgagaacagcctggaggacctgaccaaggccatcatcgaggacgtgcagagactgcccggcaacgacatctgctgcgactgcggcagcagcgagcccacctggctgagcaccaacctgggcatcctgacctgcatcgagtgcagcggcatccacagagagatgggcgtgcacatcagcagaatccagagcctggagctggacaagctgggcaccagcgagctgctgctggccaagaacgtgggcaacaacagcttcaacgacatcatggaggccaacctgcccagccccagccccaagcccacccccagcagcgacatgaccgtgagaaaggagtacatcaccgccaagtacgtggaccacagattcagcagaaagacctgcagcaccagcagcgccaagctgaacgagctgctggaggccatcaagagcagagacctgctggccctgatccaggtgtacgccgagggcgtggagctgatggagcccctgctggagcccggccaggagctgggcgagaccgccctgcacctggccgtgagaaccgccgaccagaccagcctgcacctggtggacttcctggtgcagaactgcggcaacctggacaagcagaccgccctgggcaacaccgtgctgcactactgcagcatgtacagcaagcccgagtgcctgaagctgctgctgagaagcaagcccaccgtggacatcgtgaaccaggccggcgagaccgccctggacatcgccaagagactgaaggccacccagtgcgaggacctgctgagccaggccaagagcggcaagttcaacccccacgtgcacgtggagtacgagtggaacctgagacaggaggagatcgacgagagcgacgacgacctggacgacaagcccagccccatcaagaaggagagaagccccagaccccagagcttctgccacagcagcagcatcagcccccaggacaagctggccctgcccggcttcagcacccccagagacaagcagagactgagctacggcgccttcaccaaccagatcttcgtgagcaccagcaccgacagccccaccagccccaccaccgaggccccccccctgccccccagaaacgccggcaagggccccaccggcccccccagcaccctgcccctgagcacccagaccagcagcggcagcagcaccctgagcaagaagagaccccccccccccccccccggccacaagagaaccctgagcgacccccccagccccctgccccacggcccccccaacaagggcgccgtgccctggggcaacgacggcggccccagcagcagcagcaagaccaccaacaagttcgagggcctgagccagcagagcagcaccagcagcgccaagaccgccctgggccccagagtgctgcccaagctgccccagaaggtggccctgagaaagaccgaccacctgagcctggacaaggccaccatcccccccgagatcttccagaagagcagccagctggccgagctgccccagaagcccccccccggcgacctgccccccaagcccaccgagctggcccccaagccccagatcggcgacctgccccccaagcccggcgagctgccccccaagccccagctgggcgacctgccccccaagccccagctgagcgacctgccccccaagccccagatgaaggacctgccccccaagccccagctgggcgacctgctggccaagagccagaccggcgacgtgagccccaaggcccagcagcccagcgaggtgaccctgaagagccaccccctggacctgagccccaacgtgcagagcagagacgccatccagaagcaggccagcgaggacagcaacgacctgacccccaccctgcccgagacccccgtgcccctgcccagaaagatcaacaccggcaagaacaaggtgagaagagtgaagaccatctacgactgccaggccgacaacgacgacgagctgaccttcatcgagggcgaggtgatcatcgtgaccggcgaggaggaccaggagtggtggatcggccacatcgagggccagcccgagagaaagggcgtgttccccgtgagcttcgtgcacatcctgagcgactag

SEQ ID NO: 73199 - DNA, 3390 bp, synthetic construct
  misc_feature 1..3390: note = Description of Artificial Sequence: Synthetic coding sequence
  source 1..3390: mol_type = other DNA
atgagaagcagcgccagcagactgagcagcttcagcagcagagacagcctgtggaacagaatgcccgaccagatcagcgtgagcgagttcatcgccgagaccaccgaggactacaacagccccaccaccagcagcttcaccaccagactgcacaactgcagaaacaccgtgaccctgctggaggaggccctggaccaggacagaaccgccctgcagaaggtgaagaagagcgtgaaggccatctacaacagcggccaggaccacgtgcagaacgaggagaactacgcccaggtgctggacaagttcggcagcaacttcctgagcagagacaaccccgacctgggcaccgccttcgtgaagttcagcaccctgaccaaggagctgagcaccctgctgaagaacctgctgcagggcctgagccacaacgtgatcttcaccctggacagcctgctgaagggcgacctgaagggcgtgaagggcgacctgaagaagcccttcgacaaggcctggaaggactacgagaccaagttcaccaagatcgagaaggagaagagagagcacgccaagcagcacggcatgatcagaaccgagatcaccggcgccgagatcgccgaggagatggagaaggagagaagactgttccagctgcagatgtgcgagtacctgatcaaggtgaacgagatcaagaccaagaagggcgtggacctgctgcagaacctgatcaagtactaccacgcccagtgcaacttcttccaggacggcctgaagaccgccgacaagctgaagcagtacatcgagaagctggccgccgacctgtacaacatcaagcagacccaggacgaggagaagaagcagctgaccgccctgagagacctgatcaagagcagcctgcagctggaccagaaggaggacagccagagcagacagggcggctacagcatgcaccagctgcagggcaacaaggagtacggcagcgagaagaagggctacctgctgaagaagagcgacggcatcagaaaggtgtggcagagaagaaagtgcagcgtgaagaacggcatcctgaccatcagccacgccaccagcaacagacagcccgccaagctgaacctgctgacctgccaggtgaagcccaacgccgaggacaagaagagcttcgacctgatcagccacaacagaacctaccacttccaggccgaggacgagcaggactacgtggcctggatcagcgtgctgaccaacagcaaggaggaggccctgaccatggccttcagaggcgagcagagcgccggcgagaacagcctggaggacctgaccaaggccatcatcgaggacgtgcagagactgcccggcaacgacatctgctgcgactgcggcagcagcgagcccacctggctgagcaccaacctgggcatcctgacctgcatcgagtgcagcggcatccacagagagatgggcgtgcacatcagcagaatccagagcctggagctggacaagctgggcaccagcgagctgctgctggccaagaacgtgggcaacaacagcttcaacgacatcatggaggccaacctgcccagccccagccccaagcccacccccagcagcgacatgaccgtgagaaaggagtacatcaccgccaagtacgtggaccacagattcagcagaaagacctgcagcaccagcagcgccaagctgaacgagctgctggaggccatcaagagcagagacctgctggccctgatccaggtgtacgccgagggcgtggagctgatggagcccctgctggagcccggccaggagctgggcgagaccgccctgcacctggccgtgagaaccgccgaccagaccagcctgcacctggtggacttcctggtgcagaactgcggcaacctggacaagcagaccgccctgggcaacaccgtgctgcactactgcagcatgtacagcaagcccgagtgcctgaagctgctgctgagaagcaagcccaccgtggacatcgtgaaccaggccggcgagaccgccctggacatcgccaagagactgaaggccacccagtgcgaggacctgctgagccaggccaagagcggcaagttcaacccccacgtgcacgtggagtacgagtggaacctgagacaggaggagatcgacgagagcgacgacgacctggacgacaagcccagccccatcaagaaggagagaagccccagaccccagagcttctgccacagcagcagcatcagcccccaggacaagctggccctgcccggcttcagcacccccagagacaagcagagactgagctacggcgccttcaccaaccagatcttcgtgagcaccagcaccgacagccccaccagccccaccaccgaggccccccccctgccccccagaaacgccggcaagggccccaccggcccccccagcaccctgcccctgagcacccagaccagcagcggcagcagcaccctgagcaagaagagaccccccccccccccccccggccacaagagaaccctgagcgacccccccagccccctgccccacggcccccccaacaagggcgccgtgccctggggcaacgacggcggccccagcagcagcagcaagaccaccaacaagttcgagggcctgagccagcagagcagcaccagcagcgccaagaccgccctgggccccagagtgctgcccaagctgccccagaaggtggccctgagaaagaccgaccacctgagcctggacaaggccaccatcccccccgagatcttccagaagagcagccagctggccgagctgccccagaagcccccccccggcgacctgccccccaagcccaccgagctggcccccaagccccagatcggcgacctgccccccaagcccggcgagctgccccccaagccccagctgggcgacctgccccccaagccccagctgagcgacctgccccccaagccccagatgaaggacctgccccccaagccccagctgggcgacctgctggccaagagccagaccggcgacgtgagccccaaggcccagcagcccagcgaggtgaccctgaagagccaccccctggacctgagccccaacgtgcagagcagagacgccatccagaagcaggccagcgaggacagcaacgacctgacccccaccctgcccgagacccccgtgcccctgcccagaaagatcaacaccggcaagaacaaggtgagaagagtgaagaccatctacgactgccaggccgacaacgacgacgagctgaccttcatcgagggcgaggtgatcatcgtgaccggcgaggaggaccaggagtggtggatcggccacatcgagggccagcccgagagaaagggcgtgttccccgtgagcttcgtgcacatcctgagcgactag

SEQ ID NO: 73200 - DNA, 3390 bp, synthetic construct; identical to SEQ ID NO: 73199
  misc_feature 1..3390: note = Description of Artificial Sequence: Synthetic coding sequence
  source 1..3390: mol_type = other DNA

SEQ ID NO: 73201 - DNA, 1065 bp, synthetic construct
  misc_feature 1..1065: note = Description of Artificial Sequence: Synthetic coding sequence
  source 1..1065: mol_type = other DNA
atgagcctgagaggcagcctgagcagactgctgcagaccagagtgcacagcatcctgaagaagagcgtgcacagcgtggccgtgatcggcgcccccttcagccagggccagaagagaaagggcgtggagcacggccccgccgccatcagagaggccggcctgatgaagagactgagcagcctgggctgccacctgaaggacttcggcgacctgagcttcacccccgtgcccaaggacgacctgtacaacaacctgatcgtgaaccccagaagcgtgggcctggccaaccaggagctggccgaggtggtgagcagagccgtgagcgacggctacagctgcgtgaccctgggcggcgaccacagcctggccatcggcaccatcagcggccacgccagacactgccccgacctgtgcgtggtgtgggtggacgcccacgccgacatcaacacccccctgaccaccagcagcggcaacctgcacggccagcccgtgagcttcctgctgagagagctgcaggacaaggtgccccagctgcccggcttcagctggatcaagccctgcatcagcagcgccagcatcgtgtacatcggcctgagagacgtggacccccccgagcacttcatcctgaagaactacgacatccagtacttcagcatgagagacatcgacagactgggcatccagaaggtgatggagagaaccttcgacctgctgatcggcaagagacagagacccatccacctgagcttcgacatcgacgccttcgaccccaccctggcccccgccaccggcacccccgtggtgggcggcctgacctacagagagggcatgtacatcgccgaggagatccacaacaccggcctgctgagcgccctggacctggtggaggtgaacccccagctggccaccagcgaggaggaggccaagaccaccgccaacctggccgtggacgtgatcgccagcagcttcggccagaccagagagggcggccacatcgtgtacgaccagctgcccacccccagcagccccgacgagagcgagaaccaggccagagtgagaatctag

SEQ ID NO: 73202 - DNA, 207 bp, synthetic construct
  misc_feature 1..207: note = Description of Artificial Sequence: Synthetic coding sequence
  source 1..207: mol_type = other DNA
atgaagctgaacgagaagttcagcgagggctggagaaagcccaacgccagctggaagagcagctgcagcaagaacagcagcgacagagacaagctgagcctgccccacaagaagctggagagaggcagctggagagtgtggcagcccagaagcaccctgtgcagaaccctggacaagaccgaggaggagagagccaagagagagtag

SEQ ID NO: 73203 - DNA, 429 bp, synthetic construct
  misc_feature 1..429: note = Description of Artificial Sequence: Synthetic coding sequence
  source 1..429: mol_type = other DNA
atgaagctgaacgagaagttcagcgagggctggagaaagcccaacgccagctggaagagcagctgcagcaagaacagcagcgacagagacaagctgagcctgccccacaagaagctggagagaggcagctggagagtgtggcagcccagaagcaccctgtgcagaaccctggacaagaccgaggaggagagagccaagagagaggagctggagagaatcctggaggagaacaacagaaagatcgccgaggcccaggccaagctggccgaggagcagctgagaatcgtggaggagcagagaaagatccacgaggagagaatgaagctggagcaggagagacagagacagcagaaggaggagcagaagatcatcctgggcaagggcaagagcagacccaagctgagcttcagcctgaagacccaggactag

SEQ ID NO: 73204 - DNA, 822 bp, synthetic construct
  misc_feature 1..822: note = Description of Artificial Sequence: Synthetic coding sequence
  source 1..822: mol_type = other DNA
atgggcagaagcagaagcagaagcagcagcagaagcaagcacaccaagagcagcaagcacaacaagaagagaagcagaagcagaagcagaagcagagacaaggagagagtgagaaagagaagcaagagcagagagagcaagagaaacagaagaagagagagcagaagcagaagcagaagcaccaacaccgccgtgagcagaagagagagagacagagagagagccagcagcccccccgacagaatcgacatcttcggcagaaccgtgagcaagagaagcagcctggacgagaagcagaagagagaggaggaggagaagaaggccgagttcgagagacagagaaagatcagacagcaggagatcgaggagaagctgatcgaggaggagaccgccagaagagtggaggagctggtggccaagagagtggaggaggagctggagaagagaaaggacgagatcgagagagaggtgctgagaagagtggaggaggccaagagaatcatggagaagcagctgctggaggagctggagagacagagacaggccgagctggccgcccagaaggccagagaggaggaggagagagccaagagagaggagctggagagaatcctggaggagaacaacagaaagatcgccgaggcccaggccaagctggccgaggagcagctgagaatcgtggaggagcagagaaagatccacgaggagagaatgaagctggagcaggagagacagagacagcagaaggaggagcagaagatcatcctgggcaagggcaagagcagacccaagctgagcttcagcctgaagacccaggactag

SEQ ID NO: 73205 - DNA, 672 bp, synthetic construct
  misc_feature 1..672: note = Description of Artificial Sequence: Synthetic coding sequence
  source 1..672: mol_type = other DNA
atgggcagaagcagaagcagaagcagcagcagaagcaagcacaccaagagcagcaagcacaacaagaagagagccagcagcccccccgacagaatcgacatcttcggcagaaccgtgagcaagagaagcagcctggacgagaagcagaagagagaggaggaggagaagaaggccgagttcgagagacagagaaagatcagacagcaggagatcgaggagaagctgatcgaggaggagaccgccagaagagtggaggagctggtggccaagagagtggaggaggagctggagaagagaaaggacgagatcgagagagaggtgctgagaagagtggaggaggccaagagaatcatggagaagcagctgctggaggagctggagagacagagacaggccgagctggccgcccagaaggccagagaggtgaccctgggcagactggagagcagagacagcccctggcagaacttccagtgctgggtgctgccccccgcccagttcagaaagagatggaacaccgactacctgatccccttcagcagcaagctgaacatcgccgccaaggtgaacttcctggcctacagcgaggtgctgaccgacaacctgaaggtgggcagcttctacaagacctacagcagaatcctgttcgacctgatggagctggccatctag

SEQ ID NO: 73206 - DNA, 495 bp, synthetic construct
  misc_feature 1..495: note = Description of Artificial Sequence: Synthetic coding sequence
  source 1..495: mol_type = other DNA
atgcccgacaccatgctgcccgcctgcttcctgggcctgctggccttcagcagcgcctgctacttccagaactgccccagaggcggcaagagagccatgagcgacctggagctgagacagtgcctgccctgcggccccggcggcaagggcagatgcttcggccccagcatctgctgcgccgacgagctgggctgcttcgtgggcaccgccgaggccctgagatgccaggaggagaactacctgcccagcccctgccagagcggccagaaggcctgcggcagcggcggcagatgcgccgccttcggcgtgtgctgcaacgacgagagctgcgtgaccgagcccgagtgcagagagggcttccacagaagagccagagccagcgacagaagcaacgccacccagctggacggccccgccggcgccctgctgctgagactggtgcagctggccggcgcccccgagcccttcgagcccgcccagcccgacgcctactag

SEQ ID NO: 73207 - DNA, 1257 bp, synthetic construct
  misc_feature 1..1257: note = Description of Artificial Sequence: Synthetic coding sequence
  source 1..1257: mol_type = other DNA
atgagactgagcgccggccccgacgccggccccagcggcaacagcagcccctggtggcccctggccaccggcgccggcaacaccagcagagaggccgaggccctgggcgagggcaacggcccccccagagacgtgagaaacgaggagctggccaagctggagatcgccgtgctggccgtgaccttcgccgtggccgtgctgggcaacagcagcgtgctgctggccctgcacagaacccccagaaagaccagcagaatgcacctgttcatcagacacctgagcctggccgacctggccgtggccttcttccaggtgctgccccagatgtgctgggacatcacctacagattcagaggccccgactggctgtgcagagtggtgaagcacctgcaggtgttcggcatgttcgccagcgcctacatgctggtggtgatgaccgccgacagatacatcgccgtgtgccaccccctgaagaccctgcagcagcccgccagaagaagcagactgatgatcgccgccgcctgggtgctgagcttcgtgctgagcaccccccagtacttcgtgttcagcatgatcgaggtgaacaacgtgaccaaggccagagactgctgggccaccttcatccagccctggggcagcagagcctacgtgacctggatgaccggcggcatcttcgtggcccccgtggtgatcctgggcacctgctacggcttcatctgctacaacatctggtgcaacgtgagaggcaagaccgccagcagacagagcaagggcgccgagcaggccggcgtggccttccagaagggcttcctgctggccccctgcgtgagcagcgtgaagagcatcagcagagccaagatcagaaccgtgaagatgaccttcgtgatcgtgaccgcctacatcgtgtgctgggcccccttcttcatcatccagatgtggagcgtgtgggaccccatgagcgtgtggaccgagagcgagaaccccaccatcaccatcaccgccctgctgggcagcctgaacagctgctgcaacccctggatctacatgttcttcagcggccacctgctgcaggactgcgtgcagagcttcccctgctgccagaacatgaaggagaagttcaacaaggaggacaccgacagcatgagcagaagacagaccttctacagcaacaacagaagccccaccaacagcaccggcatgtggaaggacagccccaagagcagcaagagcatcaagttcatccccgtgagcacctag

SEQ ID NO: 73208 - DNA, 1275 bp, synthetic construct
  misc_feature 1..1275: note = Description of Artificial Sequence: Synthetic coding sequence
  source 1..1275: mol_type = other DNA
atggacagcggccccctgtgggacgccaaccccacccccagaggcaccctgagcgcccccaacgccaccaccccctggctgggcagagacgaggagctggccaaggtggagatcggcgtgctggccaccgtgctggtgctggccaccggcggcaacctggccgtgctgctgaccctgggccagctgggcagaaagagaagcagaatgcacctgttcgtgctgcacctggccctgaccgacctggccgtggccctgttccaggtgctgccccagctgctgtgggacatcacctacagattccagggccccgacctgctgtgcagagccgtgaagtacctgcaggtgctgagcatgttcgccagcacctacatgctgctggccatgaccctggacagatacctggccgtgtgccaccccctgagaagcctgcagcagcccggccagagcacctacctgctgatcgccgccccctggctgctggccgccatcttcagcctgccccaggtgttcatcttcagcctgagagaggtgatccagggcagcggcgtgctggactgctgggccgacttcggcttcccctggggccccagagcctacctgacctggaccaccctggccatcttcgtgctgcccgtgaccatgctgaccgcctgctacagcctgatctgccacgagatctgcaagaacctgaaggtgaagacccaggcctggagagtgggcggcggcggctggagaacctgggacagacccagccccagcaccctggccgccaccaccagaggcctgcccagcagagtgagcagcatcaacaccatcagcagagccaagatcagaaccgtgaagatgaccttcgtgatcgtgctggcctacatcgcctgctgggcccccttcttcagcgtgcagatgtggagcgtgtgggacaagaacgcccccgacgaggacagcaccaacgtggccttcaccatcagcatgctgctgggcaacctgaacagctgctgcaacccctggatctacatgggcttcaacagccacctgctgcccagacccctgagacacctggcctgctgcggcggcccccagcccagaatgagaagaagactgagcgacggcagcctgagcagcagacacaccaccctgctgaccagaagcagctgccccgccaccctgagcctgagcctgagcctgaccctgagcggcagacccagacccgaggagagccccagagacctggagctggccgacggcgagggcaccgccgagaccatcatcttctag

SEQ ID NO: 73209 - DNA, 1116 bp, synthetic construct
  misc_feature 1..1116: note = Description of Artificial Sequence: Synthetic coding sequence
  source 1..1116: mol_type = other DNA
atgctgatggccagcaccaccagcgccgtgcccggccaccccagcctgcccagcctgcccagcaacagcagccaggagagacccctggacaccagagaccccctgctggccagagccgagctggccctgctgagcatcgtgttcgtggccgtggccctgagcaacggcctggtgctggccgccctggccagaagaggcagaagaggccactgggcccccatccacgtgttcatcggccacctgtgcctggccgacctggccgtggccctgttccaggtgctgccccagctggcctggaaggccaccgacagattcagaggccccgacgccctgtgcagagccgtgaagtacctgcagatggtgggcatgtacgccagcagctacatgatcctggccatgaccctggacagacacagagccatctgcagacccatgctggcctacagacacggcagcggcgcccactggaacagacccgtgctggtggcctgggccttcagcctgctgctgagcctgccccagctgttcatcttcgcccagagaaacgtggagggcggcagcggcgtgaccgactgctgggcctgcttcgccgagccctggggcagaagaacctacgtgacctggatcgccctgatggtgttcgtggcccccaccctgggcatcgccgcctgccaggtgctgatcttcagagagatccacgccagcctggtgcccggccccagcgagagacccggcggcagaagaagaggcagaagaaccggcagccccggcgagggcgcccacgtgagcgccgccgtggccaagaccgtgagaatgaccctggtgatcgtggtggtgtacgtgctgtgctgggcccccttcttcctggtgcagctgtgggccgcctgggaccccgaggcccccctggagggcgcccccttcgtgctgctgatgctgctggccagcctgaacagctgcaccaacccctggatctacgccagcttcagcagcagcgtgagcagcgagctgagaagcctgctgtgctgcgccagaggcagaaccccccccagcctgggcccccaggacgagagctgcaccaccgccagcagcagcctggccaaggacaccagcagctag

SEQ ID NO: 73210 - DNA, 1116 bp, synthetic construct; identical to SEQ ID NO: 73209
  misc_feature 1..1116: note = Description of Artificial Sequence: Synthetic coding sequence
  source 1..1116: mol_type = other DNA

SEQ ID NO: 73211 - DNA, 930 bp, synthetic construct
  misc_feature 1..930: note = Description of Artificial Sequence: Synthetic coding sequence
  source 1..930: mol_type = other DNA
atgctgatggccagcaccaccagcgccgtgcccggccaccccagcctgcccagcctgcccagcaacagcagccaggagagacccctggacaccagagaccccctgctggccagagccgagctggccctgctgagcatcgtgttcgtggccgtggccctgagcaacggcctggtgctggccgccctggccagaagaggcagaagaggccactgggcccccatccacgtgttcatcggccacctgtgcctggccgacctggccgtggccctgttccaggtgctgccccagctggcctggaaggccaccgacagattcagaggccccgacgccctgtgcagagccgtgaagtacctgcagatggtgggcatgtacgccagcagctacatgatcctggccatgaccctggacagacacagagccatctgcagacccatgctggcctacagacacggcagcggcgcccactggaacagacccgtgctggtggcctgggccttcagcctgctgctgagcctgccccagctgttcatcttcgcccagagaaacgtggagggcggcagcggcgtgaccgactgctgggcctgcttcgccgagccctggggcagaagaacctacgtgacctggatcgccctgatggtgttcgtggcccccaccctgggcatcgccgcctgccaggtgctgatcttcagagagatccacgccagcctggtgcccggccccagcgagagacccggcggcagaagaagaggcagaagaaccggcagccccggcgagggcgcccacgtgagcgccgccgtggccaagaccgtgagaatgaccctggtgatcgtggtggtgtacgtgctgtgctgggcccccttcttcctggtgcagctgtgggccgcctgggaccccgaggcccccctggagggcggctgcagcagaggctag

SEQ ID NO: 73212 - DNA, 1005 bp, synthetic construct
  misc_feature 1..1005: note = Description of Artificial Sequence: Synthetic coding sequence
  source 1..1005: mol_type = other DNA
atgggcagaagaagcagcgacaccgaggaggagagcagaagcaagagaaagaagaagcacagaagaagaagcagcagcagcagcagcagcgacagcagaacctacagcagaaagaagggcggcagaaagagcagaagcaagagcagaagctggagcagagacctgcagcccagaagccacagctacgacagaagaagaagacacagaagcagcagcagcagcagctacggcagcagaagaaagagaagcagaagcagaagcagaggcagaggcaagagctacagagtgcagagaagcagaagcaagagcagaaccagaagaagcagaagcagacccagactgagaagccacagcagaagcagcgagagaagcagccacagaagaaccagaagcagaagcagagacagagagagaagaaagggcagagacaaggagaagagagagaaggagaaggacaagggcaaggacaaggagctgcacaacatcaagagaggcgagagcggcaacatcaaggccggcctggagcacctgccccccgccgagcaggccaaggccagactgcagctggtgctggaggccgccgccaaggccgacgaggccctgaaggccaaggagagaaacgaggaggaggccaagagaagaaaggaggaggaccaggccaccctggtggagcaggtgaagagagtgaaggagatcgaggccatcgagagcgacagcttcgtgcagcagaccttcagaagcagcaaggaggtgaagaagagcgtggagcccagcgaggtgaagcaggccaccagcaccagcggccccgccagcgccgtggccgacccccccagcaccgagaaggagatcgaccccaccagcatccccaccgccatcaagtaccaggacgacaacagcctggcccaccccaacctgttcatcgagaaggccgacgccgaggagaagtggttcaagagactgatcgccctgagacaggagagactgatgggcagccccgtggcctag

SEQ ID NO: 73213 - DNA, 831 bp, synthetic construct
  misc_feature 1..831: note = Description of Artificial Sequence: Synthetic coding sequence
  source 1..831: mol_type = other DNA
atgggcagaagaagcagcgacaccgaggaggagagcagaagcaagagaaagaagaagcacagaagaagaagcagcagcagcagcagcagcgacagcagaacctacagcagaaagaagggcggcagaaagagcagaagcaagagcagaagctggagcagagacctgcagcccagaagccacagctacgacagaagaagaagacacagaagcagcagcagcagcagctacggcagcagaagaaagagaagcagaagcagaagcagaggcagaggcaagagctacagagtgcagagaagcagaagcaagagcagaaccagaagagagagcggcaacatcaaggccggcctggagcacctgccccccgccgagcaggccaaggccagactgcagctggtgctggaggccgccgccaaggccgacgaggccctgaaggccaaggagagaaacgaggaggaggccaagagaagaaaggaggaggaccaggccaccctggtggagcaggtgaagagagtgaaggagatcgaggccatcgagagcgacagcttcgtgcagcagaccttcagaagcagcaaggaggtgaagaagagcgtggagcccagcgaggtgaagcaggccaccagcaccagcggccccgccagcgccgtggccgacccccccagcaccgagaaggagatcgaccccaccagcatccccaccgccatcaagtaccaggacgacaacagcctggcccaccccaacctgttcatcgagaaggccgacgccgaggagaagtggttcaagagactgatcgccctgagacaggagagactgatgggcagccccgtggcctag

SEQ ID NO: 73214 - DNA, 831 bp, synthetic construct; identical to SEQ ID NO: 73213
  misc_feature 1..831: note = Description of Artificial Sequence: Synthetic coding sequence
  source 1..831: mol_type = other DNA

SEQ ID NO: 73215 - DNA, 612 bp, synthetic construct
  misc_feature 1..612: note = Description of Artificial Sequence: Synthetic coding sequence
  source 1..612: mol_type = other DNA
atgggcagaagaagcagcgacaccgaggaggagagcagaagcaagagaaagaagaagcacagaagaagaagcagcagcagcagcagcagcgacagcagaacctacagcagaaagaagggcggcagaaagagcagaagcaagagcagaagctggagcagagacctgcagcccagaagccacagctacgacagaagaagaagacacagaagcagcagcagcagcagctacggcagcagaagaaagagaagcagaagcagaagcagaggcagaggcaagagctacagagtgcagagaagcagaagcaagagcagaaccagaagaagcagaagcagacccagactgagaagccacagcagaagcagcgagagaagcagccacagaagaaccagaagcagaagcagagacagagagagaagaaagggcagagacaaggagaagagagagaaggagaaggacaagggcaaggacaaggagctgcacaacatcaagagaggcgagagcggcaacatcaaggccggcctggagcacctgccccccgccgagcaggccaaggccagactgcagctggtgctggaggccgccgccaaggccgacgaggccctgaaggcctag

SEQ ID NO: 73216 - DNA, 585 bp, synthetic construct
  misc_feature 1..585: note = Description of Artificial Sequence: Synthetic coding sequence
  source 1..585: mol_type = other DNA
atgggcagaagaagcagcgacaccgaggaggagagcagaagcaagagaaagaagaagcacagaagaagaagcagcagcagcagcagcagcgacagcagaacctacagcagaaagaagggcggcagaaagagcagaagcaagagcagaagctggagcagagacctgcagcccagaagccacagctacgacagaagaagaagacacagaagcagcagcagcagcagctacggcagcagaagaaagagaagcagaagcagaagcagaggcagaggcaagagctacagagtgcagagaagcagaagcaagagcagaaccagaagaagcagaagcagacccagactgagaagccacagcagaagcagcgagagaagcagccacagaagaaccagaagcagaagcagagacagagagagaagaaagggcagagacaaggagaagagagagaaggagaaggacaagggcaaggacaaggagctgcacaacatcaagagaggcgagagcggcaacatcaaggccggcctggagcacctgccccccgccgagcaggccaaggccagactgcagctggtgctggaggccgcctag

SEQ ID NO: 73217 - DNA, 1005 bp, synthetic construct; identical to SEQ ID NO: 73212
  misc_feature 1..1005: note = Description of Artificial Sequence: Synthetic coding sequence
  source 1..1005: mol_type = other DNA

SEQ ID NO: 73218 - DNA, 498 bp, synthetic construct
  misc_feature 1..498: note = Description of Artificial Sequence: Synthetic coding sequence
  source 1..498: mol_type = other DNA
atgggcagaagaagcagcgacaccgaggaggagagcagaagcaagagaaagaagaagcacagaagaagaagcagcagcagcagcagcagcgacagcagaacctacagcagaaagaagggcggcagaaagagcagaagcaagagcagaagctggagcagagacctgcagcccagaagccacagctacgacagaagaagaagacacagaagcagcagcagcagcagctacggcagcagaagaaagagaagcagaagcagaagcagaggcagaggcaagagctacagagtgcagagaagcagaagcaagagcagaaccagaagaagcagaagcagacccagactgagaagccacagcagaagcagcgagagaagcagccacagaagaaccagaagcagaagcagagacagagagagaagaaagggcagagacaaggagaagagagagaaggagaaggacaagggcaaggacaaggagctgcacaacatcaagagaggctag

SEQ ID NO: 73219 - DNA, 948 bp, synthetic construct
  misc_feature 1..948: note = Description of Artificial Sequence: Synthetic coding sequence
  source 1..948: mol_type = other DNA
atgagaaacagaatggcccccgagaacccccagcccgaccccttcatcaacagaaactacagcaacatgaaggtgatccccccccaggaccccgccagccccagcttcaccctgctgagcaagctggagtgcagcggcaccgtgagcgcctactgcagcctgaacctgcccggcagcaccgacccccccaccagcgccagcagagtggccgccaccaccgccatcagaagaagacacaaggagagaaccagcttcacccaccagcagtacgaggagctggaggccctgttcagccagaccatgttccccgacagaaacctgcaggagaagctggccctgagactggacctgcccgagagcaccgtgaaggtgtggttcagaaacagaagattcaagctgaagaagcagcagcagcagcagagcgccaagcagagaaaccagatcctgcccagcaagaagaacgtgcccaccagccccagaaccagccccagcccctacgccttcagccccgtgatcagcgacttctacagcagcctgcccagccagcccctggaccccagcaactgggcctggaacagcaccttcaccgagagcagcaccagcgacttccagatgcaggacacccagtgggagagactggtggccagcgtgcccgccctgtacagcgacgcctacgacatcttccagatcatcgagctgtacaacctgcccgacgagaacgagatcagcagcagcagcttccactgcctgtaccagtacctgagccccaccaagtaccaggtgggcggccagggcagcagcctgagcatcttcgccggccccgccgtgggcctgagccccgcccagacctggcccaacatgaccagccaggccttcgaggcctacagcctgaccgacagcctggagttccagaagaccagcaacatggtggacctgggcttcctgtag

SEQ ID NO: 73220 - DNA, 4701 bp, synthetic construct
  misc_feature 1..4701: note = Description of Artificial Sequence: Synthetic coding sequence
  source 1..4701: mol_type = other DNA
atgaccgccgacaaggacaaggacaaggacaaggagaaggacagagacagagacagagacagagagagagagaagagagacaaggccagagagagcgagaacagcagacccagaagaagctgcaccctggagggcggcgccaagaactacgccgagagcgaccacagcgaggacgaggacaacgacaacaacagcgccaccgccgaggagagcaccaagaagaacaagaagaagccccccaagaagaagagcagatacgagagaaccgacaccggcgagatcaccagctacatcaccgaggacgacgtggtgtacagacccggcgactgcgtgtacatcgagagcagaagacccaacaccccctacttcatctgcagcatccaggacttcaagctggtgcacaacagccaggcctgctgcagaagccccacccccgccctgtgcgacccccccgcctgcagcctgcccgtggccagccagcccccccagcacctgagcgaggccggcagaggccccgtgggcagcaagagagaccacctgctgatgaacgtgaagtggtactacagacagagcgaggtgcccgacagcgtgtaccagcacctggtgcaggacagacacaacgagaacgacagcggcagagagctggtgatcaccgaccccgtgatcaagaacagagagctgttcatcagcgactacgtggacacctaccacgccgccgccctgagaggcaagtgcaacatcagccacttcagcgacatcttcgccgccagagagttcaaggccagagtggacagcttcttctacatcctgggctacaaccccgagaccagaagactgaacagcacccagggcgagatcagagtgggccccagccaccaggccaagctgcccgacctgcagcccttccccagccccgacggcgacaccgtgacccagcacgaggagctggtgtggatgcccggcgtgaacgactgcgacctgctgatgtacctgagagccgccagaagcatggccgccttcgccggcatgtgcgacggcggcagcaccgaggacggctgcgtggccgccagcagagacgacaccaccctgaacgccctgaacaccctgcacgagagcggctacgacgccggcaaggccctgcagagactggtgaagaagcccgtgcccaagctgatcgagaagtgctggaccgaggacgaggtgaagagattcgtgaagggcctgagacagtacggcaagaacttcttcagaatcagaaaggagctgctgcccaacaaggagaccggcgagctgatcaccttctactactactggaagaagacccccgaggccgccagcagcagagcccacagaagacacagaagacaggccgtgttcagaagaatcaagaccagaaccgccagcacccccgtgaacacccccagcagaccccccagcagcgagttcctggacctgagcagcgccagcgaggacgacttcgacagcgaggacagcgagcaggagctgaagggctacgcctgcagacactgcttcaccaccaccagcaaggactggcaccacggcggcagagagaacatcctgctgtgcaccgactgcagaatccacttcaagaagtacggcgagctgccccccatcgagaagcccgtggaccccccccccttcatgttcaagcccgtgaaggaggaggacgacggcctgagcggcaagcacagcatgagaaccagaagaagcagaggcagcatgagcaccctgagaagcggcagaaagaagcagcccgccagccccgacggcagaaccagccccatcaacgaggacatcagaagcagcggcagaaacagccccagcgccgccagcaccagcagcaacgacagcaaggccgagaccgtgaagaagagcgccaagaaggtgaaggaggaggccagcagccccctgaagagcaacaagagacagagagagaaggtggccagcgacaccgaggaggccgacagaaccagcagcaagaagaccaagacccaggagatcagcagacccaacagccccagcgagggcgagggcgagagcagcgacagcagaagcgtgaacgacgagggcagcagcgaccccaaggacatcgaccaggacaacagaagcaccagccccagcatccccagcccccaggacaacgagagcgacagcgacagcagcgcccagcagcagatgctgcaggcccagccccccgccctgcaggcccccaccggcgtgacccccgcccccagcagcgccccccccggcaccccccagctgcccacccccggccccacccccagcgccaccgccgtgcccccccagggcagccccaccgccagccaggcccccaaccagccccaggcccccaccgcccccgtgccccacacccacatccagcaggcccccgccctgcacccccagagaccccccagcccccacccccccccccaccccagcccccacccccccctgcagcccctgaccggcagcgccggccagcccagcgcccccagccacgcccagccccccctgcacggccagggcccccccggcccccacagcctgcaggccggccccctgctgcagcaccccggccccccccagcccttcggcctgcccccccaggccagccagggccaggcccccctgggcaccagccccgccgccgcctacccccacaccagcctgcagctgcccgccagccagagcgccctgcagagccagcagccccccagagagcagcccctgccccccgcccccctggccatgccccacatcaagcccccccccaccacccccatcccccagctgcccgccccccaggcccacaagcaccccccccacctgagcggccccagccccttcagcatgaacgccaacctgccccccccccccgccctgaagcccctgagcagcctgagcacccaccacccccccagcgcccaccccccccccctgcagctgatgccccagagccagcccctgcccagcagccccgcccagccccccggcctgacccagagccagaacctgccccccccccccgccagccacccccccaccggcctgcaccaggtggccccccagccccccttcgcccagcaccccttcgtgcccggcggccccccccccatcaccccccccacctgccccagcaccagcaccccccccgccggccccggcaccagcgcccagcccccctgcagcggcgccgccgccagcggcggcagcatcgccggcggcagcagctgccccctgcccaccgtgcagatcaaggaggaggccctggacgacgccgaggagcccgagagccccccccccccccccagaagccccagccccgagcccaccgtggtggacacccccagccacgccagccagagcgccagattctacaagcacctggacagaggctacaacagctgcgccagaaccgacctgtacttcatgcccctggccggcagcaagctggccaagaagagagaggaggccatcgagaaggccaagagagaggccgagcagaaggccagagaggagagagagagagagaaggagaaggagaaggagagagagagagagagagagagagagagagaggccgagagagccgccaaggccagcagcagcgcccacgagggcagactgagcgacccccagctgagcggccccggccacatgagacccagcttcgagcccccccccaccaccatcgccgccgtgcccccctacatcggccccgacacccccgccctgagaaccctgagcgagtacgccagaccccacgtgatgagccccaccaacagaaaccaccccttctacatgcccctgaaccccaccgaccccctgctggcctaccacatgcccggcctgtacaacgtggaccccaccatcagagagagagagctgagagagagagagatcagagagagagagatcagagagagagagctgagagagagaatgaagcccggcttcgaggtgaagccccccgagctggaccccctgcaccccgccgccaaccccatggagcacttcgccagacacagcgccctgaccatcccccccaccgccggcccccaccccttcgccagcttccaccccggcctgaaccccctggagagagagagactggccctggccggcccccagctgagacccgagatgagctaccccgacagactggccgccgagagaatccacgccgagagaatggccagcctgaccagcgaccccctggccagactgcagatgttcaacgtgaccccccaccaccaccagcacagccacatccacagccacctgcacctgcaccagcaggaccccctgcaccagggcagcgccggccccgtgcaccccctggtggaccccctgaccgccggcccccacctggccagattcccctacccccccggcaccctgcccaaccccctgctgggccagcccccccacgagcacgagatgctgagacaccccgtgttcggcaccccctaccccagagacctgcccggcgccatccccccccccatgagcgccgcccaccagctgcaggccatgcacgcccagagcgccgagctgcagagactggccatggagcagcagtggctgcacggccacccccacatgcacggcggccacctgcccagccaggaggactactacagcagactgaagaaggagggcgacaagcagctgtag

SEQ ID NO: 73221 - DNA, 3897 bp, synthetic construct
  misc_feature 1..3897: note = Description of Artificial Sequence: Synthetic coding sequence
  source 1..3897: mol_type = other DNA
atggacgaccccttcagcccctgcagaagactgaacagcacccagggcgagatcagagtgggccccagccaccaggccaagctgcccgacctgcagcccttccccagccccgacggcgacaccgtgacccagcacgaggagctggtgtggatgcccggcgtgaacgactgcgacctgctgatgtacctgagagccgccagaagcatggccgccttcgccggcatgtgcgacggcggcagcaccgaggacggctgcgtggccgccagcagagacgacaccaccctgaacgccctgaacaccctgcacgagagcggctacgacgccggcaaggccctgcagagactggtgaagaagcccgtgcccaagctgatcgagaagtgctggaccgaggacgaggtgaagagattcgtgaagggcctgagacagtacggcaagaacttcttcagaatcagaaaggagctgctgcccaacaaggagaccggcgagctgatcaccttctactactactggaagaagacccccgaggccgccagcagcagagcccacagaagacacagaagacaggccgtgttcagaagaatcaagaccagaaccgccagcacccccgtgaacacccccagcagaccccccagcagcgagttcctggacctgagcagcgccagcgaggacgacttcgacagcgaggacagcgagcaggagctgaagggctacgcctgcagacactgcttcaccaccaccagcaaggactggcaccacggcggcagagagaacatcctgctgtgcaccgactgcagaatccacttcaagaagtacggcgagctgccccccatcgagaagcccgtggaccccccccccttcatgttcaagcccgtgaaggaggaggacgacggcctgagcggcaagcacagcatgagaaccagaagaagcagaggcagcatgagcaccctgagaagcggcagaaagaagcagcccgccagccccgacggcagaaccagccccatcaacgaggacatcagaagcagcggcagaaacagccccagcgccgccagcaccagcagcaacgacagcaaggccgagaccgtgaagaagagcgccaagaaggtgaaggaggaggccagcagccccctgaagagcaacaagagacagagagagaaggtggccagcgacaccgaggaggccgacagaaccagcagcaagaagaccaagacccaggagatcagcagacccaacagccccagcgagggcgagggcgagagcagcgacagcagaagcgtgaacgacgagggcagcagcgaccccaaggacatcgaccaggacaacagaagcaccagccccagcatccccagcccccaggacaacgagagcgacagcgacagcagcgcccagcagcagatgctgcaggcccagccccccgccctgcaggcccccaccggcgtgacccccgcccccagcagcgccccccccggcaccccccagctgcccacccccggccccacccccagcgccaccgccgtgcccccccagggcagccccaccgccagccaggcccccaaccagccccaggcccccaccgcccccgtgccccacacccacatccagcaggcccccgccctgcacccccagagaccccccagcccccacccccccccccaccccagcccccacccccccctgcagcccctgaccggcagcgccggccagcccagcgcccccagccacgcccagccccccctgcacggccagggcccccccggcccccacagcctgcaggccggccccctgctgcagcaccccggccccccccagcccttcggcctgcccccccaggccagccagggccaggcccccctgggcaccagccccgccgccgcctacccccacaccagcctgcagctgcccgccagccagagcgccctgcagagccagcagccccccagagagcagcccctgccccccgcccccctggccatgccccacatcaagcccccccccaccacccccatcccccagctgcccgccccccaggcccacaagcaccccccccacctgagcggccccagccccttcagcatgaacgccaacctgccccccccccccgccctgaagcccctgagcagcctgagcacccaccacccccccagcgcccaccccccccccctgcagctgatgccccagagccagcccctgcccagcagccccgcccagccccccggcctgacccagagccagaacctgccccccccccccgccagccacccccccaccggcctgcaccaggtggccccccagccccccttcgcccagcaccccttcgtgcccggcggccccccccccatcaccccccccacctgccccagcaccagcaccccccccgccggccccggcaccagcgcccagcccccctgcagcggcgccgccgccagcggcggcagcatcgccggcggcagcagctgccccctgcccaccgtgcagatcaaggaggaggccctggacgacgccgaggagcccgagagccccccccccccccccagaagccccagccccgagcccaccgtggtggacacccccagccacgccagccagagcgccagattctacaagcacctggacagaggctacaacagctgcgccagaaccgacctgtacttcatgcccctggccggcagcaagctggccaagaagagagaggaggccatcgagaaggccaagagagaggccgagcagaaggccagagaggagagagagagagagaaggagaaggagaaggagagagagagagagagagagagagagagagaggccgagagagccgccaaggccagcagcagcgcccacgagggcagactgagcgacccccagctgagcggccccggccacatgagacccagcttcgagcccccccccaccaccatcgccgccgtgcccccctacatcggccccgacacccccgccctgagaaccctgagcgagtacgccagaccccacgtgatgagccccaccaacagaaaccaccccttctacatgcccctgaaccccaccgaccccctgctggcctaccacatgcccggcctgtacaacgtggaccccaccatcagagagagagagctgagagagagagagatcagagagagagagatcagagagagagagctgagagagagaatgaagcccggcttcgaggtgaagccccccgagctggaccccctgcaccccgccgccaaccccatggagcacttcgccagacacagcgccctgaccatcccccccaccgccggcccccaccccttcgccagcttccaccccggcctgaaccccctggagagagagagactggccctggccggcccccagctgagacccgagatgagctaccccgacagactggccgccgagagaatccacgccgagagaatggccagcctgaccagcgaccccctggccagactgcagatgttcaacgtgaccccccaccaccaccagcacagccacatccacagccacctgcacctgcaccagcaggaccccctgcaccagggcagcgccggccccgtgcaccccctggtggaccccctgaccgccggcccccacctggccagattcccctacccccccggcaccctgcccaaccccctgctgggccagcccccccacgagcacgagatgctgagacaccccgtgttcggcaccccctaccccagagacctgcccggcgccatccccccccccatgagcgccgcccaccagctgcaggccatgcacgcccagagcgccgagctgcagagactggccatggagcagcagtggctgcacggccacccccacatgcacggcggccacctgcccagccaggaggactactacagcagactgaagaaggagggcgacaagcagctgtag

SEQ ID NO: 73222 - DNA, 4701 bp, synthetic construct; identical to SEQ ID NO: 73220
  misc_feature 1..4701: note = Description of Artificial Sequence: Synthetic coding sequence
  source 1..4701: mol_type = other DNA

SEQ ID NO: 73223 - DNA, 3039 bp, synthetic construct
  misc_feature 1..3039: note = Description of Artificial Sequence: Synthetic coding sequence
  source 1..3039: mol_type = other DNA
atgttcaagcccgtgaaggaggaggacgacggcctgagcggcaagcacagcatgagaaccagaagaagcagaggcagcatgagcaccctgagaagcggcagaaagaagcagcccgccagccccgacggcagaaccagccccatcaacgaggacatcagaagcagcggcagaaacagccccagcgccgccagcaccagcagcaacgacagcaaggccgagaccgtgaagaagagcgccaagaaggtgaaggaggaggccagcagccccctgaagagcaacaagagacagagagagaaggtggccagcgacaccgaggaggccgacagaaccagcagcaagaagaccaagacccaggagatcagcagacccaacagccccagcgagggcgagggcgagagcagcgacagcagaagcgtgaacgacgagggcagcagcgaccccaaggacatcgaccaggacaacagaagcaccagccccagcatccccagcccccaggacaacgagagcgacagcgacagcagcgcccagcagcagatgctgcaggcccagccccccgccctgcaggcccccaccggcgtgacccccgcccccagcagcgccccccccggcaccccccagctgcccacccccggccccacccccagcgccaccgccgtgcccccccagggcagccccaccgccagccaggcccccaaccagccccaggcccccaccgcccccgtgccccacacccacatccagcaggcccccgccctgcacccccagagaccccccagcccccacccccccccccaccccagcccccacccccccctgcagcccctgaccggcagcgccggccagcccagcgcccccagccacgcccagccccccctgcacggccagggcccccccggcccccacagcctgcaggccggccccctgctgcagcaccccggccccccccagcccttcggcctgcccccccaggccagccagggccaggcccccctgggcaccagccccgccgccgcctacccccacaccagcctgcagctgcccgccagccagagcgccctgcagagccagcagccccccagagagcagcccctgccccccgcccccctggccatgccccacatcaagcccccccccaccacccccatcccccagctgcccgccccccaggcccacaagcaccccccccacctgagcggccccagccccttcagcatgaacgccaacctgccccccccccccgccctgaagcccctgagcagcctgagcacccaccacccccccagcgcccaccccccccccctgcagctgatgccccagagccagcccctgcccagcagccccgcccagccccccggcctgacccagagccagaacctgccccccccccccgccagccacccccccaccggcctgcaccaggtggccccccagccccccttcgcccagcaccccttcgtgcccggcggccccccccccatcaccccccccacctgccccagcaccagcaccccccccgccggccccggcaccagcgcccagcccccctgcagcggcgccgccgccagcggcggcagcatcgccggcggcagcagctgccccctgcccaccgtgcagatcaaggaggaggccctggacgacgccgaggagcccgagagccccccccccccccccagaagccccagccccgagcccaccgtggtggacacccccagccacgccagccagagcgccagattctacaagcacctggacagaggctacaacagctgcgccagaaccgacctgtacttcatgcccctggccggcagcaagctggccaagaagagagaggaggccatcgagaaggccaagagagaggccgagcagaaggccagagaggagagagagagagagaaggagaaggagaaggagagagagagagagagagagagagagagagaggccgagagagccgccaaggccagcagcagcgcccacgagggcagactgagcgacccccagctgagcggccccggccacatgagacccagcttcgagcccccccccaccaccatcgccgccgtgcccccctacatcggccccgacacccccgccctgagaaccctgagcgagtacgccagaccccacgtgatgagccccaccaacagaaaccaccccttctacatgcccctgaaccccaccgaccccctgctggcctaccacatgcccggcctgtacaacgtggaccccaccatcagagagagagagctgagagagagagagatcagagagagagagatcagagagagagagctgagagagagaatgaagcccggcttcgaggtgaagccccccgagctggaccccctgcaccccgccgccaaccccatggagcacttcgccagacacagcgccctgaccatcccccccaccgccggcccccaccccttcgccagcttccaccccggcctgaaccccctggagagagagagactggccctggccggcccccagctgagacccgagatgagctaccccgacagactggccgccgagagaatccacgccgagagaatggccagcctgaccagcgaccccctggccagactgcagatgttcaacgtgaccccccaccaccaccagcacagccacatccacagccacctgcacctgcaccagcaggaccccctgcaccagggcagcgccggccccgtgcaccccctggtggaccccctgaccgccggcccccacctggccagattcccctacccccccggcaccctgcccaaccccctgctgggccagcccccccacgagcacgagatgctgagacaccccgtgttcggcaccccctaccccagagacctgcccggcgccatccccccccccatgagcgccgcccaccagctgcaggccatgcacgcccagagcgccgagctgcagagactggccatggagcagcagtggctgcacggccacccccacatgcacggcggccacctgcccagccaggaggactactacagcagactgaagaaggagggcgacaagcagctgtag

SEQ ID NO: 73224 - DNA, 1953 bp, synthetic construct
  misc_feature 1..1953: note = Description of Artificial Sequence: Synthetic coding sequence
  source 1..1953: mol_type = other DNA
atggccagcggcgagcacagccccggcagcggcgccgccagaagacccctgcacagcgcccaggccgtggacgtggccagcgccagcaacttcagagccttcgagctgctgcacctgcacctggacctgagagccgagttcggcccccccggccccggcgccggcagcagaggcctgagcggcaccgccgtgctggacctgagatgcctggagcccgagggcgccgccgagctgagactggacagccacccctgcctggaggtgaccgccgccgccctgagaagagagagacccggcagcgaggagccccccgccgagcccgtgagcttctacacccagcccttcagccactacggccaggccctgtgcgtgagcttcccccagccctgcagagccgccgagagactgcaggtgctgctgacctacagagtgggcgagggccccggcgtgtgctggctggcccccgagcagaccgccggcaagaagaagcccttcgtgtacacccagggccaggccgtgctgaacagagccttcttcccctgcttcgacacccccgccgtgaagtacaagtacagcgccctgatcgaggtgcccgacggcttcaccgccgtgatgagcgccagcacctgggagaagagaggccccaacaagttcttcttccagatgtgccagcccatccccagctacctgatcgccctggccatcggcgacctggtgagcgccgaggtgggccccagaagcagagtgtgggccgagccctgcctgatcgacgccgccaaggaggagtacaacggcgtgatcgaggagttcctggccaccggcgagaagctgttcggcccctacgtgtggggcagatacgacctgctgttcatgccccccagcttccccttcggcggcatggagaacccctgcctgaccttcgtgaccccctgcctgctggccggcgacagaagcctggccgacgtgatcatccacgagatcagccacagctggttcggcaacctggtgaccaacgccaactggggcgagttctggctgaacgagggcttcaccatgtacgcccagagaagaatcagcaccatcctgttcggcgccgcctacacctgcctggaggccgccaccggcagagccctgctgagacagcacatggacatcaccggcgaggagaaccccctgaacaagctgagagtgaagatcgagcccggcgtggaccccgacgacacctacaacgagaccccctacgagaagggcttctgcttcgtgagctacctggcccacctggtgggcgaccaggaccagttcgacagcttcctgaaggcctacgtgcacgagttcaagttcagaagcatcctggccgacgacttcctggacttctacctggagtacttccccgagctgaagaagaagagagtggacatcatccccggcttcgagttcgacagatggctgaacacccccggctggcccccctacctgcccgacctgagccccggcgacagcctgatgaagcccgccgaggagctggcccagctgtgggccgccgaggagctggacatgaaggccatcgaggccgtggccatcagcccctggaagacctaccagctggtgtacttcctggacaagatcctgcagaagagccccctgccccccggcaacgtgaagaagctgggcgacacctaccccagcatcagcaacgccagaaacgccgagctgagactgagatggggccagatcgtgctgaagaacgaccaccaggaggacttctggaaggtgaaggagttcctgcacaaccagggcaagcagaagtacaccctgcccctgtaccacgccatgatgggcggcagcgaggtggcccagaccctggccaaggagaccttcgccagcaccgccagccagctgcacagcaacgtggtgaactacgtgcagcagatcgtggcccccaagggcagctag

SEQ ID NO: 73225 - DNA, 1836 bp, synthetic construct
  misc_feature 1..1836: note = Description of Artificial Sequence: Synthetic coding sequence
  source 1..1836: mol_type = other DNA
atggccagcggcgagcacagccccggcagcggcgccgccagaagacccctgcacagcgcccaggccgtggacgtggccagcgccagcaacttcagagccttcgagctgctgcacctgcacctggacctgagagccgagttcggcccccccggccccggcgccggcagcagaggcctgagcggcaccgccgtgctggacctgagatgcctggagcccgagggcgccgccgagctgagactggacagccacccctgcctggaggtgaccgccgccgccctgagaagagagagacccggcagcgaggagccccccgccgagcccgtgagcttctacacccagcccttcagccactacggccaggccctgtgcgtgagcttcccccagccctgcagagccgccgagagactgcaggtgctgctgacctacagagtgggcgagggccccggcgtgtgctggctggcccccgagcagaccgccggcaagaagaagcccttcgtgtacacccagggccaggccgtgctgaacagagccttcttcccctgcttcgacacccccgccgtgaagtacaagtacagcgccctgatcgaggtgcccgacggcttcaccgccgtgatgagcgccagcacctgggagaagagaggccccaacaagttcttcttccagatgtgccagcccatccccagctacctgatcgccctggccatcggcgacctggtgagcgccgaggtgggccccagatacgacctgctgttcatgccccccagcttccccttcggcggcatggagaacccctgcctgaccttcgtgaccccctgcctgctggccggcgacagaagcctggccgacgtgatcatccacgagatcagccacagctggttcggcaacctggtgaccaacgccaactggggcgagttctggctgaacgagggcttcaccatgtacgcccagagaagaatcagcaccatcctgttcggcgccgcctacacctgcctggaggccgccaccggcagagccctgctgagacagcacatggacatcaccggcgaggagaaccccctgaacaagctgagagtgaagatcgagcccggcgtggaccccgacgacacctacaacgagaccccctacgagaagggcttctgcttcgtgagctacctggcccacctggtgggcgaccaggaccagttcgacagcttcctgaaggcctacgtgcacgagttcaagttcagaagcatcctggccgacgacttcctggacttctacctggagtacttccccgagctgaagaagaagagagtggacatcatccccggcttcgagttcgacagatggctgaacacccccggctggcccccctacctgcccgacctgagccccggcgacagcctgatgaagcccgccgaggagctggcccagctgtgggccgccgaggagctggacatgaaggccatcgaggccgtggccatcagcccctggaagacctaccagctggtgtacttcctggacaagatcctgcagaagagccccctgccccccggcaacgtgaagaagctgggcgacacctaccccagcatcagcaacgccagaaacgccgagctgagactgagatggggccagatcgtgctgaagaacgaccaccaggaggacttctggaaggtgaaggagttcctgcacaaccagggcaagcagaagtacaccctgcccctgtaccacgccatgatgggcggcagcgaggtggcccagaccctggccaaggagaccttcgccagcaccgccagccagctgcacagcaacgtggtgaactacgtgcagcagatcgtggcccccaagggcagctag

SEQ ID NO: 73226 - DNA, 1035 bp, synthetic construct
  misc_feature 1..1035: note = Description of Artificial Sequence: Synthetic coding sequence
  source 1..1035: mol_type = other DNA
atgacctgctgcagctgcaccagcctgagcgccctgctggacttctgggccgaggtgtgctggctggcccccgagcagaccgccggcaagaagaagcccttcgtgtacacccagggccaggccgtgctgaacagagccttcttcccctgcttcgacacccccgccgtgaagtacaagtacagcgccctgatcgaggtgcccgacggcttcaccgccgtgatgagcgccagcacctgggagaagagaggccccaacaagttcttcttccagatgtgccagcccatccccagctacctgatcgccctggccatcggcgacctggtgagcgccgaggtgggccccagaagcagagtgtgggccgagccctgcctgatcgacgccgccaaggaggagtacaacggcgtgatcgaggagttcctggccaccggcgagaagctgttcggcccctacgtgtggggcagatacgacctgctgttcatgccccccagcttccccttcggcggcatggagaacccctgcctgaccttcgtgaccccctgcctgctggccggcgacagaagcctggccgacgtgatcatccacgagatcagccacagctggttcggcaacctggtgaccaacgccaactggggcgagttctggctgaacgagggcttcaccatgtacgcccagagaagaatcagcaccatcctgttcggcgccgcctacacctgcctggaggccgccaccggcagagccctgctgagacagcacatggacatcaccggcgaggagaaccccctgaacaagctgagagtgaagatcgagcccggcgtggaccccgacgacacctacaacgagaccccctacgagaagggcttctgcttcgtgagctacctggcccacctggtgggcgaccaggaccagttcgacagcttcctgaaggcctacgtgcacgagttcaagttcagaagcatcctggccgacgacttcctggacttctacctggagtacttccccgagctgaagaagaagagagtggacatcatcccctag

SEQ ID NO: 73227 - DNA, 507 bp, synthetic construct
  misc_feature 1..507: note = Description of Artificial Sequence: Synthetic coding sequence
  source 1..507: mol_type = other DNA
ctgatcgacgccgccaaggaggagtacaacggcgtgatcgaggagttcctggccaccggcgagaagctgttcggcccctacgtgtggggcagatacgacctgctgttcatgccccccagcttccccttcggcggcatggagaacccctgcctgaccttcgtgaccccctgcctgctggccggcgacagaagcctggccgacgtgatcatccacgagatcagccacagctggttcggcaacctggtgaccaacgccaactggggcgagttctggctgaacgagggcttcaccatgtacgcccagagaagaatcagcaccatcctgttcggcgtggaccccgacgacacctacaacgagaccccctacgagaagggcttctgcttcgtgagctacctggcccacctggtgggcgaccaggaccagttcgacagcttcctgaaggcctacgtgcacgagttcaagttcagaagcatcctggccgacgacttcctggacttctacctgtag

SEQ ID NO: 73228 - DNA, 1485 bp, synthetic construct
  misc_feature 1..1485: note = Description of Artificial Sequence: Synthetic coding sequence
  source 1..1485: mol_type = other DNA
atgagcgccaccagaagcgcctacatggaggaggagggcgtgttccacttccacatggagcaccccgtgcccgcctacctggtggccctggtggccggcgacctgaagcccgccgacatcggccccagaagcagagtgtgggccgagccctgcctgctgcccaccgccaccagcaagctgagcggcgccgtggagcagtggctgagcgccgccgagagactgtacggcccctacatgtggggcagatacgacatcgtgttcctgccccccagcttccccatcgtggccatggagaacccctgcctgaccttcatcatcagcagcatcctggagagcgacgagttcctggtgatcgacgtgatccacgaggtggcccacagctggttcggcaacgccgtgaccaacgccacctgggaggagatgtggctgagcgagggcctggccacctacgcccagagaagaatcaccaccgagacctacggcgccgccttcacctgcctggagaccgccttcagactggacgccctgcacagacagatgaagctgctgggcgaggacagccccgtgagcaagctgcaggtgaagctggagcccggcgtgaaccccagccacctgatgaacctgttcacctacgagaagggctactgcttcgtgtactacctgagccagctgtgcggcgacccccagagattcgacgacttcctgagagcctacgtggagaagtacaagttcaccagcgtggtggcccaggacctgctggacagcttcctgagcttcttccccgagctgaaggagcagagcgtggactgcagagccggcctggagttcgagagatggctgaacgccaccggcccccccctggccgagcccgacctgagccagggcagcagcctgaccagacccgtggaggccctgttccagctgtggaccgccgagcccctggaccaggccgccgccagcgccagcgccatcgacatcagcaagtggagaaccttccagaccgccctgttcctggacagactgctggacggcagccccctgccccaggaggtggtgatgagcctgagcaagtgctacagcagcctgctggacagcatgaacgccgagatcagaatcagatggctgcagatcgtggtgagaaacgactactaccccgacctgcacagagtgagaagattcctggagagccagatgagcagaatgtacaccatccccctgtacgaggacctgtgcaccggcgccctgaagagcttcgccctggaggtgttctaccagacccagggcagactgcaccccaacctgagaagagccatccagcagatcctgagccagggcctgggcagcagcaccgagcccgccagcgagcccagcaccgagctgggcaaggccgaggccgacaccgacagcgacgcccaggccctgctgctgggcgacgaggcccccagcagcgccatcagcctgagagacgtgaacgtgagcgcctag

SEQ ID NO: 73229 - DNA, 1236 bp, synthetic construct
  misc_feature 1..1236: note = Description of Artificial Sequence: Synthetic coding sequence
  source 1..1236: mol_type = other DNA
atggaggtgaacccccccaagcaggagcacctgctggccctgaaggtgatgagactgaccaagcccaccctgttcaccaacatccccgtgacctgcgaggagaaggacctgcccggcgacctgttcaaccagctgatgagagacgaccccagcaccgtgaacggcgccgaggtgctgatgctgggcgagatgctgaccctgccccagaacttcggcaacatcttcctgggcgagaccttcagcagctacatcagcgtgcacaacgacagcaaccaggtggtgaaggacatcctggtgaaggccgacctgcagaccagcagccagagactgaacctgagcgccagcaacgccgccgtggccgagctgaagcccgactgctgcatcgacgacgtgatccaccacgaggtgaaggagatcggcacccacatcctggtgtgcgccgtgagctacaccacccaggccggcgagaagatgtacttcagaaagttcttcaagttccaggtgctgaagcccctggacgtgaagaccaagttctacaacgccgagaccgacgaggtgttcctggaggcccagatccagaacatgaccaccagccccatgttcatggagaaggtgagcctggagcccagcatcatgtacaacgtgaccgagctgaacagcgtgagccaggccggcgagtgcgtgagcaccttcggcagcagagcctacctgcagcccatggacaccagacagtacctgtactgcctgaagcccaagaacgagttcgccgagaaggccggcatcatcaagggcgtgaccgtgatcggcaagctggacatcgtgtggaagaccaacctgggcgagagaggcagactgcagaccagccagctgcagagaatggcccccggctacggcgacgtgagactgagcctggaggccatccccgacaccgtgaacctggaggagcccttccacatcacctgcaagatcaccaactgcagcgagagaaccatggacctggtgctggagatgtgcaacaccaacagcatccactggtgcggcatcagcggcagacagctgggcaagctgcaccccagcagcagcctgtgcctggccctgaccctgctgagcagcgtgcagggcctgcagagcatcagcggcctgagactgaccgacaccttcctgaagagaacctacgagtacgacgacatcgcccaggtgtgcgtggtgagcagcgccatcaaggtggagagctag

SEQ ID NO: 73230 - DNA, 1365 bp, synthetic construct
  misc_feature 1..1365: note = Description of Artificial Sequence: Synthetic coding sequence
  source 1..1365: mol_type = other DNA
atgcacgtgggccacctgagaagcaccatcatcggcgagagcatcagcagactgttcgagttcgccggctacgacgtgctgagactgaaccacgtgggcgactggggcacccagttcggcatgctgatcgcccacctgcaggacaagttccccgactacctgaccgtgagcccccccatcggcgacctgcaggtgttctacaaggagagcaagaagagattcgacaccgaggaggagttcaagaagagagcctaccagtgcgtggtgctgctgcagggcaagaaccccgacatcaccaaggcctggaagctgatctgcgacgtgagcagacaggagctgaacaagatctacgacgccctggacgtgagcctgatcgagagaggcgagagcttctaccaggacagaatgaacgacatcgtgaaggagttcgaggacagaggcttcgtgcaggtggacgacggcagaaagatcgtgttcgtgcccggctgcagcatccccctgaccatcgtgaagagcgacggcggctacacctacgacaccagcgacctggccgccatcaagcagagactgttcgaggagaaggccgacatgatcatctacgtggtggacaacggccagagcgtgcacttccagaccatcttcgccgccgcccagatgatcggctggtacgaccccaaggtgaccagagtgttccacgccggcttcggcgtggtgctgggcgaggacaagaagaagttcaagaccagaagcggcgagaccgtgagactgatggacctgctgggcgagggcctgaagagaagcatggacaagctgaaggagaaggagagagacaaggtgctgaccgccgaggagctgaacgccgcccagaccagcgtggcctacggctgcatcaagtacgccgacctgagccacaacagactgaacgactacatcttcagcttcgacaagatgctggacgacagaggcaacaccgccgcctacctgctgtacgccttcaccagaatcagaagcatcgccagactggccaacatcgacgaggagatgctgcagaaggccgccagagagaccaagatcctgctggaccacgagaaggagtggaagctgggcagatgcatcctgagattccccgagatcctgcagaagatcctggacgacctgttcctgcacaccctgtgcgactacatctacgagctggccaccgccttcaccgagttctacgacagctgctactgcgtggagaaggacagacagaccggcaagatcctgaaggtgaacatgtggagaatgctgctgtgcgaggccgtggccgccgtgatggccaagggcttcgacatcctgggcatcaagcccgtgcagagaatgtag

SEQ ID NO: 73231 - DNA, 618 bp, synthetic construct
  misc_feature 1..618: note = Description of Artificial Sequence: Synthetic coding sequence
  source 1..618: mol_type = other DNA
ttccagagcgtggagagcagcaccagaaagctggaccacatcaacatctgcagcagcaacttccccaagagaagcttcgccctggtgacccaggccggcgtgcagtggcacaacctggacagcctgcagagccccccccccggcttcaagagattcccctgcctgagcctgcccagcagctgggactgcagagaggtggccgacttccagctgagcgtggacagcctgctggagaaggacaacgaccacagcagacccgacatccaggtgcaggccaagagactggccgagaagctgagatgcgacaccgtggtgagcgagatcagcaccggccagagaaccgtgaacttcaagatcaacagagagctgctgaccaagaccgtgctgcagcaggtgatcgaggacggcagcaagtacggcctgaagagcgagctgttcagcggcctgccccagaagaagatcgtggtggagttcagcagccccaacgtggccaagaagttccacgtgggccacctgagaagcaccatcatcggcaacttcatcgccaacctgaaggaggccctgggccaccaggtgatcagaatcaactacctgggcgactggggcatgcagttctag

SEQ ID NO: 73232 - DNA, 1737 bp, synthetic construct
  misc_feature 1..1737: note = Description of Artificial Sequence: Synthetic coding sequence
  source 1..1737: mol_type = other DNA
atggcctgcggcttcagaagagccatcgcctgccagctgagcagagtgctgaacctgccccccgagaacctgatcaccagcatcagcgccgtgcccatcagccagaaggaggaggtggccgacttccagctgagcgtggacagcctgctggagaaggacaacgaccacagcagacccgacatccaggtgcaggccaagagactggccgagaagctgagatgcgacaccgtggtgagcgagatcagcaccggccagagaaccgtgaacttcaagatcaacagagagctgctgaccaagaccgtgctgcagcaggtgatcgaggacggcagcaagtacggcctgaagagcgagctgttcagcggcctgccccagaagaagatcgtggtggagttcagcagccccaacgtggccaagaagttccacgtgggccacctgagaagcaccatcatcggcaacttcatcgccaacctgaaggaggccctgggccaccaggtgatcagaatcaactacctgggcgactggggcatgcagttcggcctgctgggcaccggcttccagctgttcggctacgaggagaagctgcagagcaaccccctgcagcacctgttcgaggtgtacgtgcaggtgaacaaggaggccgccgacgacaagagcgtggccaaggccgcccaggagttcttccagagactggagctgggcgacgtgcaggccctgagcctgtggcagaagttcagagacctgagcatcgaggagtacatcagagtgtacaagagactgggcgtgtacttcgacgagtacagcggcgagagcttctacagagagaagagccaggaggtgctgaagctgctggagagcaagggcctgctgctgaagaccatcaagggcaccgccgtggtggacctgagcggcaacggcgaccccagcagcatctgcaccgtgatgagaagcgacggcaccagcctgtacgccaccagagacctggccgccgccatcgacagaatggacaagtacaacttcgacaccatgatctacgtgaccgacaagggccagaagaagcacttccagcaggtgttccagatgctgaagatcatgggctacgactgggccgagagatgccagcacgtgcccttcggcgtggtgcagggcatgaagaccagaagaggcgacgtgaccttcctggaggacgtgctgaacgagatccagctgagaatgctgcagaacatggccagcatcaagaccaccaaggagctgaagaacccccaggagaccgccgagagagtgggcctggccgccctgatcatccaggacttcaagggcctgctgctgagcgactacaagttcagctgggacagagtgttccagagcagaggcgacaccggcgtgttcctgcagtacacccacgccagactgcacagcctggaggagaccttcggctgcggctacctgaacgacttcaacaccgcctgcctgcaggagccccagagcgtgagcatcctgcagcacctgctgagattcgacgaggtgctgtacaagagcagccaggacttccagcccagacacatcgtgagctacctgctgaccctgagccacctggccgccgtggcccacaagaccctgcagatcaaggacagcccccccgaggtggccggcgccagactgcacctgttcaaggccgtgagaagcgtgctggccaacggcatgaagctgctgggcatcacccccgtgtgcagaatgtag

SEQ ID NO: 73233 - DNA, 621 bp, synthetic construct
  misc_feature 1..621: note = Description of Artificial Sequence: Synthetic coding sequence
  source 1..621: mol_type = other DNA
tgattccagagcgtggagagcagcaccagaaagctggaccacatcaacatctgcagcagcaacttccccaagagaagcttcgccctggtgacccaggccggcgtgcagtggcacaacctggacagcctgcagagccccccccccggcttcaagagattcccctgcctgagcctgcccagcagctgggactgcagagaggtggccgacttccagctgagcgtggacagcctgctggagaaggacaacgaccacagcagacccgacatccaggtgcaggccaagagactggccgagaagctgagatgcgacaccgtggtgagcgagatcagcaccggccagagaaccgtgaacttcaagatcaacagagagctgctgaccaagaccgtgctgcagcaggtgatcgaggacggcagcaagtacggcctgaagagcgagctgttcagcggcctgccccagaagaagatcgtggtggagttcagcagccccaacgtggccaagaagttccacgtgggccacctgagaagcaccatcatcggcaacttcatcgccaacctgaaggaggccctgggccaccaggtgatcagaatcaactacctgggcgactggggcatgcagttctag

SEQ ID NO: 73234 - DNA, 1482 bp, synthetic construct
  misc_feature 1..1482: note = Description of Artificial Sequence: Synthetic coding sequence
  source 1..1482: mol_type = other DNA
atgagcgtggacatgaacagccagggcagcgacagcaacgaggaggactacgaccccaactgcgaggaggaggaggaggaggaggaggacgaccccggcgacatcgaggactactacgtgggcgtggccagcgacgtggagcagcagggcgccgacgccttcgaccccgaggagtaccagttcacctgcctgacctacaaggagagcgagggcgccctgaacgagcacatgaccagcctggccagcgtgctgaaggtgagccacagcgtggccaagctgatcctggtgaacttccactggcaggtgagcgagatcctggacagatacaagagcaacagcgcccagctgctggtggaggccagagtgcagcccaaccccagcaagcacgtgcccaccagccaccccccccaccactgcgccgtgtgcatgcagttcgtgagaaaggagaacctgctgagcctggcctgccagcaccagttctgcagaagctgctgggagcagcactgcagcgtgctggtgaaggacggcgtgggcgtgggcgtgagctgcatggcccaggactgccccctgagaacccccgaggacttcgtgttccccctgctgcccaacgaggagctgagagagaagtacagaagatacctgttcagagactacgtggagagccactaccagctgcagctgtgccccggcgccgactgccccatggtgatcagagtgcaggagcccagagccagaagagtgcagtgcaacagatgcaacgaggtgttctgcttcaagtgcagacagatgtaccacgcccccaccgactgcgccaccatcagaaagtggctgaccaagtgcgccgacgacagcgagaccgccaactacatcagcgcccacaccaaggactgccccaagtgcaacatctgcatcgagaagaacggcggctgcaaccacatgcagtgcagcaagtgcaagcacgacttctgctggatgtgcctgggcgactggaagacccacggcagcgagtactacgagtgcagcagatacaaggagaaccccgacatcgtgaaccagagccagcaggcccaggccagagaggccctgaagaagtacctgttctacttcgagagatgggagaaccacaacaagagcctgcagctggaggcccagacctaccagagaatccacgagaagatccaggagagagtgatgaacaacctgggcacctggatcgactggcagtacctgcagaacgccgccaagctgctggccaagtgcagatacaccctgcagtacacctacccctacgcctactacatggagagcggccccagaaagaagctgttcgagtaccagcaggcccagctggaggccgagatcgagaacctgagctggaaggtggagagagccgacagctacgacagaggcgacctggagaaccagatgcacatcgccgagcagagaagaagaaccctgctgaaggacttccacgacacctag

SEQ ID NO: 73235 - DNA, 954 bp, synthetic construct
  misc_feature 1..954: note = Description of Artificial Sequence: Synthetic coding sequence
  source 1..954: mol_type = other DNA
ggcatcaccggcgtgagctgcatggcccaggactgccccctgagaacccccgaggacttcgtgttccccctgctgcccaacgaggagctgagagagaagtacagaagatacctgttcagagactacgtggagagccactaccagctgcagctgtgccccggcgccgactgccccatggtgatcagagtgcaggagcccagagccagaagagtgcagtgcaacagatgcaacgaggtgttctgcttcaagtgcagacagatgtaccacgcccccaccgactgcgccaccatcagaaagtggctgaccaagtgcgccgacgacagcgagaccgccaactacatcagcgcccacaccaaggactgccccaagtgcaacatctgcatcgagaagaacggcggctgcaaccacatgcagtgcagcaagtgcaagcacgacttctgctggatgtgcctgggcgactggaagacccacggcagcgagtactacgagtgcagcagatacaaggagaaccccgacatcgtgaaccagagccagcaggcccaggccagagaggccctgaagaagtacctgttctacttcgagagatgggagaaccacaacaagagcctgcagctggaggcccagacctaccagagaatccacgagaagatccaggagagagtgatgaacaacctgggcacctggatcgactggcagtacctgcagaacgccgccaagctgctggccaagtgcagatacaccctgcagtacacctacccctacgcctactacatggagagcggccccagaaagaagctgttcgagtaccagcaggcccagctggaggccgagatcgagaacctgagctggaaggtggagagagccgacagctacgacagaggcgacctggagaaccagatgcacatcgccgagcagagaagaagaaccctgctgaaggacttccacgacacctag

SEQ ID NO: 73236 - DNA, 1233 bp, synthetic construct
  misc_feature 1..1233: note = Description of Artificial Sequence: Synthetic coding sequence
  source 1..1233: mol_type = other DNA
agcgtggacatgaacagccagggcagcgacagcaacgaggaggactacgaccccaactgcgaggaggaggaggaggaggaggaggacgaccccggcgacatcgaggactactacgtgggcgtggccagcgacgtggagcagcagggcgccgacgccttcgaccccgaggagtaccagttcacctgcctgacctacaaggagagcgagggcgccctgaacgagcacatgaccagcctggccagcgtgctgaaggtgagccacagcgtggccaagctgatcctggtgaacttccactggcaggtgagcgagatcctggacagatacaagagcaacagcgcccagctgctggtggaggccagagtgcagcccaaccccagcaagcacgtgcccaccagccaccccccccaccactgcgccgtgtgcatgcagttcgtgagaaaggagaacctgctgagcctggcctgccagcaccagttctgcagaagctgctgggagcagcactgcagcgtgctggtgaaggacggcgtgggcgtgggcgtgagctgcatggcccaggactgccccctgagaacccccgaggacttcgtgttccccctgctgcccaacgaggagctgagagagaagtacagaagatacctgttcagagactacgtggagagccactaccagctgcagctgtgccccggcgccgactgccccatggtgatcagagtgcaggagcccagagccagaagagtgcagtgcaacagatgcaacgaggtgttctgcttcaagtgcagacagatgtaccacgcccccaccgactgcgccaccatcagaaagtggctgaccaagtgcgccgacgacagcgagaccgccaactacatcagcgcccacaccaaggactgccccaagtgcaacatctgcatcgagaagaacggcggctgcaaccacatgcagtgcagcaagtgcaagcacgacttctgctggatgtgcctgggcgactggaagacccacggcagcgagtactacgagtgcagcagatacaaggagaaccccgacatcgtgaaccagagccagcaggcccaggccagagaggccctgaagaagtacctgttctacttcgagagactggagaacctgagctggaaggtggagagagccgacagctacgacagaggcgacctggagaaccagatgcacatcgccgagcagagaagaagaaccctgctgaaggacttccacgacacctag

SEQ ID NO: 73237 - DNA, 1482 bp, synthetic construct; identical to SEQ ID NO: 73234
  misc_feature 1..1482: note = Description of Artificial Sequence: Synthetic coding sequence
  source 1..1482: mol_type = other DNA

SEQ ID NO: 73238 - DNA, 1584 bp, synthetic construct
  misc_feature 1..1584: note = Description of Artificial Sequence: Synthetic coding sequence
  source 1..1584: mol_type = other DNA
ctgagaagagccgccagcggccccctggcccccagcctgcccccccccagaccccccagaagacaccagcccagcaacgccaacagaagaagctggggcggcgccgccgccagaggcgccggcgccagacccgccagcggccaccagcccgagcccgagagagagcccggccccagaagacccagacccctgcccgccagcgccagcgtgagaagagcccccgccagaagagccatggacagcgacgagggctacaactacgagttcgtgaacgaggtgatccagaaccccgccaccatcaccagaatcctgctgagccacttcaactgggacaaggagaagctgatggagagatacttcgacggcaacctggagaagctgttcgccgagtgccacgtgatcaaccccagcaagaagagcagaaccagacagatgaacaccagaagcagcgcccaggacatgccctgccagatctgctacctgaactaccccaacagctacttcaccggcctggagtgcggccacaagttctgcatgcagtgctggagcgagtacctgaccaccaagatcatggaggagggcatgggccagaccatcagctgccccgcccacggctgcgacatcctggtggacgacaacaccgtgatgagactgatcaccgacagcaaggtgaagctgaagtaccagcacctgatcaccaacagcttcgtggagtgcaacagactgctgaagtggtgccccgcccccgactgccaccacgtggtgaaggtgcagtaccccgacgccaagcccgtgagatgcaagtgcggcagacagttctgcttcaactgcggcgagaactggcacgaccccgtgaagtgcaagtggctgaagaagtggatcaagaagtgcgacgacgacagcgagaccagcaactggatcgccgccaacaccaaggagtgccccaagtgccacgtgaccatcgagaaggacggcggctgcaaccacatggtgtgcagaaaccagaactgcaaggccgagttctgctgggtgtgcctgggcccctgggagccccacggcagcgcctggtacaactgcaacagatacaacgaggacgacgccaaggccgccagagacgcccaggagagaagcagagccgccctgcagagatacctgttctactgcaacagatacatgaaccacatgcagagcctgagattcgagcacaagctgtacgcccaggtgaagcagaagatggaggagatgcagcagcacaacatgagctggatcgaggtgcagttcctgaagaaggccgtggacgtgctgtgccagtgcagagccaccctgatgtacacctacgtgttcgccttctacctgaagaagaacaaccagagcatcatcttcgagaacaaccaggccgacctggagaacgccaccgaggtgctgagcggctacctggagagagacatcagccaggacagcctgcaggacatcaagcagaaggtgcaggacaagtacagatactgcgagagcagaagaagagtgctgctgcagcacgtgcacgagggctacgagaaggacctgtgggagtacatcgaggactag

SEQ ID NO: 73239 - DNA, 1674 bp, synthetic construct
  misc_feature 1..1674: note = Description of Artificial Sequence: Synthetic coding sequence
  source 1..1674: mol_type = other DNA
atggacagcgacgagggctacaactacgagttcgacgaggacgaggagtgcagcgaggaggacagcggcgccgaggaggaggaggacgaggacgacgacgagcccgacgacgacaccctggacctgggcgaggtggagctggtggagcccggcctgggcgtgggcggcgagagagacggcctgctgtgcggcgagaccggcggcggcggcggcagcgccctgggccccggcggcggcggcggcggcggcggcggcggcggcggcggcggccccggccacgagcaggaggaggactacagatacgaggtgctgaccgccgagcagatcctgcagcacatggtggagtgcatcagagaggtgaacgaggtgatccagaaccccgccaccatcaccagaatcctgctgagccacttcaactgggacaaggagaagctgatggagagatacttcgacggcaacctggagaagctgttcgccgagtgccacgtgatcaaccccagcaagaagagcagaaccagacagatgaacaccagaagcagcgcccaggacatgccctgccagatctgctacctgaactaccccaacagctacttcaccggcctggagtgcggccacaagttctgcatgcagtgctggagcgagtacctgaccaccaagatcatggaggagggcatgggccagaccatcagctgccccgcccacggctgcgacatcctggtggacgacaacaccgtgatgagactgatcaccgacagcaaggtgaagctgaagtaccagcacctgatcaccaacagcttcgtggagtgcaacagactgctgaagtggtgccccgcccccgactgccaccacgtggtgaaggtgcagtaccccgacgccaagcccgtgagatgcaagtgcggcagacagttctgcttcaactgcggcgagaactggcacgaccccgtgaagtgcaagtggctgaagaagtggatcaagaagtgcgacgacgacagcgagaccagcaactggatcgccgccaacaccaaggagtgccccaagtgccacgtgaccatcgagaaggacggcggctgcaaccacatggtgtgcagaaaccagaactgcaaggccgagttctgctgggtgtgcctgggcccctgggagccccacggcagcgcctggtacaactgcaacagatacaacgaggacgacgccaaggccgccagagacgcccaggagagaagcagagccgccctgcagagatacctgttctactgcaacagatacatgaaccacatgcagagcctgagattcgagcacaagctgtacgcccaggtgaagcagaagatggaggagatgcagcagcacaacatgagctggatcgaggtgcagttcctgaagaaggccgtggacgtgctgtgccagtgcagagccaccctgatgtacacctacgtgttcgccttctacctgaagaagaacaaccagagcatcatcttcgagaacaaccaggccgacctggagaacgccaccgaggtgctgagcggctacctggagagagacatcagccaggacagcctgcaggacatcaagcagaaggtgcaggacaagtacagatactgcgagagcagaagaagagtgctgctgcagcacgtgcacgagggctacgagaaggacctgtgggagtacatcgaggactag

SEQ ID NO: 73240 - DNA, 1689 bp, synthetic construct
  misc_feature 1..1689: note = Description of Artificial Sequence: Synthetic coding sequence
  source 1..1689: mol_type = other DNA
atgagcaaccagtaccaggaggagggctgcagcgagagacccgagtgcaagagcaagagccccaccctgctgagcagctactgcatcgacagcatcctgggcagaagaagcccctgcaagatgagactgctgggcgccgcccagagcctgcccgcccccctgaccagcagagccgaccccgagaaggccgtgcagggcagccccaagagcagcagcgcccccttcgaggccgagctgcacctgccccccaagctgagaagactgtacggccccggcggcggcagactgctgcagggcgccgccgccgccgccgccgccgccgccgccgccgccgccgccgccgccaccgccaccgccggccccagaggcgaggccccccccccccccccccccaccgccagacccggcgagagacccgacggcgccggcgccgccgccgccgccgccgccgccgccgccgccgcctgggacaccctgaagatcagccaggccccccaggtgagcatcagcagaagcaagagctacagagagaacggcgcccccttcgtgccccccccccccgccctggacgagctgggcggccccggcggcgtgacccaccccgaggagagactgggcgtggccggcggccccggcagcgcccccgccgccggcggcggcaccggcaccgaggacgacgaggaggagctgctggaggacgaggaggacgaggacgaggaggaggagctgctggaggacgacgaggaggagctgctggaggacgacgccagagccctgctgaaggagcccagaagatgccccgtggccgccaccggcgccgtggccgccgccgccgccgccgccgtggccaccgagggcggcgagctgagccccaaggaggagctgctgctgcaccccgaggacgccgagggcaaggacggcgaggacagcgtgtgcctgagcgccggcagcgacagcgaggagggcctgctgaagagaaagcagagaagatacagaaccaccttcaccagctaccagctggaggagctggagagagccttccagaagacccactaccccgacgtgttcaccagagaggagctggccatgagactggacctgaccgaggccagagtgcaggtgtggttccagaacagaagagccaagtggagaaagagagagaaggccggcgcccagacccacccccccggcctgcccttccccggccccctgagcgccacccaccccctgagcccctacctggacgccagccccttccccccccaccaccccgccctggacagcgcctggaccgccgccgccgccgccgccgccgccgccttccccagcctgccccccccccccggcagcgccagcctgccccccagcggcgcccccctgggcctgagcaccttcctgggcgccgccgtgttcagacaccccgccttcatcagccccgccttcggcagactgttcagcaccatggcccccctgaccagcgccagcaccgccgccgccctgctgagacagcccacccccgccgtggagggcgccgtggccagcggcgccctggccgaccccgccaccgccgccgccgacagaagagccagcagcatcgccgccctgagactgaaggccaaggagcacgccgcccagctgacccagctgaacatcctgcccggcaccagcaccggcaaggaggtgtgctag

SEQ ID NO: 73241 - DNA, 1032 bp, synthetic construct
  misc_feature 1..1032: note = Description of Artificial Sequence: Synthetic coding sequence
  source 1..1032: mol_type = other DNA
atgggcggccccagaggcgccggctgggtggccgccggcctgctgctgggcgccggcgcctgctactgcatctacagactgaccagaggcagaagaagaggcgacagagagctgggcatcagaagcagcaagagcgccggcgccctggaggagggcaccagcgagggccagctgtgcggcagaagcgccagaccccagaccggcggcacctgggagagccagtggagcaagaccagccagcccgaggacctgaccgacggcagctacgacgacgtgctgaacgccgagcagctgcagaagctgctgtacctgctggagagcaccgaggaccccgtgatcatcgagagagccctgatcaccctgggcaacaacgccgccttcagcgtgaaccaggccatcatcagagagctgggcggcatccccatcgtggccaacaagatcaaccacagcaaccagagcatcaaggagaaggccctgaacgccctgaacaacctgagcgtgaacgtggagaaccagatcaagatcaagatctacatcagccaggtgtgcgaggacgtgttcagcggccccctgaacagcgccgtgcagctggccggcctgaccctgctgaccaacatgaccgtgaccaacgaccaccagcacatgctgcacagctacatcaccgacctgttccaggtgctgctgaccggcaacggcaacaccaaggtgcaggtgctgaagctgctgctgaacctgagcgagaaccccgccatgaccgagggcctgctgagagcccaggtggacagcagcttcctgagcctgtacgacagccacgtggccaaggagatcctgctgagagtgctgaccctgttccagaacatcaagaactgcctgaagatcgagggccacctggccgtgcagcccaccttcaccgagggcagcctgttcttcctgctgcacggcgaggagtgcgcccagaagatcagagccctggtggaccaccacgacgccgaggtgaaggagaaggtggtgaccatcatccccaagatctag

SEQ ID NO: 73242 - DNA, 855 bp, synthetic construct
  misc_feature 1..855: note = Description of Artificial Sequence: Synthetic coding sequence
  source 1..855: mol_type = other DNA
atgggcggccccagaggcgccggctgggtggccgccggcctgctgctgggcgccggcgcctgctactgcatctacagactgaccagaggcagaagaagaggcgacagagagctgggcatcagaagcagcaagagcgccgaggacctgaccgacggcagctacgacgacgtgctgaacgccgagcagctgcagaagctgctgtacctgctggagagcaccgaggaccccgtgatcatcgagagagccctgatcaccctgggcaacaacgccgccttcagcgtgaaccaggccatcatcagagagctgggcggcatccccatcgtggccaacaagatcaaccacagcaaccagagcatcaaggagaaggccctgaacgccctgaacaacctgagcgtgaacgtggagaaccagatcaagatcaagatctacatcagccaggtgtgcgaggacgtgttcagcggccccctgaacagcgccgtgcagctggccggcctgaccctgctgaccaacatgaccgtgaccaacgaccaccagcacatgctgcacagctacatcaccgacctgttccaggtgctgctgaccggcaacggcaacaccaaggtggacagcagcttcctgagcctgtacgacagccacgtggccaaggagatcctgctgagagtgctgaccctgttccagaacatcaagaactgcctgaagatcgagggccacctggccgtgcagcccaccttcaccgagggcagcctgttcttcctgctgcacggcgaggagtgcgcccagaagatcagagccctggtggaccaccacgacgccgaggtgaaggagaaggtggtgaccatcatccccaagatctag

SEQ ID NO: 73243 - DNA, 855 bp, synthetic construct
  misc_feature 1..855: note = Description of Artificial Sequence: Synthetic coding sequence
  source 1..855: mol_type = other DNA
atgggcggccccagaggcgccggctgggtggccgccggcctgctgctgggcgccggcgcctgctactgcatctacagactgaccagaggcagaagaagaggcgacagagagctgggcatcagaagcagcaagagcgccggcgccctggaggagggcaccagcgagggccagctgtgcggcagaagcgccagaccccagaccggcggcacctgggagagccagtggagcaagaccagccagcccgaggacctgaccgacggcagctacgacgacgtgctgaacgccgagcagctgcagaagctgctgtacctgctggagagcaccgaggaccccgtgatcatcgagagagccctgatcaccctgggcaacaacgccgccttcagcgtgaaccaggccatcatcagagagctgggcggcatccccatcgtggccaacaagatcaaccacagcaaccagagcatcaaggagaaggccctgaacgccctgaacaacctgagcgtgaacgtggagaaccagatcaagatcaaggtgcaggtgctgaagctgctgctgaacctgagcgagaaccccgccatgaccgagggcctgctgagagcccaggtggacagcagcttcctgagcctgtacgacagccacgtggccaaggagatcctgctgagagtgctgaccctgttccagaacatcaagaactgcctgaagatcgagggccacctggccgtgcagcccaccttcaccgagggcagcctgttcttcctgctgcacggcgaggagtgcgcccagaagatcagagccctggtggaccaccacgacgccgaggtgaaggagaaggtggtgaccatcatccccaagatctag

SEQ ID NO: 73244 - DNA, 927 bp, synthetic construct
  misc_feature 1..927: note = Description of Artificial Sequence: Synthetic coding sequence
  source 1..927: mol_type = other DNA
atgggcggccccagaggcgccggctgggtggccgccggcctgctgctgggcgccggcgcctgctactgcatctacagactgaccagaggcagaagaagaggcgacagagagctgggcatcagaagcagcaagagcgccgaggacctgaccgacggcagctacgacgacgtgctgaacgccgagcagctgcagaagctgctgtacctgctggagagcaccgaggaccccgtgatcatcgagagagccctgatcaccctgggcaacaacgccgccttcagcgtgaaccaggccatcatcagagagctgggcggcatccccatcgtggccaacaagatcaaccacagcaaccagagcatcaaggagaaggccctgaacgccctgaacaacctgagcgtgaacgtggagaaccagatcaagatcaagatctacatcagccaggtgtgcgaggacgtgttcagcggccccctgaacagcgccgtgcagctggccggcctgaccctgctgaccaacatgaccgtgaccaacgaccaccagcacatgctgcacagctacatcaccgacctgttccaggtgctgctgaccggcaacggcaacaccaaggtgcaggtgctgaagctgctgctgaacctgagcgagaaccccgccatgaccgagggcctgctgagagcccaggtggacagcagcttcctgagcctgtacgacagccacgtggccaaggagatcctgctgagagtgctgaccctgttccagaacatcaagaactgcctgaagatcgagggccacctggccgtgcagcccaccttcaccgagggcagcctgttcttcctgctgcacggcgaggagtgcgcccagaagatcagagccctggtggaccaccacgacgccgaggtgaaggagaaggtggtgaccatcatccccaagatctag

SEQ ID NO: 73245 - DNA, 750 bp, synthetic construct
  misc_feature 1..750: note = Description of Artificial Sequence: Synthetic coding sequence
  source 1..750: mol_type = other DNA
atgggcggccccagaggcgccggctgggtggccgccggcctgctgctgggcgccggcgcctgctactgcatctacagactgaccagaggcagaagaagaggcgacagagagctgggcatcagaagcagcaagagcgccgaggacctgaccgacggcagctacgacgacgtgctgaacgccgagcagctgcagaagctgctgtacctgctggagagcaccgaggaccccgtgatcatcgagagagccctgatcaccctgggcaacaacgccgccttcagcgtgaaccaggccatcatcagagagctgggcggcatccccatcgtggccaacaagatcaaccacagcaaccagagcatcaaggagaaggccctgaacgccctgaacaacctgagcgtgaacgtggagaaccagatcaagatcaaggtgcaggtgctgaagctgctgctgaacctgagcgagaaccccgccatgaccgagggcctgctgagagcccaggtggacagcagcttcctgagcctgtacgacagccacgtggccaaggagatcctgctgagagtgctgaccctgttccagaacatcaagaactgcctgaagatcgagggccacctggccgtgcagcccaccttcaccgagggcagcctgttcttcctgctgcacggcgaggagtgcgcccagaagatcagagccctggtggaccaccacgacgccgaggtgaaggagaaggtggtgaccatcatccccaagatctag

SEQ ID NO: 73246 - DNA, 678 bp, synthetic construct
  misc_feature 1..678: note = Description of Artificial Sequence: Synthetic coding sequence
  source 1..678: mol_type = other DNA
atgggcggccccagaggcgccggctgggtggccgccggcctgctgctgggcgccggcgcctgctactgcatctacagactgaccagaggcagaagaagaggcgacagagagctgggcatcagaagcagcaagagcgccgaggacctgaccgacggcagctacgacgacgtgctgaacgccgagcagctgcagaagctgctgtacctgctggagagcaccgaggaccccgtgatcatcgagagagccctgatcaccctgggcaacaacgccgccttcagcgtgaaccaggccatcatcagagagctgggcggcatccccatcgtggccaacaagatcaaccacagcaaccagagcatcaaggagaaggccctgaacgccctgaacaacctgagcgtgaacgtggagaaccagatcaagatcaaggtggacagcagcttcctgagcctgtacgacagccacgtggccaaggagatcctgctgagagtgctgaccctgttccagaacatcaagaactgcctgaagatcgagggccacctggccgtgcagcccaccttcaccgagggcagcctgttcttcctgctgcacggcgaggagtgcgcccagaagatcagagccctggtggaccaccacgacgccgaggtgaaggagaaggtggtgaccatcatccccaagatctag

SEQ ID NO: 73247 - DNA, 1362 bp, synthetic construct
  misc_feature 1..1362: note = Description of Artificial Sequence: Synthetic coding sequence
  source 1..1362: mol_type = other DNA
atgggcagaaccagagaggccggctgcgtggccgccggcgtggtgatcggcgccggcgcctgctactgcgtgtacagactggcctggggcagagacgagaacgagaagatctgggacgaggacgaggagagcaccgacaccagcgagatcggcgtggagaccgtgaagggcgccaagaccaacgccggcgccggcagcggcgccaagctgcagggcgacagcgaggtgaagcccgaggtgagcctgggcctggaggactgccccggcgtgaaggagaaggcccacagcggcagccacagcggcggcggcctggaggccaaggccaaggccctgttcaacaccctgaaggagcaggccagcgccaaggccggcaagggcgccagagtgggcaccatcagcggcaacagaaccctggcccccagcctgccctgccccggcggcagaggcggcggctgccaccccaccagaagcggcagcagagccggcggcagagccagcggcaagagcaagggcaaggccagaagcaagagcaccagagcccccgccaccacctggcccgtgagaagaggcaagttcaacttcccctacaagatcgacgacatcctgagcgcccccgacctgcagaaggtgctgaacatcctggagagaaccaacgaccccttcatccaggaggtggccctggtgaccctgggcaacaacgccgcctacagcttcaaccagaacgccatcagagagctgggcggcgtgcccatcatcgccaagctgatcaagaccaaggaccccatcatcagagagaagacctacaacgccctgaacaacctgagcgtgaacgccgagaaccagggcaagatcaagacctacatcagccaggtgtgcgacgacaccatggtgtgcagactggacagcgccgtgcagatggccggcctgagactgctgaccaacatgaccgtgaccaaccactaccagcacctgctgagctacagcttccccgacttcttcgccctgctgttcctgggcaaccacttcaccaagatccagatcatgaagctgatcatcaacttcaccgagaaccccgccatgaccagagagctggtgagctgcaaggtgcccagcgagctgatcagcctgttcaacaaggagtgggacagagagatcctgctgaacatcctgaccctgttcgagaacatcaacgacaacatcaagaacgagggcctggccagcagcagaaaggagttcagcagaagcagcctgttcttcctgttcaaggagagcggcgtgtgcgtgaagaagatcaaggccctggccaaccacaacgacctggtggtgaaggtgaaggtgctgaaggtgctgaccaagctgtag

SEQ ID NO: 73248 - DNA, 477 bp, synthetic construct
  misc_feature 1..477: note = Description of Artificial Sequence: Synthetic coding sequence
  source 1..477: mol_type = other DNA
atggtgtgcagactggacagcgccgtgcagatggccggcctgagactgctgaccaacatgaccgtgaccaaccactaccagcacctgctgagctacagcttccccgacttcttcgccctgctgttcctgggcaaccacttcaccaagatccagatcatgaagctgatcatcaacttcaccgagaaccccgccatgaccagagagctggtgagctgcaaggtgcccagcgagctgatcagcctgttcaacaaggagtgggacagagagatcctgctgaacatcctgaccctgttcgagaacatcaacgacaacatcaagaacgagggcctggccagcagcagaaaggagttcagcagaagcagcctgttcttcctgttcaaggagagcggcgtgtgcgtgaagaagatcaaggccctggccaaccacaacgacctggtggtgaaggtgaaggtgctgaaggtgctgaccaagctgtag

SEQ ID NO: 73249 - DNA, 1899 bp, synthetic construct
  misc_feature 1..1899: note = Description of Artificial Sequence: Synthetic coding sequence
  source 1..1899: mol_type = other DNA
atgagcagagtgagagacgccggctgcgtggccgccggcatcgtgatcggcgccggcgcctggtactgcgtgtacaagtacaccagaggcagagaccagaccaagaagagaatggccaagcccaagaacagagccgtggccggcaccggcgccagagccagagccggcctgagagccggcttcaccatcgacctgggcagcggcttcagcccccccacccccgtgagagccgaggccgaggacagagcccaggacgaggccagcgccctggacaccgtgggcgccgaggccgtggcccccgccgccagcagcgccgaggcccagagcggcgccggcagccaggcccaggaggccgacggcgccggcgtgggccccaaggccgagagcgtggtgggcgccgccatggccagcgccatcgcccccccccccggcgtgaccgaggccctgggcgccgccgaggcccccgccatggccggcgcccccaaggtggccgaggcccccagagaggccgagaccagcagagccgccgtgccccccggcaccgtggtgcccaccgaggccgccgcccccaccgaggtgaccgagggccccggcgtggccgcccccaccaaggtggccgaggcccccggcgtggccagccccaccgaggccgccgaggcccccgtgcccgccacccccaccggcgccgccgcccccaccggcgccgccgagagccccggcaccagcggcagccccagaaccgccgtggtgcccggcaccagcgccgccaagaaggccacccccggcgcccacaccggcgccatccccaaggccaccagcgccaccggcgccgtgcccaagggcggcggcaagggcgtgaccagaagcagaaacggcggcaagggcaagggcaagaagagcaaggtggaggtggacgagctgggcatgggcttcagacccggcgacggcgccgccgccgccgccgccgccagcgccaacggcggccaggccttcctggccgaggtgcccgacagcgaggagggcgagagcggctggaccgacaccgagagcgacagcgacagcgagcccgagacccagagaagaggcagaggcagaagacccgtggccatgcagaagagacccttcccctacgagatcgacgagatcctgggcgtgagagacctgagaaaggtgctggccctgctgcagaagagcgacgaccccttcatccagcaggtggccctgctgaccctgagcaacaacgccaactacagctgcaaccaggagaccatcagaaagctgggcggcctgcccatcatcgccaacatgatcaacaagaccgacccccacatcaaggagaaggccctgatggccatgaacaacctgagcgagaactacgagaaccagggcagactgcaggtgtacatgaacaaggtgatggacgacatcatggccagcaacctgaacagcgccgtgcaggtggtgggcctgaagttcctgaccaacatgaccatcaccaacgactaccagcacctgctggtgaacagcatcgccaacttcttcagactgctgagccagggcggcggcaagatcaaggtggagatcctgaagatcctgagcaacttcgccgagaaccccgacatgctgaagaagctgctgagcacccaggtgcccgccagcttcagcagcctgtacaacagctacgtggagagcgagatcctgatcaacgccctgaccctgttcgagatcatctacgacaacctgagagccgaggtgttcaactacagagagttcaacaagggcagcctgttctacctgtgcaccaccagcggcgtgtgcgtgaagaagatcagagccctggccaaccaccacgacctgctggtgaaggtgaaggtgatcaagctggtgaacaagttctag

SEQ ID NO: 73250 - DNA, 1899 bp, synthetic construct; identical to SEQ ID NO: 73249
  misc_feature 1..1899: note = Description of Artificial Sequence: Synthetic coding sequence
  source 1..1899: mol_type = other DNA

SEQ ID NO: 73251 - DNA, 1899 bp, synthetic construct; identical to SEQ ID NO: 73249
  misc_feature 1..1899: note = Description of Artificial Sequence: Synthetic coding sequence
  source 1..1899: mol_type = other DNA

SEQ ID NO: 73252 - DNA, 504 bp, synthetic construct
  misc_feature 1..504: note = Description of Artificial Sequence: Synthetic coding sequence
  source 1..504: mol_type = other DNA
atgagcagagtgagagacgccggctgcgtggccgccggcatcgtgatcggcgccggcgcctggtactgcgtgtacaagtacaccagaggcagagaccagaccaagaagagaatggccaagcccaagaacagagccgtggccggcaccggcgccagagccagagccggcctgagagccggcttcaccatcgacctgggcagcggcttcagcccccccacccccgtgagagccgaggccgaggacagagcccaggacgaggccagcgccctggacaccgtgggcgccgaggccgtggcccccgccgccagcagcgccgaggcccagagcggcgccggcagccaggcccaggaggccgacggcgccggcgtgggccccaaggccgagagcgtggtgggcgccgccatggccagcgccatcgcccccccccccggcgtgaccgaggccctgggcgccgccgaggcccccgccatggccggcgcccccaaggtggccgaggccccctag

SEQ ID NO: 73253 - DNA, 189 bp, synthetic construct
  misc_feature 1..189: note = Description of Artificial Sequence: Synthetic coding sequence
  source 1..189: mol_type = other DNA
atgagcagagtgagagacgccggctgcgtggccgccggcatcgtgatcggcgccggcgcctggtactgcgtgtacaagtacaccagaggcagagaccagaccaagaagagaatggccaagcccaagaacagagccgtggccggcaccggcgccagagccagagccggcctgagagccggcttcacctag

SEQ ID NO: 73254 - DNA, 498 bp, synthetic construct
  misc_feature 1..498: note = Description of Artificial Sequence: Synthetic coding sequence
  source 1..498: mol_type = other DNA
atgagcagagtgagagacgccggctgcgtggccgccggcatcgtgatcggcgccggcgcctggtactgcgtgtacaagtacaccagaggcagagaccagaccaagaagagaatggccaagcccaagaacagagccgtggccggcaccggcgccagagccagagccggcctgagagccggcttcaccatcgacctgggcagcggcttcagcccccccacccccgtgagagccgaggccgaggacagagcccaggacgaggccagcgccctggacaccgtgggcgccgaggccgtggcccccgccgccagcagcgccgaggcccagagcggcgccggcagccaggcccaggaggccgacggcgccggcgtgggccccaaggccgagagcgtggtgggcgccgccatggccagcgccatcgcccccccccccggcgtgaccgaggccctgggcgccgccgaggcccccgccatggccggcgcccccaaggtggccgagtag

SEQ ID NO: 73255 - DNA, 318 bp, synthetic construct
  misc_feature 1..318: note = Description of Artificial Sequence: Synthetic coding sequence
  source 1..318: mol_type = other DNA
atgagcagagtgagagacgccggctgcgtggccgccggcatcgtgatcggcgccggcgcctggtactgcgtgtacaagtacaccagaggcagagaccagaccaagaagagaatggccaagcccaagaacagagccgtggccggcaccggcgccagagccagagccggcctgagagccggcttcaccatcgacctgggcagcggcttcagcccccccacccccgtgagagccgaggccgaggacagagcccaggacgaggccagcgccctggacaccgtgggcgccgaggccgtggcccccgccgccagcagcgcctag

SEQ ID NO: 73256 - DNA, 282 bp, synthetic construct
  misc_feature 1..282: note = Description of Artificial Sequence: Synthetic coding sequence
  source 1..282: mol_type = other DNA
atgagcagagtgagagacgccggctgcgtggccgccggcatcgtgatcggcgccggcgcctggtactgcgtgtacaagtacaccagaggcagagaccagaccaagaagagaatggccaagcccaagaacagagccgtggccggcaccggcgccagagccagagccggcctgagagccggcttcaccatcgacctgggcagcggcttcagcccccccacccccgtgagagccgaggccgaggacagagcccaggacgaggccagcgccctggacaccgtgtag

SEQ ID NO: 73257 - DNA, 1140 bp, synthetic construct
  misc_feature 1..1140: note = Description of Artificial Sequence: Synthetic coding sequence
  source 1..1140: mol_type = other DNA
atgggctacgccagaaaggtgggctgggtgaccgccggcctggtgatcggcgccggcgcctgctactgcatctacagactgaccagaggcagaaagcagaacaaggagaagatggccgagggcggcagcggcgacgtggacgacgccggcgactgcagcggcgccagatacaacgactggagcgacgacgacgacgacagcaacgagagcaagagcatcgtgtggtaccccccctgggccagaatcggcaccgaggccggcaccagagccagagccagagccagagccagagccaccagagccagaagagccgtgcagaagagagccagccccaacagcgacgacaccgtgctgagcccccaggagctgcagaaggtgctgtgcctggtggagatgagcgagaagccctacatcctggaggccgccctgatcgccctgggcaacaacgccgcctacgccttcaacagagacatcatcagagacctgggcggcctgcccatcgtggccaagatcctgaacaccagagaccccatcgtgaaggagaaggccctgatcgtgctgaacaacctgagcgtgaacgccgagaaccagagaagactgaaggtgtacatgaaccaggtgtgcgacgacaccatcaccagcagactgaacagcagcgtgcagctggccggcctgagactgctgaccaacatgaccgtgaccaacgagtaccagcacatgctggccaacagcatcagcgacttcttcagactgttcagcgccggcaacgaggagaccaagctgcaggtgctgaagctgctgctgaacctggccgagaaccccgccatgaccagagagctgctgagagcccaggtgcccagcagcctgggcagcctgttcaacaagaaggagaacaaggaggtgatcctgaagctgctggtgatcttcgagaacatcaacgacaacttcaagtgggaggagaacgagcccacccagaaccagttcggcgagggcagcctgttcttcttcctgaaggagttccaggtgtgcgccgacaaggtgctgggcatcgagagccaccacgacttcctggtgaaggtgaaggtgggcaagttcatggccaagctggccgagcacatgttccccaagagccaggagtag

SEQ ID NO: 73258 - DNA, 1140 bp, synthetic construct; identical to SEQ ID NO: 73257
  misc_feature 1..1140: note = Description of Artificial Sequence: Synthetic coding sequence
  source 1..1140: mol_type = other DNA

SEQ ID NO: 73259 - DNA, 2889 bp, synthetic construct
  misc_feature 1..2889: note = Description of Artificial Sequence: Synthetic coding sequence
  source 1..2889: mol_type = other DNA
atggaggactgcaacgtgcacagcgccgccagcatcctggccagcgtgaaggagcaggaggccagattcgagagactgaccagagccctggagcaggagagaagacacgtggccctgcagctggagagagcccagcagcccggcatggtgagcggcggcatgggcagcggccagcccctgcccatggcctggcagcagctggtgctgcaggagcagagccccggcagccaggccagcctggccaccatgcccgaggcccccgacgtgctggaggagaccgtgaccgtggaggaggaccccggcacccccaccagccacgtgagcatcgtgaccagcgaggacggcaccaccagaagaaccgagaccaaggtgaccaagaccgtgaagaccgtgaccaccagaaccgtgagacaggtgcccgtgggccccgacggcctgcccctgctggacggcggcccccccctgggccccttcgccgacggcgccctggacagacacttcctgctgagaggcggcggccccgtggccaccctgagcagagcctacctgagcagcggcggcggcttccccgagggccccgagcccagagacagccccagctacggcagcctgagcagaggcctgggcatgagaccccccagagccggccccctgggccccggccccggcgacggctgcttcaccctgcccggccacagagaggccttccccgtgggccccgagcccggcccccccggcggcagaagcctgcccgagagattccaggccgagccctacggcctggaggacgacaccagaagcctggccgccgacgacgagggcggccccgagctggagcccgactacggcaccgccaccagaagaagacccgagtgcggcagaggcctgcacaccagagcctacgaggacaccgccgacgacggcggcgagctggccgacgagagacccgccttccccatggtgaccgcccccctggcccagcccgagagaggcagcatgggcagcctggacagactggtgagaagaagccccagcgtggacagcgccagaaaggagcccagatggagagaccccgagctgcccgaggtgctggccatgctgagacaccccgtggaccccgtgaaggccaacgccgccgcctacctgcagcacctgtgcttcgagaacgagggcgtgaagagaagagtgagacagctgagaggcctgcccctgctggtggccctgctggaccaccccagagccgaggtgagaagaagagcctgcggcgccctgagaaacctgagctacggcagagacaccgacaacaaggccgccatcagagactgcggcggcgtgcccgccctggtgagactgctgagagccgccagagacaacgaggtgagagagctggtgaccggcaccctgtggaacctgagcagctacgagcccctgaagatggtgatcatcgaccacggcctgcagaccctgacccacgaggtgatcgtgccccacagcggctgggagagagagcccaacgaggacagcaagcccagagacgccgagtggaccaccgtgttcaagaacaccagcggctgcctgagaaacgtgagcagcgacggcgccgaggccagaagaagactgagagagtgcgagggcctggtggacgccctgctgcacgccctgcagagcgccgtgggcagaaaggacaccgacaacaagagcgtggagaactgcgtgtgcatcatgagaaacctgagctaccacgtgcacaaggaggtgcccggcgccgacagataccaggaggccgagcccggccccctgggcagcgccgtgggcagccagagaagaagaagagacgacgccagctgcttcggcggcaagaaggccaaggaggagtggttccaccagggcaagaaggacggcgagatggacagaaacttcgacaccctggacctgcccaagagaaccgaggccgccaagggcttcgagctgctgtaccagcccgaggtggtgagactgtacctgagcctgctgaccgagagcagaaacttcaacaccctggaggccgccgccggcgccctgcagaacctgagcgccggcaactggatgtgggccacctacatcagagccaccgtgagaaaggagagaggcctgcccgtgctggtggagctgctgcagagcgagaccgacaaggtggtgagagccgtggccatcgccctgagaaacctgagcctggacagaagaaacaaggacctgatcggcagctacgccatggccgagctggtgagaaacgtgagaaacgcccaggccccccccagacccggcgcctgcctggaggaggacaccgtggtggccgtgctgaacaccatccacgagatcgtgagcgacagcctggacaacgccagaagcctgctgcaggccagaggcgtgcccgccctggtggccctggtggccagcagccagagcgtgagagaggccaaggccgccagccacgtgctgcagaccgtgtggagctacaaggagctgagaggcaccctgcagaaggacggctggaccaaggccagattccagagcgccgccgccaccgccaagggccccaagggcgccctgagccccggcggcttcgacgacagcaccctgcccctggtggacaagagcctggagggcgagaagaccggcagcagagacgtgatccccatggacgccctgggccccgacggctacagcaccgtggacagaagagagagaagacccagaggcgccagcagcgccggcgaggccagcgagaaggagcccctgaagctggaccccagcagaaaggcccccccccccggccccagcagacccgccgtgagactggtggacgccgtgggcgacgccaagccccagcccgtggacagctgggtgtag

SEQ ID NO: 73260 - DNA, 2700 bp, synthetic construct
  misc_feature 1..2700: note = Description of Artificial Sequence: Synthetic coding sequence
  source 1..2700: mol_type = other DNA
atgcccgccgagctgagacaggagcagagccccggcagccaggccagcctggccaccatgcccgaggcccccgacgtgctggaggagaccgtgaccgtggaggaggaccccggcacccccaccagccacgtgagcatcgtgaccagcgaggacggcaccaccagaagaaccgagaccaaggtgaccaagaccgtgaagaccgtgaccaccagaaccgtgagacaggtgcccgtgggccccgacggcctgcccctgctggacggcggcccccccctgggccccttcgccgacggcgccctggacagacacttcctgctgagaggcggcggccccgtggccaccctgagcagagcctacctgagcagcggcggcggcttccccgagggccccgagcccagagacagccccagctacggcagcctgagcagaggcctgggcatgagaccccccagagccggccccctgggccccggccccggcgacggctgcttcaccctgcccggccacagagaggccttccccgtgggccccgagcccggcccccccggcggcagaagcctgcccgagagattccaggccgagccctacggcctggaggacgacaccagaagcctggccgccgacgacgagggcggccccgagctggagcccgactacggcaccgccaccagaagaagacccgagtgcggcagaggcctgcacaccagagcctacgaggacaccgccgacgacggcggcgagctggccgacgagagacccgccttccccatggtgaccgcccccctggcccagcccgagagaggcagcatgggcagcctggacagactggtgagaagaagccccagcgtggacagcgccagaaaggagcccagatggagagaccccgagctgcccgaggtgctggccatgctgagacaccccgtggaccccgtgaaggccaacgccgccgcctacctgcagcacctgtgcttcgagaacgagggcgtgaagagaagagtgagacagctgagaggcctgcccctgctggtggccctgctggaccaccccagagccgaggtgagaagaagagcctgcggcgccctgagaaacctgagctacggcagagacaccgacaacaaggccgccatcagagactgcggcggcgtgcccgccctggtgagactgctgagagccgccagagacaacgaggtgagagagctggtgaccggcaccctgtggaacctgagcagctacgagcccctgaagatggtgatcatcgaccacggcctgcagaccctgacccacgaggtgatcgtgccccacagcggctgggagagagagcccaacgaggacagcaagcccagagacgccgagtggaccaccgtgttcaagaacaccagcggctgcctgagaaacgtgagcagcgacggcgccgaggccagaagaagactgagagagtgcgagggcctggtggacgccctgctgcacgccctgcagagcgccgtgggcagaaaggacaccgacaacaagagcgtggagaactgcgtgtgcatcatgagaaacctgagctaccacgtgcacaaggaggtgcccggcgccgacagataccaggaggccgagcccggccccctgggcagcgccgtgggcagccagagaagaagaagagacgacgccagctgcttcggcggcaagaaggccaaggaggagtggttccaccagggcaagaaggacggcgagatggacagaaacttcgacaccctggacctgcccaagagaaccgaggccgccaagggcttcgagctgctgtaccagcccgaggtggtgagactgtacctgagcctgctgaccgagagcagaaacttcaacaccctggaggccgccgccggcgccctgcagaacctgagcgccggcaactggatgtgggccacctacatcagagccaccgtgagaaaggagagaggcctgcccgtgctggtggagctgctgcagagcgagaccgacaaggtggtgagagccgtggccatcgccctgagaaacctgagcctggacagaagaaacaaggacctgatcggcagctacgccatggccgagctggtgagaaacgtgagaaacgcccaggccccccccagacccggcgcctgcctggaggaggacaccgtggtggccgtgctgaacaccatccacgagatcgtgagcgacagcctggacaacgccagaagcctgctgcaggccagaggcgtgcccgccctggtggccctggtggccagcagccagagcgtgagagaggccaaggccgccagccacgtgctgcagaccgtgtggagctacaaggagctgagaggcaccctgcagaaggacggctggaccaaggccagattccagagcgccgccgccaccgccaagggccccaagggcgccctgagccccggcggcttcgacgacagcaccctgcccctggtggacaagagcctggagggcgagaagaccggcagcagagacgtgatccccatggacgccctgggccccgacggctacagcaccgtggacagaagagagagaagacccagaggcgccagcagcgccggcgaggccagcgagaaggagcccctgaagctggaccccagcagaaaggcccccccccccggccccagcagacccgccgtgagactggtggacgccgtgggcgacgccaagccccagcccgtggacagctgggtgtag

SEQ ID NO: 73261 - DNA, 2700 bp, synthetic construct; identical to SEQ ID NO: 73260
  misc_feature 1..2700: note = Description of Artificial Sequence: Synthetic coding sequence
  source 1..2700: mol_type = other DNA

SEQ ID NO: 73262 - DNA, 2871 bp, synthetic construct
  misc_feature 1..2871: note = Description of Artificial Sequence: Synthetic coding sequence
  source 1..2871: mol_type = other DNA
atggaggactgcaacgtgcacagcgccgccagcatcctggccagcgtgaaggagcaggaggccagattcgagagactgaccagagccctggagcaggagagaagacacgtggccctgcagctggagagagcccagcagcccggcatggtgagcggcggcatgggcagcggccagcccctgcccatggcctggcagcagctggtgctgcaggagcagagccccggcagccaggccagcctggccaccatgcccgaggcccccgacgtgctggaggagaccgtgaccgtggaggaggaccccggcacccccaccagccacgtgagcatcgtgaccagcgaggacggcaccaccagaagaaccgagaccaaggtgaccaagaccgtgaagaccgtgaccaccagaaccgtgagacaggtgcccgtgggccccgacggcctgcccctgctggacggcggcccccccctgggccccttcgccgacggcgccctggacagacacttcctgctgagaggcggcggccccgtggccaccctgagcagagcctacctgagcagcggcggcggcttccccgagggccccgagcccagagacagccccagctacggcagcctgagcagaggcctgggcatgagaccccccagagccggccccctgggccccggccccggcgacggctgcttcaccctgcccggccacagagaggccttccccgtgggccccgagcccggcccccccggcggcagaagcctgcccgagagattccaggccgagccctacggcctggaggacgacaccagaagcctggccgccgacgacgagggcggccccgagctggagcccgactacggcaccgccaccagaagaagacccgagtgcggcagaggcctgcacaccagagcctacgaggacaccgccgacgacggcggcgagctggccgacgagagacccgccttccccatggtgaccgcccccctggcccagcccgagagaggcagcatgggcagcctggacagactggtgagaagaagccccagcgtggacagcgccagaaaggagcccagatggagagaccccgagctgcccgaggtgctggccatgctgagacaccccgtggaccccgtgaaggccaacgccgccgcctacctgcagcacctgtgcttcgagaacgagggcgtgaagagaagagtgagacagctgagaggcctgcccctgctggtggccctgctggaccaccccagagccgaggtgagaagaagagcctgcggcgccctgagaaacctgagctacggcagagacaccgacaacaaggccgccatcagagactgcggcggcgtgcccgccctggtgagactgctgagagccgccagagacaacgaggtgagagagctggtgaccggcaccctgtggaacctgagcagctacgagcccctgaagatggtgatcatcgaccacggcctgcagaccctgacccacgaggtgatcgtgccccacagcggctgggagagagagcccaacgaggacagcaagcccagagacgccgagtggaccaccgtgttcaagaacaccagcggctgcctgagaaacgtgagcagcgacggcgccgaggccagaagaagactgagagagtgcgagggcctggtggacgccctgctgcacgccctgcagagcgccgtgggcagaaaggacaccgacaacaagagcgtggagaactgcgtgtgcatcatgagaaacctgagctaccacgtgcacaaggaggtgcccggcgccgacagataccaggaggccgagcccggccccctgggcagcgccgtgggcagccagagaagaagaagagacgacgccagctgcttcggcggcaagaaggccaagggcaagaaggacggcgagatggacagaaacttcgacaccctggacctgcccaagagaaccgaggccgccaagggcttcgagctgctgtaccagcccgaggtggtgagactgtacctgagcctgctgaccgagagcagaaacttcaacaccctggaggccgccgccggcgccctgcagaacctgagcgccggcaactggatgtgggccacctacatcagagccaccgtgagaaaggagagaggcctgcccgtgctggtggagctgctgcagagcgagaccgacaaggtggtgagagccgtggccatcgccctgagaaacctgagcctggacagaagaaacaaggacctgatcggcagctacgccatggccgagctggtgagaaacgtgagaaacgcccaggccccccccagacccggcgcctgcctggaggaggacaccgtggtggccgtgctgaacaccatccacgagatcgtgagcgacagcctggacaacgccagaagcctgctgcaggccagaggcgtgcccgccctggtggccctggtggccagcagccagagcgtgagagaggccaaggccgccagccacgtgctgcagaccgtgtggagctacaaggagctgagaggcaccctgcagaaggacggctggaccaaggccagattccagagcgccgccgccaccgccaagggccccaagggcgccctgagccccggcggcttcgacgacagcaccctgcccctggtggacaagagcctggagggcgagaagaccggcagcagagacgtgatccccatggacgccctgggccccgacggctacagcaccgtggacagaagagagagaagacccagaggcgccagcagcgccggcgaggccagcgagaaggagcccctgaagctggaccccagcagaaaggcccccccccccggccccagcagacccgccgtgagactggtggacgccgtgggcgacgccaagccccagcccgtggacagctgggtgtag

SEQ ID NO: 73263 - DNA, 2682 bp, synthetic construct
  misc_feature 1..2682: note = Description of Artificial Sequence: Synthetic coding sequence
  source 1..2682: mol_type = other DNA
atgcccgccgagctgagacaggagcagagccccggcagccaggccagcctggccaccatgcccgaggcccccgacgtgctggaggagaccgtgaccgtggaggaggaccccggcacccccaccagccacgtgagcatcgtgaccagcgaggacggcaccaccagaagaaccgagaccaaggtgaccaagaccgtgaagaccgtgaccaccagaaccgtgagacaggtgcccgtgggccccgacggcctgcccctgctggacggcggcccccccctgggccccttcgccgacggcgccctggacagacacttcctgctgagaggcggcggccccgtggccaccctgagcagagcctacctgagcagcggcggcggcttccccgagggccccgagcccagagacagccccagctacggcagcctgagcagaggcctgggcatgagaccccccagagccggccccctgggccccggccccggcgacggctgcttcaccctgcccggccacagagaggccttccccgtgggccccgagcccggcccccccggcggcagaagcctgcccgagagattccaggccgagccctacggcctggaggacgacaccagaagcctggccgccgacgacgagggcggccccgagctggagcccgactacggcaccgccaccagaagaagacccgagtgcggcagaggcctgcacaccagagcctacgaggacaccgccgacgacggcggcgagctggccgacgagagacccgccttccccatggtgaccgcccccctggcccagcccgagagaggcagcatgggcagcctggacagactggtgagaagaagccccagcgtggacagcgccagaaaggagcccagatggagagaccccgagctgcccgaggtgctggccatgctgagacaccccgtggaccccgtgaaggccaacgccgccgcctacctgcagcacctgtgcttcgagaacgagggcgtgaagagaagagtgagacagctgagaggcctgcccctgctggtggccctgctggaccaccccagagccgaggtgagaagaagagcctgcggcgccctgagaaacctgagctacggcagagacaccgacaacaaggccgccatcagagactgcggcggcgtgcccgccctggtgagactgctgagagccgccagagacaacgaggtgagagagctggtgaccggcaccctgtggaacctgagcagctacgagcccctgaagatggtgatcatcgaccacggcctgcagaccctgacccacgaggtgatcgtgccccacagcggctgggagagagagcccaacgaggacagcaagcccagagacgccgagtggaccaccgtgttcaagaacaccagcggctgcctgagaaacgtgagcagcgacggcgccgaggccagaagaagactgagagagtgcgagggcctggtggacgccctgctgcacgccctgcagagcgccgtgggcagaaaggacaccgacaacaagagcgtggagaactgcgtgtgcatcatgagaaacctgagctaccacgtgcacaaggaggtgcccggcgccgacagataccaggaggccgagcccggccccctgggcagcgccgtgggcagccagagaagaagaagagacgacgccagctgcttcggcggcaagaaggccaagggcaagaaggacggcgagatggacagaaacttcgacaccctggacctgcccaagagaaccgaggccgccaagggcttcgagctgctgtaccagcccgaggtggtgagactgtacctgagcctgctgaccgagagcagaaacttcaacaccctggaggccgccgccggcgccctgcagaacctgagcgccggcaactggatgtgggccacctacatcagagccaccgtgagaaaggagagaggcctgcccgtgctggtggagctgctgcagagcgagaccgacaaggtggtgagagccgtggccatcgccctgagaaacctgagcctggacagaagaaacaaggacctgatcggcagctacgccatggccgagctggtgagaaacgtgagaaacgcccaggccccccccagacccggcgcctgcctggaggaggacaccgtggtggccgtgctgaacaccatccacgagatcgtgagcgacagcctggacaacgccagaagcctgctgcaggccagaggcgtgcccgccctggtggccctggtggccagcagccagagcgtgagagaggccaaggccgccagccacgtgctgcagaccgtgtggagctacaaggagctgagaggcaccctgcagaaggacggctggaccaaggccagattccagagcgccgccgccaccgccaagggccccaagggcgccctgagccccggcggcttcgacgacagcaccctgcccctggtggacaagagcctggagggcgagaagaccggcagcagagacgtgatccccatggacgccctgggccccgacggctacagcaccgtggacagaagagagagaagacccagaggcgccagcagcgccggcgaggccagcgagaaggagcccctgaagctggaccccagcagaaaggcccccccccccggccccagcagacccgccgtgagactggtggacgccgtgggcgacgccaagccccagcccgtggacagctgggtgtag

SEQ ID NO: 73264 - DNA, 1131 bp, synthetic construct
  misc_feature 1..1131: note = Description of Artificial Sequence: Synthetic coding sequence
  source 1..1131: mol_type = other DNA
atggagagctacgacatcatcgccaaccagcccgtggtgatcgacaacggcagcggcgtgatcaaggccggcttcgccggcgaccagatccccaagtactgcttccccaactacgtgggcagacccaagcacatgagagtgatggccggcgccctggagggcgacctgttcatcggccccaaggccgaggagcacagaggcctgctgaccatcagataccccatggagcacggcgtggtgagagactggaacgacatggagagaatctggcagtacgtgtacagcaaggaccagctgcagaccttcagcgaggagcaccccgtgctgctgaccgaggcccccctgaaccccagcaagaacagagagaaggccgccgaggtgttcttcgagaccttcaacgtgcccgccctgttcatcagcatgcaggccgtgctgagcctgtacgccaccggcagaaccaccggcgtggtgctggacagcggcgacggcgtgacccacgccgtgcccatctacgagggcttcgccatgccccacagcatcatgagagtggacatcgccggcagagacgtgagcagatacctgagactgctgctgagaaaggagggcgtggacttccacaccagcgccgagttcgaggtggtgagaaccatcaaggagagagcctgctacctgagcatcaacccccagaaggacgaggccctggagaccgagaaggtgcagtacaccctgcccgacggcagcaccctggacgtgggccccgccagattcagagcccccgagctgctgttccagcccgacctggtgggcgacgagagcgagggcctgcacgaggtggtggccttcgccatccacaagagcgacatggacctgagaagaaccctgttcgccaacatcgtgctgagcggcggcagcaccctgttcaagggcttcggcgacagactgctgagcgaggtgaagaagctggcccccaaggacatcaagatcaagatcagcgccccccaggagagactgtacagcacctggatcggcggcagcatcctggccagcctggacaccttcaagaagatgtgggtgagcaagaaggagtacgaggaggacggcagcagagccatccacagaaagaccttctag

SEQ ID NO: 73265 - DNA, 1167 bp, synthetic construct
  misc_feature 1..1167: note = Description of Artificial Sequence: Synthetic coding sequence
  source 1..1167: mol_type = other DNA
atgagcaaggtgttcaagaagaccagcagcaacggcaagctgagcatctacctgggcaagagagacttcgtggaccacgtggacaccgtggagcccatcgacggcgtggtgctggtggaccccgagtacctgaagtgcagaaagctgttcgtgatgctgacctgcgccttcagatacggcagagacgacctggaggtgatcggcctgaccttcagaaaggacctgtacgtgcagaccctgcaggtggtgcccgccgagagcagcagcccccagggccccctgaccgtgctgcaggagagactgctgcacaagctgggcgacaacgcctaccccttcaccctgcagatggtgaccaacctgccctgcagcgtgaccctgcagcccggccccgaggacgccggcaagccctgcggcatcgacttcgaggtgaagagcttctgcgccgagaaccccgaggagaccgtgagcaagagagactacgtgagactggtggtgagaaaggtgcagttcgccccccccgaggccggccccggccccagcgcccagaccatcagaagattcctgctgagcgcccagcccctgcagctgcaggcctggatggacagagaggtgcactaccacggcgagcccatcagcgtgaacgtgagcatcaacaactgcaccaacaaggtgatcaagaagatcaagatcagcgtggaccagatcaccgacgtggtgctgtacagcctggacaagtacaccaagaccgtgttcatccaggagttcaccgagaccgtggccgccaacagcagcttcagccagagcttcgccgtgacccccatcctggccgccagctgccagaagagaggcctggccctggacggcaagctgaagcacgaggacaccaacctggccagcagcaccatcatcagacccggcatggacaaggagctgctgggcatcctggtgagctacaaggtgagagtgaacctgatggtgagctgcggcggcatcctgggcgacctgaccgccagcgacgtgggcgtggagctgcccctggtgctgatccaccccaagcccagccacgaggccgccagcagcgaggacatcgtgatcgaggagttcaccagaaagggcgaggaggagagccagaaggccgtggaggccgagggcgacgagggcagctag

SEQ ID NO: 73266 - DNA, 1167 bp, synthetic construct
  misc_feature 1..1167: note = Description of Artificial Sequence: Synthetic coding sequence
  source 1..1167: mol_type = other DNA
atgagcaaggtgttcaagaagaccagcagcaacggcaagctgagcatctacctgggcaagagagacttcgtggaccacgtggacaccgtggagcccatcgacggcgtggtgctggtggaccccgagtacctgaagtgcagaaagctgttcgtgatgctgacctgcgccttcagatacggcagagacgacctggaggtgatcggcctgaccttcagaaaggacctgtacgtgcagaccctgcaggtggtgcccgccgagagcagcagcccccagggccccctgaccgtgctgcaggagagactgctgcacaagctgggcgacaacgcctaccccttcaccctgcagatggtgaccaacctgccctgcagcgtgaccctgcagcccggccccgaggacgccggcaagccctgcggcatcgacttcgaggtgaagagcttctgcgccgagaaccccgaggagaccgtgagcaagagagactacgtgagactggtggtgagaaaggtgcagttcgccccccccgaggccggccccggccccagcgcccagaccatcagaagattcctgctgagcgcccagcccctgcagctgcaggcctggatggacagagaggtgcactaccacggcgagcccatcagcgtgaacgtgagcatcaacaactgcaccaacaaggtgatcaagaagatcaagatcagcgtggaccagatcaccgacgtggtgctgtacagcctggacaagtacaccaagaccgtgttcatccaggagttcaccgagaccgtggccgccaacagcagcttcagccagagcttcgccgtgacccccatcctggccgccagctgccagaagagaggcctggccctggacggcaagctgaagcacgaggacaccaacctggccagcagcaccatcatcagacccggcatggacaaggagctgctgggcatcctggtgagctacaaggtgagagtgaacctgatggtgagctgcggcggcatcctgggcgacctgaccgccagcgacgtgggcgtggagctgcccctggtgctgatccaccccaagcccagccacgccagcgccagcagcgaggacatcgtgatcgaggagttcaccagaaagggcgaggaggagagccagaaggccgtggaggccgagggcgacgagggcagctag

SEQ ID NO: 73267 - DNA, 1080 bp, synthetic construct
  misc_feature 1..1080: note = Description of Artificial Sequence: Synthetic coding sequence
  source 1..1080: mol_type = other DNA
atgagcaaggtgttcaagaagaccagcagcaacggcaagctgagcatctacctgggcaagagagacttcgtggaccacgtggacaccgtggagcccatcgacggcgtggtgctggtggaccccgagtacctgaagtgcagaaagctgttcgtgatgctgacctgcgccttcagatacggcagagacgacctggaggtgatcggcctgaccttcagaaaggacctgtacgtgcagaccctgcaggtggtgcccgccgagagcagcagcccccagggccccctgaccgtgctgcaggagagactgctgcacaagctgggcgacaacgcctaccccttcaccctgcagatggtgaccaacctgccctgcagcgtgaccctgcagcccggccccgaggacgccggcaagccctgcggcatcgacttcgaggtgaagagcttctgcgccgagaaccccgaggagaccgtgagcaagagagactacgtgagactggtggtgagaaaggtgcagttcgccccccccgaggccggccccggccccagcgcccagaccatcagaagattcctgctgagcgcccagcccctgcagctgcaggcctggatggacagagaggtgcactaccacggcgagcccatcagcgtgaacgtgagcatcaacaactgcaccaacaaggtgatcaagaagatcaagatcagcgtggaccagatcaccgacgtggtgctgtacagcctggacaagtacaccaagaccgtgttcatccaggagttcaccgagaccgtggccgccaacagcagcttcagccagagcttcgccgtgacccccatcctggccgccagctgccagaagagaggcctggccctggacggcaagctgaagcacgaggacaccaacctggccagcagcaccatcatcagacccggcatggacaaggagctgctgggcatcctggtgagctacaaggtgagagtgaacctgatggtgagctgcggcggcatcctgggcgacctgaccgccagcgacgtgggcgtggagctgcccctggtgctgatccaccccaagcccagccacgaggccgccagatag

SEQ ID NO: 73268 - DNA, 993 bp, synthetic construct
  misc_feature 1..993: note = Description of Artificial Sequence: Synthetic coding sequence
  source 1..993: mol_type = other DNA
atgggcgagaagcccggcaccagagtgttcaagaagagcagccccaactgcaagctgaccgtgtacctgggcaagagagacttcgtggaccacctggacaaggtggaccccgtggacggcgtggtgctggtggaccccgactacctgaaggacagaaaggtgttcgtgaccctgacctgcgccttcagatacggcagagaggacctggacgtgctgggcctgagcttcagaaaggacctgttcatcgccacctaccaggccttcccccccgtgcccaacccccccagaccccccaccagactgcaggacagactgctgagaaagctgggccagcacgcccaccccttcttcttcaccatcccccagaacctgccctgcagcgtgaccctgcagcccggccccgaggacaccggcaaggcctgcggcgtggacttcgagatcagagccttctgcgccaagagcctggaggagaagagccacaagagaaacagcgtgagactggtgatcagaaaggtgcagttcgcccccgagaagcccggcccccagcccagcgccgagaccaccagacacttcctgatgagcgacagaagcctgcacctggaggccagcctggacaaggagctgtactaccacggcgagcccctgaacgtgaacgtgcacgtgaccaacaacagcaccaagaccgtgaagaagatcaaggtgagcgtgagacagtacgccgacatctgcctgttcagcaccgcccagtacaagtgccccgtggcccagctggagcaggacgaccagagagagggcggctgccagcagggcggcgccggcaaccccggcgtgctgcagggccagggcgaggccggcggcgtgagcagaagaggctgcctgtgcggcgccgccttctgcagctacgccccccaggcccccagaccccacccccccccccagacccccgtgagcagaagcggcgacagatgcccctgcggccaccagccccactag

SEQ ID NO: 73269 - DNA, 1245 bp, synthetic construct
  misc_feature 1..1245: note = Description of Artificial Sequence: Synthetic coding sequence
  source 1..1245: mol_type = other DNA
atggtgctgggcaaggtgaagagcctgaccatcagcttcgactgcctgaacgacagcaacgtgcccgtgtacagcagcggcgacaccgtgagcggcagagtgaacctggaggtgaccggcgagatcagagtgaagagcctgaagatccacgccagaggccacgccaaggtgagatggaccgagagcagaaacgccggcagcaacaccgcctacacccagaactacaccgaggaggtggagtacttcaaccacaaggacatcctgatcggccacgagagagacgacgacaacagcgaggagggcttccacaccatccacagcggcagacacgagtacgccttcagcttcgagctgccccagacccccctggccaccagcttcgagggcagacacggcagcgtgagatactgggtgaaggccgagctgcacagaccctggctgctgcccgtgaagctgaagaaggagttcaccgtgttcgagcacatcgacatcaacacccccagcctgctgagcccccaggccggcaccaaggagaagaccctgtgctgctggttctgcaccagcggccccatcagcctgagcgccaagatcgagagaaagggctacacccccggcgagagcatccagatcttcgccgagatcgagaactgcagcagcagaatggtggtgcccaaggccgccatctaccagacccaggccttctacgccaagggcaagatgaaggaggtgaagcagctggtggccaacctgagaggcgagagcctgagcagcggcaagaccgagacctggaacggcaagctgctgaagatcccccccgtgagccccagcatcctggactgcagcatcatcagagtggagtacagcctgatggtgtacgtggacatccccggcgccatggacctgttcctgaacctgcccctggtgatcggcaccatccccctgcaccccttcggcagcagaaccagcagcgtgagcagccagtgcagcatgaacatgaactggctgagcctgagcctgcccgagagacccgaggccccccccagctacgccgaggtggtgaccgaggagcagagaagaaacaacctggcccccgtgagcgcctgcgacgacttcgagagagccctgcagggccccctgttcgcctacatccaggagttcagattcctgcccccccccctgtacagcgagatcgaccccaaccccgaccagagcgccgacgacagacccagctgccccagcagatag

SEQ ID NO: 73270 - DNA, 1233 bp, synthetic construct
  misc_feature 1..1233: note = Description of Artificial Sequence: Synthetic coding sequence
  source 1..1233: mol_type = other DNA
atgggcgacaagggcaccagagtgttcaagaaggccagccccaacggcaagctgaccgtgtacctgggcaagagagacttcgtggaccacatcgacctggtggaccccgtggacggcgtggtgctggtggaccccgagtacctgaaggagagaagagtgtacgtgaccctgacctgcgccttcagatacggcagagaggacctggacgtgctgggcctgaccttcagaaaggacctgttcgtggccaacgtgcagagcttcccccccgcccccgaggacaagaagcccctgaccagactgcaggagagactgatcaagaagctgggcgagcacgcctaccccttcaccttcgagatcccccccaacctgccctgcagcgtgaccctgcagcccggccccgaggacaccggcaaggcctgcggcgtggactacgaggtgaaggccttctgcgccgagaacctggaggagaagatccacaagagaaacagcgtgagactggtgatcagaaaggtgcagtacgcccccgagagacccggcccccagcccaccgccgagaccaccagacagttcctgatgagcgacaagcccctgcacctggaggccagcctggacaaggagatctactaccacggcgagcccatcagcgtgaacgtgcacgtgaccaacaacaccaacaagaccgtgaagaagatcaagatcagcgtgagacagtacgccgacatctgcctgttcaacaccgcccagtacaagtgccccgtggccatggaggaggccgacgacaccgtggcccccagcagcaccttctgcaaggtgtacaccctgacccccttcctggccaacaacagagagaagagaggcctggccctggacggcaagctgaagcacgaggacaccaacctggccagcagcaccctgctgagagagggcgccaacagagagatcctgggcatcatcgtgagctacaaggtgaaggtgaagctggtggtgagcagaggcggcgacgtggccgtggagctgcccttcaccctgatgcaccccaagcccaaggaggagcccccccacagagaggtgcccgagaacgagacccccgtggacaccaacctgatcgagctggacaccaacgacgacgacatcgtgttcgaggacttcgccagacagagactgaagggcatgaaggacgacaaggaggaggaggaggacggcaccggcagcccccagctgaacaacagatag

SEQ ID NO: 73271 - DNA, 1257 bp, synthetic construct
  misc_feature 1..1257: note = Description of Artificial Sequence: Synthetic coding sequence
  source 1..1257: mol_type = other DNA
atgggcgacaagggcaccagagtgttcaagaaggccagccccaacggcaagctgaccgtgtacctgggcaagagagacttcgtggaccacatcgacctggtggaccccgtggacggcgtggtgctggtggaccccgagtacctgaaggagagaagagtgtacgtgaccctgacctgcgccttcagatacggcagagaggacctggacgtgctgggcctgaccttcagaaaggacctgttcgtggccaacgtgcagagcttcccccccgcccccgaggacaagaagcccctgaccagactgcaggagagactgatcaagaagctgggcgagcacgcctaccccttcaccttcgagatcccccccaacctgccctgcagcgtgaccctgcagcccggccccgaggacaccggcaaggcctgcggcgtggactacgaggtgaaggccttctgcgccgagaacctggaggagaagatccacaagagaaacagcgtgagactggtgatcagaaaggtgcagtacgcccccgagagacccggcccccagcccaccgccgagaccaccagacagttcctgatgagcgacaagcccctgcacctggaggccagcctggacaaggagatctactaccacggcgagcccatcagcgtgaacgtgcacgtgaccaacaacaccaacaagaccgtgaagaagatcaagatcagcgtgagacagtacgccgacatctgcctgttcaacaccgcccagtacaagtgccccgtggccatggaggaggccgacgacaccgtggcccccagcagcaccttctgcaaggtgtacaccctgacccccttcctggccaacaacagagagaagagaggcctggccctggacggcaagctgaagcacgaggacaccaacctggccagcagcaccctgctgagagagggcgccaacagagagatcctgggcatcatcgtgagctacaaggtgaaggtgaagctggtggtgagcagaggcggcctgctgagaggcctgtgcttcagcgacgtggccgtggagctgcccttcaccctgatgcaccccaagcccaaggaggagcccccccacagagaggtgcccgagaacgagacccccgtggacaccaacctgatcgagctggacaccaacgacgacgacatcgtgttcgaggacttcgccagacagagactgaagggcatgaaggacgacaaggaggaggaggaggacggcaccggcagcccccagctgaacaacagatag

SEQ ID NO: 73272 - DNA, 1257 bp, synthetic construct
  misc_feature 1..1257: note = Description of Artificial Sequence: Synthetic coding sequence
  source 1..1257: mol_type = other DNA
atgggcgacaagggcaccagagtgttcaagaaggccagccccaacggcaagctgaccgtgtacctgggcaagagagacttcgtggaccacatcgacctggtggaccccgtggacggcgtggtgctggtggaccccgagtacctgaaggagagaagagtgtacgtgaccctgacctgcgccttcagatacggcagagaggacctggacgtgctgggcctgaccttcagaaaggacctgttcgtggccaacgtgcagagcttcccccccgcccccgaggacaagaagcccctgaccagactgcaggagagactgatcaagaagctgggcgagcacgcctaccccttcaccttcgagatcccccccaacctgccctgcagcgtgaccctgcagcccggccccgaggacaccggcaaggcctgcggcgtggactacgaggtgaaggccttctgcgccgagaacctggaggagaagatccacaagagaaacagcgtgagactggtgatcagaaaggtgcagtacgcccccgagagacccggcccccagcccaccgccgagaccaccagacagttcctgatgagcgacaagcccctgcacctggaggccagcctggacaaggagatctactaccacggcgagcccatcagcgtgaacgtgcacgtgaccaacaacaccaacaagaccgtgaagaagatcaagatcagcgtgagacagtacgccgacatctgcctgttcaacaccgcccagtacaagtgccccgtggccatggaggaggccgacgacaccgtggcccccagcagcaccttctgcaaggtgtacaccctgacccccttcctggccaacaacagagagaagagaggcctggccctggacggcaagctgaagcacgaggacaccaacctggccagcagcaccctgctgagagagggcgccaacagagagatcctgggcatcatcgtgagctacaaggtgaaggtgaagctggtggtgagcagaggcggcctgctgggcgacctggccagcagcgacgtggccgtggagctgcccttcaccctgatgcaccccaagcccaaggaggagcccccccacagagaggtgcccgagaacgagacccccgtggacaccaacctgatcgagctggacaccaacgacgacgacatcgtgttcgaggacttcgccagacagagactgaagggcatgaaggacgacaaggaggaggaggaggacggcaccggcagcccccagctgaacaacagatag

SEQ ID NO: 73273 - DNA, 1230 bp, synthetic construct
  misc_feature 1..1230: note = Description of Artificial Sequence: Synthetic coding sequence
  source 1..1230: mol_type = other DNA
atgggcgagaagcccggcaccagagtgttcaagaagagcagccccaactgcaagctgaccgtgtacctgggcaagagagacttcgtggaccacctggacaaggtggaccccgtggacggcgtggtgctggtggaccccgactacctgaaggacagaaaggtgttcgtgaccctgacctgcgccttcagatacggcagagaggacctggacgtgctgggcctgagcttcagaaaggacctgttcatcgccacctaccaggccttcccccccgtgcccaacccccccagaccccccaccagactgcaggacagactgctgagaaagctgggccagcacgcccaccccttcttcttcaccatcccccagaacctgccctgcagcgtgaccctgcagcccggccccgaggacaccggcaaggcctgcggcgtggacttcgagatcagagccttctgcgccaagagcctggaggagaagagccacaagagaaacagcgtgagactggtgatcagaaaggtgcagttcgcccccgagaagcccggcccccagcccagcgccgagaccaccagacacttcctgatgagcgacagaagcctgcacctggaggccagcctggacaaggagctgtactaccacggcgagcccctgaacgtgaacgtgcacgtgaccaacaacagcaccaagaccgtgaagaagatcaaggtgagcgtgagacagtacgccgacatctgcctgttcagcaccgcccagtacaagtgccccgtggcccagctggagcaggacgaccaggtgagccccagcagcaccttctgcaaggtgtacaccatcacccccctgctgagcgacaacagagagaagagaggcctggccctggacggcaagctgaagcacgaggacaccaacctggccagcagcaccatcgtgaaggagggcgccaacaaggaggtgctgggcatcctggtgagctacagagtgaaggtgaagctggtggtgagcagaggcggcgacgtgagcgtggagctgcccttcgtgctgatgcaccccaagccccacgaccacatccccctgcccagaccccagagcgccgcccccgagaccgacgtgcccgtggacaccaacctgatcgagttcgacaccaactacgccaccgacgacgacatcgtgttcgaggacttcgccagactgagactgaagggcatgaaggacgacgactacgacgaccagctgtgctag

SEQ ID NO: 73274 - DNA, 1185 bp, synthetic construct
  misc_feature 1..1185: note = Description of Artificial Sequence: Synthetic coding sequence
  source 1..1185: mol_type = other DNA
atgggcgagaagcccggcaccagagtgttcaagaagagcagccccaactgcaagctgaccgtgtacctgggcaagagagacttcgtggaccacctggacaaggtggaccccgtggtgttcgtgaccctgacctgcgccttcagatacggcagagaggacctggacgtgctgggcctgagcttcagaaaggacctgttcatcgccacctaccaggccttcccccccgtgcccaacccccccagaccccccaccagactgcaggacagactgctgagaaagctgggccagcacgcccaccccttcttcttcaccatcccccagaacctgccctgcagcgtgaccctgcagcccggccccgaggacaccggcaaggcctgcggcgtggacttcgagatcagagccttctgcgccaagagcctggaggagaagagccacaagagaaacagcgtgagactggtgatcagaaaggtgcagttcgcccccgagaagcccggcccccagcccagcgccgagaccaccagacacttcctgatgagcgacagaagcctgcacctggaggccagcctggacaaggagctgtactaccacggcgagcccctgaacgtgaacgtgcacgtgaccaacaacagcaccaagaccgtgaagaagatcaaggtgagcgtgagacagtacgccgacatctgcctgttcagcaccgcccagtacaagtgccccgtggcccagctggagcaggacgaccaggtgagccccagcagcaccttctgcaaggtgtacaccatcacccccctgctgagcgacaacagagagaagagaggcctggccctggacggcaagctgaagcacgaggacaccaacctggccagcagcaccatcgtgaaggagggcgccaacaaggaggtgctgggcatcctggtgagctacagagtgaaggtgaagctggtggtgagcagaggcggcgacgtgagcgtggagctgcccttcgtgctgatgcaccccaagccccacgaccacatccccctgcccagaccccagagcgccgcccccgagaccgacgtgcccgtggacaccaacctgatcgagttcgacaccaactacgccaccgacgacgacatcgtgttcgaggacttcgccagactgagactgaagggcatgaaggacgacgactacgacgaccagctgtgctag

SEQ ID NO: 73275 - DNA, 1266 bp, synthetic construct
  misc_feature 1..1266: note = Description of Artificial Sequence: Synthetic coding sequence
  source 1..1266: mol_type = other DNA
atgggcgagaagcccggcaccagagtgttcaagaagagcagccccaactgcaagctgaccgtgtacctgggcaagagagacttcgtggaccacctggacaaggtggaccccgtggacggcgtggtgctggtggaccccgactacctgaaggacagaaaggtgttcgtgaccctgacctgcgccttcagatacggcagagaggacctggacgtgctgggcctgagcttcagaaaggacctgttcatcgccacctaccaggccttcccccccgtgcccaacccccccagaccccccaccagactgcaggacagactgctgagaaagctgggccagcacgcccaccccttcttcttcaccatcccccagaacctgccctgcagcgtgaccctgcagcccggccccgaggacaccggcaaggcctgcggcgtggacttcgagatcagagccttctgcgccaagagcctggaggagaagagccacaagagaaacagcgtgagactggtgatcagaaaggtgcagttcgcccccgagaagcccggcccccagcccagcgccgagaccaccagacacttcctgatgagcgacagaagcctgcacctggaggccagcctggacaaggagctgtactaccacggcgagcccctgaacgtgaacgtgcacgtgaccaacaacagcaccaagaccgtgaagaagatcaaggtgagcgtgagacagtacgccgacatctgcctgttcagcaccgcccagtacaagtgccccgtggcccagctggagcaggacgaccaggtgagccccagcagcaccttctgcaaggtgtacaccatcacccccctgctgagcgacaacagagagaagagaggcctggccctggacggcaagctgaagcacgaggacaccaacctggccagcagcaccatcgtgaaggagggcgccaacaaggaggtgctgggcatcctggtgagctacagagtgaaggtgaagctggtggtgagcagaggcggcgacgtgagcgtggagctgcccttcgtgctgatgcaccccaagccccacgaccacatccccctgcccagaccccagagcgcccccacccccaccccccccctgcccgtgccccccgccgcccccgagaccgacgtgcccgtggacaccaacctgatcgagttcgacaccaactacgccaccgacgacgacatcgtgttcgaggacttcgccagactgagactgaagggcatgaaggacgacgactacgacgaccagctgtgctag

SEQ ID NO: 73276 - DNA, 1233 bp, synthetic construct
  misc_feature 1..1233: note = Description of Artificial Sequence: Synthetic coding sequence
  source 1..1233: mol_type = other DNA
gccgccaacagagccggcggcggcagagcccaccacggcggcgagaccagagaccagctgaccgtgtacctgggcaagagagacttcgtggaccacctggacaaggtggaccccgtggacggcgtggtgctggtggaccccgactacctgaaggacagaaaggtgttcgtgaccctgacctgcgccttcagatacggcagagaggacctggacgtgctgggcctgagcttcagaaaggacctgttcatcgccacctaccaggccttcccccccgtgcccaacccccccagaccccccaccagactgcaggacagactgctgagaaagctgggccagcacgcccaccccttcttcttcaccatcccccagaacctgccctgcagcgtgaccctgcagcccggccccgaggacaccggcaaggcctgcggcgtggacttcgagatcagagccttctgcgccaagagcctggaggagaagagccacaagagaaacagcgtgagactggtgatcagaaaggtgcagttcgcccccgagaagcccggcccccagcccagcgccgagaccaccagacacttcctgatgagcgacagaagcctgcacctggaggccagcctggacaaggagctgtactaccacggcgagcccctgaacgtgaacgtgcacgtgaccaacaacagcaccaagaccgtgaagaagatcaaggtgagcgtgagacagtacgccgacatctgcctgttcagcaccgcccagtacaagtgccccgtggcccagctggagcaggacgaccaggtgagccccagcagcaccttctgcaaggtgtacaccatcacccccctgctgagcgacaacagagagaagagaggcctggccctggacggcaagctgaagcacgaggacaccaacctggccagcagcaccatcgtgaaggagggcgccaacaaggaggtgctgggcatcctggtgagctacagagtgaaggtgaagctggtggtgagcagaggcggcgacgtgagcgtggagctgcccttcgtgctgatgcaccccaagccccacgaccacatccccctgcccagaccccagagcgccgcccccgagaccgacgtgcccgtggacaccaacctgatcgagttcgacaccaactacgccaccgacgacgacatcgtgttcgaggacttcgccagactgagactgaagggcatgaaggacgacgactacgacgaccagctgtgctag

SEQ ID NO: 73277 - DNA, 1047 bp, synthetic construct
  misc_feature 1..1047: note = Description of Artificial Sequence: Synthetic coding sequence
  source 1..1047: mol_type = other DNA
atggccgccggcgtggccggctggggcgtggaggccgaggagttcgaggacgcccccgacgtggagcccctggagcccaccctgagcaacatcatcgagcagagaagcctgaagtggatcttcgtgggcggcaagggcggcgtgggcaagaccacctgcagctgcagcctggccgtgcagctgagcaagggcagagagagcgtgctgatcatcagcaccgaccccgcccacaacatcagcgacgccttcgaccagaagttcagcaaggtgcccaccaaggtgaagggctacgacaacctgttcgccatggagatcgaccccagcctgggcgtggccgagctgcccgacgagttcttcgaggaggacaacatgctgagcatgggcaagaagatgatgcaggaggccatgagcgccttccccggcatcgacgaggccatgagctacgccgaggtgatgagactggtgaagggcatgaacttcagcgtggtggtgttcgacaccgcccccaccggccacaccctgagactgctgaacttccccaccatcgtggagagaggcctgggcagactgatgcagatcaagaaccagatcagccccttcatcagccagatgtgcaacatgctgggcctgggcgacatgaacgccgaccagctggccagcaagctggaggagaccctgcccgtgatcagaagcgtgagcgagcagttcaaggaccccgagcagaccaccttcatctgcgtgtgcatcgccgagttcctgagcctgtacgagaccgagagactgatccaggagctggccaagtgcaagatcgacacccacaacatcatcgtgaaccagctggtgttccccgaccccgagaagccctgcaagatgtgcgaggccagacacaagatccaggccaagtacctggaccagatggaggacctgtacgaggacttccacatcgtgaagctgcccctgctgccccacgaggtgagaggcgccgacaaggtgaacaccttcagcgccctgctgctggagccctacaagccccccagcgcccagtag

SEQ ID NO: 73278 - DNA, 1047 bp, synthetic construct; identical to SEQ ID NO: 73277
  misc_feature 1..1047: note = Description of Artificial Sequence: Synthetic coding sequence
  source 1..1047: mol_type = other DNA

SEQ ID NO: 73279 - DNA, 1128 bp, synthetic construct
  misc_feature 1..1128: note = Description of Artificial Sequence: Synthetic coding sequence
  source 1..1128: mol_type = other DNA
atggccgccctgagagacgccgagatccagaaggacgtgcagacctactacggccaggtgctgaagagaagcgccgacctgcagaccaacggctgcgtgaccaccgccagacccgtgcccaagcacatcagagaggccctgcagaacgtgcacgaggaggtggccctgagatactacggctgcggcctggtgatccccgagcacctggagaactgctggatcctggacctgggcagcggcagcggcagagactgctacgtgctgagccagctggtgggcgagaagggccacgtgaccggcatcgacatgaccaagggccaggtggaggtggccgagaagtacctggactaccacatggagaagtacggcttccaggccagcaacgtgaccttcatccacggctacatcgagaagctgggcgaggccggcatcaagaacgagagccacgacatcgtggtgagcaactgcgtgatcaacctggtgcccgacaagcagcaggtgctgcaggaggcctacagagtgctgaagcacggcggcgagctgtacttcagcgacgtgtacaccagcctggagctgcccgaggagatcagaacccacaaggtgctgtggggcgagtgcctgggcggcgccctgtactggaaggagctggccgtgctggcccagaagatcggcttctgcccccccagactggtgaccgccaacctgatcaccatccagaacaaggagctggagagagtgatcggcgactgcagattcgtgagcgccaccttcagactgttcaagcacagcaagaccggccccaccaagagatgccaggtgatctacaacggcggcatcaccggccacgagaaggagctgatgttcgacgccaacttcaccttcaaggagggcgagatcgtggaggtggacgaggagaccgccgccatcctgaagaacagcagattcgcccaggacttcctgatcagacccatcggcgagaagctgcccaccagcggcggctgcagcgccctggagctgaaggacatcatcaccgaccccttcaagctggccgaggagagcgacagcatgaagagcagatgcgtgcccgacgccgccggcggctgctgcggcaccaagaagagctgctag

SEQ ID NO: 73280 - DNA, 816 bp, synthetic construct
  misc_feature 1..816: note = Description of Artificial Sequence: Synthetic coding sequence
  source 1..816: mol_type = other DNA
atgggcaacggcggcagaagcggcctgcagcagggcaagggcaacgtggacggcgtggccgccacccccaccgccgccagcgccagctgccagtacagatgcatcgagtgcaaccaggaggccaaggagctgtacagagactacaaccacggcgtgctgaagatcaccatctgcaagagctgccagaagcccgtggacaagtacatcgagtacgaccccgtgatcatcctgatcaacgccatcctgtgcaaggcccaggcctacagacacatcctgttcaacacccagatcaacatccacggcaagctgtgcatcttctgcctgctgtgcgaggcctacctgagatggtggcagctgcaggacagcaaccagaacaccgcccccgacgacctgatcagatacgccaaggagtgggacttctacagaatgttcgccatcgccgccctggagcagaccgcctacttcatcggcatcttcaccttcctgtgggtggagagacccatgaccgccaagaagaagcccaacttcatcctgctgctgaaggccctgctgctgagcagctacggcaagctgctgctgatccccgccgtgatctgggagcacgactacaccagcgtgtgcctgaagctgatcaaggtgttcgtgctgaccagcaacttccaggccatcagagtgaccctgaacatcaacagaaagctgagcttcctggccgtgctgagcggcctgctgctggagagcatcatggtgtacttcttccagagcatggagtgggacgtgggcagcgactacgccatcttcaagagccaggacttctag

SEQ ID NO: 73281 - DNA, 807 bp, synthetic construct
  misc_feature 1..807: note = Description of Artificial Sequence: Synthetic coding sequence
  source 1..807: mol_type = other DNA
tgaggcagaagcggcctgcagcagggcaagggcaacgtggacggcgtggccgccacccccaccgccgccagcgccagctgccagtacagatgcatcgagtgcaaccaggaggccaaggagctgtacagagactacaaccacggcgtgctgaagatcaccatctgcaagagctgccagaagcccgtggacaagtacatcgagtacgaccccgtgatcatcctgatcaacgccatcctgtgcaaggcccaggcctacagacacatcctgttcaacacccagatcaacatccacggcaagctgtgcatcttctgcctgctgtgcgaggcctacctgagatggtggcagctgcaggacagcaaccagaacaccgcccccgacgacctgatcagatacgccaaggagtgggacttctacagaatgttcgccatcgccgccctggagcagaccgcctacttcatcggcatcttcaccttcctgtgggtggagagacccatgaccgccaagaagaagcccaacttcatcctgctgctgaaggccctgctgctgagcagctacggcaagctgctgctgatccccgccgtgatctgggagcacgactacaccagcgtgtgcctgaagctgatcaaggtgttcgtgctgaccagcaacttccaggccatcagagtgaccctgaacatcaacagaaagctgagcttcctggccgtgctgagcggcctgctgctggagagcatcatggtgtacttcttccagagcatggagtgggacgtgggcagcgactacgccatcttcaagagccaggacttctag

SEQ ID NO: 73282 - DNA, 2547 bp, synthetic construct
  misc_feature 1..2547: note = Description of Artificial Sequence: Synthetic coding sequence
  source 1..2547: mol_type = other DNA
atgaacagcagcagcgccaacatcacctacgccagcagaaagagaagaaagcccgtgcagaagaccgtgaagcccatccccgccgagggcatcaagagcaaccccagcaagagacacagagacagactgaacaccgagctggacagactggccagcctgctgcccttcccccaggacgtgatcaacaagctggacaagctgagcgtgctgagactgagcgtgagctacctgagagccaagagcttcttcgacgtggccctgaagagcagccccaccgagagaaacggcggccaggacaactgcagagccgccaacttcagagagggcctgaacctgcaggagggcgagttcctgctgcaggccctgaacggcttcgtgctggtggtgaccaccgacgccctggtgttctacgccagcagcaccatccaggactacctgggcttccagcagagcgacgtgatccaccagagcgtgtacgagctgatccacaccgaggacagagccgagttccagagacagctgcactgggccctgaaccccagccagtgcaccgagagcggccagggcatcgaggaggccaccggcctgccccagaccgtggtgtgctacaaccccgaccagatcccccccgagaacagccccctgatggagagatgcttcatctgcagactgagatgcctgctggacaacagcagcggcttcctggccatgaacttccagggcaagctgaagtacctgcacggccagaagaagaagggcaaggacggcagcatcctgcccccccagctggccctgttcgccatcgccacccccctgcagccccccagcatcctggagatcagaaccaagaacttcatcttcagaaccaagcacaagctggacttcacccccatcggctgcgacgccaagggcagaatcgtgctgggctacaccgaggccgagctgtgcaccagaggcagcggctaccagttcatccacgccgccgacatgctgtactgcgccgagagccacatcagaatgatcaagaccggcgagagcggcatgatcgtgttcagactgctgaccaagaacaacagatggacctgggtgcagagcaacgccagactgctgtacaagaacggcagacccgactacatcatcgtgacccagagacccctgaccgacgaggagggcaccgagcacctgagaaagagaaacaccaagctgcccttcatgttcaccaccggcgaggccgtgctgtacgaggccaccaaccccttccccgccatcatggaccccctgcccctgagaaccaagaacggcaccagcggcaaggacagcgccaccaccagcaccctgagcaaggacagcctgaaccccagcagcctgctggccgccatgatgcagcaggacgagagcatctacctgtaccccgccagcagcaccagcagcaccgcccccttcgagaacaacttcttcaacgagagcatgaacgagtgcagaaactggcaggacaacaccgcccccatgggcaacgacaccatcctgaagcacgagcagatcgaccagccccaggacgtgaacagcttcgccggcggccaccccggcctgttccaggacagcaagaacagcgacctgtacagcatcatgaagaacctgggcatcgacttcgaggacatcagacacatgcagaacgagaagttcttcagaaacgacttcagcggcgaggtggacttcagagacatcgacctgaccgacgagatcctgacctacgtgcaggacagcctgagcaagagccccttcatccccagcgactaccagcagcagcagagcctggccctgaacagcagctgcatggtgcaggagcacctgcacctggagcagcagcagcagcaccaccagaagcaggtggtggtggagccccagcagcagctgtgccagaagatgaagcacatgcaggtgaacggcatgttcgagaactggaacagcaaccagttcgtgcccttcaactgcccccagcaggacccccagcagtacaacgtgttcaccgacctgcacggcatcagccaggagttcccctacaagagcgagatggacagcatgccctacacccagaacttcatcagctgcaaccagcccgtgctgccccagcacagcaagtgcaccgagctggactaccccatgggcagcttcgagcccagcccctaccccaccaccagcagcctggaggacttcgtgacctgcctgcagctgcccgagaaccagaagcacggcctgaacccccagagcgccatcatcaccccccagacctgctacgccggcgccgtgagcatgtaccagtgccagcccgagccccagcacacccacgtgggccagatgcagtacaaccccgtgctgcccggccagcaggccttcctgaacaagttccagaacggcgtgctgaacgagacctaccccgccgagctgaacaacatcaacaacacccagaccaccacccacctgcagcccctgcaccaccccagcgaggccagacccttccccgacctgaccagcagcggcttcctgtag

SEQ ID NO: 73283 - DNA, 2547 bp, synthetic construct; identical to SEQ ID NO: 73282
  misc_feature 1..2547: note = Description of Artificial Sequence: Synthetic coding sequence
  source 1..2547: mol_type = other DNA

SEQ ID NO: 73284 - DNA, 993 bp, synthetic construct
  misc_feature 1..993: note = Description of Artificial Sequence: Synthetic coding sequence
  source 1..993: mol_type = other DNA
atggccgacatcatcgccagactgagagaggacggcatccagaagagagtgatccaggagggcagaggcgagctgcccgacttccaggacggcaccaaggccaccttccactacagaaccctgcacagcgacgacgagggcaccgtgctggacgacagcagagccagaggcaagcccatggagctgatcatcggcaagaagttcaagctgcccgtgtgggagaccatcgtgtgcaccatgagagagggcgagatcgcccagttcctgtgcgacatcaagcacgtggtgctgtaccccctggtggccaagagcctgagaaacatcgccgtgggcaaggaccccctggagggccagagacactgctgcggcgtggcccagatgagagagcacagcagcctgggccacgccgacctggacgccctgcagcagaacccccagcccctgatcttccacatggagatgctgaaggtggagagccccggcacctaccagcaggacccctgggccatgaccgacgaggagaaggccaaggccgtgcccctgatccaccaggagggcaacagactgtacagagagggccacgtgaaggaggccgccgccaagtactacgacgccatcgcctgcctgaagaacctgcagatgaaggagcagcccggcagccccgagtggatccagctggaccagcagatcacccccctgctgctgaactactgccagtgcaagctggtggtggaggagtactacgaggtgctggaccactgcagcagcatcctgaacaagtacgacgacaacgtgaaggcctacttcaagagaggcaaggcccacgccgccgtgtggaacgcccaggaggcccaggccgacttcgccaaggtgctggagctggaccccgccctggcccccgtggtgagcagagagctgcaggccctggaggccagaatcagacagaaggacgaggaggacaaggccagattcagaggcatcttcagccactag

SEQ ID NO: 73285 - DNA, 966 bp, synthetic construct
  misc_feature 1..966: note = Description of Artificial Sequence: Synthetic coding sequence
  source 1..966: mol_type = other DNA
atggacgccgccctgctgctgaacgtggagggcgtgaagaagaccatcctgcacggcggcaccggcgagctgcccaacttcatcaccggcagcagagtgatcttccacttcagaaccatgaagtgcgacgaggagagaaccgtgatcgacgacagcagacaggtgggccagcccatgcacatcatcatcggcaacatgttcaagctggaggtgtgggagatcctgctgaccagcatgagagtgcacgaggtggccgagttctggtgcgacaccatcgtggacgcccccagcgactaccagagagagacctggaacctgagcaaccacgagaagatgaaggccgtgcccgtgctgcacggcgagggcaacagactgttcaagctgggcagatacgaggaggccagcagcaagtaccaggaggccatcatctgcctgagaaacctgcagaccaaggagaagccctgggaggtgcagtggctgaagctggagaagatgatcaacaccctgatcctgaactactgccagtgcctgctgaagaaggaggagtactacgaggtgctggagcacaccagcgacatcctgagacaccaccccggcatcgtgaaggcctactacgtgagagccagagcccacgccgaggtgtggaacgaggccgaggccaaggccgacctgcagaaggtgctggagctggagcccagcatgcagaaggccgtgagaagagagctgagactgctggagaacagaatggccgagaagcaggaggaggagagactgagatgcagaaacatgctgagccagggcgccacccagccccccgccgagccccccaccgagccccccgcccagagcagcaccgagccccccgccgagccccccaccgcccccagcgccgagctgagcgccggcccccccgccgagcccgccaccgagcccccccccagccccggccacagcctgcagcactag

SEQ ID NO: 73286 - DNA, 975 bp, synthetic construct
  misc_feature 1..975: note = Description of Artificial Sequence: Synthetic coding sequence
  source 1..975: mol_type = other DNA
atggacgccgccctgctgctgaacgtggagggcgtgaagaagaccatcctgcacggcggcaccggcgagctgcccaacttcatcaccggcagcagacacaccggcgtgtaccccatcctgagcagaagcctgagacagatggcccagggcaaggaccccaccgagtggcacgtgcacacctgcggcctggccaacatgttcgcctaccacaccctgggctacgaggacctggacgagctgcagaaggagccccagcccctggtgttcgtgatcgagctgctgcaggtggacgcccccagcgactaccagagagagacctggaacctgagcaaccacgagaagatgaaggccgtgcccgtgctgcacggcgagggcaacagactgttcaagctgggcagatacgaggaggccagcagcaagtaccaggaggccatcatctgcctgagaaacctgcagaccaaggagaagccctgggaggtgcagtggctgaagctggagaagatgatcaacaccctgatcctgaactactgccagtgcctgctgaagaaggaggagtactacgaggtgctggagcacaccagcgacatcctgagacaccaccccggcatcgtgaaggcctactacgtgagagccagagcccacgccgaggtgtggaacgaggccgaggccaaggccgacctgcagaaggtgctggagctggagcccagcatgcagaaggccgtgagaagagagctgagactgctggagaacagaatggccgagaagcaggaggaggagagactgagatgcagaaacatgctgagccagggcgccacccagccccccgccgagccccccaccgagccccccgcccagagcagcaccgagccccccgccgagccccccaccgcccccagcgccgagctgagcgccggcccccccgccgagcccgccaccgagcccccccccagccccggccacagcctgcagcactag

SEQ ID NO: 73287 - DNA, 1155 bp, synthetic construct
  misc_feature 1..1155: note = Description of Artificial Sequence: Synthetic coding sequence
  source 1..1155: mol_type = other DNA
atggacgccgccctgctgctgaacgtggagggcgtgaagaagaccatcctgcacggcggcaccggcgagctgcccaacttcatcaccggcagcagagtgatcttccacttcagaaccatgaagtgcgacgaggagagaaccgtgatcgacgacagcagacaggtgggccagcccatgcacatcatcatcggcaacatgttcaagctggaggtgtgggagatcctgctgaccagcatgagagtgcacgaggtggccgagttctggtgcgacaccatccacaccggcgtgtaccccatcctgagcagaagcctgagacagatggcccagggcaaggaccccaccgagtggcacgtgcacacctgcggcctggccaacatgttcgcctaccacaccctgggctacgaggacctggacgagctgcagaaggagccccagcccctggtgttcgtgatcgagctgctgcaggtggacgcccccagcgactaccagagagagacctggaacctgagcaaccacgagaagatgaaggccgtgcccgtgctgcacggcgagggcaacagactgttcaagctgggcagatacgaggaggccagcagcaagtaccaggaggccatcatctgcctgagaaacctgcagaccaaggagaagccctgggaggtgcagtggctgaagctggagaagatgatcaacaccctgatcctgaactactgccagtgcctgctgaagaaggaggagtactacgaggtgctggagcacaccagcgacatcctgagacaccaccccggcatcgtgaaggcctactacgtgagagccagagcccacgccgaggtgtggaacgaggccgaggccaaggccgacctgcagaaggtgctggagctggagcccagcatgcagaaggccgtgagaagagagctgagactgctggagaacagaatggccgagaagcaggaggaggagagactgagatgcagaaacatgctgagccagggcgccacccagccccccgccgagccccccaccgagccccccgcccagagcagcaccgagccccccgccgagccccccaccgcccccagcgccgagctgagcgccggcccccccgccgagcccgccaccgagcccccccccagccccggccacagcctgcagcactag

SEQ ID NO: 73288 - DNA, 981 bp, synthetic construct
  misc_feature 1..981: note = Description of Artificial Sequence: Synthetic coding sequence
  source 1..981: mol_type = other DNA
atggacgccgccctgctgctgaacgtggagggcgtgaagaagaccatcctgcacggcggcaccggcgagctgcccaacttcatcaccggcagcagagtgatcttccacttcagaaccatgaagtgcgacgaggagagaaccgtgatcgacgacagcagacaggtgggccagcccatgcacatcatcatcggcaacatgttcaagctggaggtgtgggagatcctgctgaccagcatgagagtgcacgaggtggccgagttctggtgcgacaccatccacaccggcgtgtaccccatcctgagcagaagcctgagacagatggcccagggcaaggaccccaccgagtggcacgtgcacacctgcggcctggccaacatgttcgcctaccacaccctgggctacgaggacctggacgagctgcagaaggagccccagcccctggtgttcgtgatcgagctgctgcaggtggacgcccccagcgactaccagagagagacctggaacctgagcaaccacgagaagatgaaggccgtgcccgtgctgcacggcgagggcaacagactgttcaagctgggcagatacgaggaggccagcagcaagtaccaggaggccatcatctgcctgagaaacctgcagaccaaggagaagccctgggaggtgcagtggctgaagctggagaagatgatcaacaccctgatcctgaactactgccagtgcctgctgaagaaggaggagtactacgaggtgctggagcacaccagcgacatcctgagacaccaccccggcatcgtgaaggcctactacgtgagagccagagcccacgccgaggtgtggaacgaggccgaggccaaggccgacctgcagaaggtgctggagctggagcccagcatgcagaaggccgtgagaagagagctgagactgctggagaacgcctggagaagaagcagaagaagaagcggctgcgccgccggcacctgctag

SEQ ID NO: 73289 - DNA, 975 bp, synthetic construct; identical to SEQ ID NO: 73286
  misc_feature 1..975: note = Description of Artificial Sequence: Synthetic coding sequence
  source 1..975: mol_type = other DNA

SEQ ID NO: 73290 - DNA, 1251 bp, synthetic construct
  misc_feature 1..1251: note = Description of Artificial Sequence: Synthetic coding sequence
  source 1..1251: mol_type = other DNA
atggccgccaccaccgccaaccccgagatgaccagcgacgtgcccagcctgggccccgccatcgccagcggcaacagcggccccggcatccagggcggcggcgccatcgtgcagagagccatcaagagaagacccggcctggacttcgacgacgacggcgagggcaacagcaagttcctgagatgcgacgacgaccagatgagcaacgacaaggagagattcgccagaagcgacgacgagcagagcagcgccgacaaggagagactggccagagagaaccacagcgagatcgagagaagaagaagaaacaagatgaccgcctacatcaccgagctgagcgacatggtgcccacctgcagcgccctggccagaaagcccgacaagctgaccatcctgagaatggccgtgagccacatgaagagcctgagaggcaccggcaacaccagcaccgacggcagctacaagcccagcttcctgaccgaccaggagctgaagcacctgatcctggaggccgccgacggcttcctgttcatcgtgagctgcgagaccggcagagtggtgtacgtgagcgacagcgtgacccccgtgctgaaccagccccagagcgagtggttcggcagcaccctgtacgaccaggtgcaccccgacgacgtggacaagctgagagagcagctgagcaccagcgagaacgccctgaccggcagaatcctggacctgaagaccggcaccgtgaagaaggagggccagcagagcagcatgagaatgtgcatgggcagcagaagaagcttcatctgcagaatgagatgcggcagcagcagcgtggaccccgtgagcgtgaacagactgagcttcgtgagaaacagatgcagaaacggcctgggcagcgtgaaggacggcgagccccacttcgtggtggtgcactgcaccggctacatcaaggcctggccccccgccggcgtgagcctgcccgacgacgaccccgaggccggccagggcagcaagttctgcctggtggccatcggcagactgcaggtgaccagcagccccaactgcaccgacatgagcaacgtgtgccagcccaccgagttcatcagcagacacaacatcgagggcatcttcaccttcgtggaccacagatgcgtggccaccgtgggctaccagccccaggagctgctgggcaagaacatcgtggagttctgccaccccgaggaccagcagctgctgagagacagcttccagcaggagctgtag

SEQ ID NO: 73291 - DNA, 2223 bp, synthetic construct
  misc_feature 1..2223: note = Description of Artificial Sequence: Synthetic coding sequence
  source 1..2223: mol_type = other DNA
atgtaccaccactgggtgcagcccctgcccctggagaccctggacctggagttcaaggtggaggagcccctgagcagaggcctgctgagcggcgaccaggccggcctgaagtacctgctgctggccttcctgagactggacttcgacgacgacggcgagggcaacagcaagttcctgagatgcgacgacgaccagatgagcaacgacaaggagagattcgccagagagaaccacagcgagatcgagagaagaagaagaaacaagatgaccgcctacatcaccgagctgagcgacatggtgcccacctgcagcgccctggccagaaagcccgacaagctgaccatcctgagaatggccgtgagccacatgaagagcctgagaggcaccggcaacaccagcaccgacggcagctacaagcccagcttcctgaccgaccaggagctgaagcacctgatcctggaggccgccgacggcttcctgttcatcgtgagctgcgagaccggcagagtggtgtacgtgagcgacagcgtgacccccgtgctgaaccagccccagagcgagtggttcggcagcaccctgtacgaccaggtgcaccccgacgacgtggacaagctgagagagcagctgagcaccagcgagaacgccctgaccggcagaatcctggacctgaagaccggcaccgtgaagaaggagggccagcagagcagcatgagaatgtgcatgggcagcagaagaagcttcatctgcagaatgagatgcggcagcagcagcgtggaccccgtgagcgtgaacagactgagcttcgtgagaaacagatgcagaaacggcctgggcagcgtgaaggacggcgagccccacttcgtggtggtgcactgcaccggctacatcaaggcctggccccccgccggcgtgagcctgcccgacgacgaccccgaggccggccagggcagcaagttctgcctggtggccatcggcagactgcaggtgaccagcagccccaactgcaccgacatgagcaacgtgtgccagcccaccgagttcatcagcagacacaacatcgagggcatcttcaccttcgtggaccacagatgcgtggccaccgtgggctaccagccccaggagctgctgggcaagaacatcgtggagttctgccaccccgaggaccagcagctgctgagagacagcttccagcaggtggtgaagctgaagggccaggtgctgagcgtgatgttcagattcagaagcaagaaccaggagtggctgtggatgagaaccagcagcttcaccttccagaacccctacagcgacgagatcgagtacatcatctgcaccaacaccaacgtgaagcccctgacctacagacagcagcagcagcagaccgagctggacatggtgcccggcagagacggcctggccagctacaaccacagccaggtggtgcagcccgtgaccaccaccggccccgagcacagcaagcccctggagaagagcgacggcctgttcgcccaggacagagaccccagattcagcgagatctaccacaacatcaacgccgaccagagcaagggcatcagcagcagcaccgtgcccgccacccagcagctgttcagccagggcaacaccttcccccccacccccagacccgccgagaacttcagaaacagcggcctggccccccccgtgaccatcgtgcagcccagcgccagcgccggccagatgctggcccagatcagcagacacagcaaccccacccagggcgccacccccacctggacccccaccaccagaagcggcttcagcgcccaggtggccacccaggccaccgccaagaccagaaccagccagttcggcgtgggcagcttccagacccccagcagcttcagcagcatgagcctgcccggcgcccccaccgccagccccggcgccgccgcctaccccagcctgaccaacagaggcagcaacttcgcccccgagaccggccagaccgccggccagttccagaccagaaccgccgagggcgtgggcgtgtggccccagtggcagggccagcagccccaccacagaagcagcagcagcgagcagcacgtgcagcagccccccgcccagcagcccggccagcccgaggtgttccaggagatgctgagcatgctgggcgaccagagcaacagctacaacaacgaggagttccccgacctgaccatgttcccccccttcagcgagtag

SEQ ID NO: 73292 - DNA, 1251 bp, synthetic construct; identical to SEQ ID NO: 73290
  misc_feature 1..1251: note = Description of Artificial Sequence: Synthetic coding sequence
  source 1..1251: mol_type = other DNA

SEQ ID NO: 73293 - DNA, 2325 bp, synthetic construct
  misc_feature 1..2325: note = Description of Artificial Sequence: Synthetic coding sequence
  source 1..2325: mol_type = other DNA
atggccgccaccaccgccaaccccgagatgaccagcgacgtgcccagcctgggccccgccatcgccagcggcaacagcggccccggcatccagggcggcggcgccatcgtgcagagagccatcaagagaagacccggcctggacttcgacgacgacggcgagggcaacagcaagttcctgagatgcgacgacgaccagatgagcaacgacaaggagagattcgccagagagaaccacagcgagatcgagagaagaagaagaaacaagatgaccgcctacatcaccgagctgagcgacatggtgcccacctgcagcgccctggccagaaagcccgacaagctgaccatcctgagaatggccgtgagccacatgaagagcctgagaggcaccggcaacaccagcaccgacggcagctacaagcccagcttcctgaccgaccaggagctgaagcacctgatcctggaggccgccgacggcttcctgttcatcgtgagctgcgagaccggcagagtggtgtacgtgagcgacagcgtgacccccgtgctgaaccagccccagagcgagtggttcggcagcaccctgtacgaccaggtgcaccccgacgacgtggacaagctgagagagcagctgagcaccagcgagaacgccctgaccggcagaatcctggacctgaagaccggcaccgtgaagaaggagggccagcagagcagcatgagaatgtgcatgggcagcagaagaagcttcatctgcagaatgagatgcggcagcagcagcgtggaccccgtgagcgtgaacagactgagcttcgtgagaaacagatgcagaaacggcctgggcagcgtgaaggacggcgagccccacttcgtggtggtgcactgcaccggctacatcaaggcctggccccccgccggcgtgagcctgcccgacgacgaccccgaggccggccagggcagcaagttctgcctggtggccatcggcagactgcaggtgaccagcagccccaactgcaccgacatgagcaacgtgtgccagcccaccgagttcatcagcagacacaacatcgagggcatcttcaccttcgtggaccacagatgcgtggccaccgtgggctaccagccccaggagctgctgggcaagaacatcgtggagttctgccaccccgaggaccagcagctgctgagagacagcttccagcaggtggtgaagctgaagggccaggtgctgagcgtgatgttcagattcagaagcaagaaccaggagtggctgtggatgagaaccagcagcttcaccttccagaacccctacagcgacgagatcgagtacatcatctgcaccaacaccaacgtgaagaacagcagccaggagcccagacccaccctgagcaacaccatccagagaccccagctgggccccaccgccaacctgcccctggagatgggcagcggccagctggcccccagacagcagcagcagcagaccgagctggacatggtgcccggcagagacggcctggccagctacaaccacagccaggtggtgcagcccgtgaccaccaccggccccgagcacagcaagcccctggagaagagcgacggcctgttcgcccaggacagagaccccagattcagcgagatctaccacaacatcaacgccgaccagagcaagggcatcagcagcagcaccgtgcccgccacccagcagctgttcagccagggcaacaccttcccccccacccccagacccgccgagaacttcagaaacagcggcctggccccccccgtgaccatcgtgcagcccagcgccagcgccggccagatgctggcccagatcagcagacacagcaaccccacccagggcgccacccccacctggacccccaccaccagaagcggcttcagcgcccagcaggtggccacccaggccaccgccaagaccagaaccagccagttcggcgtgggcagcttccagacccccagcagcttcagcagcatgagcctgcccggcgcccccaccgccagccccggcgccgccgcctaccccagcctgaccaacagaggcagcaacttcgcccccgagaccggccagaccgccggccagttccagaccagaaccgccgagggcgtgggcgtgtggccccagtggcagggccagcagccccaccacagaagcagcagcagcgagcagcacgtgcagcagccccccgcccagcagcccggccagcccgaggtgttccaggagatgctgagcatgctgggcgaccagagcaacagctacaacaacgaggagttccccgacctgaccatgttcccccccttcagcgagtag

SEQ ID NO: 73294 - DNA, 2328 bp, synthetic construct
  misc_feature 1..2328: note = Description of Artificial Sequence: Synthetic coding sequence
  source 1..2328: mol_type = other DNA
atgaccagcgacgtgcccagcctgggccccgccatcgccagcggcaacagcggccccggcatccagggcggcggcgccatcgtgcagagagccatcaagagaagacccggcctggacttcgacgacgacggcgagggcaacagcaagttcctgagatgcgacgacgaccagatgagcaacgacaaggagagattcgccagaagcgacgacgagcagagcagcgccgacaaggagagactggccagagagaaccacagcgagatcgagagaagaagaagaaacaagatgaccgcctacatcaccgagctgagcgacatggtgcccacctgcagcgccctggccagaaagcccgacaagctgaccatcctgagaatggccgtgagccacatgaagagcctgagaggcaccggcaacaccagcaccgacggcagctacaagcccagcttcctgaccgaccaggagctgaagcacctgatcctggaggccgccgacggcttcctgttcatcgtgagctgcgagaccggcagagtggtgtacgtgagcgacagcgtgacccccgtgctgaaccagccccagagcgagtggttcggcagcaccctgtacgaccaggtgcaccccgacgacgtggacaagctgagagagcagctgagcaccagcgagaacgccctgaccggcagaatcctggacctgaagaccggcaccgtgaagaaggagggccagcagagcagcatgagaatgtgcatgggcagcagaagaagcttcatctgcagaatgagatgcggcagcagcagcgtggaccccgtgagcgtgaacagactgagcttcgtgagaaacagatgcagaaacggcctgggcagcgtgaaggacggcgagccccacttcgtggtggtgcactgcaccggctacatcaaggcctggccccccgccgacgacgaccccgaggccggccagggcagcaagttctgcctggtggccatcggcagactgcaggtgaccagcagccccaactgcaccgacatgagcaacgtgtgccagcccaccgagttcatcagcagacacaacatcgagggcatcttcaccttcgtggaccacagatgcgtggccaccgtgggctaccagccccaggagctgctgggcaagaacatcgtggagttctgccaccccgaggaccagcagctgctgagagacagcttccagcaggtggtgaagctgaagggccaggtgctgagcgtgatgttcagattcagaagcaagaaccaggagtggctgtggatgagaaccagcagcttcaccttccagaacccctacagcgacgagatcgagtacatcatctgcaccaacaccaacgtgaagaacagcagccaggagcccagacccaccctgagcaacaccatccagagaccccagctgggccccaccgccaacctgcccctggagatgggcagcggccagctggcccccagacagcagcagcagcagaccgagctggacatggtgcccggcagagacggcctggccagctacaaccacagccaggtggtgcagcccgtgaccaccaccggccccgagcacagcaagcccctggagaagagcgacggcctgttcgcccaggacagagaccccagattcagcgagatctaccacaacatcaacgccgaccagagcaagggcatcagcagcagcaccgtgcccgccacccagcagctgttcagccagggcaacaccttcccccccacccccagacccgccgagaacttcagaaacagcggcctggccccccccgtgaccatcgtgcagcccagcgccagcgccggccagatgctggcccagatcagcagacacagcaaccccacccagggcgccacccccacctggacccccaccaccagaagcggcttcagcgcccagcaggtggccacccaggccaccgccaagaccagaaccagccagttcggcgtgggcagcttccagacccccagcagcttcagcagcatgagcctgcccggcgcccccaccgccagccccggcgccgccgcctaccccagcctgaccaacagaggcagcaacttcgcccccgagaccggccagaccgccggccagttccagaccagaaccgccgagggcgtgggcgtgtggccccagtggcagggccagcagccccaccacagaagcagcagcagcgagcagcacgtgcagcagccccccgcccagcagcccggccagcccgaggtgttccaggagatgctgagcatgctgggcgaccagagcaacagctacaacaacgaggagttccccgacctgaccatgttcccccccttcagcgagtag

SEQ ID NO: 73295 - DNA, 1428 bp, synthetic construct
  misc_feature 1..1428: note = Description of Artificial Sequence: Synthetic coding sequence
  source 1..1428: mol_type = other DNA
atgagcgccaccgccgccgccagaaagagaggcaagcccgccagcggcgccggcgccggcgccggcgccggcaagagaagaagaaaggccgacagcgccggcgacagaggcaagagcaagggcggcggcaagatgaacgaggagatcagcagcgacagcgagagcgagagcctggcccccagaaagcccgaggaggaggaggaggaggagctggaggagaccgcccaggagaagaagctgagactggccaagctgtacctggagcagctgagacagcaggaggaggagaaggccgaggccagagccttcgaggaggaccaggtggccggcagactgaaggaggacgtgctggagcagagaggcagactgcagaagctggtggccaaggagatccaggcccccgccagcgccgacatcagagtgctgagaggccaccagctgagcatcacctgcctggtggtgacccccgacgacagcgccatcttcagcgccgccaaggactgcagcatcatcaagtggagcgtggagagcggcagaaagctgcacgtgatccccagagccaagaagggcgccgagggcaagccccccggccacagcagccacgtgctgtgcatggccatcagcagcgacggcaagtacctggccagcggcgacagaagcaagctgatcctgatctgggaggcccagagctgccagcacctgtacaccttcaccggccacagagacgccgtgagcggcctggccttcagaagaggcacccaccagctgtacagcaccagccacgacagaagcgtgaaggtgtggaacgtggccgagaacagctacgtggagaccctgttcggccaccaggacgccgtggccgccctggacgccctgagcagagagtgctgcgtgaccgccggcggcagagacggcaccgtgagagtgtggaagatccccgaggagagccagctggtgttctacggccaccagggcagcatcgactgcatccacctgatcaacgaggagcacatggtgagcggcgccgacgacggcagcgtggccctgtggggcctgagcaagaagagacccctggccctgcagagagaggcccacggcctgagaggcgagcccggcctggagcagcccttctggatcagcagcgtggccgccctgctgaacaccgacctggtggccaccggcagccacagcagctgcgtgagactgtggcagtgcggcgagggcttcagacagctggacctgctgtgcgacatccccctggtgggcttcatcaacagcctgaagttcagcagcagcggcgacttcctggtggccggcgtgggccaggagcacagactgggcagatggtggagaatcaaggaggccagaaacagcgtgtgcatcatccccctgagaagagtgcccgtgccccccgccgccggcagctag

SEQ ID NO: 73296 - DNA, 2154 bp, synthetic construct
  misc_feature 1..2154: note = Description of Artificial Sequence: Synthetic coding sequence
  source 1..2154: mol_type = other DNA
atggccacccccgccgccgtgaacccccccgagatggccagcgacatccccggcagcgtgaccctgcccgtggcccccatggccgccaccggccaggtgagaatggccggcgccatgcccgccagaggcggcaagagaagaagcggcatggacttcgacgacgaggacggcgagggccccagcaagttcagcagagagaaccacagcgagatcgagagaagaagaagaaacaagatgacccagtacatcaccgagctgagcgacatggtgcccacctgcagcgccctggccagaaagcccgacaagctgaccatcctgagaatggccgtgagccacatgaagagcatgagaggcaccggcaacaagagcaccgacggcgcctacaagcccagcttcctgaccgagcaggagctgaagcacctgatcctggaggccgccgacggcttcctgttcgtggtggccgccgagaccggcagagtgatctacgtgagcgacagcgtgacccccgtgctgaaccagccccagagcgagtggttcggcagcaccctgtacgagcaggtgcaccccgacgacgtggagaagctgagagagcagctgtgcaccagcgagaacagcatgaccggcagaatcctggacctgaagaccggcaccgtgaagaaggagggccagcagagcagcatgagaatgtgcatgggcagcagaagaagcttcatctgcagaatgagatgcggcaacgcccccctggaccacctgcccctgaacagaatcaccaccatgagaaagagattcagaaacggcctgggccccgtgaaggagggcgaggcccagtacgccgtggtgcactgcaccggctacatcaaggcctggccccccgccggcatgaccatccccgaggaggacgccgacgtgggccagggcagcaagtactgcctggtggccatcggcagactgcaggtgaccagcagccccgtgtgcatggacatgaacggcatgagcgtgcccaccgagttcctgagcagacacaacagcgacggcatcatcaccttcgtggaccccagatgcatcagcgtgatcggctaccagccccaggacctgctgggcaaggacatcctggagttctgccaccccgaggaccagagccacctgagagagagcttccagcaggtggtgaagctgaagggccaggtgctgagcgtgatgtacagattcagaaccaagaacagagagtggatgctgatcagaaccagcagcttcaccttccagaacccctacagcgacgagatcgagtacatcatctgcaccaacaccaacgtgaagcagctgcagcagcagcaggccgagctggaggtgcaccagagagacggcctgagcagctacgacctgagccaggtgcccgtgcccaacctgcccgccggcgtgcacgaggccggcaagagcgtggagaaggccgacgccatcttcagccaggagagagaccccagattcgccgagatgttcgccggcatcagcgccagcgagaagaagatgatgagcagcgccagcgccgccggcacccagcagatctacagccagggcagccccttccccagcggccacagcggcaaggccttcagcagcagcgtggtgcacgtgcccggcgtgaacgacatccagagcagcagcagcaccggccagaacatgagccagatcagcagacagctgaaccagagccaggtggcctggaccggcagcagaccccccttccccggccagcagatccccagccagagcagcaagacccagagcagccccttcggcatcggcaccagccacacctaccccgccgaccccagcagctacagccccctgagcagccccgccaccagcagccccagcggcaacgcctacagcagcctggccaacagaacccccggcttcgccgagagcggccagagcagcggccagttccagggcagacccagcgaggtgtggagccagtggcagagccagcaccacggccagcagagcggcgagcagcacagccaccagcagcccggccagaccgaggtgttccaggacatgctgcccatgcccggcgaccccacccagggcaccggcaactacaacatcgaggacttcgccgacctgggcatgttcccccccttcagcgagtag

SEQ ID NO: 73297 - DNA, 2118 bp, synthetic construct
  misc_feature 1..2118: note = Description of Artificial Sequence: Synthetic coding sequence
  source 1..2118: mol_type = other DNA
atggccagcgacatccccggcagcgtgaccctgcccgtggcccccatggccgccaccggccaggtgagaatggccggcgccatgcccgccagaggcggcaagagaagaagcggcatggacttcgacgacgaggacggcgagggccccagcaagttcagcagagagaaccacagcgagatcgagagaagaagaagaaacaagatgacccagtacatcaccgagctgagcgacatggtgcccacctgcagcgccctggccagaaagcccgacaagctgaccatcctgagaatggccgtgagccacatgaagagcatgagaggcaccggcaacaagagcaccgacggcgcctacaagcccagcttcctgaccgagcaggagctgaagcacctgatcctggaggccgccgacggcttcctgttcgtggtggccgccgagaccggcagagtgatctacgtgagcgacagcgtgacccccgtgctgaaccagccccagagcgagtggttcggcagcaccctgtacgagcaggtgcaccccgacgacgtggagaagctgagagagcagctgtgcaccagcgagaacagcatgaccggcagaatcctggacctgaagaccggcaccgtgaagaaggagggccagcagagcagcatgagaatgtgcatgggcagcagaagaagcttcatctgcagaatgagatgcggcaacgcccccctggaccacctgcccctgaacagaatcaccaccatgagaaagagattcagaaacggcctgggccccgtgaaggagggcgaggcccagtacgccgtggtgcactgcaccggctacatcaaggcctggccccccgccggcatgaccatccccgaggaggacgccgacgtgggccagggcagcaagtactgcctggtggccatcggcagactgcaggtgaccagcagccccgtgtgcatggacatgaacggcatgagcgtgcccaccgagttcctgagcagacacaacagcgacggcatcatcaccttcgtggaccccagatgcatcagcgtgatcggctaccagccccaggacctgctgggcaaggacatcctggagttctgccaccccgaggaccagagccacctgagagagagcttccagcaggtggtgaagctgaagggccaggtgctgagcgtgatgtacagattcagaaccaagaacagagagtggatgctgatcagaaccagcagcttcaccttccagaacccctacagcgacgagatcgagtacatcatctgcaccaacaccaacgtgaagcagctgcagcagcagcaggccgagctggaggtgcaccagagagacggcctgagcagctacgacctgagccaggtgcccgtgcccaacctgcccgccggcgtgcacgaggccggcaagagcgtggagaaggccgacgccatcttcagccaggagagagaccccagattcgccgagatgttcgccggcatcagcgccagcgagaagaagatgatgagcagcgccagcgccgccggcacccagcagatctacagccagggcagccccttccccagcggccacagcggcaaggccttcagcagcagcgtggtgcacgtgcccggcgtgaacgacatccagagcagcagcagcaccggccagaacatgagccagatcagcagacagctgaaccagagccaggtggcctggaccggcagcagaccccccttccccggccagcagatccccagccagagcagcaagacccagagcagccccttcggcatcggcaccagccacacctaccccgccgaccccagcagctacagccccctgagcagccccgccaccagcagccccagcggcaacgcctacagcagcctggccaacagaacccccggcttcgccgagagcggccagagcagcggccagttccagggcagacccagcgaggtgtggagccagtggcagagccagcaccacggccagcagagcggcgagcagcacagccaccagcagcccggccagaccgaggtgttccaggacatgctgcccatgcccggcgaccccagaaacgagtggtggagcccccacagcagacagcacttcagacagcccatcagctacgccagaatgtag

SEQ ID NO: 73298 - DNA, 2121 bp, synthetic construct
  misc_feature 1..2121: note = Description of Artificial Sequence: Synthetic coding sequence
  source 1..2121: mol_type = other DNA
atggccagcgacatccccggcagcgtgaccctgcccgtggcccccatggccgccaccggccaggtgagaatggccggcgccatgcccgccagaggcggcaagagaagaagcggcatggacttcgacgacgaggacggcgagggccccagcaagttcagcagagagaaccacagcgagatcgagagaagaagaagaaacaagatgacccagtacatcaccgagctgagcgacatggtgcccacctgcagcgccctggccagaaagcccgacaagctgaccatcctgagaatggccgtgagccacatgaagagcatgagaggcaccggcaacaagagcaccgacggcgcctacaagcccagcttcctgaccgagcaggagctgaagcacctgatcctggaggccgccgacggcttcctgttcgtggtggccgccgagaccggcagagtgatctacgtgagcgacagcgtgacccccgtgctgaaccagccccagagcgagtggttcggcagcaccctgtacgagcaggtgcaccccgacgacgtggagaagctgagagagcagctgtgcaccagcgagaacagcatgaccggcagaatcctggacctgaagaccggcaccgtgaagaaggagggccagcagagcagcatgagaatgtgcatgggcagcagaagaagcttcatctgcagaatgagatgcggcaacgcccccctggaccacctgcccctgaacagaatcaccaccatgagaaagagattcagaaacggcctgggccccgtgaaggagggcgaggcccagtacgccgtggtgcactgcaccggctacatcaaggcctggccccccgccggcatgaccatccccgaggaggacgccgacgtgggccagggcagcaagtactgcctggtggccatcggcagactgcaggtgaccagcagccccgtgtgcatggacatgaacggcatgagcgtgcccaccgagttcctgagcagacacaacagcgacggcatcatcaccttcgtggaccccagatgcatcagcgtgatcggctaccagccccaggacctgctgggcaaggacatcctggagttctgccaccccgaggaccagagccacctgagagagagcttccagcaggtggtgaagctgaagggccaggtgctgagcgtgatgtacagattcagaaccaagaacagagagtggatgctgatcagaaccagcagcttcaccttccagaacccctacagcgacgagatcgagtacatcatctgcaccaacaccaacgtgaagcagctgcagcagcagcaggccgagctggaggtgcaccagagagacggcctgagcagctacgacctgagccaggtgcccgtgcccaacctgcccgccggcgtgcacgaggccggcaagagcgtggagaaggccgacgccatcttcagccaggagagagaccccagattcgccgagatgttcgccggcatcagcgccagcgagaagaagatgatgagcagcgccagcgccgccggcacccagcagatctacagccagggcagccccttccccagcggccacagcggcaaggccttcagcagcagcgtggtgcacgtgcccggcgtgaacgacatccagagcagcagcagcaccggccagaacatgagccagatcagcagacagctgaaccagagccaggtggcctggaccggcagcagaccccccttccccggccagcagatccccagccagagcagcaagacccagagcagccccttcggcatcggcaccagccacacctaccccgccgaccccagcagctacagccccctgagcagccccgccaccagcagccccagcggcaacgcctacagcagcctggccaacagaacccccggcttcgccgagagcggccagagcagcggccagttccagggcagacccagcgaggtgtggagccagtggcagagccagcaccacggccagcagagcggcgagcagcacagccaccagcagcccggccagaccgaggtgttccaggacatgctgcccatgcccggcgaccccacccagggcaccggcaactacaacatcgaggacttcgccgacctgggcatgttcccccccttcagcgagtag

SEQ ID NO: 73299 - DNA, 2121 bp, synthetic construct; identical to SEQ ID NO: 73298
  misc_feature 1..2121: note = Description of Artificial Sequence: Synthetic coding sequence
  source 1..2121: mol_type = other DNA

SEQ ID NO: 73300 - DNA, 1701 bp, synthetic construct
  misc_feature 1..1701: note = Description of Artificial Sequence: Synthetic coding sequence
  source 1..1701: mol_type = other DNA
atggccacccccgccgccgtgaacccccccgagatggccagcgacatccccggcagcgtgaccctgcccgtggcccccatggccgccaccggccaggtgagaatggccggcgccatgcccgccagaggcggcaagagaagaagcggcatggacttcgacgacgaggacggcgagggccccagcaagttcagcagagagaaccacagcgagatcgagagaagaagaagaaacaagatgacccagtacatcaccgagctgagcgacatggtgcccacctgcagcgccctggccagaaagcccgacaagctgaccatcctgagaatggccgtgagccacatgaagagcatgagaggcaccggcaacaagagcaccgacggcgcctacaagcccagcttcctgaccgagcaggagctgaagcacctgatcctggaggccgccgacggcttcctgttcgtggtggccgccgagaccggcagagtgatctacgtgagcgacagcgtgacccccgtgctgaaccagccccagagcgagtggttcggcagcaccctgtacgagcaggtgcaccccgacgacgtggagaagctgagagagcagctgtgcaccagcgagaacagcatgaccggcagaatcctggacctgaagaccggcaccgtgaagaaggagggccagcagagcagcatgagaatgtgcatgggcagcagaagaagcttcatctgcagaatgagatgcggcaacgcccccctggaccacctgcccctgaacagaatcaccaccatgagaaagagattcagaaacggcctgggccccgtgaaggagggcgaggcccagtacgccgtggtgcactgcaccggctacatcaaggcctggccccccgccggcatgaccatccccgaggaggacgccgacgtgggccagggcagcaagtactgcctggtggccatcggcagactgcaggtgaccagcagccccgtgtgcatggacatgaacggcatgagcgtgcccaccgagttcctgagcagacacaacagcgacggcatcatcaccttcgtggaccccagatgcatcagcgtgatcggctaccagccccaggacctgctgggcaaggacatcctggagttctgccaccccgaggaccagagccacctgagagagagcttccagcaggtggtgaagctgaagggccaggtgctgagcgtgatgtacagattcagaaccaagaacagagagtggatgctgatcagaaccagcagcttcaccttccagaacccctacagcgacgagatcgagtacatcatctgcaccaacaccaacgtgaagcagctgcagcagcagcaggccgagctggaggtgcaccagagagacggcctgagcagctacgacctgagccaggtgcccgtgcccaacctgcccgccggcgtgcacgaggccggcaagagcgtggagaaggccgacgccatcttcagccaggagagagaccccagattcgccgagatgttcgccggcatcagcgccagcgagaagaagatgatgagcagcgccagcgccgccggcacccagcagatctacagccagggcagccccttccccagcggccacagcggcaaggccttcagcagcagcgtggtgcacgtgcccggcgtgaacgacatccagagcagcagcagcaccggccagaacatgagccagatcagcggcagctag

SEQ ID NO: 73301 - DNA, 2160 bp, synthetic construct
  misc_feature 1..2160: note = Description of Artificial Sequence: Synthetic coding sequence
  source 1..2160: mol_type = other DNA
atgcccagaaccatgatcccccccggcgagtgcacctacgccggcagaaagagaagaagacccctgcagaagcagagacccgccgtgggcgccgagaagagcaaccccagcaagagacacagagacagactgaacgccgagctggaccacctggccagcctgctgcccttcccccccgacatcatcagcaagctggacaagctgagcgtgctgagactgagcgtgagctacctgagagtgaagagcttcttccaggtggtgcaggagcagagcagcagacagcccgccgccggcgcccccagccccggcgacagctgccccctggccggcagcgccgtgctggagggcagactgctgctggagagcctgaacggcttcgccctggtggtgagcgccgagggcaccatcttctacgccagcgccaccatcgtggactacctgggcttccaccagaccgacgtgatgcaccagaacatctacgactacatccacgtggacgacagacaggacttctgcagacagctgcactgggccatggaccccccccaggtggtgttcggccagcccccccccctggagaccggcgacgacgccatcctgggcagactgctgagagcccaggagtggggcaccggcacccccaccgagtacagcgccttcctgaccagatgcttcatctgcagagtgagatgcctgctggacagcaccagcggcttcctggccagaggcagccaggcctggcagctgagactgtgctgccccgagcccctgatgaccatgcagttccagggcaagctgaagttcctgttcggccagaagaagaaggcccccagcggcgccatgctgccccccagactgagcctgttctgcatcgccgcccccgtgctgctgcccagcgccgccgagatgaagatgagaagcgccctgctgagagccaagcccagagccgacaccgccgccaccgccgacgccaaggtgaaggccaccaccagcctgtgcgagagcgagctgcacggcaagcccaactacagcgccggcagaagcagcagagagagcggcgtgctggtgctgagagagcagaccgacgccggcagatgggcccaggtgcccgccagagccccctgcctgtgcctgagaggcggccccgacctggtgctggaccccaagggcggcagcggcgacagagaggaggagcagcacagaatgctgagcagagccagcggcgtgaccggcagaagagagacccccggccccaccaagcccctgccctggaccgccggcaagcacagcgaggacggcgccagacccagactgcagcccagcaagaacgacccccccagcctgagacccatgcccagaggcagctgcctgccctgcccctgcgtgcagggcaccttcagaaacagccccatcagccacccccccagccccagccccagcgcctacagcagcagaaccagcagacccatgagagacgtgggcgaggaccaggtgcacccccccctgtgccacttcccccagagaagcctgcagcaccagctgccccagcccggcgcccagagattcgccaccagaggctaccccatggaggacatgaagctgcagggcgtgcccatgccccccggcgacctgtgcggccccaccctgctgctggacgtgagcatcaagatggagaaggacagcggctgcgagggcgccgccgacggctgcgtgcccagccaggtgtggctgggcgccagcgacagaagccaccccgccaccttccccaccagaatgcacctgaagaccgagcccgacagcagacagcaggtgtacatcagccacctgggccacggcgtgagaggcgcccagccccacggcagagccaccgccggcagaagcagagagctgacccccttccaccccgcccactgcgcctgcctggagcccaccgacggcctgccccagagcgagcccccccaccagctgtgcgccagaggcagaggcgagcagagctgcacctgcagagccgccgaggccgcccccgtggtgaagagagagcccctggacagcccccagtgggccacccacagccagggcatggtgcccggcatgctgcccaagagcgccctggccaccctggtgcccccccaggccagcggctgcaccttcctgccctag

SEQ ID NO: 73302 - DNA, 2106 bp, synthetic construct
  misc_feature 1..2106: note = Description of Artificial Sequence: Synthetic coding sequence
  source 1..2106: mol_type = other DNA
atgcccagaaccatgatcccccccggcgagtgcacctacgccggcagaaagagaagaagacccctgcagaagcagagacccgccgtgggcgccgagaagagcaaccccagcaagagacacagagacagactgaacgccgagctggaccacctggccagcctgctgcccttcccccccgacatcatcagcaagctggacaagctgagcgtgctgagactgagcgtgagctacctgagagtgaagagcttcttccaggtggtgcaggagcagagcagcagacagcccgccgccggcgcccccagccccggcgacagctgccccctggccggcagcgccgtgctggagggcagactgctgctggagagcctgaacggcttcgccctggtggtgagcgccgagggcaccatcttctacgccagcgccaccatcgtggactacctgggcttccaccagaccgacgtgatgcaccagaacatctacgactacatccacgtggacgacagacaggacttctgcagacagctgcactgggccatggaccccccccaggtggtgttcggccagcccccccccctggagaccggcgacgacgccatcctgggcagactgctgagagcccaggagtggggcaccggcacccccaccgagtacagcgccttcctgaccagatgcttcatctgcagagtgagatgcctgctggacagcaccagcggcttcctgaccatgcagttccagggcaagctgaagttcctgttcggccagaagaagaaggcccccagcggcgccatgctgccccccagactgagcctgttctgcatcgccgcccccgtgctgctgcccagcgccgccgagatgaagatgagaagcgccctgctgagagccaagcccagagccgacaccgccgccaccgccgacgccaaggtgaaggccaccaccagcctgtgcgagagcgagctgcacggcaagcccaactacagcgccggcagaagcagcagagagagcggcgtgctggtgctgagagagcagaccgacgccggcagatgggcccaggtgcccgccagagccccctgcctgtgcctgagaggcggccccgacctggtgctggaccccaagggcggcagcggcgacagagaggaggagcagcacagaatgctgagcagagccagcggcgtgaccggcagaagagagacccccggccccaccaagcccctgccctggaccgccggcaagcacagcgaggacggcgccagacccagactgcagcccagcaagaacgacccccccagcctgagacccatgcccagaggcagctgcctgccctgcccctgcgtgcagggcaccttcagaaacagccccatcagccacccccccagccccagccccagcgcctacagcagcagaaccagcagacccatgagagacgtgggcgaggaccaggtgcacccccccctgtgccacttcccccagagaagcctgcagcaccagctgccccagcccggcgcccagagattcgccaccagaggctaccccatggaggacatgaagctgcagggcgtgcccatgccccccggcgacctgtgcggccccaccctgctgctggacgtgagcatcaagatggagaaggacagcggctgcgagggcgccgccgacggctgcgtgcccagccaggtgtggctgggcgccagcgacagaagccaccccgccaccttccccaccagaatgcacctgaagaccgagcccgacagcagacagcaggtgtacatcagccacctgggccacggcgtgagaggcgcccagccccacggcagagccaccgccggcagaagcagagagctgacccccttccaccccgcccactgcgcctgcctggagcccaccgacggcctgccccagagcgagcccccccaccagctgtgcgccagaggcagaggcgagcagagctgcacctgcagagccgccgaggccgcccccgtggtgaagagagagcccctggacagcccccagtgggccacccacagccagggcatggtgcccggcatgctgcccaagagcgccctggccaccctggtgcccccccaggccagcggctgcaccttcctgccctag

SEQ ID NO: 73303 - DNA, 2205 bp, synthetic construct
  misc_feature 1..2205: note = Description of Artificial Sequence: Synthetic coding sequence
  source 1..2205: mol_type = other DNA
atgagcggcttcgacgaccccggcatcttctacagcgacagcttcggcggcgacgcccaggccgacgagggccaggccagaaagagccagctgcagagaagattcaaggagttcctgagacagtacagagtgggcaccgacagaaccggcttcaccttcaagtacagagacgagctgaagagacactacaacctgggcgagtactggatcgaggtggagatggaggacctggccagcttcgacgaggacctggccgactacctgtacaagcagcccgccgagcacctgcagctgctggaggaggccgccaaggaggtggccgacgaggtgaccagacccagacccagcggcgaggaggtgctgcaggacatccaggtgatgctgaagagcgacgccagccccagcagcatcagaagcctgaagagcgacatgatgagccacctggtgaagatccccggcatcatcatcgccgccagcgccgtgagagccaaggccaccagaatcagcatccagtgcagaagctgcagaaacaccctgaccaacatcgccatgagacccggcctggagggctacgccctgcccagaaagtgcaacaccgaccaggccggcagacccaagtgccccctggacccctacttcatcatgcccgacaagtgcaagtgcgtggacttccagaccctgaagctgcaggagctgcccgacgccgtgccccacggcgagatgcccagacacatgcagctgtactgcgacagatacctgtgcgacaaggtggtgcccggcaacagagtgaccatcatgggcatctacagcatcaagaagttcggcctgaccaccagcagaggcagagacagagtgggcgtgggcatcagaagcagctacatcagagtgctgggcatccaggtggacaccgacggcagcggcagaagcttcgccggcgccgtgagcccccaggaggaggaggagttcagaagactggccgccctgcccaacgtgtacgaggtgatcagcaagagcatcgcccccagcatcttcggcggcaccgacatgaagaaggccatcgcctgcctgctgttcggcggcagcagaaagagactgcccgacggcctgaccagaagaggcgacatcaacctgctgatgctgggcgaccccggcaccgccaagagccagctgctgaagttcgtggagaagtgcagccccatcggcgtgtacaccagcggcaagggcagcagcgccgccggcctgaccgccagcgtgatgagagaccccagcagcagaaacttcatcatggagggcggcgccatggtgctggccgacggcggcgtggtgtgcatcgacgagttcgacaagatgagagaggacgacagagtggccatccacgaggccatggagcagcagaccatcagcatcgccaaggccggcatcaccaccaccctgaacagcagatgcagcgtgctggccgccgccaacagcgtgttcggcagatgggacgagaccaagggcgaggacaacatcgacttcatgcccaccatcctgagcagattcgacatgatcttcatcgtgaaggacgagcacaacgaggagagagacgtgatgctggccaagcacgtgatcaccctgcacgtgagcgccctgacccagacccaggccgtggagggcgagatcgacctggccaagctgaagaagttcatcgcctactgcagagtgaagtgcggccccagactgagcgccgaggccgccgagaagctgaagaacagatacatcatcatgagaagcggcgccagacagcacgagagagacagcgacagaagaagcagcatccccatcaccgtgagacagctggaggccatcgtgagaatcgccgaggccctgagcaagatgaagctgcagcccttcgccaccgaggccgacgtggaggaggccctgagactgttccaggtgagcaccctggacgccgccctgagcggcaccctgagcggcgtggagggcttcaccagccaggaggaccaggagatgctgagcagaatcgagaagcagctgaagagaagattcgccatcggcagccaggtgagcgagcacagcatcatcaaggacttcaccaagcagaagtaccccgagcacgccatccacaaggtgctgcagctgatgctgagaagaggcgagatccagcacagaatgcagagaaaggtgctgtacagactgaagtag

SEQ ID NO: 73304 - DNA, 1530 bp, synthetic construct
  misc_feature 1..1530: note = Description of Artificial Sequence: Synthetic coding sequence
  source 1..1530: mol_type = other DNA
atgagcatgggcgcccccagaagcctgctgctggccctggccgccggcctggccgtggccagaccccccaacatcgtgctgatcttcgccgacgacctgggctacggcgacctgggctgctacggccaccccagcagcaccacccccaacctggaccagctggccgccggcggcctgagattcaccgacttctacgtgcccgtgagcctgtgcacccccagcagagccgccctgctgaccggcagactgcccgtgagaatgggcatgtaccccggcgtgctggtgcccagcagcagaggcggcctgcccctggaggaggtgaccgtggccgaggtgctggccgccagaggctacctgaccggcatggccggcaagtggcacctgggcgtgggccccgagggcgccttcctgcccccccaccagggcttccacagattcctgggcatcccctacagccacgaccagggcccctgccagaacctgacctgcttcccccccgccaccccctgcgacggcggctgcgaccagggcctggtgcccatccccctgctggccaacctgagcgtggaggcccagcccccctggctgcccggcctggaggccagatacatggccttcgcccacgacctgatggccgacgcccagagacaggacagacccttcttcctgtactacgccagccaccacacccactacccccagttcagcggccagagcttcgccgagagaagcggcagaggccccttcggcgacagcctgatggagctggacgccgccgtgggcaccctgatgaccgccatcggcgacctgggcctgctggaggagaccctggtgatcttcaccgccgacaacggccccgagaccatgagaatgagcagaggcggctgcagcggcctgctgagatgcggcaagggcaccacctacgagggcggcgtgagagagcccgccctggccttctggcccggccacatcgcccccggcgtgacccacgagctggccagcagcctggacctgctgcccaccctggccgccctggccggcgcccccctgcccaacgtgaccctggacggcttcgacctgagccccctgctgctgggcaccggcaagagccccagacagagcctgttcttctaccccagctaccccgacgaggtgagaggcgtgttcgccgtgagaaccggcaagtacaaggcccacttcttcacccagggcagcgcccacagcgacaccaccgccgaccccgcctgccacgccagcagcagcctgaccgcccacgagccccccctgctgtacgacctgagcaaggaccccggcgagaactacaacctgctgggcggcgtggccggcgccacccccgaggtgctgcaggccctgaagcagctgcagctgctgaaggcccagctggacgccgccgtgaccttcggccccagccaggtggccagaggcgaggaccccgccctgcagatctgctgccaccccggctgcacccccagacccgcctgctgccactgccccgacccccacgcctag

SEQ ID NO: 73305 - DNA, 1530 bp, synthetic construct; identical to SEQ ID NO: 73304
  misc_feature 1..1530: note = Description of Artificial Sequence: Synthetic coding sequence
  source 1..1530: mol_type = other DNA

SEQ ID NO: 73306 - DNA, 1530 bp, synthetic construct; identical to SEQ ID NO: 73304
  misc_feature 1..1530: note = Description of Artificial Sequence: Synthetic coding sequence
  source 1..1530: mol_type = other DNA

SEQ ID NO: 73307 - DNA, 1272 bp, synthetic construct
  misc_feature 1..1272: note = Description of Artificial Sequence: Synthetic coding sequence
  source 1..1272: mol_type = other DNA
atgggcatgtaccccggcgtgctggtgcccagcagcagaggcggcctgcccctggaggaggtgaccgtggccgaggtgctggccgccagaggctacctgaccggcatggccggcaagtggcacctgggcgtgggccccgagggcgccttcctgcccccccaccagggcttccacagattcctgggcatcccctacagccacgaccagggcccctgccagaacctgacctgcttcccccccgccaccccctgcgacggcggctgcgaccagggcctggtgcccatccccctgctggccaacctgagcgtggaggcccagcccccctggctgcccggcctggaggccagatacatggccttcgcccacgacctgatggccgacgcccagagacaggacagacccttcttcctgtactacgccagccaccacacccactacccccagttcagcggccagagcttcgccgagagaagcggcagaggccccttcggcgacagcctgatggagctggacgccgccgtgggcaccctgatgaccgccatcggcgacctgggcctgctggaggagaccctggtgatcttcaccgccgacaacggccccgagaccatgagaatgagcagaggcggctgcagcggcctgctgagatgcggcaagggcaccacctacgagggcggcgtgagagagcccgccctggccttctggcccggccacatcgcccccggcgtgacccacgagctggccagcagcctggacctgctgcccaccctggccgccctggccggcgcccccctgcccaacgtgaccctggacggcttcgacctgagccccctgctgctgggcaccggcaagagccccagacagagcctgttcttctaccccagctaccccgacgaggtgagaggcgtgttcgccgtgagaaccggcaagtacaaggcccacttcttcacccagggcagcgcccacagcgacaccaccgccgaccccgcctgccacgccagcagcagcctgaccgcccacgagccccccctgctgtacgacctgagcaaggaccccggcgagaactacaacctgctgggcggcgtggccggcgccacccccgaggtgctgcaggccctgaagcagctgcagctgctgaaggcccagctggacgccgccgtgaccttcggccccagccaggtggccagaggcgaggaccccgccctgcagatctgctgccaccccggctgcacccccagacccgcctgctgccactgccccgacccccacgcctag

SEQ ID NO: 73308 - DNA, 1524 bp, synthetic construct
  misc_feature 1..1524: note = Description of Artificial Sequence: Synthetic coding sequence
  source 1..1524: mol_type = other DNA
atgggcgcccccagaagcctgctgctggccctggccgccggcctggccgtggccagaccccccaacatcgtgctgatcttcgccgacgacctgggctacggcgacctgggctgctacggccaccccagcagcaccacccccaacctggaccagctggccgccggcggcctgagattcaccgacttctacgtgcccgtgagcctgtgcacccccagcagagccgccctgctgaccggcagactgcccgtgagaatgggcatgtaccccggcgtgctggtgcccagcagcagaggcggcctgcccctggaggaggtgaccgtggccgaggtgctggccgccagaggctacctgaccggcatggccggcaagtggcacctgggcgtgggccccgagggcgccttcctgcccccccaccagggcttccacagattcctgggcatcccctacagccacgaccagggcccctgccagaacctgacctgcttcccccccgccaccccctgcgacggcggctgcgaccagggcctggtgcccatccccctgctggccaacctgagcgtggaggcccagcccccctggctgcccggcctggaggccagatacatggccttcgcccacgacctgatggccgacgcccagagacaggacagacccttcttcctgtactacgccagccaccacacccactacccccagttcagcggccagagcttcgccgagagaagcggcagaggccccttcggcgacagcctgatggagctggacgccgccgtgggcaccctgatgaccgccatcggcgacctgggcctgctggaggagaccctggtgatcttcaccgccgacaacggccccgagaccatgagaatgagcagaggcggctgcagcggcctgctgagatgcggcaagggcaccacctacgagggcggcgtgagagagcccgccctggccttctggcccggccacatcgcccccggcgtgacccacgagctggccagcagcctggacctgctgcccaccctggccgccctggccggcgcccccctgcccaacgtgaccctggacggcttcgacctgagccccctgctgctgggcaccggcaagagccccagacagagcctgttcttctaccccagctaccccgacgaggtgagaggcgtgttcgccgtgagaaccggcaagtacaaggcccacttcttcacccagggcagcgcccacagcgacaccaccgccgaccccgcctgccacgccagcagcagcctgaccgcccacgagccccccctgctgtacgacctgagcaaggaccccggcgagaactacaacctgctgggcggcgtggccggcgccacccccgaggtgctgcaggccctgaagcagctgcagctgctgaaggcccagctggacgccgccgtgaccttcggccccagccaggtggccagaggcgaggaccccgccctgcagatctgctgccaccccggctgcacccccagacccgcctgctgccactgccccgacccccacgcctag

SEQ ID NO: 73309 - DNA, 1524 bp, synthetic construct; identical to SEQ ID NO: 73308
  misc_feature 1..1524: note = Description of Artificial Sequence: Synthetic coding sequence
  source 1..1524: mol_type = other DNA

SEQ ID NO: 73310 - DNA, 1782 bp, synthetic construct
  misc_feature 1..1782: note = Description of Artificial Sequence: Synthetic coding sequence
  source 1..1782: mol_type = other DNA
atgagaagcgccgccagaagaggcagagccgcccccgccgccagagacagcctgcccgtgctgctgttcctgtgcctgctgctgaagacctgcgagcccaagaccgccaacgccttcaagcccaacatcctgctgatcatggccgacgacctgggcaccggcgacctgggctgctacggcaacaacaccctgagaacccccaacatcgaccagctggccgaggagggcgtgagactgacccagcacctggccgccgcccccctgtgcacccccagcagagccgccttcctgaccggcagacacagcttcagaagcggcatggacgccagcaacggctacagagccctgcagtggaacgccggcagcggcggcctgcccgagaacgagaccaccttcgccagaatcctgcagcagcacggctacgccaccggcctgatcggcaagtggcaccagggcgtgaactgcgccagcagaggcgaccactgccaccaccccctgaaccacggcttcgactacttctacggcatgcccttcaccctgaccaacgactgcgaccccggcagaccccccgaggtggacgccgccctgagagcccagctgtggggctacacccagttcctggccctgggcatcctgaccctggccgccggccagacctgcggcttcttcagcgtgagcgccagagccgtgaccggcatggccggcgtgggctgcctgttcttcatcagctggtacagcagcttcggcttcgtgagaagatggaactgcatcctgatgagaaaccacgacgtgaccgagcagcccatggtgctggagaagaccgccagcctgatgctgaaggaggccgtgagctacatcgagagacacaagcacggccccttcctgctgttcctgagcctgctgcacgtgcacatccccctggtgaccaccagcgccttcctgggcaagagccagcacggcctgtacggcgacaacgtggaggagatggactggctgatcggcaaggtgctgaacgccatcgaggacaacggcctgaagaacagcaccttcacctacttcaccagcgaccacggcggccacctggaggccagagacggccacagccagctgggcggctggaacggcatctacaagggcggcaagggcatgggcggctgggagggcggcatcagagtgcccggcatcttccactggcccggcgtgctgcccgccggcagagtgatcggcgagcccaccagcctgatggacgtgttccccaccgtggtgcagctggtgggcggcgaggtgccccaggacagagtgatcgacggccacagcctggtgcccctgctgcagggcgccgaggccagaagcgcccacgagttcctgttccactactgcggccagcacctgcacgccgccagatggcaccagaaggacagcggcagcgtgtggaaggtgcactacaccaccccccagttccaccccgagggcgccggcgcctgctacggcagaggcgtgtgcccctgcagcggcgagggcgtgacccaccacagaccccccctgctgttcgacctgagcagagaccccagcgaggccagacccctgacccccgacagcgagcccctgtaccacgccgtgatcgccagagtgggcgccgccgtgagcgagcacagacagaccctgagccccgtgccccagcagttcagcatgagcaacatcctgtggaagccctggctgcagccctgctgcggccacttccccttctgcagctgccacgaggacggcgacggcaccccctag

SEQ ID NO: 73311 - DNA, 1770 bp, synthetic construct
  misc_feature 1..1770: note = Description of Artificial Sequence: Synthetic coding sequence
  source 1..1770: mol_type = other DNA
atgctgcacctgcaccacagctgcctgtgcttcagaagctggctgcccgccatgctggccgtgctgctgagcctggcccccagcgccagcagcgacatcagcgccagcagacccaacatcctgctgctgatggccgacgacctgggcatcggcgacatcggctgctacggcaacaacaccatgagaacccccaacatcgacagactggccgaggacggcgtgaagctgacccagcacatcagcgccgccagcctgtgcacccccagcagagccgccttcctgaccggcagataccccgtgagaagcggcatggtgagcagcatcggctacagagtgctgcagtggaccggcgccagcggcggcctgcccaccaacgagaccaccttcgccaagatcctgaaggagaagggctacgccaccggcctgatcggcaagtggcacctgggcctgaactgcgagagcgccagcgaccactgccaccaccccctgcaccacggcttcgaccacttctacggcatgcccttcagcctgatgggcgactgcgccagatgggagctgagcgagaagagagtgaacctggagcagaagctgaacttcctgttccaggtgctggccctggtggccctgaccctggtggccggcaagctgacccacctgatccccgtgagctggatgcccgtgatctggagcgccctgagcgccgtgctgctgctggccagcagctacttcgtgggcgccctgatcgtgcacgccgactgcttcctgatgagaaaccacaccatcaccgagcagcccatgtgcttccagagaaccacccccctgatcctgcaggaggtggccagcttcctgaagagaaacaagcacggccccttcctgctgttcgtgagcttcctgcacgtgcacatccccctgatcaccatggagaacttcctgggcaagagcctgcacggcctgtacggcgacaacgtggaggagatggactggatggtgggcagaatcctggacaccctggacgtggagggcctgagcaacagcaccctgatctacttcaccagcgaccacggcggcagcctggagaaccagctgggcaacacccagtacggcggctggaacggcatctacaagggcggcaagggcatgggcggctgggagggcggcatcagagtgcccggcatcttcagatggcccggcgtgctgcccgccggcagagtgatcggcgagcccaccagcctgatggacgtgttccccaccgtggtgagactggccggcggcgaggtgccccaggacagagtgatcgacggccaggacctgctgcccctgctgctgggcaccgcccagcacagcgaccacgagttcctgatgcactactgcgagagattcctgcacgccgccagatggcaccagagagacagaggcaccatgtggaaggtgcacttcgtgacccccgtgttccagcccgagggcgccggcgcctgctacggcagaaaggtgtgcccctgcttcggcgagaaggtggtgcaccacgacccccccctgctgttcgacctgagcagagaccccagcgagacccacatcctgacccccgccagcgagcccgtgttctaccaggtgatggagagagtgcagcaggccgtgtgggagcaccagagaaccctgagccccgtgcccctgcagctggacagactgggcaacatctggagaccctggctgcagccctgctgcggccccttccccctgtgctggtgcctgagagaggacgacccccagtag

SEQ ID NO: 73312 - DNA, 537 bp, synthetic construct
  misc_feature 1..537: note = Description of Artificial Sequence: Synthetic coding sequence
  source 1..537: mol_type = other DNA
atgctgcacctgcaccacagctgcctgtgcttcagaagctggctgcccgccatgctggccgtgctgctgagcctggcccccagcgccagcagcgacatcagcgccagcagacccaacatcctgctgctgatggccgacgacctgggcatcggcgacatcggctgctacggcaacaacaccatgagaacccccaacatcgacagactggccgaggacggcgtgaagctgacccagcacatcagcgccgccagcctgtgcacccccagcagagccgccttcctgaccggcagataccccgtgagaagcggcatggtgagcagcatcggctacagagtgctgcagtggaccggcgccagcggcggcctgcccaccaacgagaccaccttcgccaagatcctgaaggagaagggctacgccaccggcctgatcggcaagtggcacctgggcctgaactgcgagagcgccagcgaccactgccaccaccccctgcaccacggcttcgaccacttctacggcatgcccttcagcctgatgtag

SEQ ID NO: 73313 - DNA, 1635 bp, synthetic construct
  misc_feature 1..1635: note = Description of Artificial Sequence: Synthetic coding sequence
  source 1..1635: mol_type = other DNA
atgagcggcagcagagagagagacaacatgctgcacctgcaccacagctggacccccaacatcgacagactggccgaggacggcgtgaagctgacccagcacatcagcgccgccagcctgtgcacccccagcagagccgccttcctgaccggcagataccccgtgagaagcggcatggtgagcagcatcggctacagagtgctgcagtggaccggcgccagcggcggcctgcccaccaacgagaccaccttcgccaagatcctgaaggagaagggctacgccaccggcctgatcggcaagtggcacctgggcctgaactgcgagagcgccagcgaccactgccaccaccccctgcaccacggcttcgaccacttctacggcatgcccttcagcctgatgggcgactgcgccagatgggagctgagcgagaagagagtgaacctggagcagaagctgaacttcctgttccaggtgctggccctggtggccctgaccctggtggccggcaagctgacccacctgatccccgtgagctggatgcccgtgatctggagcgccctgagcgccgtgctgctgctggccagcagctacttcgtgggcgccctgatcgtgcacgccgactgcttcctgatgagaaaccacaccatcaccgagcagcccatgtgcttccagagaaccacccccctgatcctgcaggaggtggccagcttcctgaagagaaacaagcacggccccttcctgctgttcgtgagcttcctgcacgtgcacatccccctgatcaccatggagaacttcctgggcaagagcctgcacggcctgtacggcgacaacgtggaggagatggactggatggtgggcagaatcctggacaccctggacgtggagggcctgagcaacagcaccctgatctacttcaccagcgaccacggcggcagcctggagaaccagctgggcaacacccagtacggcggctggaacggcatctacaagggcggcaagggcatgggcggctgggagggcggcatcagagtgcccggcatcttcagatggcccggcgtgctgcccgccggcagagtgatcggcgagcccaccagcctgatggacgtgttccccaccgtggtgagactggccggcggcgaggtgccccaggacagagtgatcgacggccaggacctgctgcccctgctgctgggcaccgcccagcacagcgaccacgagttcctgatgcactactgcgagagattcctgcacgccgccagatggcaccagagagacagaggcaccatgtggaaggtgcacttcgtgacccccgtgttccagcccgagggcgccggcgcctgctacggcagaaaggtgtgcccctgcttcggcgagaaggtggtgcaccacgacccccccctgctgttcgacctgagcagagaccccagcgagacccacatcctgacccccgccagcgagcccgtgttctaccaggtgatggagagagtgcagcaggccgtgtgggagcaccagagaaccctgagccccgtgcccctgcagctggacagactgggcaacatctggagaccctggctgcagccctgctgcggccccttccccctgtgctggtgcctgagagaggacgacccccagtag

SEQ ID NO: 73314 - DNA, 1845 bp, synthetic construct
  misc_feature 1..1845: note = Description of Artificial Sequence: Synthetic coding sequence
  source 1..1845: mol_type = other DNA
atgagacccgtgatcaacagatgcgcccccggcagcctggacctgatgctgccccaggccgccagcgagggcatcgtgttccacagcctgcagatcagcctgtgcttcagaagctggctgcccgccatgctggccgtgctgctgagcctggcccccagcgccagcagcgacatcagcgccagcagacccaacatcctgctgctgatggccgacgacctgggcatcggcgacatcggctgctacggcaacaacaccatgagaacccccaacatcgacagactggccgaggacggcgtgaagctgacccagcacatcagcgccgccagcctgtgcacccccagcagagccgccttcctgaccggcagataccccgtgagaagcggcatggtgagcagcatcggctacagagtgctgcagtggaccggcgccagcggcggcctgcccaccaacgagaccaccttcgccaagatcctgaaggagaagggctacgccaccggcctgatcggcaagtggcacctgggcctgaactgcgagagcgccagcgaccactgccaccaccccctgcaccacggcttcgaccacttctacggcatgcccttcagcctgatgggcgactgcgccagatgggagctgagcgagaagagagtgaacctggagcagaagctgaacttcctgttccaggtgctggccctggtggccctgaccctggtggccggcaagctgacccacctgatccccgtgagctggatgcccgtgatctggagcgccctgagcgccgtgctgctgctggccagcagctacttcgtgggcgccctgatcgtgcacgccgactgcttcctgatgagaaaccacaccatcaccgagcagcccatgtgcttccagagaaccacccccctgatcctgcaggaggtggccagcttcctgaagagaaacaagcacggccccttcctgctgttcgtgagcttcctgcacgtgcacatccccctgatcaccatggagaacttcctgggcaagagcctgcacggcctgtacggcgacaacgtggaggagatggactggatggtgggcagaatcctggacaccctggacgtggagggcctgagcaacagcaccctgatctacttcaccagcgaccacggcggcagcctggagaaccagctgggcaacacccagtacggcggctggaacggcatctacaagggcggcaagggcatgggcggctgggagggcggcatcagagtgcccggcatcttcagatggcccggcgtgctgcccgccggcagagtgatcggcgagcccaccagcctgatggacgtgttccccaccgtggtgagactggccggcggcgaggtgccccaggacagagtgatcgacggccaggacctgctgcccctgctgctgggcaccgcccagcacagcgaccacgagttcctgatgcactactgcgagagattcctgcacgccgccagatggcaccagagagacagaggcaccatgtggaaggtgcacttcgtgacccccgtgttccagcccgagggcgccggcgcctgctacggcagaaaggtgtgcccctgcttcggcgagaaggtggtgcaccacgacccccccctgctgttcgacctgagcagagaccccagcgagacccacatcctgacccccgccagcgagcccgtgttctaccaggtgatggagagagtgcagcaggccgtgtgggagcaccagagaaccctgagccccgtgcccctgcagctggacagactgggcaacatctggagaccctggctgcagccctgctgcggccccttccccctgtgctggtgcctgagagaggacgacccccagtag

SEQ ID NO: 73315 - DNA, 1773 bp, synthetic construct
  misc_feature 1..1773: note = Description of Artificial Sequence: Synthetic coding sequence
  source 1..1773: mol_type = other DNA
atgagacccagaagacccctggtgttcatgagcctggtgtgcgccctgctgaacacctgccaggcccacagagtgcacgacgacaagcccaacatcgtgctgatcatggtggacgacctgggcatcggcgacctgggctgctacggcaacgacaccatgagaaccccccacatcgacagactggccagagagggcgtgagactgacccagcacatcagcgccgccagcctgtgcagccccagcagaagcgccttcctgaccggcagataccccatcagaagcggcatggtgagcagcggcaacagaagagtgatccagaacctggccgtgcccgccggcctgcccctgaacgagaccaccctggccgccctgctgaagaagcagggctacagcaccggcctgatcggcaagtggcaccagggcctgaactgcgacagcagaagcgaccagtgccaccacccctacaactacggcttcgactactactacggcatgcccttcaccctggtggacagctgctggcccgaccccagcagaaacaccgagctggccttcgagagccagctgtggctgtgcgtgcagctggtggccatcgccatcctgaccctgaccttcggcaagctgagcggctgggtgagcgtgccctggctgctgatcttcagcatgatcctgttcatcttcctgctgggctacgcctggttcagcagccacaccagccccctgtactgggactgcctgctgatgagaggccacgagatcaccgagcagcccatgaaggccgagagagccggcagcatcatggtgaaggaggccatcagcttcctggagagacacagcaaggagaccttcctgctgttcttcagcttcctgcacgtgcacacccccctgcccaccaccgacgacttcaccggcaccagcaagcacggcctgtacggcgacaacgtggaggagatggacagcatggtgggcaagatcctggacgccatcgacgacttcggcctgagaaacaacaccctggtgtacttcaccagcgaccacggcggccacctggaggccagaagaggccacgcccagctgggcggctggaacggcatctacaagggcggcaagggcatgggcggctgggagggcggcatcagagtgcccggcatcgtgagatggcccggcaaggtgcccgccggcagactgatcaaggagcccaccagcctgatggacatcctgcccaccgtggccagcgtgagcggcggcagcctgccccaggacagagtgatcgacggcagagacctgatgcccctgctgcagggcaacgtgagacacagcgagcacgagttcctgttccactactgcggcagctacctgcacgccgtgagatggatccccaaggacgacagcggcagcgtgtggaaggcccactacgtgacccccgtgttccagccccccgccagcggcggctgctacgtgaccagcctgtgcagatgcttcggcgagcaggtgacctaccacaacccccccctgctgttcgacctgagcagagaccccagcgagagcacccccctgacccccgccaccgagcccctgcacgacttcgtgatcaagaaggtggccaacgccctgaaggagcaccaggagaccatcgtgcccgtgacctaccagctgagcgagctgaaccagggcagaacctggctgaagccctgctgcggcgtgttccccttctgcctgtgcgacaaggaggaggaggtgagccagcccagaggccccaacgagaagagatag

SEQ ID NO: 73316 - DNA, 1773 bp, synthetic construct; identical to SEQ ID NO: 73315
  misc_feature 1..1773: note = Description of Artificial Sequence: Synthetic coding sequence
  source 1..1773: mol_type = other DNA

SEQ ID NO: 73317 - DNA, 1773 bp, synthetic construct; identical to SEQ ID NO: 73315
  misc_feature 1..1773: note = Description of Artificial Sequence: Synthetic coding sequence
  source 1..1773: mol_type = other DNA

SEQ ID NO: 73318 - DNA, 1689 bp, synthetic construct
  misc_feature 1..1689: note = Description of Artificial Sequence: Synthetic coding sequence
  source 1..1689: mol_type = other DNA
atgaccagaaacgccagacccaacatcgtgctgctgatggccgacgacctgggcgtgggcgacctgtgctgctacggcaacaacagcgtgagcacccccaacatcgacagactggccagcgagggcgtgagactgacccagcacctggccgccgccagcatgtgcacccccagcagagccgccttcctgaccggcagataccccatcagaagcggcatggtgagcgcctacaacctgaacagagccttcacctggctgggcggcagcggcggcctgcccaccaacgagaccaccttcgccaagctgctgcagcacagaggctacagaaccggcctgatcggcaagtggcacctgggcctgagctgcgccagcagaaacgaccactgctaccaccccctgaaccacggcttccactacttctacggcgtgcccttcggcctgctgagcgactgccaggccagcaagacccccgagctgcacagatggctgagaatcaagctgtggatcagcaccgtggccctggccctggtgcccttcctgctgctgatccccaagttcgccagatggttcagcgtgccctggaaggtgatcttcgtgttcgccctgctggccttcctgttcttcaccagctggtacagcagctacggcttcaccagaagatggaactgcatcctgatgagaaaccacgagatcatccagcagcccatgaaggaggagaaggtggccagcctgatgctgaaggaggccctggccttcatcgagagatacaagagagagcccttcctgctgttcttcagcttcctgcacgtgcacacccccctgatcagcaagaagaagttcgtgggcagaagcaagtacggcagatacggcgacaacgtggaggagatggactggatggtgggcaagatcctggacgccctggaccaggagagactggccaaccacaccctggtgtacttcaccagcgacaacggcggccacctggagcccctggacggcgccgtgcagctgggcggctggaacggcatctacaagggcggcaagggcatgggcggctgggagggcggcatcagagtgcccggcatcttcagatggcccagcgtgctggaggccggcagagtgatcaacgagcccaccagcctgatggacatctaccccaccctgagctacatcggcggcggcatcctgagccaggacagagtgatcgacggccagaacctgatgcccctgctggagggcagagccagccacagcgaccacgagttcctgttccactactgcggcgtgtacctgcacaccgtgagatggcaccagaaggactgcgccaccgtgtggaaggcccactacgtgacccccaagttctaccccgagggcaccggcgcctgctacggcagcggcatctgcagctgcagcggcgacgtgacctaccacgacccccccctgctgttcgacatcagcagagaccccagcgaggccctgcccctgaaccccgacaacgagcccctgttcgacagcgtgatcaagaagatggaggccgccatcagagagcacagaagaaccctgacccccgtgccccagcagttcagcgtgttcaacaccatctggaagccctggctgcagccctgctgcggcaccttccccttctgcggctgcgacaaggaggacgacatcctgcccatggccccctag

SEQ ID NO: 73319 - DNA, 1710 bp, synthetic construct
  misc_feature 1..1710: note = Description of Artificial Sequence: Synthetic coding sequence
  source 1..1710: mol_type = other DNA
atgcacaccctgaccggcttcagcctggtgagcctgctgagcttcggctacctgagctgggactgggccaagcccagcttcgtggccgacggccccggcgaggccggcgagcagcccagcgccgcccccccccagcccccccacatcatcttcatcctgaccgacgaccagggctaccacgacgtgggctaccacggcagcgacatcgagacccccaccctggacagactggccgccaagggcgtgaagctggagaactactacatccagcccatctgcacccccagcagaagccagctgctgaccggcagataccagatccacaccggcctgcagcacagcatcatcagaccccagcagcccaactgcctgcccctggaccaggtgaccctgccccagaagctgcaggaggccggctacagcacccacatggtgggcaagtggcacctgggcttctacagaaaggagtgcctgcccaccagaagaggcttcgacaccttcctgggcagcctgaccggcaacgtggactactacacctacgacaactgcgacggccccggcgtgtgcggcttcgacctgcacgagggcgagaacgtggcctggggcctgagcggccagtacagcaccatgctgtacgcccagagagccagccacatcctggccagccacagcccccagagacccctgttcctgtacgtggccttccaggccgtgcacacccccctgcagagccccagagagtacctgtacagatacagaaccatgggcaacgtggccagaagaaagtacgccgccatggtgacctgcatggacgaggccgtgagaaacatcacctgggccctgaagagatacggcttctacaacaacagcgtgatcatcttcagcagcgacaacggcggccagaccttcagcggcggcagcaactggcccctgagaggcagaaagggcacctactgggagggcggcgtgagaggcctgggcttcgtgcacagccccctgctgaagagaaagcagagaaccagcagagccctgatgcacatcaccgactggtaccccaccctggtgggcctggccggcggcaccaccagcgccgccgacggcctggacggctacgacgtgtggcccgccatcagcgagggcagagccagccccagaaccgagatcctgcacaacatcgaccccctgtacaaccacgcccagcacggcagcctggagggcggcttcggcatctggaacaccgccgtgcaggccgccatcagagtgggcgagtggaagctgctgaccggcgaccccggctacggcgactggatccccccccagaccctggccaccttccccggcagctggtggaacctggagagaatggccagcgtgagacaggccgtgtggctgttcaacatcagcgccgacccctacgagagagaggacctggccggccagagacccgacgtggtgagaaccctgctggccagactggccgagtacaacagaaccgccatccccgtgagataccccgccgagaaccccagagcccaccccgacttcaacggcggcgcctggggcccctgggccagcgacgaggaggaggaggaggaggagggcagagccagaagcttcagcagaggcagaagaaagaagaagtgcaagatctgcaagctgagaagcttcttcagaaagctgaacaccagactgatgagccagagaatctag

SEQ ID NO: 73320 - DNA, 261 bp, synthetic construct
  misc_feature 1..261: note = Description of Artificial Sequence: Synthetic coding sequence
  source 1..261: mol_type = other DNA
atggtgggcaagtggcacctgggcttctacagaaaggagtgcctgcccaccagaagaggcttcgacaccttcctgggcagcctgaccggcaacgtggactactacacctacgacaactgcgacggccccggcgtgtgcggcttcgacctgcacgagggcgagaacgtggcctggggcctgagcggccagtacagcaccatgctgtacgcccagagagccagccacatcctggccagccacagcccccagagacccctgtag

SEQ ID NO: 73321 - DNA, 1281 bp, synthetic construct
  misc_feature 1..1281: note = Description of Artificial Sequence: Synthetic coding sequence
  source 1..1281: mol_type = other DNA
atggtgggcaagtggcacctgggcttctacagaaaggagtgcctgcccaccagaagaggcttcgacaccttcctgggcagcctgaccggcaacgtggactactacacctacgacaactgcgacggccccggcgtgtgcggcttcgacctgcacgagggcgagaacgtggcctggggcctgagcggccagtacagcaccatgctgtacgcccagagagccagccacatcctggccagccacagcccccagagacccctgttcctgtacgtggccttccaggccgtgcacacccccctgcagagccccagagagtacctgtacagatacagaaccatgggcaacgtggccagaagaaagtacgccgccatggtgacctgcatggacgaggccgtgagaaacatcacctgggccctgaagagatacggcttctacaacaacagcgtgatcatcttcagcagcgacaacggcggccagaccttcagcggcggcagcaactggcccctgagaggcagaaagggcacctactgggagggcggcgtgagaggcctgggcttcgtgcacagccccctgctgaagagaaagcagagaaccagcagagccctgatgcacatcaccgactggtaccccaccctggtgggcctggccggcggcaccaccagcgccgccgacggcctggacggctacgacgtgtggcccgccatcagcgagggcagagccagccccagaaccgagatcctgcacaacatcgaccccctgtacaaccacgcccagcacggcagcctggagggcggcttcggcatctggaacaccgccgtgcaggccgccatcagagtgggcgagtggaagctgctgaccggcgaccccggctacggcgactggatccccccccagaccctggccaccttccccggcagctggtggaacctggagagaatggccagcgtgagacaggccgtgtggctgttcaacatcagcgccgacccctacgagagagaggacctggccggccagagacccgacgtggtgagaaccctgctggccagactggccgagtacaacagaaccgccatccccgtgagataccccgccgagaaccccagagcccaccccgacttcaacggcggcgcctggggcccctgggccagcgacgaggaggaggaggaggaggagggcagagccagaagcttcagcagaggcagaagaaagaagaagtgcaagatctgcaagctgagaagcttcttcagaaagctgaacaccagactgatgagccagagaatctag

SEQ ID NO: 73322 - DNA, 1800 bp, synthetic construct
  misc_feature 1..1800: note = Description of Artificial Sequence: Synthetic coding sequence
  source 1..1800: mol_type = other DNA
atggcccccagaggctgcgccggccacccccccccccccagcccccaggcctgcgtgtgccccggcaagatgctggccatgggcgccctggccggcttctggatcctgtgcctgctgacctacggctacctgagctggggccaggccctggaggaggaggaggagggcgccctgctggcccaggccggcgagaagctggagcccagcaccaccagcaccagccagccccacctgatcttcatcctggccgacgaccagggcttcagagacgtgggctaccacggcagcgagatcaagacccccaccctggacaagctggccgccgagggcgtgaagctggagaactactacgtgcagcccatctgcacccccagcagaagccagttcatcaccggcaagtaccagatccacaccggcctgcagcacagcatcatcagacccacccagcccaactgcctgcccctggacaacgccaccctgccccagaagctgaaggaggtgggctacagcacccacatggtgggcaagtggcacctgggcttctacagaaaggagtgcatgcccaccagaagaggcttcgacaccttcttcggcagcctgctgggcagcggcgactactacacccactacaagtgcgacagccccggcatgtgcggctacgacctgtacgagaacgacaacgccgcctgggactacgacaacggcatctacagcacccagatgtacacccagagagtgcagcagatcctggccagccacaaccccaccaagcccatcttcctgtacatcgcctaccaggccgtgcacagccccctgcaggcccccggcagatacttcgagcactacagaagcatcatcaacatcaacagaagaagatacgccgccatgctgagctgcctggacgaggccatcaacaacgtgaccctggccctgaagacctacggcttctacaacaacagcatcatcatctacagcagcgacaacggcggccagcccaccgccggcggcagcaactggcccctgagaggcagcaagggcacctactgggagggcggcatcagagccgtgggcttcgtgcacagccccctgctgaagaacaagggcaccgtgtgcaaggagctggtgcacatcaccgactggtaccccaccctgatcagcctggccgagggccagatcgacgaggacatccagctggacggctacgacatctgggagaccatcagcgagggcctgagaagccccagagtggacatcctgcacaacatcgaccccatctacaccaaggccaagaacggcagctgggccgccggctacggcatctggaacaccgccatccagagcgccatcagagtgcagcactggaagctgctgaccggcaaccccggctacagcgactgggtgcccccccagagcttcagcaacctgggccccaacagatggcacaacgagagaatcaccctgagcaccggcaagagcgtgtggctgttcaacatcaccgccgacccctacgagagagtggacctgagcaacagataccccggcatcgtgaagaagctgctgagaagactgagccagttcaacaagaccgccgtgcccgtgagatacccccccaaggaccccagaagcaaccccagactgaacggcggcgtgtggggcccctggtacaaggaggagaccaagaagaagaagcccagcaagaaccaggccgagaagaagcagaagaagagcaagaagaagaagaagaagcagcagaaggccgtgagcggcagcacctgccacagcggcgtgacctgcggctag

SEQ ID NO: 73323 - DNA, 1791 bp, synthetic construct
  misc_feature 1..1791: note = Description of Artificial Sequence: Synthetic coding sequence
  source 1..1791: mol_type = other DNA
atggcccccagaggctgcgccggccacccccccccccccagcccccaggcctgcgtgtgccccggcaagatgctggccatgggcgccctggccggcttctggatcctgtgcctgctgacctacggctacctgagctggggccaggccctggaggaggaggaggagggcgccctgctggcccaggccggcgagaagctggagcccagcaccaccagcaccagccagccccacctgatcttcatcctggccgacgaccagggcttcagagacgtgggctaccacggcagcgagatcaagacccccaccctggacaagctggccgccgagggcgtgaagctggagaactactacgtgcagcccatctgcacccccagcagaagccagttcatcaccggcaagtaccagatccacaccggcctgcagcacagcatcatcagacccacccagcccaactgcctgcccctggacaacgccaccctgccccagaagctgaaggaggtgggctacagcacccacatggtgggcaagtggcacctgggcttctacagaaaggagtgcatgcccaccagaagaggcttcgacaccttcttcggcagcctgctgggcagcggcgactactacacccactacaagtgcgacagccccggcatgtgcggctacgacctgtacgagaacgacaacgccgcctgggactacgacaacggcatctacagcacccagatgtacacccagagagtgcagcagatcctggccagccacaaccccaccaagcccatcttcctgtacatcgcctaccaggccgtgcacagccccctgcaggcccccggcagatacttcgagcactacagaagcatcatcaacatcaacagaagaagatacgccgccatgctgagctgcctggacgaggccatcaacaacgtgaccctggccctgaagacctacggcttctacaacaacagcatcatcatctacagcagcgacaacggcggccagcccaccgccggcggcagcaactggcccctgagaggcagcaagggcacctactgggagggcggcatcagagccgtgggcttcgtgcacagccccctgctgaagaacaagggcaccgtgtgcaaggagctggtgcacatcaccgactggtaccccaccctgatcagcctggccgagggccagatcgacgaggacatccagctggacggctacgacatctgggagaccatcagcgagggcctgagaagccccagagtggacatcctgcacaacatcgaccccatctacaccaaggccaagaacggcagctgggccgccggctacggcatctggaacaccgccatccagagcgccatcagagtgcagcactggaagctgctgaccggcaaccccggctacagcgactgggtgcccccccagagcttcagcaacctgggccccaacagatggcacaacgagagaatcaccctgagcaccggcaagagcgtgtggctgttcaacatcaccgccgacccctacgagagagtggacctgagcaacagataccccggcatcgtgaagaagctgctgagaagactgagccagttcaacaagaccgccgtgcccgtgagatacccccccaaggaccccagaagcaaccccagactgaacggcggcgtgtggggcccctggtacaaggaggagaccaagaagaagaagcccagcaagaaccaggccgagaagaagcagaagaagagcaagaagaagaagaagaagcagcagaaggccgtgagcggcaagcccgccaacctggccagatag

SEQ ID NO: 73324 - DNA, 507 bp, synthetic construct
  misc_feature 1..507: note = Description of Artificial Sequence: Synthetic coding sequence
  source 1..507: mol_type = other DNA
atggcccccggccagcaggccatgggcagcggcaccctgcagagcagccagcccagcgagtgcagcaccggcctgctgaccggcaaccccggctacagcgactgggtgcccccccagagcttcagcaacctgggccccaacagatggcacaacgagagaatcaccctgagcaccggcaagagcgtgtggctgttcaacatcaccgccgacccctacgagagagtggacctgagcaacagataccccggcatcgtgaagaagctgctgagaagactgagccagttcaacaagaccgccgtgcccgtgagatacccccccaaggaccccagaagcaaccccagactgaacggcggcgtgtggggcccctggtacaaggaggagaccaagaagaagaagcccagcaagaaccaggccgagaagaagcagaagaagagcaagaagaagaagaagaagcagcagaaggccgtgagcggcagcacctgccacagcggcgtgacctgcggctag

SEQ ID NO: 73325 - DNA, 1611 bp, synthetic construct
  misc_feature 1..1611: note = Description of Artificial Sequence: Synthetic coding sequence
  source 1..1611: mol_type = other DNA
atgctgctgctgtgggtgagcgtggtggccgccctggccctggccgtgctggcccccggcgccggcgagcagagaagaagagccgccaaggcccccaacgtggtgctggtggtgagcgacagcttcgacggcagactgaccttccaccccggcagccaggtggtgaagctgcccttcatcaacttcatgaagaccagaggcaccagcttcctgaacgcctacaccaacagccccatctgctgccccagcagagccgccatgtggagcggcctgttcacccacctgaccgagagctggaacaacttcaagggcctggaccccaactacaccacctggatggacgtgatggagagacacggctacagaacccagaagttcggcaagctggactacaccagcggccaccacagcatcagcaacagagtggaggcctggaccagagacgtggccttcctgctgagacaggagggcagacccatggtgaacctgatcagaaacagaaccaaggtgagagtgatggagagagactggcagaacaccgacaaggccgtgaactggctgagaaaggaggccatcaactacaccgagcccttcgtgatctacctgggcctgaacctgccccacccctaccccagccccagcagcggcgagaacttcggcagcagcaccttccacaccagcctgtactggctggagaaggtgagccacgacgccatcaagatccccaagtggagccccctgagcgagatgcaccccgtggactactacagcagctacaccaagaactgcaccggcagattcaccaagaaggagatcaagaacatcagagccttctactacgccatgtgcgccgagaccgacgccatgctgggcgagatcatcctggccctgcaccagctggacctgctgcagaagaccatcgtgatctacagcagcgaccacggcgagctggccatggagcacagacagttctacaagatgagcatgtacgaggccagcgcccacgtgcccctgctgatgatgggccccggcatcaaggccggcctgcaggtgagcaacgtggtgagcctggtggacatctaccccaccatgctggacatcgccggcatccccctgccccagaacctgagcggctacagcctgctgcccctgagcagcgagaccttcaagaacgagcacaaggtgaagaacctgcaccccccctggatcctgagcgagttccacggctgcaacgtgaacgccagcacctacatgctgagaaccaaccactggaagtacatcgcctacagcgacggcgccagcatcctgccccagctgttcgacctgagcagcgaccccgacgagctgaccaacgtggccgtgaagttccccgagatcacctacagcctggaccagaagctgcacagcatcatcaactaccccaaggtgagcgccagcgtgcaccagtacaacaaggagcagttcatcaagtggaagcagagcatcggccagaactacagcaacgtgatcgccaacctgagatggcaccaggactggcagaaggagcccagaaagtacgagaacgccatcgaccagtggctgaagacccacatgaaccccagagccgtgtag

SEQ ID NO: 73326 - DNA, 561 bp, synthetic construct
  misc_feature 1..561: note = Description of Artificial Sequence: Synthetic coding sequence
  source 1..561: mol_type = other DNA
atgctgctgctgtgggtgagcgtggtggccgccctggccctggccgtgctggcccccggcgccggcgagcagagaagaagagccgccaaggcccccaacgtggtgctggtggtgagcgacagcttcgacggcagactgaccttccaccccggcagccaggtggtgaagctgcccttcatcaacttcatgaagaccagaggcaccagcttcctgaacgcctacaccaacagccccatctgctgccccagcagagccgccatgtggagcggcctgttcacccacctgaccgagagctggaacaacttcaagggcctggaccccaactacaccacctggatggacgtgatggagagacacggctacagaacccagaagttcggcaagctggactacaccagcggccaccacagcatcagcaacagagtggaggcctggaccagagacgtggccttcctgctgagacaggagggcagacccatggtgaacctgatcagaaacagaaccaaggtgagagtgatggagagagactggcagaacaccgacaaggccgtgaccggctag

SEQ ID NO: 73327 - DNA, 1275 bp, synthetic construct
  misc_feature 1..1275: note = Description of Artificial Sequence: Synthetic coding sequence
  source 1..1275: mol_type = other DNA
atgtggggctgctgcgtgtgcggcgccctgttcgagggccagagactgagactgctgagagcccccggcgacggcctgagcagccccttcaccgtggtgagcagaaagtggcacctgggccaccacggcagctaccaccccaacttcagaggcttcgactactacttcggcatcccctacagccacgacatgggctgcaccgacacccccggctacaaccaccccccctgccccgcctgcccccagggcgacggccccagcagaaacctgcagagagactgctacaccgacgtggccctgcccctgtacgagaacctgaacatcgtggagcagcccgtgaacctgagcagcctggcccagaagtacgccgagaaggccacccagttcatccagagagccagcaccagcggcagacccttcctgctgtacgtggccctggcccacatgcacgtgcccctgcccgtgacccagctgcccgccgcccccagaggcagaagcctgtacggcgccggcctgtgggagatggacagcctggtgggccagatcaaggacaaggtggaccacaccgtgaaggagaacaccttcctgtggttcaccggcgacaacggcccctgggcccagaagtgcgagctggccggcagcgtgggccccttcaccggcttctggcagaccagacagggcggcagccccgccaagcagaccacctgggagggcggccacagagtgcccgccctggcctactggcccggcagagtgcccgtgaacgtgaccagcaccgccctgctgagcgtgctggacatcttccccaccgtggtggccctggcccaggccagcctgccccagggcagaagattcgacggcgtggacgtgagcgaggtgctgttcggcagaagccagcccggccacagagtgctgttccaccccaacagcggcgccgccggcgagttcggcgccctgcagaccgtgagactggagagatacaaggccttctacatcaccggcggcgccagagcctgcgacggcagcaccggccccgagctgcagcacaagttccccctgatcttcaacctggaggacgacaccgccgaggccgtgcccctggagagaggcggcgccgagtaccaggccgtgctgcccgaggtgagaaaggtgctggccgacgtgctgcaggacatcgccaacgacaacatcagcagcgccgactacacccaggaccccagcgtgaccccctgctgcaacccctaccagatcgcctgcagatgccaggccgcctag

SEQ ID NO: 73328 - DNA, 1578 bp, synthetic construct
  misc_feature 1..1578: note = Description of Artificial Sequence: Synthetic coding sequence
  source 1..1578: mol_type = other DNA
atgggctggctgttcctgaaggtgctgctggccggcgtgagcttcagcggcttcctgtaccccctggtggacttctgcatcagcggcaagaccagaggccagaagcccaacttcgtgatcatcctggccgacgacatgggctggggcgacctgggcgccaactgggccgagaccaaggacaccgccaacctggacaagatggccagcgagggcatgagattcgtggacttccacgccgccgccagcacctgcagccccagcagagccagcctgctgaccggcagactgggcctgagaaacggcgtgaccagaaacttcgccgtgaccagcgtgggcggcctgcccctgaacgagaccaccctggccgaggtgctgcagcaggccggctacgtgaccggcatcatcggcaagtggcacctgggccaccacggcagctaccaccccaacttcagaggcttcgactactacttcggcatcccctacagccacgacatgggctgcaccgacacccccggctacaaccaccccccctgccccgcctgcccccagggcgacggccccagcagaaacctgcagagagactgctacaccgacgtggccctgcccctgtacgagaacctgaacatcgtggagcagcccgtgaacctgagcagcctggcccagaagtacgccgagaaggccacccagttcatccagagagccagcaccagcggcagacccttcctgctgtacgtggccctggcccacatgcacgtgcccctgcccgtgacccagctgcccgccgcccccagaggcagaagcctgtacggcgccggcctgtgggagatggacagcctggtgggccagatcaaggacaaggtggaccacaccgtgaaggagaacaccttcctgtggttcaccggcgacaacggcccctgggcccagaagtgcgagctggccggcagcgtgggccccttcaccggcttctggcagaccagacagggcggcagccccgccaagcagaccacctgggagggcggccacagagtgcccgccctggcctactggcccggcagagtgcccgtgaacgtgaccagcaccgccctgctgagcgtgctggacatcttccccaccgtggtggccctggcccaggccagcctgccccagggcagaagattcgacggcgtggacgtgagcgaggtgctgttcggcagaagccagcccggccacagagtgctgttccaccccaacagcggcgccgccggcgagttcggcgccctgcagaccgtgagactggagagatacaaggccttctacatcaccggcggcgccagagcctgcgacggcagcaccggccccgagctgcagcacaagttccccctgatcttcaacctggaggacgacaccgccgaggccgtgcccctggagagaggcggcgccgagtaccaggccgtgctgcccgaggtgagaaaggtgctggccgacgtgctgcaggacatcgccaacgacaacatcagcagcgccgactacacccaggaccccagcgtgaccccctgctgcaacccctaccagatcgcctgcagatgccaggccgcctag

SEQ ID NO: 73329 - DNA, 747 bp, synthetic construct
  misc_feature 1..747: note = Description of Artificial Sequence: Synthetic coding sequence
  source 1..747: mol_type = other DNA
atgaccaagaccagcacctgcatctaccacttcctggtgctgagctggtacaccttcctgaactactacatcagccaggagggcaaggacgaggtgaagcccaagatcctggccaacggcgccagatggaagtacatgaccctgctgaacctgctgaagaacagaaccgccggcttcgacatctaccagcccggcagcttcagacagctgctgcagaccatcttctacggcgtgacctgcctggacgacgtgctgaagagaaccaagggcggcaaggacatcaagttcctgaccgccttcagagacctgctgttcaccaccctggccttccccgtgagcaccttcgtgttcctggccttctggatcctgttcctgtacaacagagacctgatctaccccaaggtgctggacaccgtgatccccgtgtggctgaaccacgccatgcacaccttcatcttccccatcaccctggccgaggtggtgctgagaccccacagctaccccagcaagaagaccggcctgaccctgctggccgccgccagcatcgcctacatcagcagaatcctgtggctgtacttcgagaccggcacctgggtgtaccccgtgttcgccaagctgagcctgctgggcctggccgccttcttcagcctgagctacgtgttcatcgccagcatctacctgctgggcgagaagctgaaccactggaagtggggcgacatgagacagcccagaaagaagagaaagtag

SEQ ID NO: 73330 - DNA, 609 bp, synthetic construct
  misc_feature 1..609: note = Description of Artificial Sequence: Synthetic coding sequence
  source 1..609: mol_type = other DNA
atggccaaggtgagcgtgctgaacgtggccgtgctggagaaccccagccccttccacagccccttcagattcgagatcagcttcgagtgcagcgaggccctggccgacgacctggagtggaagatcatctacgtgggcagcgccgagagcgaggagttcgaccagatcctggacagcgtgctggtgggccccgtgcccgccggcagacacatgttcgtgttccaggccgacgcccccaaccccagcctgatccccgagaccgacgccgtgggcgtgaccgtggtgctgatcacctgcacctaccacggccaggagttcatcagagtgggctactacgtgaacaacgagtacctgaaccccgagctgagagagaacccccccatgaagcccgacttcagccagctgcagagaaacatcctggccagcaaccccagagtgaccagattccacatcaactgggacaacaacatggacagactggaggccatcgagacccaggaccccagcctgggctgcggcctgcccctgaactgcacccccatcaagggcctgggcctgcccggctgcatccccggcctgctgcccgagaacagcatggactgcatctag

SEQ ID NO: 73331 - DNA, 1506 bp, synthetic construct
  misc_feature 1..1506: note = Description of Artificial Sequence: Synthetic coding sequence
  source 1..1506: mol_type = other DNA
atggacacccaggccggcagcgtggacgaggagaacggcagacagctgggcgaggtggagctgcagtgcggcatctgcaccaagtggttcaccgccgacaccttcggcatcgacaccagcagctgcctgcccttcatgaccaactacagcttccactgcaacgtgtgccaccacagcggcaacacctacttcctgagaaagcaggccaacctgaaggagatgtgcctgagcgccctggccaacctgacctggcagagcagaacccaggacgagcaccccaagaccatgttcagcaaggacaaggacatcatccccttcatcgacaagtactgggagtgcatgaccaccagacagagacccggcaagatgacctggcccaacaacatcgtgaagaccatgagcaaggagagagacgtgttcctggtgaaggagcaccccgaccccggcagcaaggaccccgaggaggactaccccaagttcggcctgctggaccaggacctgagcaacatcggccccgcctacgacaaccagaagcagagcagcgccgtgagcaccagcggcaacctgaacggcggcatcgccgccggcagcagcggcaagggcagaggcgccaagagaaagcagcaggacggcggcaccaccggcaccaccaagaaggccagaagcgaccccctgttcagcgcccagagactgcccccccacggctaccccctggagcaccccttcaacaaggacggctacagatacatcctggccgagcccgacccccacgcccccgaccccgagaagctggagctggactgctgggccggcaagcccatccccggcgacctgtacagagcctgcctgtacgagagagtgctgctggccctgcacgacagagccccccagctgaagatcagcgacgacagactgaccgtggtgggcgagaagggctacagcatggtgagagccagccacggcgtgagaaagggcgcctggtacttcgagatcaccgtggacgagatgccccccgacaccgccgccagactgggctggagccagcccctgggcaacctgcaggcccccctgggctacgacaagttcagctacagctggagaagcaagaagggcaccaagttccaccagagcatcggcaagcactacagcagcggctacggccagggcgacgtgctgggcttctacatcaacctgcccgaggacaccgagaccgccaagagcctgcccgacacctacaaggacaaggccctgatcaagttcaagagctacctgtacttcgaggagaaggacttcgtggacaaggccgagaagagcctgaagcagaccccccacagcgaggtgagcatcaacttcggcccctgcttcaagtacccccccaaggacctgacctacagacccatgagcgacatgggctggggcgccgtggtggagcacaccctggccgacgtgctgtaccacgtggagaccgaggtggacggcagaagaagccccccctgggagccctag

SEQ ID NO: 73332 - DNA, 1887 bp, synthetic construct
  misc_feature 1..1887: note = Description of Artificial Sequence: Synthetic coding sequence
  source 1..1887: mol_type = other DNA
atggccgccgccggcgccggccccggccaggaggccggcgccggccccggccccggcgccgtggccaacgccaccggcgccgaggagggcgagatgaagcccgtggccgccggcgccgccgccccccccggcgagggcatcagcgccgcccccaccgtggagcccagcagcggcgaggccgagggcggcgaggccaacctggtggacgtgagcggcggcctggagaccgagagcagcaacggcaaggacaccctggagggcgccggcgacaccagcgaggtgatggacacccaggccggcagcgtggacgaggagaacggcagacagctgggcgaggtggagctgcagtgcggcatctgcaccaagtggttcaccgccgacaccttcggcatcgacaccagcagctgcctgcccttcatgaccaactacagcttccactgcaacgtgtgccaccacagcggcaacacctacttcctgagaaagcaggccaacctgaaggagatgtgcctgagcgccctggccaacctgacctggcagagcagaacccaggacgagcaccccaagaccatgttcagcaaggacaaggacatcatccccttcatcgacaagtactgggagtgcatgaccaccagacagagacccggcaagatgacctggcccaacaacatcgtgaagaccatgagcaaggagagagacgtgttcctggtgaaggagcaccccgaccccggcagcaaggaccccgaggaggactaccccaagttcggcctgctggaccaggacctgagcaacatcggccccgcctacgacaaccagaagcagagcagcgccgtgagcaccagcggcaacctgaacggcggcatcgccgccggcagcagcggcaagggcagaggcgccaagagaaagcagcaggacggcggcaccaccggcaccaccaagaaggccagaagcgaccccctgttcagcgcccagagactgcccccccacggctaccccctggagcaccccttcaacaaggacggctacagatacatcctggccgagcccgacccccacgcccccgaccccgagaagctggagctggactgctgggccggcaagcccatccccggcgacctgtacagagcctgcctgtacgagagagtgctgctggccctgcacgacagagccccccagctgaagatcagcgacgacagactgaccgtggtgggcgagaagggctacagcatggtgagagccagccacggcgtgagaaagggcgcctggtacttcgagatcaccgtggacgagatgccccccgacaccgccgccagactgggctggagccagcccctgggcaacctgcaggcccccctgggctacgacaagttcagctacagctggagaagcaagaagggcaccaagttccaccagagcatcggcaagcactacagcagcggctacggccagggcgacgtgctgggcttctacatcaacctgcccgaggacaccgagaccgccaagagcctgcccgacacctacaaggacaaggccctgatcaagttcaagagctacctgtacttcgaggagaaggacttcgtggacaaggccgagaagagcctgaagcagaccccccacagcgagatcatcttctacaagaacggcgtgaaccagggcgtggcctacaaggacatcttcgagggcgtgtacttccccgccatcagcctgtacaagagctgcaccgtgagcatcaacttcggcccctgcttcaagtacccccccaaggacctgacctacagacccatgagcgacatgggctggggcgccgtggtggagcacaccctggccgacgtgctgtaccacgtggagaccgaggtggacggcagaagaagccccccctgggagccctag

SEQ ID NO: 73333 - DNA, 1605 bp, synthetic construct
  misc_feature 1..1605: note = Description of Artificial Sequence: Synthetic coding sequence
  source 1..1605: mol_type = other DNA
atggacacccaggccggcagcgtggacgaggagaacggcagacagctgggcgaggtggagctgcagtgcggcatctgcaccaagtggttcaccgccgacaccttcggcatcgacaccagcagctgcctgcccttcatgaccaactacagcttccactgcaacgtgtgccaccacagcggcaacacctacttcctgagaaagcaggccaacctgaaggagatgtgcctgagcgccctggccaacctgacctggcagagcagaacccaggacgagcaccccaagaccatgttcagcaaggacaaggacatcatccccttcatcgacaagtactgggagtgcatgaccaccagacagagacccggcaagatgacctggcccaacaacatcgtgaagaccatgagcaaggagagagacgtgttcctggtgaaggagcaccccgaccccggcagcaaggaccccgaggaggactaccccaagttcggcctgctggaccaggacctgagcaacatcggccccgcctacgacaaccagaagcagagcagcgccgtgagcaccagcggcaacctgaacggcggcatcgccgccggcagcagcggcaagggcagaggcgccaagagaaagcagcaggacggcggcaccaccggcaccaccaagaaggccagaagcgaccccctgttcagcgcccagagactgcccccccacggctaccccctggagcaccccttcaacaaggacggctacagatacatcctggccgagcccgacccccacgcccccgaccccgagaagctggagctggactgctgggccggcaagcccatccccggcgacctgtacagagcctgcctgtacgagagagtgctgctggccctgcacgacagagccccccagctgaagatcagcgacgacagactgaccgtggtgggcgagaagggctacagcatggtgagagccagccacggcgtgagaaagggcgcctggtacttcgagatcaccgtggacgagatgccccccgacaccgccgccagactgggctggagccagcccctgggcaacctgcaggcccccctgggctacgacaagttcagctacagctggagaagcaagaagggcaccaagttccaccagagcatcggcaagcactacagcagcggctacggccagggcgacgtgctgggcttctacatcaacctgcccgaggacaccgagaccgccaagagcctgcccgacacctacaaggacaaggccctgatcaagttcaagagctacctgtacttcgaggagaaggacttcgtggacaaggccgagaagagcctgaagcagaccccccacagcgagatcatcttctacaagaacggcgtgaaccagggcgtggcctacaaggacatcttcgagggcgtgtacttccccgccatcagcctgtacaagagctgcaccgtgagcatcaacttcggcccctgcttcaagtacccccccaaggacctgacctacagacccatgagcgacatgggctggggcgccgtggtggagcacaccctggccgacgtgctgtaccacgtggagaccgaggtggacggcagaagaagccccccctgggagccctag

SEQ ID NO: 73334 - DNA, 1506 bp, synthetic construct; identical to SEQ ID NO: 73331
  misc_feature 1..1506: note = Description of Artificial Sequence: Synthetic coding sequence
  source 1..1506: mol_type = other DNA

SEQ ID NO: 73335 - DNA, 1470 bp, synthetic construct
  misc_feature 1..1470: note = Description of Artificial Sequence: Synthetic coding sequence
  source 1..1470: mol_type = other DNA
atgaccaactacagcttccactgcaacgtgtgccaccacagcggcaacacctacttcctgagaaagcaggccaacctgaaggagatgtgcctgagcgccctggccaacctgacctggcagagcagaacccaggacgagcaccccaagaccatgttcagcaaggacaaggacatcatccccttcatcgacaagtactgggagtgcatgaccaccagacagagacccggcaagatgacctggcccaacaacatcgtgaagaccatgagcaaggagagagacgtgttcctggtgaaggagcaccccgaccccggcagcaaggaccccgaggaggactaccccaagttcggcctgctggaccaggacctgagcaacatcggccccgcctacgacaaccagaagcagagcagcgccgtgagcaccagcggcaacctgaacggcggcatcgccgccggcagcagcggcaagggcagaggcgccaagagaaagcagcaggacggcggcaccaccggcaccaccaagaaggccagaagcgaccccctgttcagcgcccagagactgcccccccacggctaccccctggagcaccccttcaacaaggacggctacagatacatcctggccgagcccgacccccacgcccccgaccccgagaagctggagctggactgctgggccggcaagcccatccccggcgacctgtacagagcctgcctgtacgagagagtgctgctggccctgcacgacagagccccccagctgaagatcagcgacgacagactgaccgtggtgggcgagaagggctacagcatggtgagagccagccacggcgtgagaaagggcgcctggtacttcgagatcaccgtggacgagatgccccccgacaccgccgccagactgggctggagccagcccctgggcaacctgcaggcccccctgggctacgacaagttcagctacagctggagaagcaagaagggcaccaagttccaccagagcatcggcaagcactacagcagcggctacggccagggcgacgtgctgggcttctacatcaacctgcccgaggacaccgagaccgccaagagcctgcccgacacctacaaggacaaggccctgatcaagttcaagagctacctgtacttcgaggagaaggacttcgtggacaaggccgagaagagcctgaagcagaccccccacagcgagatcatcttctacaagaacggcgtgaaccagggcgtggcctacaaggacatcttcgagggcgtgtacttccccgccatcagcctgtacaagagctgcaccgtgagcatcaacttcggcccctgcttcaagtacccccccaaggacctgacctacagacccatgagcgacatgggctggggcgccgtggtggagcacaccctggccgacgtgctgtaccacgtggagaccgaggtggacggcagaagaagccccccctgggagccctag

SEQ ID NO: 73336 - DNA, 876 bp, synthetic construct
  misc_feature 1..876: note = Description of Artificial Sequence: Synthetic coding sequence
  source 1..876: mol_type = other DNA
atgaccaaggagtaccaggacctgcagcacctggacaacgaggagagcgaccaccaccagctgagaaagggccccccccccccccagcccctgctgcagagactgtgcagcggccccagactgctgctgctgagcctgggcctgagcctgctgctgctggtggtggtgtgcgtgatcggcagccagaacagccagctgcaggaggagctgagaggcctgagagagaccttcagcaacttcaccgccagcaccgaggcccaggtgaagggcctgagcacccagggcggcaacgtgggcagaaagatgaagagcctggagagccagctggagaagcagcagaaggacctgagcgaggaccacagcagcctgctgctgcacgtgaagcagttcgtgagcgacctgagaagcctgagctgccagatggccgccctgcagggcaacggcagcgagagaacctgctgccccgtgaactgggtggagcacgagagaagctgctactggttcagcagaagcggcaaggcctgggccgacgccgacaactactgcagactggaggacgcccacctggtggtggtgaccagctgggaggagcagaagttcgtgcagcaccacatcggccccgtgaacacctggatgggcctgcacgaccagaacggcccctggaagtgggtggacggcaccgactacgagaccggcttcaagaactggagacccgagcagcccgacgactggtacggccacggcctgggcggcggcgaggactgcgcccacttcaccgacgacggcagatggaacgacgacgtgtgccagagaccctacagatgggtgtgcgagaccgagctggacaaggccagccaggagccccccctgctgtag

SEQ ID NO: 73337 - DNA, 759 bp, synthetic construct
  misc_feature 1..759: note = Description of Artificial Sequence: Synthetic coding sequence
  source 1..759: mol_type = other DNA
atgaccaaggagtaccaggacctgcagcacctggacaacgaggagagcgaccaccaccagctgagaaaggacagccagctgcaggaggagctgagaggcctgagagagaccttcagcaacttcaccgccagcaccgaggcccaggtgaagggcctgagcacccagggcggcaacgtgggcagaaagatgaagagcctggagagccagctggagaagcagcagaaggacctgagcgaggaccacagcagcctgctgctgcacgtgaagcagttcgtgagcgacctgagaagcctgagctgccagatggccgccctgcagggcaacggcagcgagagaacctgctgccccgtgaactgggtggagcacgagagaagctgctactggttcagcagaagcggcaaggcctgggccgacgccgacaactactgcagactggaggacgcccacctggtggtggtgaccagctgggaggagcagaagttcgtgcagcaccacatcggccccgtgaacacctggatgggcctgcacgaccagaacggcccctggaagtgggtggacggcaccgactacgagaccggcttcaagaactggagacccgagcagcccgacgactggtacggccacggcctgggcggcggcgaggactgcgcccacttcaccgacgacggcagatggaacgacgacgtgtgccagagaccctacagatgggtgtgcgagaccgagctggacaaggccagccaggagccccccctgctgtag

SEQ ID NO: 73338 - DNA, 759 bp, synthetic construct; identical to SEQ ID NO: 73337
  misc_feature 1..759: note = Description of Artificial Sequence: Synthetic coding sequence
  source 1..759: mol_type = other DNA

SEQ ID NO: 73339 - DNA, 5679 bp, synthetic construct
  misc_feature 1..5679: note = Description of Artificial Sequence: Synthetic coding sequence
  source 1..5679: mol_type = other DNA
atggccaacagaagagtgggcagaggctgctgggaggtgagccccaccgagagaagaccccccgccggcctgagaggccccgccgccgaggaggaggccagcagcccccccgtgctgagcctgagccacttctgcagaagccccttcctgtgcttcggcgacgtgctgctgggcgccagcagaaccctgagcctggccctggacaaccccaacgaggaggtggccgaggtgaagatcagccacttccccgccgccgacctgggcttcagcgtgagccagagatgcttcgtgctgcagcccaaggagaagatcgtgatcagcgtgaactggacccccctgaaggagggcagagtgagagagatcatgaccttcctggtgaacgacgtgctgaagcaccaggccatcctgctgggcaacgccgaggagcagaagaagaagaagagaagcctgtgggacaccatcaagaagaagaagatcagcgccagcaccagccacaacagaagagtgagcaacatccagaacgtgaacaagaccttcagcgtgagccagaaggtggacagagtgagaagccccctgcaggcctgcgagaacctggccatgaacgagggcggcccccccaccgagaacaacagcctgatcctggaggagaacaagatccccatcagccccatcagccccgccttcaacgagtgccacggcgccacctgcctgcccctgagcgtgagaagaagcaccacctacagcagcctgcacgccagcgagaacagagagctgctgaacgtgcacagcgccaacgtgagcaaggtgagcttcaacgagaaggccgtgaccgagaccagcttcaacagcgtgaacgtgaacggccagagaggcgagaacagcaagctgagcctgacccccaactgcagcagcaccctgaacatcacccagagccagatccacttcctgagccccgacagcttcgtgaacaacagccacggcgccaacaacgagctggagctggtgacctgcctgagcagcgacatgttcatgaaggacaacagccagcccgtgcacctggagagcaccatcgcccacgagatctaccagaagatcctgagccccgacagcttcatcaaggacaactacggcctgaaccaggacctggagagcgagagcgtgaaccccatcctgagccccaaccagttcctgaaggacaacatggcctacatgtgcaccagccagcagacctgcaaggtgcccctgagcaacgagaacagccaggtgccccagagccccgaggactggagaaagagcgaggtgagccccagaatccccgagtgccagggcagcaagagccccaaggccatcttcgaggagctggtggagatgaagagcaactactacagcttcatcaagcagaacaaccccaagttcagcgccgtgcaggacatcagcagccacagccacaacaagcagcccaagagaagacccatcctgagcgccaccgtgaccaagagaaaggccacctgcaccagagagaaccagaccgagatcaacaagcccaaggccaagagatgcctgaacagcgccgtgggcgagcacgagaaggtgatcaacaaccagaaggagaaggaggacttccacagctacctgcccatcatcgaccccatcctgagcaagagcaagagctacaagaacgaggtgacccccagcagcaccaccgccagcgtggccagaaagagaaagagcgacggcagcatggaggacgccaacgtgagagtggccatcaccgagcacaccgaggtgagagagatcaagagaatccacttcagccccagcgagcccaagaccagcgccgtgaagaagaccaagaacgtgaccacccccatcagcaagagaatcagcaacagagagaagctgaacctgaagaagaagaccgacctgagcatcttcagaacccccatcagcaagaccaacaagagaaccaagcccatcatcgccgtggcccagagcagcctgaccttcatcaagcccctgaagaccgacatccccagacaccccatgcccttcgccgccaagaacatgttctacgacgagagatggaaggagaagcaggagcagggcttcacctggtggctgaacttcatcctgacccccgacgacttcaccgtgaagaccaacatcagcgaggtgaacgccgccaccctgctgctgggcatcgagaaccagcacaagatcagcgtgcccagagcccccaccaaggaggagatgagcctgagagcctacaccgccagatgcagactgaacagactgagaagagccgcctgcagactgttcaccagcgagaagatggtgaaggccatcaagaagctggagatcgagatcgaggccagaagactgatcgtgagaaaggacagacacctgtggaaggacgtgggcgagagacagaaggtgctgaactggctgctgagctacaaccccctgtggctgagaatcggcctggagaccacctacggcgagctgatcagcctggaggacaacagcgacgtgaccggcctggccatgttcatcctgaacagactgctgtggaaccccgacatcgccgccgagtacagacaccccaccgtgccccacctgtacagagacggccacgaggaggccctgagcaagttcaccctgaagaagctgctgctgctggtgtgcttcctggactacgccaagatcagcagactgatcgaccacgacccctgcctgttctgcaaggacgccgagttcaaggccagcaaggagatcctgctggccttcagcagagacttcctgagcggcgagggcgacctgagcagacacctgggcctgctgggcctgcccgtgaaccacgtgcagacccccttcgacgagttcgacttcgccgtgaccaacctggccgtggacctgcagtgcggcgtgagactggtgagaaccatggagctgctgacccagaactgggacctgagcaagaagctgagaatccccgccatcagcagactgcagaagatgcacaacgtggacatcgtgctgcaggtgctgaagagcagaggcatcgagctgagcgacgagcacggcaacaccatcctgagcaaggacatcgtggacagacacagagagaagaccctgagactgctgtggaagatcgccttcgccttccaggtggacatcagcctgaacctggaccagctgaaggaggagatcgccttcctgaagcacaccaagagcatcaagaagaccatcagcctgctgagctgccacagcgacgacctgatcaacaagaagaagggcaagagagacagcggcagcttcgagcagtacagcgagaacatcaagctgctgatggactgggtgaacgccgtgtgcgccttctacaacaagaaggtggagaacttcaccgtgagcttcagcgacggcagagtgctgtgctacctgatccaccactaccacccctgctacgtgcccttcgacgccatctgccagagaaccacccagaccgtggagtgcacccagaccggcagcgtggtgctgaacagcagcagcgagagcgacgacagcagcctggacatgagcctgaaggccttcgaccacgagaacaccagcgagctgtacaaggagctgctggagaacgagaagaagaacttccacctggtgagaagcgccgtgagagacctgggcggcatccccgccatgatcaaccacagcgacatgagcaacaccatccccgacgagaaggtggtgatcacctacctgagcttcctgtgcgccagactgctggacctgagaaaggagatcagagccgccagactgatccagaccacctggagaaagtacaagctgaagaccgacctgaagagacaccaggagagagagaaggccgccagaatcatccagctggccgtgatcaacttcctggccaagcagagactgagaaagagagtgaacgccgccctggtgatccagaagtactggagaagagtgctggcccagagaaagctgctgatgctgaagaaggagaagctggagaaggtgcagaacaaggccgccagcctgatccaggccatgtggagaagatacagagccaagaagtacctgtgcaaggtgaaggccgcctgcaagatccaggcctggtacagatgctggagagcccacaaggagtacctggccatcctgaaggccgtgaagatcatccagggctgcttctacaccaagctggagagaaccagattcctgaacgtgagagccagcgccatcatcatccagagaaagtggagagccatcctgcccgccaagatcgcccacgagcacttcctgatgatcaagagacacagagccgcctgcctgatccaggcccactacagaggctacaagggcagacaggtgttcctgagacagaagagcgccgccctgatcatccagaagtacatcagagccagagaggccggcaagcacgagagaatcaagtacatcgagttcaagaagagcaccgtgatcctgcaggccctggtgagaggctggctggtgagaaagagattcctggagcagagagccaagatcagactgctgcacttcaccgccgccgcctactaccacctgaacgccgtgagaatccagagagcctacaagctgtacctggccgtgaagaacgccaacaagcaggtgaacagcgtgatctgcatccagagatggttcagagccagactgcaggagaagagattcatccagaagtaccacagcatcaagaagatcgagcacgagggccaggagtgcctgagccagagaaacagagccgccagcgtgatccagaaggccgtgagacacttcctgctgagaaagaagcaggagaagttcaccagcggcatcatcaagatccaggccctgtggagaggctacagctggagaaagaagaacgactgcaccaagatcaaggccatcagactgagcctgcaggtggtgaacagagagatcagagaggagaacaagctgtacaagagaaccgccctggccctgcactacctgctgacctacaagcacctgagcgccatcctggaggccctgaagcacctggaggtggtgaccagactgagccccctgtgctgcgagaacatggcccagagcggcgccatcagcaagatcttcgtgctgatcagaagctgcaacagaagcatcccctgcatggaggtgatcagatacgccgtgcaggtgctgctgaacgtgagcaagtacgagaagaccaccagcgccgtgtacgacgtggagaactgcatcgacatcctgctggagctgctgcagatctacagagagaagcccggcaacaaggtggccgacaagggcggcagcatcttcaccaagacctgctgcctgctggccatcctgctgaagaccaccaacagagccagcgacgtgagaagcagaagcaaggtggtggacagaatctacagcctgtacaagctgaccgcccacaagcacaagatgaacaccgagagaatcctgtacaagcagaagaagaacagcagcatcagcatccccttcatccccgagacccccgtgagaaccagaatcgtgagcagactgaagcccgactgggtgctgagaagagacaacatggaggagatcaccaaccccctgcaggccatccagatggtgatggacaccctgggcatcccctactag

SEQ ID NO: 73340 - DNA, 4170 bp, synthetic construct
  misc_feature 1..4170: note = Description of Artificial Sequence: Synthetic coding sequence
  source 1..4170: mol_type = other DNA
atggccaacagaagagtgggcagaggctgctgggaggtgagccccaccgagagaagaccccccgccggcctgagaggccccgccgccgaggaggaggccagcagcccccccgtgctgagcctgagccacttctgcagaagccccttcctgtgcttcggcgacgtgctgctgggcgccagcagaaccctgagcctggccctggacaaccccaacgaggaggtggccgaggtgaagatcagccacttccccgccgccgacctgggcttcagcgtgagccagagatgcttcgtgctgcagcccaaggagaagatcgtgatcagcgtgaactggacccccctgaaggagggcagagtgagagagatcatgaccttcctggtgaacgacgtgctgaagcaccaggccatcctgctgggcaacgccgaggagcagaagaagaagaagagaagcctgtgggacaccatcaagaagaagaagatcagcgccagcaccagccacaacagaagagtgagcaacatccagaacgtgaacaagaccttcagcgtgagccagaaggtggacagaagatacagacagcagacctacttcaacaagctgaagaagatcaccaagaccgtgcagcagagatactgggccatgaaggagagaaacatccagttccagagatacaacaagctgagacacagcgtgatctacatccaggccatcttcagaggcaagaaggccagaagacacctgaagatgatgcacatcgccgccaccctgatccagagaagattcagaaccctgatgatgagaagaagattcctgagcctgaagaagaccgccatcctgatccagagaaagtacagagcccacctgtgcaccaagcaccacctgcagttcctgcaggtgcagaacgccgtgatcaagatccagagcagctacagaagatggatgatcagaaagagaatgagagagatgcacagagccgccaccttcatccagagcaccttcagaatgcacagactgcacatgagataccaggccctgaagcaggccagcgtggtgatccagcagcagtaccaggccaacagagccgccaagctgcagagacagcactacctgagacagagacacagcgccgtgatcctgcaggccgccttcagaggcatgaagaccagaagacacctgaagagcatgcacagcagcgccaccctgatccagagcagattcagaagcctgctggtgagaagaagattcatcagcctgaagaaggccaccatcttcgtgcagagaaagtacagagccaccatctgcgccaagcacaagctgtaccagttcctgcacctgagaaaggccgccatcaccatccagagcagctacagaagactgatggtgaagaagaagctgcaggagatgcagagagccgccgtgctgatccaggccaccttcagaatgtacagaacctacatcaccttccagacctggaagcacgccagcatcctgatccagcagcactacagaacctacagagccgccaagctgcagagagagaactacatcagacagtggcacagcgccgtggtgatccaggccgcctacaagggcatgaaggccagacagctgctgagagagaagcacaaggccagcatcgtgatccagagcacctacagaatgtacagacagtactgcttctaccagaagctgcagtgggccaccaagatcatccaggagaagtacagagccaacaagaagaagcagaaggtgttccagcacaacgagctgaagaaggagacctgcgtgcaggccggcttccaggacatgaacatcaagaagcagatccaggagcagcaccaggccgccatcatcatccagaagcactgcaaggccttcaagatcagaaagcactacctgcacctgagagccaccgtggtgagcatccagagaagatacagaaagctgaccgccgtgagaacccaggccgtgatctgcatccagagctactacagaggcttcaaggtgagaaaggacatccagaacatgcacagagccgccaccctgatccagagcttctacagaatgcacagagccaaggtggactacgagaccaagaagaccgccatcgtggtgatccagaactactacagactgtacgtgagagtgaagaccgagagaaagaacttcctggccgtgcagaagagcgtgagaaccatccaggccgccttcagaggcatgaaggtgagacagaagctgaagaacgtgagcgaggagaagatggccgccatcgtgaaccagagcgccctgtgctgctacagaagcaagacccagtacgaggccgtgcagagcgagggcgtgatgatccaggagtggtacaaggccagcggcctggcctgcagccaggaggccgagtaccacagccagagcagagccgccgtgaccatccagaaggccttctgcagaatggtgaccagaaagctggagacccagaagtgcgccgccctgagaatccagttcttcctgcagatggccgtgtacagaagaagattcgtgcagcagaagagagccgccatcaccctgcagcactacttcagaacctggcagaccagaaagcagttcctgctgtacagaaaggccgccgtggtgctgcagaaccactacagagccttcctgagcgccaagcaccagagacaggtgtacctgcagatcagaagcagcgtgatcatcatccaggccagaagcaagggcttcatccagaagagaaagttccaggagatcaagaacagcaccatcaagatccaggccatgtggagaagatacagagccaagaagtacctgtgcaaggtgaaggccgcctgcaagatccaggcctggtacagatgctggagagcccacaaggagtacctggccatcctgaaggccgtgaagatcatccagggctgcttctacaccaagctggagagaaccagattcctgaacgtgagagccagcgccatcatcatccagagaaagtggagagccatcctgcccgccaagatcgcccacgagcacttcctgatgatcaagagacacagagccgcctgcctgatccaggcccactacagaggctacaagggcagacaggtgttcctgagacagaagagcgccgccctgatcatccagaagtacatcagagccagagaggccggcaagcacgagagaatcaagtacatcgagttcaagaagagcaccgtgatcctgcaggccctggtgagaggctggctggtgagaaagagattcctggagcagagagccaagatcagactgctgcacttcaccgccgccgcctactaccacctgaacgccgtgagaatccagagagcctacaagctgtacctggccgtgaagaacgccaacaagcaggtgaacagcgtgatctgcatccagagatggttcagagccagactgcaggagaagagattcatccagaagtaccacagcatcaagaagatcgagcacgagggccaggagtgcctgagccagagaaacagagccgccagcgtgatccagaaggccgtgagacacttcctgctgagaaagaagcaggagaagttcaccagcggcatcatcaagatccaggccctgtggagaggctacagctggagaaagaagaacgactgcaccaagatcaaggccatcagactgagcctgcaggtggtgaacagagagatcagagaggagaacaagctgtacaagagaaccgccctggccctgcactacctgctgacctacaagcacctgagcgccatcctggaggccctgaagcacctggaggtggtgaccagactgagccccctgtgctgcgagaacatggcccagagcggcgccatcagcaagatcttcgtgctgatcagaagctgcaacagaagcatcccctgcatggaggtgatcagatacgccgtgcaggtgctgctgaacgtgagcaagtacgagaagaccaccagcgccgtgtacgacgtggagaactgcatcgacatcctgctggagctgctgcagatctacagagagaagcccggcaacaaggtggccgacaagggcggcagcatcttcaccaagacctgctgcctgctggccatcctgctgaagaccaccaacagagccagcgtgagcatcagccagctgcccttcttcaagatcatcttcctgtggagctag

SEQ ID NO: 73341 - DNA, 3429 bp, synthetic construct
  misc_feature 1..3429: note = Description of Artificial Sequence: Synthetic coding sequence
  source 1..3429: mol_type = other DNA
atgagcctgagagcctacaccgccagatgcagactgaacagactgagaagagccgcctgcagactgttcaccagcgagaagatggtgaaggccatcaagaagctggagatcgagatcgaggccagaagactgatcgtgagaaaggacagacacctgtggaaggacgtgggcgagagacagaaggtgctgaactggctgctgagctacaaccccctgtggctgagaatcggcctggagaccacctacggcgagctgatcagcctggaggacaacagcgacgtgaccggcctggccatgttcatcctgaacagactgctgtggaaccccgacatcgccgccgagtacagacaccccaccgtgccccacctgtacagagacggccacgaggaggccctgagcaagttcaccctgaagaagctgctgctgctggtgtgcttcctggactacgccaagatcagcagactgatcgaccacgacccctgcctgttctgcaaggacgccgagttcaaggccagcaaggagatcctgctggccttcagcagagacttcctgagcggcgagggcgacctgagcagacacctgggcctgctgggcctgcccgtgaaccacgtgcagacccccttcgacgagttcgacttcgccgtgaccaacctggccgtggacctgcagtgcggcgtgagactggtgagaaccatggagctgctgacccagaactgggacctgagcaagaagctgagaatccccgccatcagcagactgcagaagatgcacaacgtggacatcgtgctgcaggtgctgaagagcagaggcatcgagctgagcgacgagcacggcaacaccatcctgagcaaggacatcgtggacagacacagagagaagaccctgagactgctgtggaagatcgccttcgccttccaggtggacatcagcctgaacctggaccagctgaaggaggagatcgccttcctgaagcacaccaagagcatcaagaagaccatcagcctgctgagctgccacagcgacgacctgatcaacaagaagaagggcaagagagacagcggcagcttcgagcagtacagcgagaacatcaagctgctgatggactgggtgaacgccgtgtgcgccttctacaacaagaaggtggagaacttcaccgtgagcttcagcgacggcagagtgctgtgctacctgatccaccactaccacccctgctacgtgcccttcgacgccatctgccagagaaccacccagaccgtggagtgcacccagaccggcagcgtggtgctgaacagcagcagcgagagcgacgacagcagcctggacatgagcctgaaggccttcgaccacgagaacaccagcgagctgtacaaggagctgctggagaacgagaagaagaacttccacctggtgagaagcgccgtgagagacctgggcggcatccccgccatgatcaaccacagcgacatgagcaacaccatccccgacgagaaggtggtgatcacctacctgagcttcctgtgcgccagactgctggacctgagaaaggagatcagagccgccagactgatccagaccacctggagaaagtacaagctgaagaccgacctgaagagacaccaggagagagagaaggccgccagaatcatccagctggccgtgatcaacttcctggccaagcagagactgagaaagagagtgaacgccgccctggtgatccagaagtactggagaagagtgctggcccagagaaagctgctgatgctgaagaaggagaagctggagaaggtgcagaacaaggccgccagcctgatccaggccatgtggagaagatacagagccaagaagtacctgtgcaaggtgaaggccgcctgcaagatccaggcctggtacagatgctggagagcccacaaggagtacctggccatcctgaaggccgtgaagatcatccagggctgcttctacaccaagctggagagaaccagattcctgaacgtgagagccagcgccatcatcatccagagaaagtggagagccatcctgcccgccaagatcgcccacgagcacttcctgatgatcaagagacacagagccgcctgcctgatccaggcccactacagaggctacaagggcagacaggtgttcctgagacagaagagcgccgccctgatcatccagaagtacatcagagccagagaggccggcaagcacgagagaatcaagtacatcgagttcaagaagagcaccgtgatcctgcaggccctggtgagaggctggctggtgagaaagagattcctggagcagagagccaagatcagactgctgcacttcaccgccgccgcctactaccacctgaacgccgtgagaatccagagagcctacaagctgtacctggccgtgaagaacgccaacaagcaggtgaacagcgtgatctgcatccagagatggttcagagccagactgcaggagaagagattcatccagaagtaccacagcatcaagaagatcgagcacgagggccaggagtgcctgagccagagaaacagagccgccagcgtgatccagaaggccgtgagacacttcctgctgagaaagaagcaggagaagttcaccagcggcatcatcaagatccaggccctgtggagaggctacagctggagaaagaagaacgactgcaccaagatcaaggccatcagactgagcctgcaggtggtgaacagagagatcagagaggagaacaagctgtacaagagaaccgccctggccctgcactacctgctgacctacaagcacctgagcgccatcctggaggccctgaagcacctggaggtggtgaccagactgagccccctgtgctgcgagaacatggcccagagcggcgccatcagcaagatcttcgtgctgatcagaagctgcaacagaagcatcccctgcatggaggtgatcagatacgccgtgcaggtgctgctgaacgtgagcaagtacgagaagaccaccagcgccgtgtacgacgtggagaactgcatcgacatcctgctggagctgctgcagatctacagagagaagcccggcaacaaggtggccgacaagggcggcagcatcttcaccaagacctgctgcctgctggccatcctgctgaagaccaccaacagagccagcgacgtgagaagcagaagcaaggtggtggacagaatctacagcctgtacaagctgaccgcccacaagcacaagatgaacaccgagagaatcctgtacaagcagaagaagaacagcagcatcagcatccccttcatccccgagacccccgtgagaaccagaatcgtgagcagactgaagcccgactgggtgctgagaagagacaacatggaggagatcaccaaccccctgcaggccatccagatggtgatggacaccctgggcatcccctactag

SEQ ID NO: 73342 - DNA, 10434 bp, synthetic construct
  misc_feature 1..10434: note = Description of Artificial Sequence: Synthetic coding sequence
  source 1..10434: mol_type = other DNA
atggccaacagaagagtgggcagaggctgctgggaggtgagccccaccgagagaagaccccccgccggcctgagaggccccgccgccgaggaggaggccagcagcccccccgtgctgagcctgagccacttctgcagaagccccttcctgtgcttcggcgacgtgctgctgggcgccagcagaaccctgagcctggccctggacaaccccaacgaggaggtggccgaggtgaagatcagccacttccccgccgccgacctgggcttcagcgtgagccagagatgcttcgtgctgcagcccaaggagaagatcgtgatcagcgtgaactggacccccctgaaggagggcagagtgagagagatcatgaccttcctggtgaacgacgtgctgaagcaccaggccatcctgctgggcaacgccgaggagcagaagaagaagaagagaagcctgtgggacaccatcaagaagaagaagatcagcgccagcaccagccacaacagaagagtgagcaacatccagaacgtgaacaagaccttcagcgtgagccagaaggtggacagagtgagaagccccctgcaggcctgcgagaacctggccatgaacgagggcggcccccccaccgagaacaacagcctgatcctggaggagaacaagatccccatcagccccatcagccccgccttcaacgagtgccacggcgccacctgcctgcccctgagcgtgagaagaagcaccacctacagcagcctgcacgccagcgagaacagagagctgctgaacgtgcacagcgccaacgtgagcaaggtgagcttcaacgagaaggccgtgaccgagaccagcttcaacagcgtgaacgtgaacggccagagaggcgagaacagcaagctgagcctgacccccaactgcagcagcaccctgaacatcacccagagccagatccacttcctgagccccgacagcttcgtgaacaacagccacggcgccaacaacgagctggagctggtgacctgcctgagcagcgacatgttcatgaaggacaacagccagcccgtgcacctggagagcaccatcgcccacgagatctaccagaagatcctgagccccgacagcttcatcaaggacaactacggcctgaaccaggacctggagagcgagagcgtgaaccccatcctgagccccaaccagttcctgaaggacaacatggcctacatgtgcaccagccagcagacctgcaaggtgcccctgagcaacgagaacagccaggtgccccagagccccgaggactggagaaagagcgaggtgagccccagaatccccgagtgccagggcagcaagagccccaaggccatcttcgaggagctggtggagatgaagagcaactactacagcttcatcaagcagaacaaccccaagttcagcgccgtgcaggacatcagcagccacagccacaacaagcagcccaagagaagacccatcctgagcgccaccgtgaccaagagaaaggccacctgcaccagagagaaccagaccgagatcaacaagcccaaggccaagagatgcctgaacagcgccgtgggcgagcacgagaaggtgatcaacaaccagaaggagaaggaggacttccacagctacctgcccatcatcgaccccatcctgagcaagagcaagagctacaagaacgaggtgacccccagcagcaccaccgccagcgtggccagaaagagaaagagcgacggcagcatggaggacgccaacgtgagagtggccatcaccgagcacaccgaggtgagagagatcaagagaatccacttcagccccagcgagcccaagaccagcgccgtgaagaagaccaagaacgtgaccacccccatcagcaagagaatcagcaacagagagaagctgaacctgaagaagaagaccgacctgagcatcttcagaacccccatcagcaagaccaacaagagaaccaagcccatcatcgccgtggcccagagcagcctgaccttcatcaagcccctgaagaccgacatccccagacaccccatgcccttcgccgccaagaacatgttctacgacgagagatggaaggagaagcaggagcagggcttcacctggtggctgaacttcatcctgacccccgacgacttcaccgtgaagaccaacatcagcgaggtgaacgccgccaccctgctgctgggcatcgagaaccagcacaagatcagcgtgcccagagcccccaccaaggaggagatgagcctgagagcctacaccgccagatgcagactgaacagactgagaagagccgcctgcagactgttcaccagcgagaagatggtgaaggccatcaagaagctggagatcgagatcgaggccagaagactgatcgtgagaaaggacagacacctgtggaaggacgtgggcgagagacagaaggtgctgaactggctgctgagctacaaccccctgtggctgagaatcggcctggagaccacctacggcgagctgatcagcctggaggacaacagcgacgtgaccggcctggccatgttcatcctgaacagactgctgtggaaccccgacatcgccgccgagtacagacaccccaccgtgccccacctgtacagagacggccacgaggaggccctgagcaagttcaccctgaagaagctgctgctgctggtgtgcttcctggactacgccaagatcagcagactgatcgaccacgacccctgcctgttctgcaaggacgccgagttcaaggccagcaaggagatcctgctggccttcagcagagacttcctgagcggcgagggcgacctgagcagacacctgggcctgctgggcctgcccgtgaaccacgtgcagacccccttcgacgagttcgacttcgccgtgaccaacctggccgtggacctgcagtgcggcgtgagactggtgagaaccatggagctgctgacccagaactgggacctgagcaagaagctgagaatccccgccatcagcagactgcagaagatgcacaacgtggacatcgtgctgcaggtgctgaagagcagaggcatcgagctgagcgacgagcacggcaacaccatcctgagcaaggacatcgtggacagacacagagagaagaccctgagactgctgtggaagatcgccttcgccttccaggtggacatcagcctgaacctggaccagctgaaggaggagatcgccttcctgaagcacaccaagagcatcaagaagaccatcagcctgctgagctgccacagcgacgacctgatcaacaagaagaagggcaagagagacagcggcagcttcgagcagtacagcgagaacatcaagctgctgatggactgggtgaacgccgtgtgcgccttctacaacaagaaggtggagaacttcaccgtgagcttcagcgacggcagagtgctgtgctacctgatccaccactaccacccctgctacgtgcccttcgacgccatctgccagagaaccacccagaccgtggagtgcacccagaccggcagcgtggtgctgaacagcagcagcgagagcgacgacagcagcctggacatgagcctgaaggccttcgaccacgagaacaccagcgagctgtacaaggagctgctggagaacgagaagaagaacttccacctggtgagaagcgccgtgagagacctgggcggcatccccgccatgatcaaccacagcgacatgagcaacaccatccccgacgagaaggtggtgatcacctacctgagcttcctgtgcgccagactgctggacctgagaaaggagatcagagccgccagactgatccagaccacctggagaaagtacaagctgaagaccgacctgaagagacaccaggagagagagaaggccgccagaatcatccagctggccgtgatcaacttcctggccaagcagagactgagaaagagagtgaacgccgccctggtgatccagaagtactggagaagagtgctggcccagagaaagctgctgatgctgaagaaggagaagctggagaaggtgcagaacaaggccgccagcctgatccagggctactggagaagatacagcaccagacagagattcctgaagctgaagtactacagcatcatcctgcagagcagaatcagaatgatcatcgccgtgaccagctacaagagatacctgtgggccaccgtgaccatccagagacactggagagcctacctgagaagaaagcaggaccagcagagatacgagatgctgaagagcagcaccctgatcatccagagcatgttcagaaagtggaagcagagaaagatgcagagccaggtgaaggccaccgtgatcctgcagagagccttcagagagtggcacctgagaaagcaggccaaggaggagaacagcgccatcatcatccagagctggtacagaatgcacaaggagctgagaaagtacatctacatcagaagctgcgtggtgatcatccagaagagattcagatgcttccaggcccagaagctgtacaagagaagaaaggagagcatcctgaccatccagaagtactacaaggcctacctgaagggcaagatcgagagaaccaactacctgcagaagagagccgccgccatccagctgcaggccgccttcagaagactgaaggcccacaacctgtgcagacagatcagagccgcctgcgtgatccagagctactggagaatgagacaggacagagtgagattcctgaacctgaagaagaccatcatcaagttccaggcccacgtgagaaagcaccagcagagacagaagtacaagaagatgaagaaggccgccgtgatcatccagacccacttcagagcctacatcttcgccatgaaggtgctggccagctaccagaagaccagaagcgccgtgatcgtgctgcagagcgcctacagaggcatgcaggccagaaagatgtacatccacatcctgaccagcgtgatcaagatccagagctactacagagcctacgtgagcaagaaggagttcctgagcctgaagaacgccaccatcaagctgcagagcaccgtgaagatgaagcagaccagaaagcagtacctgcacctgagagccgccgccctgttcatccagcagtgctacagaagcaagaagatcgccgcccagaagagagaggagtacatgcagatgagagagagctgcatcaagctgcaggccttcgtgagaggctacctggtgagaaagcagatgagactgcagagaaaggccgtgatcagcctgcagagctacttcagaatgagaaaggccagacagtactacctgaagatgtacaaggccatcatcgtgatccagaactactaccacgcctacaaggcccaggtgaaccagagaaagaacttcctgcaggtgaagaaggccgccacctgcctgcaggccgcctacagaggctacaaggtgagacagctgatcaagcagcagagcatcgccgccctgaagatccagagcgccttcagaggctacaacaagagagtgaagtaccagagcgtgctgcagagcatcatcaagatccagagatggtacagagcctacaagaccctgcacgacaccagaacccacttcctgaagaccaaggccgccgtgatcagcctgcagagcgcctacagaggctggaaggtgagaaagcagatcagaagagagcaccaggccgccctgaagatccagagcgccttcagaatggccaaggcccagaagcagttcagactgttcaagaccgccgccctggtgatccagcagaacttcagagcctggaccgccggcagaaagcagtgcatggagtacatcgagctgagacacgccgtgctggtgctgcagagcatgtggaagggcaagaccctgagaagacagctgcagagacagcacaagtgcgccatcatcatccagagctactacagaatgcacgtgcagcagaagaagtggaagatcatgaagaaggccgccctgctgatccagaagtactacagagcctacagcatcggcagagagcagaaccacctgtacctgaagaccaaggccgccgtggtgaccctgcagagcgcctacagaggcatgaaggtgagaaagagaatcaaggactgcaacaaggccgccgtgaccatccagagcaagtacagagcctacaagaccaagaagaagtacgccacctacagagccagcgccatcatcatccagagatggtacagaggcatcaagatcaccaaccaccagcacaaggagtacctgaacctgaagaagaccgccatcaagatccagagcgtgtacagaggcatcagagtgagaagacacatccagcacatgcacagagccgccaccttcatcaaggccatgttcaagatgcaccagagcagaatcagctaccacaccatgagaaaggccgccatcgtgatccaggtgagatgcagagcctactaccagggcaagatgcagagagagaagtacctgaccatcctgaaggccgtgaaggtgctgcaggccagcttcagaggcgtgagagtgagaagaaccctgagaaagatgcagaccgccgccaccctgatccagagcaactacagaagatacagacagcagacctacttcaacaagctgaagaagatcaccaagaccgtgcagcagagatactgggccatgaaggagagaaacatccagttccagagatacaacaagctgagacacagcgtgatctacatccaggccatcttcagaggcaagaaggccagaagacacctgaagatgatgcacatcgccgccaccctgatccagagaagattcagaaccctgatgatgagaagaagattcctgagcctgaagaagaccgccatcctgatccagagaaagtacagagcccacctgtgcaccaagcaccacctgcagttcctgcaggtgcagaacgccgtgatcaagatccagagcagctacagaagatggatgatcagaaagagaatgagagagatgcacagagccgccaccttcatccagagcaccttcagaatgcacagactgcacatgagataccaggccctgaagcaggccagcgtggtgatccagcagcagtaccaggccaacagagccgccaagctgcagagacagcactacctgagacagagacacagcgccgtgatcctgcaggccgccttcagaggcatgaagaccagaagacacctgaagagcatgcacagcagcgccaccctgatccagagcagattcagaagcctgctggtgagaagaagattcatcagcctgaagaaggccaccatcttcgtgcagagaaagtacagagccaccatctgcgccaagcacaagctgtaccagttcctgcacctgagaaaggccgccatcaccatccagagcagctacagaagactgatggtgaagaagaagctgcaggagatgcagagagccgccgtgctgatccaggccaccttcagaatgtacagaacctacatcaccttccagacctggaagcacgccagcatcctgatccagcagcactacagaacctacagagccgccaagctgcagagagagaactacatcagacagtggcacagcgccgtggtgatccaggccgcctacaagggcatgaaggccagacagctgctgagagagaagcacaaggccagcatcgtgatccagagcacctacagaatgtacagacagtactgcttctaccagaagctgcagtgggccaccaagatcatccaggagaagtacagagccaacaagaagaagcagaaggtgttccagcacaacgagctgaagaaggagacctgcgtgcaggccggcttccaggacatgaacatcaagaagcagatccaggagcagcaccaggccgccatcatcatccagaagcactgcaaggccttcaagatcagaaagcactacctgcacctgagagccaccgtggtgagcatccagagaagatacagaaagctgaccgccgtgagaacccaggccgtgatctgcatccagagctactacagaggcttcaaggtgagaaaggacatccagaacatgcacagagccgccaccctgatccagagcttctacagaatgcacagagccaaggtggactacgagaccaagaagaccgccatcgtggtgatccagaactactacagactgtacgtgagagtgaagaccgagagaaagaacttcctggccgtgcagaagagcgtgagaaccatccaggccgccttcagaggcatgaaggtgagacagaagctgaagaacgtgagcgaggagaagatggccgccatcgtgaaccagagcgccctgtgctgctacagaagcaagacccagtacgaggccgtgcagagcgagggcgtgatgatccaggagtggtacaaggccagcggcctggcctgcagccaggaggccgagtaccacagccagagcagagccgccgtgaccatccagaaggccttctgcagaatggtgaccagaaagctggagacccagaagtgcgccgccctgagaatccagttcttcctgcagatggccgtgtacagaagaagattcgtgcagcagaagagagccgccatcaccctgcagcactacttcagaacctggcagaccagaaagcagttcctgctgtacagaaaggccgccgtggtgctgcagaaccactacagagccttcctgagcgccaagcaccagagacaggtgtacctgcagatcagaagcagcgtgatcatcatccaggccagaagcaagggcttcatccagaagagaaagttccaggagatcaagaacagcaccatcaagatccaggccatgtggagaagatacagagccaagaagtacctgtgcaaggtgaaggccgcctgcaagatccaggcctggtacagatgctggagagcccacaaggagtacctggccatcctgaaggccgtgaagatcatccagggctgcttctacaccaagctggagagaaccagattcctgaacgtgagagccagcgccatcatcatccagagaaagtggagagccatcctgcccgccaagatcgcccacgagcacttcctgatgatcaagagacacagagccgcctgcctgatccaggcccactacagaggctacaagggcagacaggtgttcctgagacagaagagcgccgccctgatcatccagaagtacatcagagccagagaggccggcaagcacgagagaatcaagtacatcgagttcaagaagagcaccgtgatcctgcaggccctggtgagaggctggctggtgagaaagagattcctggagcagagagccaagatcagactgctgcacttcaccgccgccgcctactaccacctgaacgccgtgagaatccagagagcctacaagctgtacctggccgtgaagaacgccaacaagcaggtgaacagcgtgatctgcatccagagatggttcagagccagactgcaggagaagagattcatccagaagtaccacagcatcaagaagatcgagcacgagggccaggagtgcctgagccagagaaacagagccgccagcgtgatccagaaggccgtgagacacttcctgctgagaaagaagcaggagaagttcaccagcggcatcatcaagatccaggccctgtggagaggctacagctggagaaagaagaacgactgcaccaagatcaaggccatcagactgagcctgcaggtggtgaacagagagatcagagaggagaacaagctgtacaagagaaccgccctggccctgcactacctgctgacctacaagcacctgagcgccatcctggaggccctgaagcacctggaggtggtgaccagactgagccccctgtgctgcgagaacatggcccagagcggcgccatcagcaagatcttcgtgctgatcagaagctgcaacagaagcatcccctgcatggaggtgatcagatacgccgtgcaggtgctgctgaacgtgagcaagtacgagaagaccaccagcgccgtgtacgacgtggagaactgcatcgacatcctgctggagctgctgcagatctacagagagaagcccggcaacaaggtggccgacaagggcggcagcatcttcaccaagacctgctgcctgctggccatcctgctgaagaccaccaacagagccagcgacgtgagaagcagaagcaaggtggtggacagaatctacagcctgtacaagctgaccgcccacaagcacaagatgaacaccgagagaatcctgtacaagcagaagaagaacagcagcatcagcatccccttcatccccgagacccccgtgagaaccagaatcgtgagcagactgaagcccgactgggtgctgagaagagacaacatggaggagatcaccaaccccctgcaggccatccagatggtgatggacaccctgggcatcccctactag

SEQ ID NO: 73343 - DNA, 1686 bp, synthetic construct
  misc_feature 1..1686: note = Description of Artificial Sequence: Synthetic coding sequence
  source 1..1686: mol_type = other DNA
atgtgcggcatctgggccctgttcggcagcgacgactgcctgagcgtgcagtgcctgagcgccatgaagatcgcccacagaggccccgacgccttcagattcgagaacgtgaacggctacaccaactgctgcttcggcttccacagactggccgtggtggaccccctgttcggcatgcagcccatcagagtgaagaagtacccctacctgtggctgtgctacaacggcgagatctacaaccacaagaagatgcagcagcacttcgagttcgagtaccagaccaaggtggacggcgagatcatcctgcacctgtacgacaagggcggcatcgagcagaccatctgcatgctggacggcgtgttcgccttcgtgctgctggacaccgccaacaagaaggtgttcctgggcagagacacctacggcgtgagacccctgttcaaggccatgaccgaggacggcttcctggccgtgtgcagcgaggccaagggcctggtgaccctgaagcacagcgccacccccttcctgaaggtggagcccttcctgcccggccactacgaggtgctggacctgaagcccaacggcaaggtggccagcgtggagatggtgaagtaccaccactgcagagacgtgcccctgcacgccctgtacgacaacgtggagaagctgttccccggcttcgagatcgagaccgtgaagaacaacctgagaatcctgttcaacaacgccgtgaagaagagactgatgaccgacagaagaatcggctgcctgctgagcggcggcctggacagcagcctggtggccgccaccctgctgaagcagctgaaggaggcccaggtgcagtaccccctgcagaccttcgccatcggcatggaggacagccccgacctgctggccgccagaaaggtggccgaccacatcggcagcgagcactacgaggtgctgttcaacagcgaggagggcatccaggccctggacgaggtgatcttcagcctggagacctacgacatcaccaccgtgagagccagcgtgggcatgtacctgatcagcaagtacatcagaaagaacaccgacagcgtggtgatcttcagcggcgagggcagcgacgagctgacccagggctacatctacttccacaaggcccccagccccgagaaggccgaggaggagagcgagagactgctgagagagctgtacctgttcgacgtgctgagagccgacagaaccaccgccgcccacggcctggagctgagagtgcccttcctggaccacagattcagcagctactacctgagcctgccccccgagatgagaatccccaagaacggcatcgagaagcacctgctgagagagaccttcgaggacagcaacctgatccccaaggagatcctgtggagacccaaggaggccttcagcgacggcatcaccagcgtgaagaacagctggttcaagatcctgcaggagtacgtggagcaccaggtggacgacgccatgatggccaacgccgcccagaagttccccttcaacacccccaagaccaaggagggctactactacagacaggtgttcgagagacactaccccggcagagccgactggctgagccactactggatgcccaagtggatcaacgccaccgaccccagcgccagaaccctgacccactacaagagcgccgtgaaggcctag

SEQ ID NO: 73344 - DNA, 1686 bp, synthetic construct; identical to SEQ ID NO: 73343
  misc_feature 1..1686: note = Description of Artificial Sequence: Synthetic coding sequence
  source 1..1686: mol_type = other DNA

SEQ ID NO: 73345 - DNA, 1686 bp, synthetic construct; identical to SEQ ID NO: 73343
  misc_feature 1..1686: note = Description of Artificial Sequence: Synthetic coding sequence
  source 1..1686: mol_type = other DNA

SEQ ID NO: 73346 - DNA, 87 bp, synthetic construct
  misc_feature 1..87: note = Description of Artificial Sequence: Synthetic coding sequence
  source 1..87: mol_type = other DNA
atgtgcggcatctgggccctgttcggcagcgacgactgcctgagcgtgcagtgcctgagcgccatgaagatcgcccacagaggctag

SEQ ID NO: 73347 - DNA, 489 bp, synthetic construct
  misc_feature 1..489: note = Description of Artificial Sequence: Synthetic coding sequence
  source 1..489: mol_type = other DNA
atgtgcggcatctgggccctgttcggcagcgacgactgcctgagcgtgcagtgcctgagcgccatgaagatcgcccacagaggccccgacgccttcagattcgagaacgtgaacggctacaccaactgctgcttcggcttccacagactggccgtggtggaccccctgttcggcatgcagcccatcagagtgaagaagtacccctacctgtggctgtgctacaacggcgagatctacaaccacaagaagatgcagcagcacttcgagttcgagtaccagaccaaggtggacggcgagatcatcctgcacctgtacgacaagggcggcatcgagcagaccatctgcatgctggacggcgtgttcgccttcgtgctgctggacaccgccaacaagaaggtgttcctgggcagagacacctacggcgtgagacccctgttcaaggccatgaccgaggacggcttcctggccgtgtgcagcgaggccaagtag

SEQ ID NO: 73348 - DNA, 648 bp, synthetic construct
  misc_feature 1..648: note = Description of Artificial Sequence: Synthetic coding sequence
  source 1..648: mol_type = other DNA
atgtgcggcatctgggccctgttcggcagcgacgactgcctgagcgtgcagtgcctgagcgccatgaagatcgcccacagaggccccgacgccttcagattcgagaacgtgaacggctacaccaactgctgcttcggcttccacagactggccgtggtggaccccctgttcggcatgcagcccatcagagtgaagaagtacccctacctgtggctgtgctacaacggcgagatctacaaccacaagaagatgcagcagcacttcgagttcgagtaccagaccaaggtggacggcgagatcatcctgcacctgtacgacaagggcggcatcgagcagaccatctgcatgctggacggcgtgttcgccttcgtgctgctggacaccgccaacaagaaggtgttcctgggcagagacacctacggcgtgagacccctgttcaaggccatgaccgaggacggcttcctggccgtgtgcagcgaggccaagggcctggtgaccctgaagcacagcgccacccccttcctgaaggtggagcccttcctgcccggccactacgaggtgctggacctgaagcccaacggcaaggtggccagcgtggagatggtgaagtaccaccactgcagagacgtgcccctgcacgccctgtag

SEQ ID NO: 73349 - DNA, 360 bp, synthetic construct
  misc_feature 1..360: note = Description of Artificial Sequence: Synthetic coding sequence
  source 1..360: mol_type = other DNA
atgtgcggcatctgggccctgttcggcagcgacgactgcctgagcgtgcagtgcctgagcgccatgaagatcgcccacagaggccccgacgccttcagattcgagaacgtgaacggctacaccaactgctgcttcggcttccacagactggccgtggtggaccccctgttcggcatgcagcccatcagagtgaagaagtacccctacctgtggctgtgctacaacggcgagatctacaaccacaagaagatgcagcagcacttcgagttcgagtaccagaccaaggtggacggcgagatcatcctgcacctgtacgacaagggcggcatcgagcagaccatctgcatgctggacggctag

SEQ ID NO: 73350 - DNA, 102 bp, synthetic construct
  misc_feature 1..102: note = Description of Artificial Sequence: Synthetic coding sequence
  source 1..102: mol_type = other DNA
atgtgcggcatctgggccctgttcggcagcgacgactgcctgagcgtgcagtgcctgagcgccatgaagatcgcccacagaggccccgacgccttcagatag

SEQ ID NO: 73351 - DNA, 192 bp, synthetic construct
  misc_feature 1..192: note = Description of Artificial Sequence: Synthetic coding sequence
  source 1..192: mol_type = other DNA
atgaagatcgcccacagaggccccgacgccttcagattcgagaacgtgaacggctacaccaactgctgcttcggcttccacagactggccgtggtggaccccctgttcggcatgcagcccatcagagtgaagaagtacccctacctgtggctgtgctacaacggcgagatctacaaccacaagaaggtgtag

SEQ ID NO: 73352 - DNA, 1437 bp, synthetic construct
  misc_feature 1..1437: note = Description of Artificial Sequence: Synthetic coding sequence
  source 1..1437: mol_type = other DNA
atgcagcagcacttcgagttcgagtaccagaccaaggtggacggcgagatcatcctgcacctgtacgacaagggcggcatcgagcagaccatctgcatgctggacggcgtgttcgccttcgtgctgctggacaccgccaacaagaaggtgttcctgggcagagacacctacggcgtgagacccctgttcaaggccatgaccgaggacggcttcctggccgtgtgcagcgaggccaagggcctggtgaccctgaagcacagcgccacccccttcctgaaggtggagcccttcctgcccggccactacgaggtgctggacctgaagcccaacggcaaggtggccagcgtggagatggtgaagtaccaccactgcagagacgtgcccctgcacgccctgtacgacaacgtggagaagctgttccccggcttcgagatcgagaccgtgaagaacaacctgagaatcctgttcaacaacgccgtgaagaagagactgatgaccgacagaagaatcggctgcctgctgagcggcggcctggacagcagcctggtggccgccaccctgctgaagcagctgaaggaggcccaggtgcagtaccccctgcagaccttcgccatcggcatggaggacagccccgacctgctggccgccagaaaggtggccgaccacatcggcagcgagcactacgaggtgctgttcaacagcgaggagggcatccaggccctggacgaggtgatcttcagcctggagacctacgacatcaccaccgtgagagccagcgtgggcatgtacctgatcagcaagtacatcagaaagaacaccgacagcgtggtgatcttcagcggcgagggcagcgacgagctgacccagggctacatctacttccacaaggcccccagccccgagaaggccgaggaggagagcgagagactgctgagagagctgtacctgttcgacgtgctgagagccgacagaaccaccgccgcccacggcctggagctgagagtgcccttcctggaccacagattcagcagctactacctgagcctgccccccgagatgagaatccccaagaacggcatcgagaagcacctgctgagagagaccttcgaggacagcaacctgatccccaaggagatcctgtggagacccaaggaggccttcagcgacggcatcaccagcgtgaagaacagctggttcaagatcctgcaggagtacgtggagcaccaggtggacgacgccatgatggccaacgccgcccagaagttccccttcaacacccccaagaccaaggagggctactactacagacaggtgttcgagagacactaccccggcagagccgactggctgagccactactggatgcccaagtggatcaacgccaccgaccccagcgccagaaccctgacccactacaagagcgccgtgaaggcctag

SEQ ID NO: 73353 - DNA, 1623 bp, synthetic construct
  misc_feature 1..1623: note = Description of Artificial Sequence: Synthetic coding sequence
  source 1..1623: mol_type = other DNA
atgaagatcgcccacagaggccccgacgccttcagattcgagaacgtgaacggctacaccaactgctgcttcggcttccacagactggccgtggtggaccccctgttcggcatgcagcccatcagagtgaagaagtacccctacctgtggctgtgctacaacggcgagatctacaaccacaagaagatgcagcagcacttcgagttcgagtaccagaccaaggtggacggcgagatcatcctgcacctgtacgacaagggcggcatcgagcagaccatctgcatgctggacggcgtgttcgccttcgtgctgctggacaccgccaacaagaaggtgttcctgggcagagacacctacggcgtgagacccctgttcaaggccatgaccgaggacggcttcctggccgtgtgcagcgaggccaagggcctggtgaccctgaagcacagcgccacccccttcctgaaggtggagcccttcctgcccggccactacgaggtgctggacctgaagcccaacggcaaggtggccagcgtggagatggtgaagtaccaccactgcagagacgtgcccctgcacgccctgtacgacaacgtggagaagctgttccccggcttcgagatcgagaccgtgaagaacaacctgagaatcctgttcaacaacgccgtgaagaagagactgatgaccgacagaagaatcggctgcctgctgagcggcggcctggacagcagcctggtggccgccaccctgctgaagcagctgaaggaggcccaggtgcagtaccccctgcagaccttcgccatcggcatggaggacagccccgacctgctggccgccagaaaggtggccgaccacatcggcagcgagcactacgaggtgctgttcaacagcgaggagggcatccaggccctggacgaggtgatcttcagcctggagacctacgacatcaccaccgtgagagccagcgtgggcatgtacctgatcagcaagtacatcagaaagaacaccgacagcgtggtgatcttcagcggcgagggcagcgacgagctgacccagggctacatctacttccacaaggcccccagccccgagaaggccgaggaggagagcgagagactgctgagagagctgtacctgttcgacgtgctgagagccgacagaaccaccgccgcccacggcctggagctgagagtgcccttcctggaccacagattcagcagctactacctgagcctgccccccgagatgagaatccccaagaacggcatcgagaagcacctgctgagagagaccttcgaggacagcaacctgatccccaaggagatcctgtggagacccaaggaggccttcagcgacggcatcaccagcgtgaagaacagctggttcaagatcctgcaggagtacgtggagcaccaggtggacgacgccatgatggccaacgccgcccagaagttccccttcaacacccccaagaccaaggagggctactactacagacaggtgttcgagagacactaccccggcagagccgactggctgagccactactggatgcccaagtggatcaacgccaccgaccccagcgccagaaccctgacccactacaagagcgccgtgaaggcctag

SEQ ID NO: 73354 - DNA, 1437 bp, synthetic construct; identical to SEQ ID NO: 73352
  misc_feature 1..1437: note = Description of Artificial Sequence: Synthetic coding sequence
  source 1..1437: mol_type = other DNA

SEQ ID NO: 73355 - DNA, 1395 bp, synthetic construct
  misc_feature 1..1395: note = Description of Artificial Sequence: Synthetic coding sequence
  source 1..1395: mol_type = other DNA
atggccgccagctgcctggtgctgctggccctgtgcctgctgctgcccctgctgctgctgggcggctggaagagatggagaagaggcagagccgccagacacgtggtggccgtggtgctgggcgacgtgggcagaagccccagaatgcagtaccacgccctgagcctggccatgcacggcttcagcgtgaccctgctgggcttctgcaacagcaagccccacgacgagctgctgcagaacaacagaatccagatcgtgggcctgaccgagctgcagagcctggccgtgggccccagagtgttccagtacggcgtgaaggtggtgctgcaggccatgtacctgctgtggaagctgatgtggagagagcccggcgcctacatcttcctgcagaacccccccggcctgcccagcatcgccgtgtgctggttcgtgggctgcctgtgcggcagcaagctggtgatcgactggcacaactacggctacagcatcatgggcctggtgcacggccccaaccaccccctggtgctgctggccaagtggtacgagaagttcttcggcagactgagccacctgaacctgtgcgtgaccaacgccatgagagaggacctggccgacaactggcacatcagagccgtgaccgtgtacgacaagcccgccagcttcttcaaggagacccccctggacctgcagcacagactgttcatgaagctgggcagcatgcacagccccttcagagccagaagcgagcccgaggaccccgtgaccgagagaagcgccttcaccgagagagacgccggcagcggcctggtgaccagactgagagagagacccgccctgctggtgagcagcaccagctggaccgaggacgaggacttcagcatcctgctggccgccctggagaagttcgagcagctgaccctggacggccacaacctgcccagcctggtgtgcgtgatcaccggcaagggccccctgagagagtactacagcagactgatccaccagaagcacttccagcacatccaggtgtgcaccccctggctggaggccgaggactaccccctgctgctgggcagcgccgacctgggcgtgtgcctgcacaccagcagcagcggcctggacctgcccatgaaggtggtggacatgttcggctgctgcctgcccgtgtgcgccgtgaacttcaagtgcctgcacgagctggtgaagcacgaggagaacggcctggtgttcgaggacagcgaggagctggccgcccagctgcagatgctgttcagcaacttccccgaccccgccggcaagctgaaccagttcagaaagaacctgagagagagccagcagctgagatgggacgagagctgggtgcagaccgtgctgcccctggtgatggacacctag

SEQ ID NO: 73356 - DNA, 1062 bp, synthetic construct
  misc_feature 1..1062: note = Description of Artificial Sequence: Synthetic coding sequence
  source 1..1062: mol_type = other DNA
atgtacctgctgtggaagctgatgtggagagagcccggcgcctacatcttcctgcagaacccccccggcctgcccagcatcgccgtgtgctggttcgtgggctgcctgtgcggcagcaagctggtgatcgactggcacaactacggctacagcatcatgggcctggtgcacggccccaaccaccccctggtgctgctggccaagtggtacgagaagttcttcggcagactgagccacctgaacctgtgcgtgaccaacgccatgagagaggacctggccgacaactggcacatcagagccgtgaccgtgtacgacaagcccgccagcttcttcaaggagacccccctggacctgcagcacagactgttcatgaagctgggcagcatgcacagccccttcagagccagaagcgagcccgaggaccccgtgaccgagagaagcgccttcaccgagagagacgccggcagcggcctggtgaccagactgagagagagacccgccctgctggtgagcagcaccagctggaccgaggacgaggacttcagcatcctgctggccgccctggagaagttcgagcagctgaccctggacggccacaacctgcccagcctggtgtgcgtgatcaccggcaagggccccctgagagagtactacagcagactgatccaccagaagcacttccagcacatccaggtgtgcaccccctggctggaggccgaggactaccccctgctgctgggcagcgccgacctgggcgtgtgcctgcacaccagcagcagcggcctggacctgcccatgaaggtggtggacatgttcggctgctgcctgcccgtgtgcgccgtgaacttcaagtgcctgcacgagctggtgaagcacgaggagaacggcctggtgttcgaggacagcgaggagctggccgcccagctgcagatgctgttcagcaacttccccgaccccgccggcaagctgaaccagttcagaaagaacctgagagagagccagcagctgagatgggacgagagctgggtgcagaccgtgctgcccctggtgatggacacctag

SEQ ID NO: 73357 - DNA, 1422 bp, synthetic construct
  misc_feature 1..1422: note = Description of Artificial Sequence: Synthetic coding sequence
  source 1..1422: mol_type = other DNA
atggcccagctggagggctactacttcagcgccgccctgagctgcaccttcctggtgagctgcctgctgttcagcgccttcagcagagccctgagagagccctacatggacgagatcttccacctgccccaggcccagagatactgcgagggccacttcagcctgagccagtgggaccccatgatcaccaccctgcccggcctgtacctggtgagcatcggcgtgatcaagcccgccatctggatcttcggctggagcgagcacgtggtgtgcagcatcggcatgctgagattcgtgaacctgctgttcagcgtgggcaacttctacctgctgtacctgctgttctgcaaggtgcagcccagaaacaaggccgccagcagcatccagagagtgctgagcaccctgaccctggccgtgttccccaccctgtacttcttcaacttcctgtactacaccgaggccggcagcatgttcttcaccctgttcgcctacctgatgtgcctgtacggcaaccacaagaccagcgccttcctgggcttctgcggcttcatgttcagacagaccaacatcatctgggccgtgttctgcgccggcaacgtgatcgcccagaagctgaccgaggcctggaagaccgagctgcagaagaaggaggacagactgccccccatcaagggccccttcgccgagttcagaaagatcctgcagttcctgctggcctacagcatgagcttcaagaacctgagcatgctgctgctgctgacctggccctacatcctgctgggcttcctgttctgcgccttcgtggtggtgaacggcggcatcgtgatcggcgacagaagcagccacgaggcctgcctgcacttcccccagctgttctacttcttcagcttcaccctgttcttcagcttcccccacctgctgagccccagcaagatcaagaccttcctgagcctggtgtggaagagaagaatcctgttcttcgtggtgaccctggtgagcgtgttcctggtgtggaagttcacctacgcccacaagtacctgctggccgacaacagacactacaccttctacgtgtggaagagagtgttccagagatacgagaccgtgaagtacctgctggtgcccgcctacatcttcgccggctggagcatcgccgacagcctgaagagcaagagcatcttctggaacctgatgttcttcatctgcctgttcaccgtgatcgtgccccagaagctgctggagttcagatacttcatcctgccctacgtgatctacagactgaacatccccctgccccccaccagcagactgatctgcgagctgagctgctacgccgtggtgaacttcatcaccttcttcatcttcctgaacaagaccttccagtggcccaacagccaggacatccagagattcatgtggtag

SEQ ID NO: 73358 - DNA, 1479 bp, synthetic construct
  misc_feature 1..1479: note = Description of Artificial Sequence: Synthetic coding sequence
  source 1..1479: mol_type = other DNA
atggccgccggcgagagaagctggtgcctgtgcaagctgctgagattcttctacagcctgttcttccccggcctgatcgtgtgcggcaccctgtgcgtgtgcctggtgatcgtgctgtggggcatcagactgctgctgcagagaaagaagaagctggtgagcaccagcaagaacggcaagaaccagatggtgatcgccttcttccacccctactgcaacgccggcggcggcggcgagagagtgctgtggtgcgccctgagagccctgcagaagaagtaccccgaggccgtgtacgtggtgtacaccggcgacgtgaacgtgaacggccagcagatcctggagggcgccttcagaagattcaacatcagactgatccaccccgtgcagttcgtgttcctgagaaagagatacctggtggaggacagcctgtacccccacttcaccctgctgggccagagcctgggcagcatcttcctgggctgggaggccctgatgcagtgcgtgcccgacgtgtacatcgacagcatgggctacgccttcaccctgcccctgttcaagtacatcggcggctgccaggtgggcagctacgtgcactaccccaccatcagcaccgacatgctgagcgtggtgaagaaccagaacatcggcttcaacaacgccgccttcatcaccagaaaccccttcctgagcaaggtgaagctgatctactactacctgttcgccttcatctacggcctggtgggcagctgcagcgacgtggtgatggtgaacagcagctggaccctgaaccacatcctgagcctgtggaaggtgggcaactgcaccaacatcgtgtaccccccctgcgacgtgcagaccttcctggacatccccctgcacgagaagaagatgacccccggccacctgctggtgagcgtgggccagttcagacccgagaagaaccaccccctgcagatcagagccttcgccaagctgctgaacaagaagatggtggagagcccccccagcctgaagctggtgctgatcggcggctgcagaaacaaggacgacgagctgagagtgaaccagctgagaagactgagcgaggacctgggcgtgcaggagtacgtggagttcaagatcaacatccccttcgacgagctgaagaactacctgagcgaggccaccatcggcctgcacaccatgtggaacgagcacttcggcatcggcgtggtggagtgcatggccgccggcaccatcatcctggcccacaacagcggcggccccaagctggacatcgtggtgccccacgagggcgacatcaccggcttcctggccgagagcgaggaggactacgccgagaccatcgcccacatcctgagcatgagcgccgagaagagactgcagatcagaaagagcgccagagccagcgtgagcagattcagcgaccaggagttcgaggtgaccttcctgagcagcgtggagaagctgttcaagtag

SEQ ID NO: 73359 - DNA, 111 bp, synthetic construct
  misc_feature 1..111: note = Description of Artificial Sequence: Synthetic coding sequence
  source 1..111: mol_type = other DNA
atggccgccggcgagagaagctggtgcctgtgcaagctgctgagaagctgcggcgtgtacggcagctggcacaactacccctgcacccagttcggcggccccaaggcctag

SEQ ID NO: 73360 - DNA, 1467 bp, synthetic construct
  misc_feature 1..1467: note = Description of Artificial Sequence: Synthetic coding sequence
  source 1..1467: mol_type = other DNA
atggccggcaagggcagcagcggcagaagacccctgctgctgggcctgctggtggccgtggccaccgtgcacctggtgatctgcccctacaccaaggtggaggagagcttcaacctgcaggccacccacgacctgctgtaccactggcaggacctggagcagtacgaccacctggagttccccggcgtggtgcccagaaccttcctgggccccgtggtgatcgccgtgttcagcagccccgccgtgtacgtgctgagcctgctggagatgagcaagttctacagccagctgatcgtgagaggcgtgctgggcctgggcgtgatcttcggcctgtggaccctgcagaaggaggtgagaagacacttcggcgccatggtggccaccatgttctgctgggtgaccgccatgcagttccacctgatgttctactgcaccagaaccctgcccaacgtgctggccctgcccgtggtgctgctggccctggccgcctggctgagacacgagtgggccagattcatctggctgagcgccttcgccatcatcgtgttcagagtggagctgtgcctgttcctgggcctgctgctgctgctggccctgggcaacagaaaggtgagcgtggtgagagccctgagacacgccgtgcccgccggcatcctgtgcctgggcctgaccgtggccgtggacagctacttctggagacagctgacctggcccgagggcaaggtgctgtggtacaacaccgtgctgaacaagagcagcaactggggcaccagccccctgctgtggtacttctacagcgccctgcccagaggcctgggctgcagcctgctgttcatccccctgggcctggtggacagaagaacccacgcccccaccgtgctggccctgggcttcatggccctgtacagcctgctgccccacaaggagctgagattcatcatctacgccttccccatgctgaacatcaccgccgccagaggctgcagctacctgctgaacaactacaagaagagctggctgtacaaggccggcagcctgctggtgatcggccacctggtggtgaacgccgcctacagcgccaccgccctgtacgtgagccacttcaactaccccggcggcgtggccatgcagagactgcaccagctggtgcccccccagaccgacgtgctgctgcacatcgacgtggccgccgcccagaccggcgtgagcagattcctgcaggtgaacagcgcctggagatacgacaagagagaggacgtgcagcccggcaccggcatgctggcctacacccacatcctgatggaggccgcccccggcctgctggccctgtacagagacacccacagagtgctggccagcgtggtgggcaccaccggcgtgagcctgaacctgacccagctgccccccttcaacgtgcacctgcagaccaagctggtgctgctggagagactgcccagacccagctag

SEQ ID NO: 73361 - DNA, 987 bp, synthetic construct
  misc_feature 1..987: note = Description of Artificial Sequence: Synthetic coding sequence
  source 1..987: mol_type = other DNA
atgccccccacccagcccagaccctgcatgtgccccatcagcaccacccaggtggccagccagtgcagaggctgcaccagctggtgcccccccagacagaccagcttctgcaccctgacctggcagccccccagacaggtgtgcctgggcttcagcaagagcaccgcccccggcggcaccaccagaggcagaatgtgcagcagaggccaggcctgctggcacacccacaccagcagctggagaagaccctgggcccccggccccctgcagggccacacccccggccccggccagagaagaggcgaccacagatgcgagagcgagcccgaccccaccgcccccctgcagagaccccccgccgacaaggccggcgccagcggcgaggccccccccgccgtgctgagaggcaccagacagcccagcgccgccaccggcctgcccggcgccgtgatcaccaccagcttctggcacaacagcagcaccatcatgaccatccagagaagcaagagcaaggactgggcccccgccagcgacagacaccagaccagaagcagagccagcagcaccgccagcgccggcgccctgagcaccaaggagagaggcgcccaggtgctgctggcccccagagagcccctgcccagagtgatggtggccagcagcggcctgcccgccggcgactgcagacccgaccaggtgcccttcatgaccaaccaggagcagagagcccaccccggcacctgcctgcccggcggccacgtgtgccccgcccaccccggcggcgccgtgttctggcagcaccccaccctggccgccagaggccccctgggcgcccccaagaccgccccccccctgagaggcgaccacggcggccccggcagaaccccccccccctggtgccaccactgcaacttctgcatccacagacaccccatcagcatcaccgacaagatcctgggcgacaagcacatccagaagggcatgagatag

SEQ ID NO: 73362 - DNA, 2865 bp, synthetic construct
  misc_feature 1..2865: note = Description of Artificial Sequence: Synthetic coding sequence
  source 1..2865: mol_type = other DNA
atgaacaaccaccagctggagctggccaagcagctgcacaaggagggccacctgttctactgcacctgcagagtgctgacctgccccggccaggccaagagcatcgccagcgcccccggcaagtgccaggacagcgccgccctgaccagcaccgccttcagcggcctggacttcggcctgctgagcggctacctgcacaagcaggccctggtgaccgccacccaccccacctgcaccctgctgttccccagctgccacgccttcttccccctgcccctgacccccaccctgtacaagatgcacaagggctggaagaactactgcagccagaagagcctgaacgaggccagcatggacgagtacctgggcagcctgggcctgttcagaaagctgaccgccaaggacgccagctgcctgttcagagccatcagcgagcagctgttctgcagccaggtgcaccacctggagatcagaaaggcctgcgtgagctacatgagagagaaccagcagaccttcgagagctacgtggagggcagcttcgagaagtacctggagagactgggcgaccccaaggagagcgccggccagctggagatcagagccctgagcctgatctacaacagagacttcatcctgtacagattccccggcaagccccccacctacgtgaccgacaacggctacgaggacaagatcctgctgtgctacagcagcagcggccactacgacagcgtgtacagcaagcagttccagagcagcgccgccgtgtgccaggccgtgctgtacgagatcctgtacaaggacgtgttcgtggtggacgaggaggagctgaagaccgccatcaagctgttcagaagcggcagcaagaagaacagaaacaacgccgtgaccggcagcgaggacgcccacaccgactacaagagcagcaaccagaacagaatggaggagtggggcgcctgctacaacgccgagaacatccccgagggctacaacaagggcaccgaggagaccaagagccccgagaaccccagcaagatgcccttcccctacaaggtgctgaaggccctggaccccgagatctacagaaacgtggagttcgacgtgtggctggacagcagaaaggagctgcagaagagcgactacatggagtacgccggcagacagtactacctgggcgacaagtgccaggtgtgcctggagagcgagggcagatactacaacgcccacatccaggaggtgggcaacgagaacaacagcgtgaccgtgttcatcgaggagctggccgagaagcacgtggtgcccctggccaacctgaagcccgtgacccaggtgatgagcgtgcccgcctggaacgccatgcccagcagaaagggcagaggctaccagaagatgcccggcggctacgtgcccgagatcgtgatcagcgagatggacatcaagcagcagaagaagatgttcaagaagatcagaggcaaggaggtgtacatgaccatggcctacggcaagggcgaccccctgctgccccccagactgcagcacagcatgcactacggccacgacccccccatgcactacagccagaccgccggcaacgtgatgagcaacgagcacttccacccccagcaccccagccccagacagggcagaggctacggcatgcccagaaacagcagcagattcatcaacagacacaacatgcccggccccaaggtggacttctaccccggccccggcaagagatgctgccagagctacgacaacttcagctacagaagcagaagcttcagaagaagccacagacagatgagctgcgtgaacaaggagagccagtacggcttcacccccggcaacggccagatgcccagaggcctggaggagaccatcaccttctacgaggtggaggagggcgacgagaccgcctaccccaccctgcccaaccacggcggccccagcaccatggtgcccgccaccagcggctactgcgtgggcagaagaggccacagcagcggcaagcagaccctgaacctggaggagggcaacggccagagcgagaacggcagataccacgaggagtacctgtacagagccgagcccgactacgagaccagcggcgtgtacagcaccaccgccagcaccgccaacctgagcctgcaggacagaaagagctgcagcatgagcccccaggacaccgtgaccagctacaactacccccagaagatgatgggcaacatcgccgccgtggccgccagctgcgccaacaacgtgcccgcccccgtgctgagcaacggcgccgccgccaaccaggccatcagcaccaccagcgtgagcagccagaacgccatccagcccctgttcgtgagcccccccacccacggcagacccgacaccaaggtgctgcagtactacttcaacctgggcctgcagtgctactaccacagctactggcacagcatggtgtacgtgccccagatgcagcagcagctgcacgtggagaactaccccgtgtacaccgagccccccctggtggaccagaccgtgccccagtgctacagcgaggtgagaagagaggacggcatccaggccgaggccagcgccaacgacaccttccccaacgccgacagcagcagcgtgccccacggcgccgtgtactaccccgtgatgagcgacccctacggccagccccccctgcccggcttcgacagctgcctgcccgtggtgcccgactacagctgcgtgcccccctggcaccccgtgggcaccgcctacggcggcagcagccagatccacggcgccatcaaccccggccccatcggctgcatcgcccccagcccccccgccagccactacgtgccccagggcatgtag

SEQ ID NO: 73363 - DNA, 498 bp, synthetic construct
  misc_feature 1..498: note = Description of Artificial Sequence: Synthetic coding sequence
  source 1..498: mol_type = other DNA
atgaagtgcgtgttcgtgaccgtgggcaccaccagcttcgacgacctgatcgcctgcgtgagcgcccccgacagcctgcagaagatcgagagcctgggctacaacagactgatcctgcagatcggcagaggcaccgtggtgcccgagcccttcagcaccgagagcttcaccctggacgtgtacagatacaaggacagcctgaaggaggacatccagaaggccgacctggtgatcagccacgccggcgccggcagctgcctggagaccctggagaagggcaagcccctggtggtggtgatcaacgagaagctgatgaacaaccaccagctggagctggccaagcagctgcacaaggagggccacctgttctactgcacctgcagcaccctgcccggcctgctgcagagcatggacctgagcaccctgaagtgctacccccccggccagcccgagaagttcagcgccttcctggacaaggtggtgggcctgcagaagtag

SEQ ID NO: 73364 - DNA, 3414 bp, synthetic construct
  misc_feature 1..3414: note = Description of Artificial Sequence: Synthetic coding sequence
  source 1..3414: mol_type = other DNA
atgaagtgcgtgttcgtgaccgtgggcaccaccagcttcgacgacctgatcgcctgcgtgagcgcccccgacagcctgcagaagatcgagagcctgggctacaacagactgatcctgcagatcggcagaggcaccgtggtgcccgagcccttcagcaccgagagcttcaccctggacgtgtacagatacaaggacagcctgaaggaggacatccagaaggccgacctggtgatcagccacgccggcgccggcagctgcctggagaccctggagaagggcaagcccctggtggtggtgatcaacgagaagctgatgaacaaccaccagctggagctggccaagcagctgcacaaggagggccacctgttctactgcacctgcagagtgctgacctgccccggccaggccaagagcatcgccagcgcccccggcaagtgccaggacagcgccgccctgaccagcaccgccttcagcggcctggacttcggcctgctgagcggctacctgcacaagcaggccctggtgaccgccacccaccccacctgcaccctgctgttccccagctgccacgccttcttccccctgcccctgacccccaccctgtacaagatgcacaagggctggaagaactactgcagccagaagagcctgaacgaggccagcatggacgagtacctgggcagcctgggcctgttcagaaagctgaccgccaaggacgccagctgcctgttcagagccatcagcgagcagctgttctgcagccaggtgcaccacctggagatcagaaaggcctgcgtgagctacatgagagagaaccagcagaccttcgagagctacgtggagggcagcttcgagaagtacctggagagactgggcgaccccaaggagagcgccggccagctggagatcagagccctgagcctgatctacaacagagacttcatcctgtacagattccccggcaagccccccacctacgtgaccgacaacggctacgaggacaagatcctgctgtgctacagcagcagcggccactacgacagcgtgtacagcaagcagttccagagcagcgccgccgtgtgccaggccgtgctgtacgagatcctgtacaaggacgtgttcgtggtggacgaggaggagctgaagaccgccatcaagctgttcagaagcggcagcaagaagaacagaaacaacgccgtgaccggcagcgaggacgcccacaccgactacaagagcagcaaccagaacagaatggaggagtggggcgcctgctacaacgccgagaacatccccgagggctacaacaagggcaccgaggagaccaagagccccgagaaccccagcaagatgcccttcccctacaaggtgctgaaggccctggaccccgagatctacagaaacgtggagttcgacgtgtggctggacagcagaaaggagctgcagaagagcgactacatggagtacgccggcagacagtactacctgggcgacaagtgccaggtgtgcctggagagcgagggcagatactacaacgcccacatccaggaggtgggcaacgagaacaacagcgtgaccgtgttcatcgaggagctggccgagaagcacgtggtgcccctggccaacctgaagcccgtgacccaggtgatgagcgtgcccgcctggaacgccatgcccagcagaaagggcagaggctaccagaagatgcccggcggctacgtgcccgagatcgtgatcagcgagatggacatcaagcagcagaagaagatgttcaagaagatcagaggcaaggaggtgtacatgaccatggcctacggcaagggcgaccccctgctgccccccagactgcagcacagcatgcactacggccacgacccccccatgcactacagccagaccgccggcaacgtgatgagcaacgagcacttccacccccagcaccccagccccagacagggcagaggctacggcatgcccagaaacagcagcagattcatcaacagacacaacatgcccggccccaaggtggacttctaccccggccccggcaagagatgctgccagagctacgacaacttcagctacagaagcagaagcttcagaagaagccacagacagatgagctgcgtgaacaaggagagccagtacggcttcacccccggcaacggccagatgcccagaggcctggaggagaccatcaccttctacgaggtggaggagggcgacgagaccgcctaccccaccctgcccaaccacggcggccccagcaccatggtgcccgccaccagcggctactgcgtgggcagaagaggccacagcagcggcaagcagaccctgaacctggaggagggcaacggccagagcgagaacggcagataccacgaggagtacctgtacagagccgagcccgactacgagaccagcggcgtgtacagcaccaccgccagcaccgccaacctgagcctgcaggacagaaagagctgcagcatgagcccccaggacaccgtgaccagctacaactacccccagaagatgatgggcaacatcgccgccgtggccgccagctgcgccaacaacgtgcccgcccccgtgctgagcaacggcgccgccgccaaccaggccatcagcaccaccagcgtgagcagccagaacgccatccagcccctgttcgtgagcccccccacccacggcagacccgtgatcgccagccccagctacccctgccacagcgccatcccccacgccggcgccagcctgcccccccccccccccccccccccccccccccccccccccccccccccccccccccccccccccccccccccccccccccccgccctggacgtgggcgagaccagcaacctgcagccccccccccccctgcccccccccccctacagctgcgaccccagcggcagcgacctgccccaggacaccaaggtgctgcagtactacttcaacctgggcctgcagtgctactaccacagctactggcacagcatggtgtacgtgccccagatgcagcagcagctgcacgtggagaactaccccgtgtacaccgagccccccctggtggaccagaccgtgccccagtgctacagcgaggtgagaagagaggacggcatccaggccgaggccagcgccaacgacaccttccccaacgccgacagcagcagcgtgccccacggcgccgtgtactaccccgtgatgagcgacccctacggccagccccccctgcccggcttcgacagctgcctgcccgtggtgcccgactacagctgcgtgcccccctggcaccccgtgggcaccgcctacggcggcagcagccagatccacggcgccatcaaccccggccccatcggctgcatcgcccccagcccccccgccagccactacgtgccccagggcatgtag

SEQ ID NO: 73365 - DNA, 651 bp, synthetic construct
  misc_feature 1..651: note = Description of Artificial Sequence: Synthetic coding sequence
  source 1..651: mol_type = other DNA
atggtgtgcgtgctggtgctggccgccgccgccggcgccgtggccgtgttcctgatcctgagaatctgggtggtgctgagaagcatggacgtgacccccagagagagcctgagcatcctggtggtggccggcagcggcggccacaccaccgagatcctgagactgctgggcagcctgagcaacgcctacagccccagacactacgtgatcgccgacaccgacgagatgagcgccaacaagatcaacagcttcgagctggacagagccgacagagaccccagcaacatgtacaccaagtactacatccacagaatccccagaagcagagaggtgcagcagagctggcccagcaccgtgttcaccaccctgcacagcatgtggctgagcttccccctgatccacagagtgaagcccgacctggtgctgtgcaacggccccggcacctgcgtgcccatctgcgtgagcgccctgctgctgggcatcctgggcatcaagaaggtgatcatcgtgtacgtggagagcatctgcagagtggagaccctgagcatgagcggcaagatcctgttccacctgagcgactacttcatcgtgcagtggcccgccctgaaggagaagtaccccaagagcgtgtacctgggcagaatcgtgtag

SEQ ID NO: 73366 - DNA, 972 bp, synthetic construct
  misc_feature 1..972: note = Description of Artificial Sequence: Synthetic coding sequence
  source 1..972: mol_type = other DNA
atgcccctgctgaagctggtgcacggcagccccctggtgttcggcgagaagttcaagctgttcaccctggtgagcgcctgcatccccgtgttcagactggccagaagaagaaagaagatcctgttctactgccacttccccgacctgctgctgaccaagagagacagcttcctgaagagactgtacagagcccccatcgactggatcgaggagtacaccaccggcatggccgactgcatcctggtgaacagccagttcaccgccgccgtgttcaaggagaccttcaagagcctgagccacatcgaccccgacgtgctgtaccccagcctgaacgtgaccagcttcgacagcgtggtgcccgagaagctggacgacctggtgcccaagggcaagaagttcctgctgctgagcatcaacagatacgagagaaagaagaacctgaccctggccctggaggccctggtgcagctgagaggcagactgaccagccaggactgggagagagtgcacctgatcgtggccggcggctacgacgagagagtgctggagaacgtggagcactaccaggagctgaagaagatggtgcagcagagcgacctgggccagtacgtgaccttcctgagaagcttcagcgacaagcagaagatcagcctgctgcacagctgcacctgcgtgctgtacacccccagcaacgagcacttcggcatcgtgcccctggaggccatgtacatgcagtgccccgtgatcgccgtgaacagcggcggccccctggagagcatcgaccacagcgtgaccggcttcctgtgcgagcccgaccccgtgcacttcagcgaggccatcgagaagttcatcagagagcccagcctgaaggccaccatgggcctggccggcagagccagagtgaaggagaagttcagccccgaggccttcaccgagcagctgtacagatacgtgaccaagctgctggtgtag

SEQ ID NO: 73367 - DNA, 1251 bp, synthetic construct
  misc_feature 1..1251: note = Description of Artificial Sequence: Synthetic coding sequence
  source 1..1251: mol_type = other DNA
atggccgaggagcagggcagagagagagacagcgtgcccaagcccagcgtgctgttcctgcaccccgacctgggcgtgggcggcgccgagagactggtgctggacgccgccctggccctgcaggccagaggctgcagcgtgaagatctggaccgcccactacgaccccggccactgcttcgccgagagcagagagctgcccgtgagatgcgccggcgactggctgcccagaggcctgggctggggcggcagaggcgccgccgtgtgcgcctacgtgagaatggtgttcctggccctgtacgtgctgttcctggccgacgaggagttcgacgtggtggtgtgcgaccaggtgagcgcctgcatccccgtgttcagactggccagaagaagaaagaagatcctgttctactgccacttccccgacctgctgctgaccaagagagacagcttcctgaagagactgtacagagcccccatcgactggatcgaggagtacaccaccggcatggccgactgcatcctggtgaacagccagttcaccgccgccgtgttcaaggagaccttcaagagcctgagccacatcgaccccgacgtgctgtaccccagcctgaacgtgaccagcttcgacagcgtggtgcccgagaagctggacgacctggtgcccaagggcaagaagttcctgctgctgagcatcaacagatacgagagaaagaagaacctgaccctggccctggaggccctggtgcagctgagaggcagactgaccagccaggactgggagagagtgcacctgatcgtggccggcggctacgacgagagagtgctggagaacgtggagcactaccaggagctgaagaagatggtgcagcagagcgacctgggccagtacgtgaccttcctgagaagcttcagcgacaagcagaagatcagcctgctgcacagctgcacctgcgtgctgtacacccccagcaacgagcacttcggcatcgtgcccctggaggccatgtacatgcagtgccccgtgatcgccgtgaacagcggcggccccctggagagcatcgaccacagcgtgaccggcttcctgtgcgagcccgaccccgtgcacttcagcgaggccatcgagaagttcatcagagagcccagcctgaaggccaccatgggcctggccggcagagccagagtgaaggagaagttcagccccgaggccttcaccgagcagctgtacagatacgtgaccaagctgctggtgtag

SEQ ID NO: 73368 - DNA, 1317 bp, synthetic construct
  misc_feature 1..1317: note = Description of Artificial Sequence: Synthetic coding sequence
  source 1..1317: mol_type = other DNA
atggccgccggcctgagaaagagaggcagaagcggcagcgccgcccaggccgagggcctgtgcaagcagtggctgcagagagcctggcaggagagaagactgctgctgagagagcccagatacaccctgctggtggccgcctgcctgtgcctggccgaggtgggcatcaccttctgggtgatccacagagtggcctacaccgagatcgactggaaggcctacatggccgaggtggagggcgtgatcaacggcacctacgactacacccagctgcagggcgacaccggccccctggtgtaccccgccggcttcgtgtacatcttcatgggcctgtactacgccaccagcagaggcaccgacatcagaatggcccagaacatcttcgccgtgctgtacctggccaccctgctgctggtgttcctgatctaccaccagacctgcaaggtgccccccttcgtgttcttcttcatgtgctgcgccagctacagagtgcacagcatcttcgtgctgagactgttcaacgaccccgtggccatggtgctgctgttcctgagcatcaacctgctgctggcccagagatggggctggggctgctgcttcttcagcctggccgtgagcgtgaagatgaacgtgctgctgttcgcccccggcctgctgttcctgctgctgacccagttcggcttcagaggcgccctgcccaagctgggcatctgcgccggcctgcaggtggtgctgggcctgcccttcctgctggagaaccccagcggctacctgagcagaagcttcgacctgggcagacagttcctgttccactggaccgtgaactggagattcctgcccgaggccctgttcctgcacagagccttccacctggccctgctgaccgcccacctgaccctgctgctgctgttcgccctgtgcagatggcacagaaccggcgagagcatcctgagcctgctgagagaccccagcaagagaaaggtgcccccccagcccctgacccccaaccagatcgtgagcaccctgttcaccagcaacttcatcggcatctgcttcagcagaagcctgcactaccagttctacgtgtggtacttccacaccctgccctacctgctgtgggccatgcccgccagatggctgacccacctgctgagactgctggtgctgggcctgatcgagctgagctggaacacctaccccagcaccagctgcagcagcgccgccctgcacatctgccacgccgtgatcctgctgcagctgtggctgggcccccagcccttccccaagagcacccagcacagcaagaaggcccactag

SEQ ID NO: 73369 - DNA, 1149 bp, synthetic construct
  misc_feature 1..1149: note = Description of Artificial Sequence: Synthetic coding sequence
  source 1..1149: mol_type = other DNA
atggccgccgccagactggccagagccgcccccgccgccgccggcgccgccctgcacgccgccggcggcagactgcccctgcccggcggcggcggccaccacctgctgggccacagccagggcggcatgtaccccgccggcttcgtgtacatcttcatgggcctgtactacgccaccagcagaggcaccgacatcagaatggcccagaacatcttcgccgtgctgtacctggccaccctgctgctggtgttcctgatctaccaccagacctgcaaggtgccccccttcgtgttcttcttcatgtgctgcgccagctacagagtgcacagcatcttcgtgctgagactgttcaacgaccccgtggccatggtgctgctgttcctgagcatcaacctgctgctggcccagagatggggctggggctgctgcttcttcagcctggccgtgagcgtgaagatgaacgtgctgctgttcgcccccggcctgctgttcctgctgctgacccagttcggcttcagaggcgccctgcccaagctgggcatctgcgccggcctgcaggtggtgctgggcctgcccttcctgctggagaaccccagcggctacctgagcagaagcttcgacctgggcagacagttcctgttccactggaccgtgaactggagattcctgcccgaggccctgttcctgcacagagccttccacctggccctgctgaccgcccacctgaccctgctgctgctgttcgccctgtgcagatggcacagaaccggcgagagcatcctgagcctgctgagagaccccagcaagagaaaggtgcccccccagcccctgacccccaaccagatcgtgagcaccctgttcaccagcaacttcatcggcatctgcttcagcagaagcctgcactaccagttctacgtgtggtacttccacaccctgccctacctgctgtgggccatgcccgccagatggctgacccacctgctgagactgctggtgctgggcctgatcgagctgagctggaacacctaccccagcaccagctgcagcagcgccgccctgcacatctgccacgccgtgatcctgctgcagctgtggctgggcccccagcccttccccaagagcacccagcacagcaagaaggcccactag

SEQ ID NO: 73370 - DNA, 1530 bp, synthetic construct
  misc_feature 1..1530: note = Description of Artificial Sequence: Synthetic coding sequence
  source 1..1530: mol_type = other DNA
atggagaagtggtacctgatgaccgtggtggtgctgatcggcctgaccgtgagatggaccgtgagcctgaacagctacagcggcgccggcaagccccccatgttcggcgactacgaggcccagagacactggcaggagatcaccttcaacctgcccgtgaagcagtggtacttcaacagcagcgacaacaacctgcagtactggggcctggactacccccccctgaccgcctaccacagcctgctgtgcgcctacgtggccaagttcatcaaccccgactggatcgccctgcacaccagcagaggctacgagagccaggcccacaagctgttcatgagaaccaccgtgctgatcgccgacctgctgatctacatccccgccgtggtgctgtactgctgctgcctgaaggagatcagcaccaagaagaagatcgccaacgccctgtgcatcctgctgtaccccggcctgatcctgatcgactacggccacttccagaacatctacaacagcgtgagcctgggcttcgccctgtggggcgtgctgggcatcagctgcgactgcgacctgctgggcagcctggccttctgcctggccatcaactacaagcagatggagctgtaccacgccctgcccttcttctgcttcctgctgggcaagtgcttcaagaagggcctgaagggcaagggcttcgtgctgctggtgaagctggcctgcatcgtggtggccagcttcgtgctgtgctggctgcccttcttcaccgagagagagcagaccctgcaggtgctgagaagactgttccccgtggacagaggcctgttcgaggacaaggtggccaacatctggtgcagcttcaacgtgttcctgaagatcaaggacatcctgcccagacacatccagctgatcatgagcttctgcagcaccttcctgagcctgctgcccgcctgcatcaagctgatcctgcagcccagcagcaagggcttcaagttcaccctggtgagctgcgccctgagcttcttcctgttcagcttccaggtgcacgagaagagcatcctgctggtgagcctgcccgtgtgcctggtgctgagcgagatccccttcatgagcacctggttcctgctggtgagcaccttcagcatgctgcccctgctgctgaaggacgagctgctgatgcccagcgtggtgaccaccatggccttcttcatcgcctgcgtgaccagcttcagcatcttcgagaagaccagcgaggaggagctgcagctgaagagcttcagcatcagcgtgagaaagtacctgccctgcttcaccttcctgagcagaatcatccagtacctgttcctgatcagcgtgatcaccatggtgctgctgaccctgatgaccgtgaccctggaccccccccagaagctgcccgacctgttcagcgtgctggtgtgcttcgtgagctgcctgaacttcctgttcttcctggtgtacttcaacatcatcatcatgtgggacagcaagagcggcagaaaccagaagaagatcagctag

SEQ ID NO: 73371 - DNA, 1524 bp, synthetic construct
  misc_feature 1..1524: note = Description of Artificial Sequence: Synthetic coding sequence
  source 1..1524: mol_type = other DNA
atggagaagtggtacctgatgaccgtggtggtgctgatcggcctgaccgtgagatggaccgtgagcctgaacagctacagcggcgccggcaagccccccatgttcggcgactacgaggcccagagacactggcaggagatcaccttcaacctgcccgtgaagcagtggtacttcaacagcagcgacaacaacctgcagtactggggcctggactacccccccctgaccgcctaccacagcctgctgtgcgcctacgtggccaagttcatcaaccccgactggatcgccctgcacaccagcagaggctacgagagccaggcccacaagctgttcatgagaaccaccgtgctgatcgccgacctgctgatctacatccccgccgtggtgctgtactgctgctgcctgaaggagatcagcaccaagaagaagatcgccaacgccctgtgcatcctgctgtaccccggcctgatcctgatcgactacggccacttccagtacaacagcgtgagcctgggcttcgccctgtggggcgtgctgggcatcagctgcgactgcgacctgctgggcagcctggccttctgcctggccatcaactacaagcagatggagctgtaccacgccctgcccttcttctgcttcctgctgggcaagtgcttcaagaagggcctgaagggcaagggcttcgtgctgctggtgaagctggcctgcatcgtggtggccagcttcgtgctgtgctggctgcccttcttcaccgagagagagcagaccctgcaggtgctgagaagactgttccccgtggacagaggcctgttcgaggacaaggtggccaacatctggtgcagcttcaacgtgttcctgaagatcaaggacatcctgcccagacacatccagctgatcatgagcttctgcagcaccttcctgagcctgctgcccgcctgcatcaagctgatcctgcagcccagcagcaagggcttcaagttcaccctggtgagctgcgccctgagcttcttcctgttcagcttccaggtgcacgagaagagcatcctgctggtgagcctgcccgtgtgcctggtgctgagcgagatccccttcatgagcacctggttcctgctggtgagcaccttcagcatgctgcccctgctgctgaaggacgagctgctgatgcccagcgtggtgaccaccatggccttcttcatcgcctgcgtgaccagcttcagcatcttcgagaagaccagcgaggaggagctgcagctgaagagcttcagcatcagcgtgagaaagtacctgccctgcttcaccttcctgagcagaatcatccagtacctgttcctgatcagcgtgatcaccatggtgctgctgaccctgatgaccgtgaccctggaccccccccagaagctgcccgacctgttcagcgtgctggtgtgcttcgtgagctgcctgaacttcctgttcttcctggtgtacttcaacatcatcatcatgtgggacagcaagagcggcagaaaccagaagaagatcagctag

SEQ ID NO: 73372 - DNA, 765 bp, synthetic construct
  misc_feature 1..765: note = Description of Artificial Sequence: Synthetic coding sequence
  source 1..765: mol_type = other DNA
atggagctgtaccacgccctgcccttcttctgcttcctgctgggcaagtgcttcaagaagggcctgaagggcaagggcttcgtgctgctggtgaagctggcctgcatcgtggtggccagcttcgtgctgtgctggctgcccttcttcaccgagagagagcagaccctgcaggtgctgagaagactgttccccgtggacagaggcctgttcgaggacaaggtggccaacatctggtgcagcttcaacgtgttcctgaagatcaaggacatcctgcccagacacatccagctgatcatgagacccgtgtgcctggtgctgagcgagatccccttcatgagcacctggttcctgctggtgagcaccttcagcatgctgcccctgctgctgaaggacgagctgctgatgcccagcgtggtgaccaccatggccttcttcatcgcctgcgtgaccagcttcagcatcttcgagaagaccagcgaggaggagctgcagctgaagagcttcagcatcagcgtgagaaagtacctgccctgcttcaccttcctgagcagaatcatccagtacctgttcctgatcagcgtgatcaccatggtgctgctgaccctgatgaccgtgaccctggaccccccccagaagctgcccgacctgttcagcgtgctggtgtgcttcgtgagctgcctgaacttcctgttcttcctggtgtacttcaacatcatcatcatgtgggacagcaagagcggcagaaaccagaagaagatcagctag

SEQ ID NO: 73373 - DNA, 1581 bp, synthetic construct
  misc_feature 1..1581: note = Description of Artificial Sequence: Synthetic coding sequence
  source 1..1581: mol_type = other DNA
atggccgccctgaccatcgccaccggcaccggcaactggttcagcgccctggccctgggcgtgaccctgctgaagtgcctgctgatccccacctaccacagcaccgacttcgaggtgcacagaaactggctggccatcacccacagcctgcccatcagccagtggtactacgaggccaccagcgagtggaccctggactacccccccttcttcgcctggttcgagtacatcctgagccacgtggccaagtacttcgaccaggagatgctgaacgtgcacaacctgaactacagcagcagcagaaccctgctgttccagagattcagcgtgatcttcatggacgtgctgttcgtgtacgccgtgagagagtgctgcaagtgcatcgacggcaagaaggtgggcaaggagctgaccgagaagcccaagttcatcctgagcgtgctgctgctgtggaacttcggcctgctgatcgtggaccacatccacttccagtacaacggcttcctgttcggcctgatgctgctgagcatcgccagactgttccagaagagacacatggagggcgccttcctgttcgccgtgctgctgcacttcaagcacatctacctgtacgtggcccccgcctacggcgtgtacctgctgagaagctactgcttcaccgccaacaagcccgacggcagcatcagatggaagagcttcagcttcgtgagagtgatcagcctgggcctggtggtgttcctggtgagcgccctgagcctgggccccttcctggccctgaaccagctgccccaggtgttcagcagactgttccccttcaagagaggcctgtgccacgcctactgggcccccaacttctgggccctgtacaacgccctggacaaggtgctgagcgtgatcggcctgaagctgaagttcctggaccccaacaacatccccaaggccagcatgaccagcggcctggtgcagcagttccagcacaccgtgctgcccagcgtgacccccctggccaccctgatctgcaccctgatcgccatcctgcccagcatcttctgcctgtggttcaagccccagggccccagaggcttcctgagatgcctgaccctgtgcgccctgagcagcttcatgttcggctggcacgtgcacgagaaggccatcctgctggccatcctgcccatgagcctgctgagcgtgggcaaggccggcgacgccagcatcttcctgatcctgaccaccaccggccactacagcctgttccccctgctgttcaccgcccccgagctgcccatcaagatcctgctgatgctgctgttcaccatctacagcatcagcagcctgaagaccctgttcagaaaggagaagcccctgttcaactggatggagaccttctacctgctgggcctgggccccctggaggtgtgctgcgagttcgtgttccccttcaccagctggaaggtgaagtaccccttcatccccctgctgctgaccagcgtgtactgcgccgtgggcatcacctacgcctggttcaagctgtacgtgagcgtgctgatcgacagcgccatcggcaagaccaagaagcagtag

SEQ ID NO: 73374 - DNA, 1404 bp, synthetic construct
  misc_feature 1..1404: note = Description of Artificial Sequence: Synthetic coding sequence
  source 1..1404: mol_type = other DNA
atggccgccctgaccatcgccaccggcaccggcaactggttcagcgccctggccctgggcgtgaccctgctgaagtgcctgctgatccccacctaccacagcaccgacttcgaggtgcacagaaactggctggccatcacccacagcctgcccatcagccagtggtactacgaggccaccagcgagtggaccctggactacccccccttcttcgcctggttcgagtacatcctgagccacgtggccaagtacttcgaccaggagatgctgaacgtgcacaacctgaactacagcagcagcagaaccctgctgttccagagattcagcgtgatcttcatggacgtgctgttcgtgtacgccgtgagagagtgctgcaagtgcatcgacggcaagaaggtgggcaaggagctgaccgagaagcccaagttcatcctgagcgtgctgctgctgtggaacttcggcctgctgatcgtggaccacatccacttccagtacaacggcttcctgttcggcctgatgctgctgagcatcgccagactgttccagaagagacacatggagggcgccttcctgttcgccgtgctgctgcacttcaagcacatctacctgtacgtggcccccgcctacggcgtgtacctgctgagaagctactgcttcaccgccaacaagcccgacggcagcatcagatggaagagcttcagcttcgtgagagtgatcagcctgggcctggtggtgttcctggtgagcgccctgagcctgggccccttcctggccctgaaccagctgccccaggtgttcagcagactgttccccttcaagagaggcctgtgccacgcctactgggcccccaacttctgggccctgtacaacgccctggacaaggtgctgagcgtgatcggcctgaagctgaagttcctggaccccaacaacatccccaaggccagcatgaccagcggcctggtgcagcagttccagcacaccgtgctgcccagcgtgacccccctggccaccctgatctgcaccctgatcgccatcctgcccagcatcttctgcctgtggttcaagccccagggccccagaggcttcctgagatgcctgaccctgtgcgccctgagcagcttcatgttcggctggcacgtgcacgagaaggccatcctgctggccatcctgcccatgagcctgctgagcgtgggcaaggccggcgacgccagcatcttcctgatcctgaccaccaccggccactacagcctgttccccctgctgttcaccgcccccgagctgcccatcaagatcctgctgatgctgctgttcaccatctacagcatcagcagcctgaagaccctgttcagaagaagcttcaccctggtggcccaggccggcgtgcagtggcacgacctgagctag

SEQ ID NO: 73375 - DNA, 1323 bp, synthetic construct
  misc_feature 1..1323: note = Description of Artificial Sequence: Synthetic coding sequence
  source 1..1323: mol_type = other DNA
atgatgctggccttcctggtgctgagcaccggcatgttctgcagcagcagcgccttcctgcccagcagcttctgcatgtacaccaccctgatcgccatgaccggctggtacatggacaagaccagcatcgccgtgctgggcgtggccgccggcgccatcctgggctggcccttcagcgccgccctgggcctgcccatcgccttcgacctgctggtgatgaagcacagatggaagagcttcttccactggagcctgatggccctgatcctgttcctggtgcccgtggtggtgatcgacagctactactacggcaagctggtgatcgcccccctgaacatcgtgctgtacaacgtgttcaccccccacggccccgacctgtacggcaccgagccctggtacttctacctgatcaacggcttcctgaacttcaacgtggccttcgccctggccctgctggtgctgcccctgaccagcctgatggagtacctgctgcagagattccacgtgcagaacctgggccacccctactggctgaccctggcccccatgtacatctggttcatcatcttcttcatccagccccacaaggaggagagattcctgttccccgtgtaccccctgatctgcctgtgcggcgccgtggccctgagcgccctgcagaagtgctaccacttcgtgttccagagatacagactggagcactacaccgtgaccagcaactggctggccctgggcaccgtgttcctgttcggcctgctgagcttcagcagaagcgtggccctgttcagaggctaccacggccccctggacctgtaccccgagttctacagaatcgccaccgaccccaccatccacaccgtgcccgagggcagacccgtgaacgtgtgcgtgggcaaggagtggtacagattccccagcagcttcctgctgcccgacaactggcagctgcagttcatccccagcgagttcagaggccagctgcccaagcccttcgccgagggccccctggccaccagaatcgtgcccaccgacatgaacgaccagaacctggaggagcccagcagatacatcgacatcagcaagtgccactacctggtggacctggacaccatgagagagacccccagagagcccaagtacagcagcaacaaggaggagtggatcagcctggcctacagacccttcctggacgccagcagaagcagcaagctgctgagagccttctacgtgcccttcctgagcgaccagtacaccgtgtacgtgaactacaccatcctgaagcccagaaaggccaagcagatcagaaagaagagcggcggctag

SEQ ID NO: 73376 - DNA, 2535 bp, synthetic construct
  misc_feature 1..2535: note = Description of Artificial Sequence: Synthetic coding sequence
  source 1..2535: mol_type = other DNA
atggcccccagaagactgctgctggtgggcgagggcaacttcagcttcgccgccgccctgagcgagaccctggaccagagcacccagctgaccgccacctgcctgcagagacccgccgagctggccagagaccccctggcctgggagaacctgcagtgcctgagagagagaggcatcgacgtgagattcggcgtggactgcacccagctggccgacgtgttcgagctgcacgagagagagttcgaccagatctacttcatcttcccccactgcggcagaaaggccggcgtggccaagaacagagagctgctggccaagttcttccagagctgcgccgacgtgctggccgaggagggcgaggtgcacgtggccctgtgcagaggccagggcggcacccccgccgacaagccccagagagagtggcacaacagctggcaggtggtggccatggccgccctgggcggcctgatcctgagcgacgtgtaccccttcagctgcaaggccgtggccggctacaagtgcaccggctacagaagccaggacaagagcttccacgtggagggcgccctgaaccacatcttcaccagaagcctgcccttcgagggcagccagcccagaatcttcagaatcaagctgggcaaccagtggttcagcttccccgagcccgaggccctggtgggcaagctgaacagactggccatggccagcagaggcgccagacagagactgaagggcagcggcgccagcagcggcgacaccgcccccgccgccgacaagctgagagagctgctgggcagcagagaggccggcggcgccgagcacagaaccgagctgagcggcaacaaggccggccaggtgtgggcccccgagggcagcaccgccttcaagtgcctgctgagcgccagactgtgcgccgccctgctgagcaacatcagcgactgcgacgagaccttcaactactgggagcccacccactacctgatctacggcgagggcttccagacctgggagtacagccccgcctacgccatcagaagctacgcctacctgctgctgcacgcctggcccgccgccttccacgccagaatcctgcagaccaacaagatcctggtgttctacttcctgagatgcctgctggccttcgtgagctgcatctgcgagctgtacttctacaaggccgtgtgcaagaagttcggcctgcacgtgagcagaatgatgctggccttcctggtgctgagcaccggcatgttctgcagcagcagcgccttcctgcccagcagcttctgcatgtacaccaccctgatcgccatgaccggctggtacatggacaagaccagcatcgccgtgctgggcgtggccgccggcgccatcctgggctggcccttcagcgccgccctgggcctgcccatcgccttcgacctgctggtgatgaagcacagatggaagagcttcttccactggagcctgatggccctgatcctgttcctggtgcccgtggtggtgatcgacagctactactacggcaagctggtgatcgcccccctgaacatcgtgctgtacaacgtgttcaccccccacggccccgacctgtacggcaccgagccctggtacttctacctgatcaacggcttcctgaacttcaacgtggccttcgccctggccctgctggtgctgcccctgaccagcctgatggagtacctgctgcagagattccacgtgcagaacctgggccacccctactggctgaccctggcccccatgtacatctggttcatcatcttcttcatccagccccacaaggaggagagattcctgttccccgtgtaccccctgatctgcctgtgcggcgccgtggccctgagcgccctgcagaagtgctaccacttcgtgttccagagatacagactggagcactacaccgtgaccagcaactggctggccctgggcaccgtgttcctgttcggcctgctgagcttcagcagaagcgtggccctgttcagaggctaccacggccccctggacctgtaccccgagttctacagaatcgccaccgaccccaccatccacaccgtgcccgagggcagacccgtgaacgtgtgcgtgggcaaggagtggtacagattccccagcagcttcctgctgcccgacaactggcagctgcagttcatccccagcgagttcagaggccagctgcccaagcccttcgccgagggccccctggccaccagaatcgtgcccaccgacatgaacgaccagaacctggaggagcccagcagatacatcgacatcagcaagtgccactacctggtggacctggacaccatgagagagacccccagagagcccaagtacagcagcaacaaggaggagtggatcagcctggcctacagacccttcctggacgccagcagaagcagcaagctgctgagagccttctacgtgcccttcctgagcgaccagtacaccgtgtacgtgaactacaccatcctgaagcccagaaaggccaagcagatcagaaagaagagcggcggctag

SEQ ID NO: 73377 - DNA, 1344 bp, synthetic construct
  misc_feature 1..1344: note = Description of Artificial Sequence: Synthetic coding sequence
  source 1..1344: mol_type = other DNA
atgatgctggccttcctggtgctgagcaccggcatgttctgcagcagcagcgccttcctgcccagcagcttctgcatgtacaccaccctgatcgccatgaccggctggtacatggacaagaccagcatcgccgtgctgggcgtggccgccggcgccatcctgggctggcccttcagcgccgccctgggcctgcccatcgccttcgacctgctggtgatgaagcacagatggaagagcttcttccactggagcctgatggccctgatcctgttcctggtgcccgtggtggtgatcgacagctactactacggcaagctggtgatcgcccccctgaacatcgtgctgtacaacgtgttcaccccccacggccccgacctgtacggcaccgagccctggtacttctacctgatcaacggcttcctgaacttcaacgtggccttcgccctggccctgctggtgctgcccctgaccagcctgatggagtacctgctgcagagattccacgtgcagaacctgggccacccctactggctgaccctggcccccatgtacatctggttcatcatcttcttcatccagccccacaaggaggagagattcctgttccccgtgtaccccctgatctgcctgtgcggcgccgtggccctgagcgccctgcagcacagcttcctgtacttccagaagtgctaccacttcgtgttccagagatacagactggagcactacaccgtgaccagcaactggctggccctgggcaccgtgttcctgttcggcctgctgagcttcagcagaagcgtggccctgttcagaggctaccacggccccctggacctgtaccccgagttctacagaatcgccaccgaccccaccatccacaccgtgcccgagggcagacccgtgaacgtgtgcgtgggcaaggagtggtacagattccccagcagcttcctgctgcccgacaactggcagctgcagttcatccccagcgagttcagaggccagctgcccaagcccttcgccgagggccccctggccaccagaatcgtgcccaccgacatgaacgaccagaacctggaggagcccagcagatacatcgacatcagcaagtgccactacctggtggacctggacaccatgagagagacccccagagagcccaagtacagcagcaacaaggaggagtggatcagcctggcctacagacccttcctggacgccagcagaagcagcaagctgctgagagccttctacgtgcccttcctgagcgaccagtacaccgtgtacgtgaactacaccatcctgaagcccagaaaggccaagcagatcagaaagaagagcggcggctag

SEQ ID NO: 73378 - DNA, 1647 bp, synthetic construct
  misc_feature 1..1647: note = Description of Artificial Sequence: Synthetic coding sequence
  source 1..1647: mol_type = other DNA
atggtgctggccgagctgtacgtgagcgacagagagggcagcgacgccaccggcgacggcaccaaggagaagcccttcaagaccggcctgaaggccctgatgaccgtgggcaaggagcccttccccaccatctacgtggacagccagaaggagaacgagagatggaacgtgatcagcaagagccagctgaagaacatcaagaagatgtggcacagagagcagatgaagagcgagagcagagagaagaaggaggccgaggacagcctgagaagagagaagaacctggaggaggccaagaagatcaccatcaagaacgaccccagcctgcccgagcccaagtgcgtgaagatcggcgccctggagggctacagaggccagagagtgaaggtgttcggctgggtgcacagactgagaagacagggcaagaacctgatgttcctggtgctgagagacggcaccggctacctgcagtgcgtgctggccgacgagctgtgccagtgctacaacggcgtgctgctgagcaccgagagcagcgtggccgtgtacggcatgctgaacctgacccccaagggcaagcaggcccccggcggccacgagctgagctgcgacttctgggagctgatcggcctggcccccgccggcggcgccgacaacctgatcaacgaggagagcgacgtggacgtgcagctgaacaacagacacatgatgatcagaggcgagaacatgagcaagatcctgaaggccagaagcatggtgaccagatgcttcagagaccacttcttcgacagaggctactacgaggtgaccccccccaccctggtgcagacccaggtggagggcggcgccaccctgttcaagctggactacttcggcgaggaggccttcctgacccagagcagccagctgtacctggagacctgcctgcccgccctgggcgacgtgttctgcatcgcccagagctacagagccgagcagagcagaaccagaagacacctggccgagtacacccacgtggaggccgagtgccccttcctgaccttcgacgacctgctgaacagactggaggacctggtgtgcgacgtggtggacagaatcctgaagagccccgccggcagcatcgtgcacgagctgaaccccaacttccagccccccaagagacccttcaagagaatgaactacagcgacgccatcgtgtggctgaaggagcacgacgtgaagaaggaggacggcaccttctacgagttcggcgaggacatccccgaggcccccgagagactgatgaccgacaccatcaacgagcccatcctgctgtgcagattccccgtggagatcaagagcttctacatgcagagatgccccgaggacagcagactgaccgagagcgtggacgtgctgatgcccaacgtgggcgagatcgtgggcggcagcatgagaatcttcgacagcgaggagatcctggccggctacaagagagagggcatcgaccccaccccctactactggtacaccgaccagagaaagtacggcacctgcccccacggcggctacggcctgggcctggagagattcctgacctggatcctgaacagataccacatcagagacgtgtgcctgtaccccagattcgtgcagagatgcaccccctag

SEQ ID NO: 73379 - DNA, 765 bp, synthetic construct
  misc_feature 1..765: note = Description of Artificial Sequence: Synthetic coding sequence
  source 1..765: mol_type = other DNA
atgaccgtgggcaaggagcccttccccaccatctacgtggacagccagaaggagaacgagagatggaacgtgatcagcaagagccagctgaagaacatcaagaagatgtggcacagagagcagatgaagagcgagagcagagagaagaaggaggccgaggacagcctgagaagagagaagaacctggaggaggccaagaagatcaccatcaagaacgaccccagcctgcccgagcccaagtgcgtgaagatcggcgccctggagggctacagaggccagagagtgaaggtgttcggctgggtgcacagactgagaagacagggcaagaacctgatgttcctggtgctgagagacggcaccggctacctgcagtgcgtgctggccgacgagctgtgccagtgctacaacggcgtgctgctgagcaccgagagcagcgtggccgtgtacggcatgctgaacctgacccccaagggcaagcaggcccccggcggccacgagctgagctgcgacttctgggagctgatcggcctggcccccgccggcggcgccgacaacctgatcaacgaggagagcgacgtggacgtgcagctgaacaacagacacatgatgatcagaggcgagaacatgagcaagatcctgaaggccagaagcatggtgaccagatgcttcagagaccacttcttcgacagaggctactacgaggtgagcatgcacagcagcgccttcgccaagaacatgttcttcgccgtgctgaagctggagtag

SEQ ID NO: 73380 - DNA, 900 bp, synthetic construct
  misc_feature 1..900: note = Description of Artificial Sequence: Synthetic coding sequence
  source 1..900: mol_type = other DNA
atgtgcgaggactggtgcttcagagaccacttcttcgacagaggctactacgaggtgaccccccccaccctggtgcagacccaggtggagggcggcgccaccctgttcaagctggactacttcggcgaggaggccttcctgacccagagcagccagctgtacctggagacctgcctgcccgccctgggcgacgtgttctgcatcgcccagagctacagagccgagcagagcagaaccagaagacacctggccgagtacacccacgtggaggccgagtgccccttcctgaccttcgacgacctgctgaacagactggaggacctggtgtgcgacgtggtggacagaatcctgaagagccccgccggcagcatcgtgcacgagctgaaccccaacttccagccccccaagagacccttcaagagaatgaactacagcgacgccatcgtgtggctgaaggagcacgacgtgaagaaggaggacggcaccttctacgagttcggcgaggacatccccgaggcccccgagagactgatgaccgacaccatcaacgagcccatcctgctgtgcagattccccgtggagatcaagagcttctacatgcagagatgccccgaggacagcagactgaccgagagcgtggacgtgctgatgcccaacgtgggcgagatcgtgggcggcagcatgagaatcttcgacagcgaggagatcctggccggctacaagagagagggcatcgaccccaccccctactactggtacaccgaccagagaaagtacggcacctgcccccacggcggctacggcctgggcctggagagattcctgacctggatcctgaacagataccacatcagagacgtgtgcctgtaccccagattcgtgcagagatgcaccccctag

SEQ ID NO: 73381 - DNA, 525 bp, synthetic construct
  misc_feature 1..525: note = Description of Artificial Sequence: Synthetic coding sequence
  source 1..525: mol_type = other DNA
atggtgctggccgagctgtacgtgagcgacagagagggcagcgacgccaccggcgacggcaccaaggagaagcccttcaagaccggcctgaaggccctgatgaccgtgggcaaggagcccttccccaccatctacgtggacagccagaaggagaacgagagatggaacgtgatcagcaagagccagctgaagaacatcaagaagatgtggcacagagagcagatgaagagcgagagcagagagaagaaggaggccgaggacagcctgagaagagagaagaacctggaggaggccaagaagatcaccatcaagaacgaccccagcctgcccgagcccaagtgcgtgaagatcggcgccctggagggctacagaggccagagagtgaaggtgttcggctgggtgcacagactgagaagacaggtgagcgtgctgcagtggagcagcctggtgcacggcgagcagtgctgcagcgtgtggaacgccaagagctaccccaagggccaggccggcagcagatggccctag

SEQ ID NO: 73382 - DNA, 1434 bp, synthetic construct
  misc_feature 1..1434: note = Description of Artificial Sequence: Synthetic coding sequence
  source 1..1434: mol_type = other DNA
atgctgggcgtgagatgcctgctgagaagcgtgagattctgcagcagcgcccccttccccaagcacaagcccagcgccaagctgagcgtgagagacgccctgggcgcccagaacgccagcggcgagagaatcaagatccagggctggatcagaagcgtgagaagccagaaggaggtgctgttcctgcacgtgaacgacggcagcagcctggagagcctgcaggtggtggccgacagcggcctggacagcagagagctgaacttcggcagcagcgtggaggtgcagggccagctgatcaagagccccagcaagagacagaacgtggagctgaaggccgagaagatcaaggtgatcggcaactgcgacgccaaggacttccccatcaagtacaaggagagacaccccctggagtacctgagacagtacccccacttcagatgcagaaccaacgtgctgggcagcatcctgagaatcagaagcgaggccaccgccgccatccacagcttcttcaaggacagcggcttcgtgcacatccacacccccatcatcaccagcaacgacagcgagggcgccggcgagctgttccagctggagcccagcggcaagctgaaggtgcccgaggagaacttcttcaacgtgcccgccttcctgaccgtgagcggccagctgcacctggaggtgatgagcggcgccttcacccaggtgttcaccttcggccccaccttcagagccgagaacagccagagcagaagacacctggccgagttctacatgatcgaggccgagatcagcttcgtggacagcctgcaggacctgatgcaggtgatcgaggagctgttcaaggccaccaccatgatggtgctgagcaagtgccccgaggacgtggagctgtgccacaagttcatcgcccccggccagaaggacagactggagcacatgctgaagaacaacttcctgatcatcagctacaccgaggccgtggagatcctgaagcaggccagccagaacttcaccttcacccccgagtggggcgccgacctgagaaccgagcacgagaagtacctggtgaagcactgcggcaacatccccgtgttcgtgatcaactaccccctgaccctgaagcccttctacatgagagacaacgaggacggcccccagcacaccgtggccgccgtggacctgctggtgcccggcgtgggcgagctgttcggcggcggcctgagagaggagagataccacttcctggaggagagactggccagaagcggcctgaccgaggtgtaccagtggtacctggacctgagaagattcggcagcgtgccccacggcggcttcggcatgggcttcgagagatacctgcagtgcatcctgggcgtggacaacatcaaggacgtgatccccttccccagattcccccacagctgcctgctgtag

SEQ ID NO: 73383 - DNA, 942 bp, synthetic construct
  misc_feature 1..942: note = Description of Artificial Sequence: Synthetic coding sequence
  source 1..942: mol_type = other DNA
atggcccagagaaagaacgccaagagcagcggcaacagcagcagcagcggcagcggcagcggcagcaccagcgccggcagcagcagccccggcgccagaagagagaccaagcacggcggccacaagaacggcagaaagggcggcctgagcggcaccagcttcttcacctggttcatggtgatcgccctgctgggcgtgtggaccagcgtggccgtggtgtggttcgacctggtggactacgaggaggtgctgggcaagctgggcatctacgacgccgacggcgacggcgacttcgacgtggacgacgccaaggtgctgctgggcctgaaggagagaagcaccagcgagcccgccgtgccccccgaggaggccgagccccacaccgagcccgaggagcaggtgcccgtggaggccgagccccagaacatcgaggacgaggccaaggagcagatccagagcctgctgcacgagatggtgcacgccgagcacgtggagggcgaggacctgcagcaggaggacggccccaccggcgagccccagcaggaggacgacgagttcctgatggccaccgacgtggacgacagattcgagaccctggagcccgaggtgagccacgaggagaccgagcacagctaccacgtggaggagaccgtgagccaggactgcaaccaggacatggaggagatgatgagcgagcaggagaaccccgacagcagcgagcccgtggtggaggacgagagactgcaccacgacaccgacgacgtgacctaccaggtgtacgaggagcaggccgtgtacgagcccctggagaacgagggcatcgagatcaccgaggtgaccgccccccccgaggacaaccccgtggaggacagccaggtgatcgtggaggaggtgagcatcttccccgtggaggagcagcaggaggtgccccccgacacctag

SEQ ID NO: 73384 - DNA, 612 bp, synthetic construct
  misc_feature 1..612: note = Description of Artificial Sequence: Synthetic coding sequence
  source 1..612: mol_type = other DNA
atggcccagagaaagaacgccaagagcagcggcaacagcagcagcagcggcagcggcagcggcagcaccagcgccggcagcagcagccccggcgccagaagagagaccaagcacggcggccacaagaacggcagaaagggcggcctgagcggcaccagcttcttcacctggttcatggtgatcgccctgctgggcgtgtggaccagcgtggccgtggtgtggttcgacctggtggactacgaggaggtgctggccaaggccaaggacttcagatacaacctgagcgaggtgctgcagggcaagctgggcatctacgacgccgacggcgacggcgacttcgacgtggacgacgccaaggtgctgctgggcctgaccaaggacggcagcaacgagaacatcgacagcctggaggaggtgctgaacatcctggccgaggagagcagcgactggttctacggcttcctgagcttcctgtacgacatcatgacccccttcgagatgctggaggaggaggaggaggagagcgagaccgccgacggcgtggacggcaccagccagaacgagggcgtgcagggcaagacctgcgtgatcctggacctgcacaaccagtag

SEQ ID NO: 73385 - DNA, 2277 bp, synthetic construct
  misc_feature 1..2277: note = Description of Artificial Sequence: Synthetic coding sequence
  source 1..2277: mol_type = other DNA
atggcccagagaaagaacgccaagagcagcggcaacagcagcagcagcggcagcggcagcggcagcaccagcgccggcagcagcagccccggcgccagaagagagaccaagcacggcggccacaagaacggcagaaagggcggcctgagcggcaccagcttcttcacctggttcatggtgatcgccctgctgggcgtgtggaccagcgtggccgtggtgtggttcgacctggtggactacgaggaggtgctgggcaagctgggcatctacgacgccgacggcgacggcgacttcgacgtggacgacgccaaggtgctgctgggcctgaaggagagaagcaccagcgagcccgccgtgccccccgaggaggccgagccccacaccgagcccgaggagcaggtgcccgtggaggccgagccccagaacatcgaggacgaggccaaggagcagatccagagcctgctgcacgagatggtgcacgccgagcacgtggagggcgaggacctgcagcaggaggacggccccaccggcgagccccagcaggaggacgacgagttcctgatggccaccgacgtggacgacagattcgagaccctggagcccgaggtgagccacgaggagaccgagcacagctaccacgtggaggagaccgtgagccaggactgcaaccaggacatggaggagatgatgagcgagcaggagaaccccgacagcagcgagcccgtggtggaggacgagagactgcaccacgacaccgacgacgtgacctaccaggtgtacgaggagcaggccgtgtacgagcccctggagaacgagggcatcgagatcaccgaggtgaccgccccccccgaggacaaccccgtggaggacagccaggtgatcgtggaggaggtgagcatcttccccgtggaggagcagcaggaggtgccccccgagaccaacagaaagaccgacgaccccgagcagaaggccaaggtgaagaagaagaagcccaagctgctgaacaagttcgacaagaccatcaaggccgagctggacgccgccgagaagctgagaaagagaggcaagatcgaggaggccgtgaacgccttcaaggagctggtgagaaagtacccccagagccccagagccagatacggcaaggcccagtgcgaggacgacctggccgagaagagaagaagcaacgaggtgctgagaggcgccatcgagacctaccaggaggtggccagcctgcccgacgtgcccgccgacctgctgaagctgagcctgaagagaagaagcgacagacagcagttcctgggccacatgagaggcagcctgctgaccctgcagagactggtgcagctgttccccaacgacaccagcctgaagaacgacctgggcgtgggctacctgctgatcggcgacaacgacaacgccaagaaggtgtacgaggaggtgctgagcgtgacccccaacgacggcttcgccaaggtgcactacggcttcatcctgaaggcccagaacaagatcgccgagagcatcccctacctgaaggagggcatcgagagcggcgaccccggcaccgacgacggcagattctacttccacctgggcgacgccatgcagagagtgggcaacaaggaggcctacaagtggtacgagctgggccacaagagaggccacttcgccagcgtgtggcagagaagcctgtacaacgtgaacggcctgaaggcccagccctggtggacccccaaggagaccggctacaccgagctggtgaagagcctggagagaaactggaagctgatcagagacgagggcctggccgtgatggacaaggccaagggcctgttcctgcccgaggacgagaacctgagagagaagggcgactggagccagttcaccctgtggcagcagggcagaagaaacgagaacgcctgcaagggcgcccccaagacctgcaccctgctggagaagttccccgagaccaccggctgcagaagaggccagatcaagtacagcatcatgcaccccggcacccacgtgtggccccacaccggccccaccaactgcagactgagaatgcacctgggcctggtgatccccaaggagggctgcaagatcagatgcgccaacgagaccaagacctgggaggagggcaaggtgctgatcttcgacgacagcttcgagcacgaggtgtggcaggacgccagcagcttcagactgatcttcatcgtggacgtgtggcaccccgagctgaccccccagcagagaagaagcctgcccgccatctag

SEQ ID NO: 73386 - DNA, 678 bp, synthetic construct
  misc_feature 1..678: note = Description of Artificial Sequence: Synthetic coding sequence
  source 1..678: mol_type = other DNA
atggccgaggacaaggagaccaagcacggcggccacaagaacggcagaaagggcggcctgagcggcaccagcttcttcacctggttcatggtgatcgccctgctgggcgtgtggaccagcgtggccgtggtgtggttcgacctggtggactacgaggaggtgctggccaaggccaaggacttcagatacaacctgagcgaggtgctgcagggcaagctgggcatctacgacgccgacggcgacggcgacttcgacgtggacgacgccaaggtgctgctggagggccccagcggcgtggccaagagaaagaccaaggccaaggtgaaggagctgaccaaggaggagctgaagaaggagaaggagaagcccgagagcagaaaggagagcaagaacgaggagagaaagaagggcaagaaggaggacgtgagaaaggacaagaagatcgccgacgccgacctgagcagaaaggagagccccaagggcaagaaggacagagagaaggagaaggtggacctggagaagagcgccaagaccaaggagaacagaaagaagagcaccaacatgaaggacgtgagcagcaagatggccagcagagacaaggacgacagaaaggagagcagaagcagcaccagatacgcccacctgaccaagggcaacacccagaagagaaacggctag

SEQ ID NO: 73387 - DNA, 1290 bp, synthetic construct
  misc_feature 1..1290: note = Description of Artificial Sequence: Synthetic coding sequence
  source 1..1290: mol_type = other DNA
atggcccagagaaagaacgccaagagcagcggcaacagcagcagcagcggcagcggcagcggcagcaccagcgccggcagcagcagccccggcgccagaagagagaccaagcacggcggccacaagaacggcagaaagggcggcctgagcggcaccagcttcttcacctggttcatggtgatcgccctgctgggcgtgtggaccagcgtggccgtggtgtggttcgacctggtggactacgaggaggtgctgggcaagctgggcatctacgacgccgacggcgacggcgacttcgacgtggacgacgccaaggtgctgctgggcctgaaggagagaagcaccagcgagcccgccgtgccccccgaggaggccgagccccacaccgagcccgaggagcaggtgcccgtggaggccgagccccagaacatcgaggacgaggccaaggagcagatccagagcctgctgcacgagatggtgcacgccgagcacgtggagggcgaggacctgcagcaggaggacggccccaccggcgagccccagcaggaggacgacgagttcctgatggccaccgacgtggacgacagattcgagaccctggagcccgaggtgagccacgaggagaccgagcacagctaccacgtggaggagaccgacagcagcgagcccgtggtggaggacgagagactgcaccacgacaccgacgacgtgacctaccaggtgtacgaggagcaggccgtgtacgagcccctggagaacgagggcatcgagatcaccgaggtgaccgccccccccgaggacaaccccgtggaggacagccaggtgatcgtggaggaggtgagcatcttccccgtggaggagcagcaggaggtgccccccgagaccaacagaaagaccgacgaccccgagcagaaggccaaggtgaagaagaagaagcccaagctgctgaacaagttcgacaagaccatcaaggccgagctggacgccgccgagaagctgagaaagagaggcaagatcgaggaggccgtgaacgccttcaaggagctggtgagaaagtacccccagagccccagagccagatacggcaaggcccagtgcgaggacgacctggccgagaagagaagaagcaacgaggtgctgagaggcgccatcgagacctaccaggaggtggccagcctgcccgacgtgcccgccgacctgctgaagctgagcctgaagagaagaagcgacagacagcagttcctgggccacatgagaggcagcctgctgaccctgcagagactggtgcagtag

SEQ ID NO: 73388 - DNA, 900 bp, synthetic construct
  misc_feature 1..900: note = Description of Artificial Sequence: Synthetic coding sequence
  source 1..900: mol_type = other DNA
atggccgaggacaaggagaccaagcacggcggccacaagaacggcagaaagggcggcctgagcggcaccagcttcttcacctggttcatggtgatcgccctgctgggcgtgtggaccagcgtggccgtggtgtggttcgacctggtggactacgaggaggtgctggccaaggccaaggacttcagatacaacctgagcgaggtgctgcagggcaagctgggcatctacgacgccgacggcgacggcgacttcgacgtggacgacgccaaggtgctgctgggcctgaaggagagaagcaccagcgagcccgccgtgccccccgaggaggccgagccccacaccgagcccgaggagcaggtgcccgtggaggccgagccccagaacatcgaggacgaggccaaggagcagatccagagcctgctgcacgagatggtgcacgccgagcacgtggagggcgaggacctgcagcaggaggacggccccaccggcgagccccagcaggaggacgacgagttcctgatggccaccgacgtggacgacagattcgagaccctggagcccgaggtgagccacgaggagaccgagcacagctaccacgtggaggagaccgtgagccaggactgcaaccaggacatggaggagatgatgagcgagcaggagaaccccgacagcagcgagcccgtggtggaggacgagagactgcaccacgacaccgacgacgtgacctaccaggtgtacgaggagcaggccgtgtacgagcccctggagaacgagggcatcgagatcaccgaggtgaccgccccccccgaggacaaccccgtggaggacagccaggtgatcgtggaggaggtgagcatcttccccgtggaggagcagcaggaggtgccccccgacacctag

SEQ ID NO: 73389 - DNA, 900 bp, synthetic construct; identical to SEQ ID NO: 73388
  misc_feature 1..900: note = Description of Artificial Sequence: Synthetic coding sequence
  source 1..900: mol_type = other DNA

SEQ ID NO: 73390 - DNA, 897 bp, synthetic construct
  misc_feature 1..897: note = Description of Artificial Sequence: Synthetic coding sequence
  source 1..897: mol_type = other DNA
atggccgaggacaaggagaccaagcacggcggccacaagaacggcagaaagggcggcctgagcggcaccagcttcttcacctggttcatggtgatcgccctgctgggcgtgtggaccagcgtggccgtggtgtggttcgacctggtggactacgaggaggtgctggccaaggccaaggacttcagatacaacctgagcgaggtgctgcagggcaagctgggcatctacgacgccgacggcgacggcgacttcgacgtggacgacgccaaggtgctgctgggcctgaaggagagaagcaccagcgagcccgccgtgccccccgaggaggccgagccccacaccgagcccgaggagcaggtgcccgtggaggccgagccccagaacatcgaggacgaggccaaggagcagatccagagcctgctgcacgagatggtgcacgccgagcacgtggagggcgaggacctgcagcaggaggacggccccaccggcgagccccagcaggaggacgacgagttcctgatggccaccgacgtggacgacagattcgagaccctggagcccgaggtgagccacgaggagaccgagcacagctaccacgtggaggagaccgtgagccaggactgcaaccaggacatggaggagatgatgagcgagcaggagaaccccgacagcagcgagcccgtggtggaggacgagagactgcaccacgacaccgacgacgtgacctaccaggtgtacgaggagcaggtgtacgagcccctggagaacgagggcatcgagatcaccgaggtgaccgccccccccgaggacaaccccgtggaggacagccaggtgatcgtggaggaggtgagcatcttccccgtggaggagcagcaggaggtgccccccgacacctag

SEQ ID NO: 73391 - DNA, 813 bp, synthetic construct
  misc_feature 1..813: note = Description of Artificial Sequence: Synthetic coding sequence
  source 1..813: mol_type = other DNA
atggcccagagaaagaacgccaagagcagcggcaacagcagcagcagcggcagcggcagcggcagcaccagcgccggcagcagcagccccggcgccagaagagagaccaagcacggcggccacaagaacggcagaaagggcggcctgagcggcaccagcttcttcacctggttcatggtgatcgccctgctgggcgtgtggaccagcgtggccgtggtgtggttcgacctggtggactacgaggaggtgctgggcaagctgggcatctacgacgccgacggcgacggcgacttcgacgtggacgacgccaaggtgctgctgggcctgaaggagagaagcaccagcgagcccgccgtgccccccgaggaggccgagccccacaccgagcccgaggagcaggtgcccgtggaggccgagccccagaacatcgaggacgaggccaaggagcagatccagagcctgctgcacgagatggtgcacgccgagcacgagaccgagcacagctaccacgtggaggagaccgtgagccaggactgcaaccaggacatggaggagatgatgagcgagcaggagaaccccgacagcagcgagcccgtggtggaggacgagagactgcaccacgacaccgacgacgtgacctaccaggtgtacgaggagcaggccgtgtacgagcccctggagaacgagggcatcgagatcaccgaggtgaccgccccccccgaggacaaccccgtggaggacagccaggtgatcgtggaggaggtgagcatcttccccgtggaggagcagcaggaggtgccccccgacacctag

SEQ ID NO: 73392 - DNA, 633 bp, synthetic construct
  misc_feature 1..633: note = Description of Artificial Sequence: Synthetic coding sequence
  source 1..633: mol_type = other DNA
atggccgaggacaaggagaccaagcacggcggccacaagaacggcagaaagggcggcctgagcggcaccagcttcttcacctggttcatggtgatcgccctgctgggcgtgtggaccagcgtggccgtggtgtggttcgacctggtggactacgaggaggtgctgggcaagctgggcatctacgacgccgacggcgacggcgacttcgacgtggacgacgccaaggtgctgctggagggccccagcggcgtggccaagagaaagaccaaggccaaggtgaaggagctgaccaaggaggagctgaagaaggagaaggagaagcccgagagcagaaaggagagcaagaacgaggagagaaagaagggcaagaaggaggacgtgagaaaggacaagaagatcgccgacgccgacctgagcagaaaggagagccccaagggcaagaaggacagagagaaggagaaggtggacctggagaagagcgccaagaccaaggagaacagaaagaagagcaccaacatgaaggacgtgagcagcaagatggccagcagagacaaggacgacagaaaggagagcagaagcagcaccagatacgcccacctgaccaagggcaacacccagaagagaaacggctag

SEQ ID NO: 73393 - DNA, 771 bp, synthetic construct
  misc_feature 1..771: note = Description of Artificial Sequence: Synthetic coding sequence
  source 1..771: mol_type = other DNA
atggccgaggacaaggagaccaagcacggcggccacaagaacggcagaaagggcggcctgagcggcaccagcttcttcacctggttcatggtgatcgccctgctgggcgtgtggaccagcgtggccgtggtgtggttcgacctggtggactacgaggaggtgctggccaaggccaaggacttcagatacaacctgagcgaggtgctgcagggcaagctgggcatctacgacgccgacggcgacggcgacttcgacgtggacgacgccaaggtgctgctgggcctgaaggagagaagcaccagcgagcccgccgtgccccccgaggaggccgagccccacaccgagcccgaggagcaggtgcccgtggaggccgagccccagaacatcgaggacgaggccaaggagcagatccagagcctgctgcacgagatggtgcacgccgagcacgagaccgagcacagctaccacgtggaggagaccgtgagccaggactgcaaccaggacatggaggagatgatgagcgagcaggagaaccccgacagcagcgagcccgtggtggaggacgagagactgcaccacgacaccgacgacgtgacctaccaggtgtacgaggagcaggccgtgtacgagcccctggagaacgagggcatcgagatcaccgaggtgaccgccccccccgaggacaaccccgtggaggacagccaggtgatcgtggaggaggtgagcatcttccccgtggaggagcagcaggaggtgccccccgacacctag

SEQ ID NO: 73394 - DNA, 2190 bp, synthetic construct
  misc_feature 1..2190: note = Description of Artificial Sequence: Synthetic coding sequence
  source 1..2190: mol_type = other DNA
atggccgaggacaaggagaccaagcacggcggccacaagaacggcagaaagggcggcctgagcggcaccagcttcttcacctggttcatggtgatcgccctgctgggcgtgtggaccagcgtggccgtggtgtggttcgacctggtggactacgaggaggtgctgggcaagctgggcatctacgacgccgacggcgacggcgacttcgacgtggacgacgccaaggtgctgctgggcctgaaggagagaagcaccagcgagcccgccgtgccccccgaggaggccgagccccacaccgagcccgaggagcaggtgcccgtggaggccgagccccagaacatcgaggacgaggccaaggagcagatccagagcctgctgcacgagatggtgcacgccgagcacgtggagggcgaggacctgcagcaggaggacggccccaccggcgagccccagcaggaggacgacgagttcctgatggccaccgacgtggacgacagattcgagaccctggagcccgaggtgagccacgaggagaccgagcacagctaccacgtggaggagaccgtgagccaggactgcaaccaggacatggaggagatgatgagcgagcaggagaaccccgacagcagcgagcccgtggtggaggacgagagactgcaccacgacaccgacgacgtgacctaccaggtgtacgaggagcaggccgtgtacgagcccctggagaacgagggcatcgagatcaccgaggtgaccgccccccccgaggacaaccccgtggaggacagccaggtgatcgtggaggaggtgagcatcttccccgtggaggagcagcaggaggtgccccccgagaccaacagaaagaccgacgaccccgagcagaaggccaaggtgaagaagaagaagcccaagctgctgaacaagttcgacaagaccatcaaggccgagctggacgccgccgagaagctgagaaagagaggcaagatcgaggaggccgtgaacgccttcaaggagctggtgagaaagtacccccagagccccagagccagatacggcaaggcccagtgcgaggacgacctggccgagaagagaagaagcaacgaggtgctgagaggcgccatcgagacctaccaggaggtggccagcctgcccgacgtgcccgccgacctgctgaagctgagcctgaagagaagaagcgacagacagcagttcctgggccacatgagaggcagcctgctgaccctgcagagactggtgcagctgttccccaacgacaccagcctgaagaacgacctgggcgtgggctacctgctgatcggcgacaacgacaacgccaagaaggtgtacgaggaggtgctgagcgtgacccccaacgacggcttcgccaaggtgcactacggcttcatcctgaaggcccagaacaagatcgccgagagcatcccctacctgaaggagggcatcgagagcggcgaccccggcaccgacgacggcagattctacttccacctgggcgacgccatgcagagagtgggcaacaaggaggcctacaagtggtacgagctgggccacaagagaggccacttcgccagcgtgtggcagagaagcctgtacaacgtgaacggcctgaaggcccagccctggtggacccccaaggagaccggctacaccgagctggtgaagagcctggagagaaactggaagctgatcagagacgagggcctggccgtgatggacaaggccaagggcctgttcctgcccgaggacgagaacctgagagagaagggcgactggagccagttcaccctgtggcagcagggcagaagaaacgagaacgcctgcaagggcgcccccaagacctgcaccctgctggagaagttccccgagaccaccggctgcagaagaggccagatcaagtacagcatcatgcaccccggcacccacgtgtggccccacaccggccccaccaactgcagactgagaatgcacctgggcctggtgatccccaaggagggctgcaagatcagatgcgccaacgagaccaagacctgggaggagggcaaggtgctgatcttcgacgacagcttcgagcacgaggtgtggcaggacgccagcagcttcagactgatcttcatcgtggacgtgtggcaccccgagctgaccccccagcagagaagaagcctgcccgccatctag

SEQ ID NO: 73395 - DNA, 1032 bp, synthetic construct
  misc_feature 1..1032: note = Description of Artificial Sequence: Synthetic coding sequence
  source 1..1032: mol_type = other DNA
atgggcagccccggcgccagcctgggcatcaagaaggccctgcagagcgagcaggccaccgccctgcccgccagcgcccccgccgtgagccagcccaccgcccccgcccccagctgcctgcccaaggccggccaggtgatccccaccctgctgagagaggcccccttcagcagcgtgatcgcccccaccctgctgtgcggcttcctgttcctggcctgggtggccgccgaggtgcccgaggagagcagcagaatggccggcagcggcgccagaagcgaggagggcagaagacagcacgccttcgtgcccgagcccttcgacggcgccaacgtggtgcccaacctgtggctgcacagcttcgaggtgatcaacgacctgaaccactgggaccacatcaccaagctgagattcctgaaggagagcctgagaggcgaggccctgggcgtgtacaacagactgagcccccaggaccagggcgactacggcaccgtgaaggaggccctgctgaaggccttcggcgtgcccggcgccgcccccagccacctgcccaaggagatcgtgttcgccaacagcatgggcaagggctactacctgaagggcaagatcggcaaggtgcccgtgagattcctggtggacagcggcgcccaggtgagcgtggtgcaccccaacctgtgggaggaggtgaccgacggcgacctggacaccctgcagcccttcgagaacgtggtgaaggtggccaacggcgccgagatgaagatcctgggcgtgtgggacaccgccgtgagcctgggcaagctgaagctgaaggcccagttcctggtggccaacgccagcgccgaggaggccatcatcggcaccgacgtgctgcaggaccacaacgccatcctggacttcgagcacagaacctgcaccctgaagggcaagaagttcagactgctgcccgtgggcggcagcctggaggacgagttcgacctggagctgatcgaggaggaccccagcagcgaggagggcagacaggagctgagccactag

SEQ ID NO: 73396 - DNA, 960 bp, synthetic construct
  misc_feature 1..960: note = Description of Artificial Sequence: Synthetic coding sequence
  source 1..960: mol_type = other DNA
atgtgcagcctgcccgtgcccagagagcccctgagaagagtggccgtgaccggcggcacccacggcaacgagatgagcggcgtgtacctggccagacactggctgcacgcccccgccgagctgcagagagccagcttcagcgccgtgcccgtgctggccaaccccgccgccaccagcggctgcagaagatacgtggaccacgacctgaacagaaccttcaccagcagcttcctgaacagcagacccacccccgacgacccctacgaggtgaccagagccagagagctgaaccagctgctgggccccaaggccagcggccaggccttcgacttcgtgctggacctgcacaacaccaccgccaacatgggcacctgcctgatcgccaagagcagccacgaggtgttcgccatgcacctgtgcagacacctgcagctgcagtaccccgagctgagctgccaggtgttcctgtaccagagaagcggcgaggagagctacaacctggacagcgtggccaagaacggcctgggcctggagctgggcccccagccccagggcgtgctgagagccgacatcttcagcagaatgagaaccctggtggccaccgtgctggacttcatcgagctgttcaaccagggcaccgccttccccgccttcgagatggaggcctacagacccgtgggcgtggtggacttccccagaaccgaggccggccacctggccggcaccgtgcacccccagctgcaggacagagacttccagcccctgcagcccggcgcccccatcttccagatgttcagcggcgaggacctgctgtacgagggcgagagcaccgtgtaccccgtgttcatcaacgaggccgcctactacgagaagggcgtggccttcgtgcagaccgagaagttcaccttcaccgtgcccgccatgcccgccctgacccccgcccccagccccgccagctag

SEQ ID NO: 73397 - DNA, 1041 bp, synthetic construct
  misc_feature 1..1041: note = Description of Artificial Sequence: Synthetic coding sequence
  source 1..1041: mol_type = other DNA
atggccagaaagagcaacctgcccgtgctgctggtgcccttcctgctgtgccaggccctggtgagatgcagcagccccctgcccctggtggtgaacacctggcccttcaagaacgccaccgaggccgcctggagagccctggccagcggcggcagcgccctggacgccgtggagagcggctgcgccatgtgcgagagagagcagtgcgacggcagcgtgggcttcggcggcagccccgacgagctgggcgagaccaccctggacgccatgatcatggacggcaccaccatggacgtgggcgccgtgggcgacctgagaagaatcaagaacgccatcggcgtggccagaaaggtgctggagcacaccacccacaccctgctggtgggcgagagcgccaccaccttcgcccagagcatgggcttcatcaacgaggacctgagcaccaccgccagccaggccctgcacagcgactggctggccagaaactgccagcccaactactggagaaacgtgatccccgaccccagcaagtactgcggcccctacaagccccccggcatcctgaagcaggacatccccatccacaaggagaccgaggacgacagaggccacgacaccatcggcatggtggtgatccacaagaccggccacatcgccgccggcaccagcaccaacggcatcaagttcaagatccacggcagagtgggcgacagccccatccccggcgccggcgcctacgccgacgacaccgccggcgccgccgccgccaccggcaacggcgacatcctgatgagattcctgcccagctaccaggccgtggagtacatgagaagaggcgaggaccccaccatcgcctgccagaaggtgatcagcagaatccagaagcacttccccgagttcttcggcgccgtgatctgcgccaacgtgaccggcagctacggcgccgcctgcaacaagctgagcaccttcacccagttcagcttcatggtgtacaacagcgagaagaaccagcccaccgaggagaaggtggactgcatctag

SEQ ID NO: 73398 - DNA, 573 bp, synthetic construct
  misc_feature 1..573: note = Description of Artificial Sequence: Synthetic coding sequence
  source 1..573: mol_type = other DNA
atggagagccagagactggagctgatcagactgatggagacccaggaggaggacgtggtgctgctgaccgccggcgagcacaacaaggcctgcagcctgctgggcaagctgagactggagtgcgccgacctgctggagaccagaggcgtggtgctgagagaccccaccctgttcagcttcctgtgggtggtggacttccccctgttcctgcccaaggaggagaaccccagagagctggagagcgcccaccaccccttcaccgccccccaccccagcgacatccacctgctgtacaccgagcccaagaaggaggacgtgaagatgctgagccacctgctgcaggccctggactacggcgcccccccccacggcggcatcgccctgggcctggacagactgatctgcctggtgaccggcagccccagcatcagagacgtgatcgccttccccaagagcttcagaggccacgacctgatgagcaacacccccgacagcgtgccccccgaggagctgaagccctaccacatcagagtgagcaagcccaccgacagcaaggccgagagagcccactag

SEQ ID NO: 73399 - DNA, 1938 bp, synthetic construct
  misc_feature 1..1938: note = Description of Artificial Sequence: Synthetic coding sequence
  source 1..1938: mol_type = other DNA
atgtacttccccagctggctgagccagctgtacagaggcctgagcagacccatcagaagaaccacccagcccatctggggcagcctgtacagaagcctgctgcagagcagccagagaagaatccccgagttcagcagcttcgtggtgagaaccaacacctgcggcgagctgagaagcagccacctgggccaggaggtgaccctgtgcggctggatccagtacagaagacagaacaccttcctggtgctgagagacttcgacggcctggtgcaggtgatcatcccccaggacgagagcgccgccagcgtgaagaagatcctgtgcgaggcccccgtggagagcgtggtgcaggtgagcggcaccgtgatcagcagacccgccggccaggagaaccccaagatgcccaccggcgagatcgagatcaaggtgaagaccgccgagctgctgaacgcctgcaagaagctgcccttcgagatcaagaacttcgtgaagaagaccgaggccctgagactgcagtacagatacctggacctgagaagcttccagatgcagtacaacctgagactgagaagccagatggtgatgaagatgagagagtacctgtgcaacctgcacggcttcgtggacatcgagacccccaccctgttcaagagaacccccggcggcgccaaggagttcctggtgcccagcagagagcccggcaagttctacagcctgccccagagcccccagcagttcaagcagctgctgatggtgggcggcctggacagatacttccaggtggccagatgctacagagacgagggcagcagacccgacagacagcccgagttcacccagatcgacatcgagatgagcttcgtggaccagaccggcatccagagcctgatcgagggcctgctgcagtacagctggcccaacgacaaggaccccgtggtggtgcccttccccaccatgaccttcgccgaggtgctggccacctacggcaccgacaagcccgacaccagattcggcatgaagatcatcgacatcagcgacgtgttcagaaacaccgagatcggcttcctgcaggacgccctgagcaagccccacggcaccgtgaaggccatctgcatccccgagggcgccaagtacctgaagagaaaggacatcgagagcatcagaaacttcgccgccgaccacttcaaccaggagatcctgcccgtgttcctgaacgccaacagaaactggaacagccccgtggccaacttcatcatggagagccagagactggagctgatcagactgatggagacccaggaggaggacgtggtgctgctgaccgccggcgagcacaacaaggcctgcagcctgctgggcaagctgagactggagtgcgccgacctgctggagaccagaggcgtggtgctgagagaccccaccctgttcagcttcctgtgggtggtggacttccccctgttcctgcccaaggaggagaaccccagagagctggagagcgcccaccaccccttcaccgccccccaccccagcgacatccacctgctgtacaccgagcccaagaaggccagaagccagcactacgacctggtgctgaacggcaacgagatcggcggcggcagcatcagaatccacaacgccgagctgcagagatacatcctggccaccctgctgaaggaggacgtgaagatgctgagccacctgctgcaggccctggactacggcgcccccccccacggcggcatcgccctgggcctggacagactgatctgcctggtgaccggcagccccagcatcagagacgtgatcgccttccccaagagcttcagaggccacgacctgatgagcaacacccccgacagcgtgccccccgaggagctgaagccctaccacatcagagtgagcaagcccaccgacagcaaggccgagagagcccactag

SEQ ID NO: 73400 - DNA, 1143 bp, synthetic construct
  misc_feature 1..1143: note = Description of Artificial Sequence: Synthetic coding sequence
  source 1..1143: mol_type = other DNA
atgaaggagtacgtgctgctgctgttcctggccctgtgcagcgccaagcccttcttcagccccagccacatcgccctgaagaacatgatgctgaaggacatggaggacaccgacgacgacgacgacgacgacgacgacgacgacgacgacgacgaggacaacagcctgttccccaccagagagcccagaagccacttcttccccttcgacctgttccccatgtgccccttcggctgccagtgctacagcagagtggtgcactgcagcgacctgggcctgaccagcgtgcccaccaacatccccttcgacaccagaatgctggacctgcagaacaacaagatcaaggagatcaaggagaacgacttcaagggcctgaccagcctgtacggcctgatcctgaacaacaacaagctgaccaagatccaccccaaggccttcctgaccaccaagaagctgagaagactgtacctgagccacaaccagctgagcgagatccccctgaacctgcccaagagcctggccgagctgagaatccacgagaacaaggtgaagaagatccagaaggacaccttcaagggcatgaacgccctgcacgtgctggagatgagcgccaaccccctggacaacaacggcatcgagcccggcgccttcgagggcgtgaccgtgttccacatcagaatcgccgaggccaagctgaccagcgtgcccaagggcctgccccccaccctgctggagctgcacctggactacaacaagatcagcaccgtggagctggaggacttcaagagatacaaggagctgcagagactgggcctgggcaacaacaagatcaccgacatcgagaacggcagcctggccaacatccccagagtgagagagatccacctggagaacaacaagctgaagaagatccccagcggcctgcccgagctgaagtacctgcagatcatcttcctgcacagcaacagcatcgccagagtgggcgtgaacgacttctgccccaccgtgcccaagatgaagaagagcctgtacagcgccatcagcctgttcaacaaccccgtgaagtactgggagatgcagcccgccaccttcagatgcgtgctgagcagaatgagcgtgcagctgggcaacttcggcatgtag

SEQ ID NO: 73401 - DNA, 732 bp, synthetic construct
  misc_feature 1..732: note = Description of Artificial Sequence: Synthetic coding sequence
  source 1..732: mol_type = other DNA
atgaaggagtacgtgctgctgctgttcctggccctgtgcagcgccaagcccttcttcagccccagccacatcgccctgaagaacatgatgctgaaggacatggaggacaccgacgacgacgacgacgacgacgacgacgacgacgacgacgacgaggacaacagcctgttccccaccagagagcccagaagccacttcttccccttcgacctgttccccatgtgccccttcggctgccagtgctacagcagagtggtgcactgcagcgacctgggcctgaccagcgtgcccaccaacatccccttcgacaccagaatgctggacctgcagaacaacaagatcaaggagatcaaggagaacgacttcaagggcctgaccagcctgtacggcctgatcctgaacaacaacaagctgaccaagatccaccccaaggccttcctgaccaccaagaagctgagaagactgtacctgagccacaaccagctgagcgagatccccctgaacctgcccaagagcctggccgagctgagaatccacgagaacaaggtgaagaagatccagaaggacaccttcaagggcatgaacgccctgcacgtgctggagatgagcgccaaccccctggacaacaacggcatcgagcccggcgccttcgagggcgtgaccgtgttccacatcagaatcgccgaggccaagctgaccagcgtgcccaaggtgaacctgccccagttctag

SEQ ID NO: 73402 - DNA, 243 bp, synthetic construct
  misc_feature 1..243: note = Description of Artificial Sequence: Synthetic coding sequence
  source 1..243: mol_type = other DNA
atgatgctgaaggacatggaggacaccgacgacgacgacgacgacgacgacgacgacgacgacgacgacgaggacaacagcctgttccccaccagagagcccagaagccacttcttccccttcgacctgttccccatgtgccccttcggctgccagtgctacagcagagtggtgcactgcagcgacctgggcctgaccagcgtgcccaccaacatccccctgatcctggagtgcctgatctag

SEQ ID NO: 73403 - DNA, 732 bp, synthetic construct
  misc_feature 1..732: note = Description of Artificial Sequence: Synthetic coding sequence
  source 1..732: mol_type = other DNA
atgaaggagtacgtgctgctgctgttcctggccctgtgcagcgccaagcccttcttcagccccagccacatcgccctgaagaacatgatgctgaaggacatggaggacaccgacgacgacgacgacgacgacgacgacgacgacgacgacgacgaggacaacagcctgttccccaccagagagcccagaagccacttcttccccttcgacctgttccccatgtgccccttcggctgccagtgctacagcagagtggtgcactgcagcgacctgggcctgaccagcgtgcccaccaacatccccttcgacaccagaatgctggacctgcagaacaacaagatcaaggagatcaaggagaacgacttcaagggcctgaccagcctgtacggcctgatcctgaacaacaacaagctgaccaagatccaccccaaggccttcctgaccaccaagaagctgagaagactgtacctgagccacaaccagctgagcgagatccccctgaacctgcccaagagcctggccgagctgagaatccacgagaacaaggtgaagaagatccagaaggacaccttcaagggcatgaacgccctgcacgtgctggagatgagcgccaaccccctggacaacaacggcatcgagcccggcgccttcgagggcgtgaccgtgttccacatcagaatcgccgaggccaagctgaccagcgtgcccaaggacaacctgcccagcttctag

SEQ ID NO: 73404 - DNA, 3885 bp, synthetic construct
  misc_feature 1..3885: note = Description of Artificial Sequence: Synthetic coding sequence
  source 1..3885: mol_type = other DNA
atggccctggccggcctgtgcgccctgctggcctgctgctggggccccgccgccgtgctggccaccgccgccggcgacgtggaccccagcaaggagctggagtgcaagctgaagagcatcaccgtgagcgccctgcccttcctgagagagaacgacctgagcatcatgcacagccccagcgccagcgagcccaagctgctgttcagcgtgagaaacgacttccccggcgagatggtggtggtggacgacctggagaacaccgagctgccctacttcgtgctggagatcagcggcaacaccgaggacatccccctggtgagatggagacagcagtggctggagaacggcaccctgctgttccacatccaccaccaggacggcgcccccagcctgcccggccaggaccccaccgaggagccccagcacgagagcgccgaggaggagctgagaatcctgcacatcagcgtgatgggcggcatgatcgccctgctgctgagcatcctgtgcctggtgatgatcctgtacaccagaagaagatggtgcaagagaagaagagtgccccagccccagaagagcgccagcgccgaggccgccaacgagatccactacatccccagcgtgctgatcggcggccacggcagagagagcctgagaaacgccagagtgcagggccacaacagcagcggcaccctgagcatcagagagacccccatcctggacggctacgagtacgacatcaccgacctgagacaccacctgcagagagagtgcatgaacggcggcgaggacttcgccagccaggtgaccagaaccctggacagcctgcagggctgcaacgagaagagcggcatggacctgacccccggcagcgacaacgccaagctgagcctgatgaacaagtacaaggacaacatcatcgccaccagccccgtggacagcaaccaccagcaggccaccctgctgagccacaccagcagcagccagagaaagagaatcaacaacaaggccagagccggcagcgccttcctgaaccccgagggcgacagcggcaccgaggccgagaacgacccccagctgaccttctacaccgaccccagcagaagcagaagaagaagcagagtgggcagccccagaagccccgtgaacaagaccaccctgaccctgatcagcatcaccagctgcgtgatcggcctggtgtgcagcagccacgtgaactgccccctggtggtgaagatcaccctgcacgtgcccgagcacctgatcgccgacggcagcagattcatcctgctggagggcagccagctggacgccagcgactggctgaaccccgcccaggtggtgctgttcagccagcagaacagcagcggcccctgggccatggacctgtgcgccagaagactgctggacccctgcgagcaccagtgcgaccccgagaccggcgagtgcctgtgctacgagggctacatgaaggaccccgtgcacaagcacctgtgcatcagaaacgagtggggcaccaaccagggcccctggccctacaccatcttccagagaggcttcgacctggtgctgggcgagcagcccagcgacaagatcttcagattcacctacaccctgggcgagggcatgtggctgcccctgagcaagagcttcgtgatcccccccgccgagctggccatcaaccccagcgccaagtgcaagaccgacatgaccgtgatggaggacgccgtggaggtgagagaggagctgatgaccagcagcagcttcgacagcctggaggtgctgctggacagcttcggccccgtgagagactgcagcaaggacaacggcggctgcagcaagaacttcagatgcatcagcgacagaaagctggacagcaccggctgcgtgtgccccagcggcctgagccccatgaaggacagcagcggctgctacgacagacacatcggcgtggactgcagcgacggcttcaacggcggctgcgagcagctgtgcctgcagcagatggcccccttccccgacgaccccaccctgtacaacatcctgatgttctgcggctgcatcgaggactacaagctgggcgtggacggcagaagctgccagctgatcaccgagacctgccccgagggcagcgactgcggcgagagcagagagctgcccatgaaccagaccctgttcggcgagatgttcttcggctacaacaaccacagcaaggaggtggccgccggccaggtgctgaagggcaccttcagacagaacaacttcgccagaggcctggaccagcagctgcccgacggcctggtggtggccaccgtgcccctggagaaccagtgcctggaggagatcagcgagcccacccccgaccccgacttcctgaccggcatggtgaacttcagcgaggtgagcggctaccccgtgctgcagcactggaaggtgagaagcgtgatgtaccacatcaagctgaaccaggtggccatcagccaggccctgagcaacgccctgcacagcctggacggcgccaccagcagagccgacttcgtggccctgctggaccagttcggcaaccactacatccaggaggccatctacggcttcgaggagagctgcagcatctggtaccccaacaagcaggtgcagagaagactgtggctggagtacgaggacatcagcaagggcaacagccccagcgacgagagcgaggagagagagagagaccccaaggtgctgaccttccccgagtacatcaccagcctgagcgacagcggcaccaagcacatggccgccggcgtgagaatggagtgccacagcaagggcagatgccccagcagctgccccctgtgccacgtgaccagcagccccgacacccccgccgagcccgtgctgctggaggtgaccaaggccgcccccatctacgagctggtgaccaacaaccagacccagagactgctgcaggaggccaccatgagcagcctgtggtgcagcggcaccggcgacgtgatcgaggactggtgcagatgcgacagcaccgccttcggcgccgacggcctgcccacctgcgcccccctgccccagcccgtgctgagactgagcaccgtgcacgagcccagcagcaccctggtggtgctggagtgggagcacagcgagccccccatcggcgtgcagatcgtggactacctgctgagacaggagaaggtgaccgacagaatggaccacagcaaggtggagaccgagaccgtgctgagcttcgtggacgacatcatcagcggcgccaagagcccctgcgccatgcccagccaggtgcccgacaagcagctgaccaccatcagcctgatcatcagatgcctggagcccgacaccatctacatgttcaccctgtggggcgtggacaacaccggcagaagaagcagacccagcgacgtgatcgtgaagaccccctgccccgtggtggacgacgtgaaggcccaggagatcgccgacaagatctacaacctgttcaacggctacaccagcggcaaggagcagcagaccgcctacaacaccctgctggacctgggcagccccaccctgcacagagtgctgtaccactacaaccagcactacgagagcttcggcgagttcacctggagatgcgaggacgagctgggccccagaaaggccggcctgatcctgagccagctgggcgacctgagcagctggtgcaacggcctgctgcaggagcccaagatcagcctgagaagaagcagcctgaagtacctgggctgcagatacagcgagatcaagccctacggcctggactgggccgagctgagcagagacctgagaaagacctgcgaggagcagaccctgagcatcccctacaacgactacggcgacagcaaggagatctag

SEQ ID NO: 73405 - DNA, 3909 bp, synthetic construct
  misc_feature 1..3909: note = Description of Artificial Sequence: Synthetic coding sequence
  source 1..3909: mol_type = other DNA
atggccctggccggcctgtgcgccctgctggcctgctgctggggccccgccgccgtgctggccaccgccgccggcgacgtggaccccagcaaggagctggagtgcaagctgaagagcatcaccgtgagcgccctgcccttcctgagagagaacgacctgagcatcatgcacagccccagcgccagcgagcccaagctgctgttcagcgtgagaaacgacttccccggcgagatggtggtggtggacgacctggagaacaccgagctgccctacttcgtgctggagatcagcggcaacaccgaggacatccccctggtgagatggagacagcagtggctggagaacggcaccctgctgttccacatccaccaccaggacggcgcccccagcctgcccggccaggaccccaccgaggagccccagcacgagagcgccgaggaggagctgagaatcctgcacatcagcgtgatgggcggcatgatcgccctgctgctgagcatcctgtgcctggtgatgatcctgtacaccagaagaagatggtgcaagagaagaagagtgccccagccccagaagagcgccagcgccgaggccgccaacgagatccactacatccccagcgtgctgatcggcggccacggcagagagagcctgagaaacgccagagtgcagggccacaacagcagcggcaccctgagcatcagagagacccccatcctggacggctacgagtacgacatcaccgacctgagacaccacctgcagagagagtgcatgaacggcggcgaggacttcgccagccaggtgaccagaaccctggacagcctgcagggctgcaacgagaagagcggcatggacctgacccccggcagcgacaacgccaagctgagcctgatgaacaagtacaaggacaacatcatcgccaccagccccgtggacagcaaccaccagcaggccaccctgctgagccacaccagcagcagccagagaaagagaatcaacaacaaggccagagccggcagcgccttcctgaaccccgagggcgacagcggcaccgaggccgagaacgacccccagctgaccttctacaccgaccccagcagaagcagaagaagaagcagagtgggcagccccagaagccccgtgaacaagaccaccctgaccctgatcagcatcaccagctgcgtgatcggcctggtgtgcagcagccacgtgaactgccccctggtggtgaagatcaccctgcacgtgcccgagcacctgatcgccgacggcagcagattcatcctgctggagggcagccagctggacgccagcgactggctgaaccccgcccaggtggtgctgttcagccagcagaacagcagcggcccctgggccatggacctgtgcgccagaagactgctggacccctgcgagcaccagtgcgaccccgagaccggcagaagagagcacagagccgccggcgagtgcctgtgctacgagggctacatgaaggaccccgtgcacaagcacctgtgcatcagaaacgagtggggcaccaaccagggcccctggccctacaccatcttccagagaggcttcgacctggtgctgggcgagcagcccagcgacaagatcttcagattcacctacaccctgggcgagggcatgtggctgcccctgagcaagagcttcgtgatcccccccgccgagctggccatcaaccccagcgccaagtgcaagaccgacatgaccgtgatggaggacgccgtggaggtgagagaggagctgatgaccagcagcagcttcgacagcctggaggtgctgctggacagcttcggccccgtgagagactgcagcaaggacaacggcggctgcagcaagaacttcagatgcatcagcgacagaaagctggacagcaccggctgcgtgtgccccagcggcctgagccccatgaaggacagcagcggctgctacgacagacacatcggcgtggactgcagcgacggcttcaacggcggctgcgagcagctgtgcctgcagcagatggcccccttccccgacgaccccaccctgtacaacatcctgatgttctgcggctgcatcgaggactacaagctgggcgtggacggcagaagctgccagctgatcaccgagacctgccccgagggcagcgactgcggcgagagcagagagctgcccatgaaccagaccctgttcggcgagatgttcttcggctacaacaaccacagcaaggaggtggccgccggccaggtgctgaagggcaccttcagacagaacaacttcgccagaggcctggaccagcagctgcccgacggcctggtggtggccaccgtgcccctggagaaccagtgcctggaggagatcagcgagcccacccccgaccccgacttcctgaccggcatggtgaacttcagcgaggtgagcggctaccccgtgctgcagcactggaaggtgagaagcgtgatgtaccacatcaagctgaaccaggtggccatcagccaggccctgagcaacgccctgcacagcctggacggcgccaccagcagagccgacttcgtggccctgctggaccagttcggcaaccactacatccaggaggccatctacggcttcgaggagagctgcagcatctggtaccccaacaagcaggtgcagagaagactgtggctggagtacgaggacatcagcaagggcaacagccccagcgacgagagcgaggagagagagagagaccccaaggtgctgaccttccccgagtacatcaccagcctgagcgacagcggcaccaagcacatggccgccggcgtgagaatggagtgccacagcaagggcagatgccccagcagctgccccctgtgccacgtgaccagcagccccgacacccccgccgagcccgtgctgctggaggtgaccaaggccgcccccatctacgagctggtgaccaacaaccagacccagagactgctgcaggaggccaccatgagcagcctgtggtgcagcggcaccggcgacgtgatcgaggactggtgcagatgcgacagcaccgccttcggcgccgacggcctgcccacctgcgcccccctgccccagcccgtgctgagactgagcaccgtgcacgagcccagcagcaccctggtggtgctggagtgggagcacagcgagccccccatcggcgtgcagatcgtggactacctgctgagacaggagaaggtgaccgacagaatggaccacagcaaggtggagaccgagaccgtgctgagcttcgtggacgacatcatcagcggcgccaagagcccctgcgccatgcccagccaggtgcccgacaagcagctgaccaccatcagcctgatcatcagatgcctggagcccgacaccatctacatgttcaccctgtggggcgtggacaacaccggcagaagaagcagacccagcgacgtgatcgtgaagaccccctgccccgtggtggacgacgtgaaggcccaggagatcgccgacaagatctacaacctgttcaacggctacaccagcggcaaggagcagcagaccgcctacaacaccctgctggacctgggcagccccaccctgcacagagtgctgtaccactacaaccagcactacgagagcttcggcgagttcacctggagatgcgaggacgagctgggccccagaaaggccggcctgatcctgagccagctgggcgacctgagcagctggtgcaacggcctgctgcaggagcccaagatcagcctgagaagaagcagcctgaagtacctgggctgcagatacagcgagatcaagccctacggcctggactgggccgagctgagcagagacctgagaaagacctgcgaggagcagaccctgagcatcccctacaacgactacggcgacagcaaggagatctag

SEQ ID NO: 73406 - DNA, 3651 bp, synthetic construct
  misc_feature 1..3651: note = Description of Artificial Sequence: Synthetic coding sequence
  source 1..3651: mol_type = other DNA
atggccctggccggcctgtgcgccctgctggcctgctgctggggccccgccgccgtgctggccaccgccgccggcgacgtggaccccagcaaggagctggagtgcaagctgaagagcatcaccgtgagcgccctgcccttcctgagagagaacgacctgagcatcatgcacagccccagcgccagcgagcccaagctgctgttcagcgtgagaaacgacttccccggcgagatggtggtggtggacgacctggagaacaccgagctgccctacttcgtgctggagatcagcggcaacaccgaggacatccccctggtgagatggagacagcagtggctggagaacggcaccctgctgttccacatccaccaccaggacggcgcccccagcctgcccggccaggaccccaccgaggagccccagcacgagagcgccgaggaggagctgagaatcctgcacatcagcgtgatgggcggcatgatcgccctgctgctgagcatcctgtgcctggtgatgatcctgtacaccagaagaagatggtgcaagagaagaagagtgccccagccccagaagagcgccagcgccgaggccgccaacgagatccactacatccccagcgtgctgatcggcggccacggcagagagagcctgagaaacgccagagtgcagggccacaacagcagcggcaccctgagcatcagagagacccccatcctggacggctacgagtacgacatcaccgacctgagacaccacctgcagagagagtgcatgaacggcggcgaggacttcgccagccaggtgaccagaaccctggacagcctgcagggctgcaacgagaagagcggcatggacctgacccccggcagcgacaacgccaagctgagcctgatgaacaagtacaaggacaacatcatcgccaccagccccgtggacagcaaccaccagcaggccaccctgctgagccacaccagcagcagccagagaaagagaatcaacaacaaggccagagccggcagcgccttcctgaaccccgagggcgacagcggcaccgaggccgagaacgacccccagctgaccttctacaccgaccccagcagaagcagaagaagaagcagagtgggcagccccagaagccccgtgaacaagaccaccctgaccctgatcagcatcaccagctgcgtgatcggcctggtgtgcagcagccacgtgaactgccccctggtggtgaagatcaccctgcacgtgcccgagcacctgatcgccgacggcagcagattcatcctgctggagggcagccagctggacgccagcgactggctgaaccccgcccaggtggtgctgttcagccagcagaacagcagcggcccctgggccatggacctgtgcgccagaagactgctggacccctgcgagcaccagtgcgaccccgagaccggcgagtgcctgtgctacgagggctacatgaaggaccccgtgcacaagcacctgtgcatcagaaacgagtggggcaccaaccagggcccctggccctacaccatcttccagagaggcttcgacctggtgctgggcgagcagcccagcgacaagatcttcagattcacctacaccctgggcgagggcatgtggctgcccctgagcaagagcttcgtgatcccccccgccgagctggccatcaaccccagcgccaagtgcaagaccgacatgaccgtgatggaggacgccgtggaggtgagagaggagctgatgaccagcagcagcttcgacagcctggaggtgctgctggacagcttcggccccgtgagagactgcagcaaggacaacggcggctgcagcaagaacttcagatgcatcagcgacagaaagctggacagcaccggctgcgtgtgccccagcggcctgagccccatgaaggacagcagcggctgctacgacagacacatcggcgtggactgcagcgacggcttcaacggcggctgcgagcagctgtgcctgcagcagatggcccccttccccgacgaccccaccctgtacaacatcctgatgttctgcggctgcatcgaggactacaagctgggcgtggacggcagaagctgccagctgatcaccgagacctgccccgagggcagcgactgcggcgagagcagagagctgcccatgaaccagaccctgttcggcgagatgttcttcggctacaacaaccacagcaaggaggtggccgccggccaggtgctgaagggcaccttcagacagaacaacttcgccagaggcctggaccagcagctgcccgacggcctggtggtggccaccgtgcccctggagaaccagtgcctggaggagatcagcgagcccacccccgaccccgacttcctgaccggcatggtgaacttcagcgaggtgagcggctaccccgtgctgcagcactggaaggtgagaagcgtgatgtaccacatcaagctgaaccaggtggccatcagccaggccctgagcaacgccctgcacagcctggacggcgccaccagcagagccgacttcgtggccctgctggaccagttcggcaaccactacatccaggaggccatctacggcttcgaggagagctgcagcatctggtaccccaacaagcaggtgcagagaagactgtggctggagtacgaggacatcagcaagggcaacagccccagcgacgagagcgaggagagagagagagaccccaaggtgctgaccttccccgagtacatcaccagcctgagcgacagcggcaccaagcacatggccgccggcgtgagaatggagtgccacagcaagggcagatgccccagcagctgccccctgtgccacgtgaccagcagccccgacacccccgccgagcccgtgctgctggaggtgaccaaggccgcccccatctacgagctggtgaccaacaaccagacccagagactgctgcaggaggccaccatgagcagcctgtggtgcagcggcaccggcgacgtgatcgaggactggtgcagatgcgacagcaccgccttcggcgccgacggcctgcccacctgcgcccccctgccccagcccgtgctgagactgagcaccgtgcacgagcccagcagcaccctggtggtgctggagtgggagcacagcgagccccccatcggcgtgcagatcgtggactacctgctgagacaggagaaggtgaccgacagaatggaccacagcaaggtggagaccgagaccgtgctgagcttcgtggacgacatcatcagcggcgccaagagcccctgcgccatgcccagccaggtgcccgacaagcagctgaccaccatcagcctgatcatcagatgcctggagcccgacaccatctacatgttcaccctgtggggcgtggacaacaccggcagaagaagcagacccagcgacgtgatcgtgaagaccccctgccccgtggtggacgacgtgaaggcccaggagatcgccgacaagatctacaacctgttcaacggctacaccagcggcaaggagcagcagaccgcctacaacaccctgctggacctgggcagccccaccctgcacagagtgctgtaccactacaaccagcactacgagagcttcggcgagttcacctggagatgcgaggacgagctgggccccagatag

SEQ ID NO: 73407 - DNA, 3657 bp, synthetic construct
  misc_feature 1..3657: note = Description of Artificial Sequence: Synthetic coding sequence
  source 1..3657: mol_type = other DNA
atggccctggccggcctgtgcgccctgctggcctgctgctggggccccgccgccgtgctggccaccgccgccggcgacgtggaccccagcaaggagctggagtgcaagctgaagagcatcaccgtgagcgccctgcccttcctgagagagaacgacctgagcatcatgcacagccccagcgccagcgagcccaagctgctgttcagcgtgagaaacgacttccccggcgagatggtggtggtggacgacctggagaacaccgagctgccctacttcgtgctggagatcagcggcaacaccgaggacatccccctggtgagatggagacagcagtggctggagaacggcaccctgctgttccacatccaccaccaggacggcgcccccagcctgcccggccaggaccccaccgaggagccccagcacgagagcgccgaggaggagctgagaatcctgcacatcagcgtgatgggcggcatgatcgccctgctgctgagcatcctgtgcctggtgatgatcctgtacaccagaagaagatggtgcaagagaagaagagtgccccagccccagaagagcgccagcgccgaggccgccaacgagatccactacatccccagcgtgctgatcggcggccacggcagagagagcctgagaaacgccagagtgcagggccacaacagcagcggcaccctgagcatcagagagacccccatcctggacggctacgagtacgacatcaccgacctgagacaccacctgcagagagagtgcatgaacggcggcgaggacttcgccagccaggtgaccagaaccctggacagcctgcagggctgcaacgagaagagcggcatggacctgacccccggcagcgacaacgccaagctgagcctgatgaacaagtacaaggacaacatcatcgccaccagccccgtggacagcaaccaccagcaggccaccctgctgagccacaccagcagcagccagagaaagagaatcaacaacaaggccagagccggcagcgccttcctgaaccccgagggcgacagcggcaccgaggccgagaacgacccccagctgaccttctacaccgaccccagcagaagcagaagaagaagcagagtgggcagccccagaagccccgtgaacaagaccaccctgaccctgatcagcatcaccagctgcgtgatcggcctggtgtgcagcagccacgtgaactgccccctggtggtgaagatcaccctgcacgtgcccgagcacctgatcgccgacggcagcagattcatcctgctggagggcagccagctggacgccagcgactggctgaaccccgcccaggtggtgctgttcagccagcagaacagcagcggcccctgggccatggacctgtgcgccagaagactgctggacccctgcgagcaccagtgcgaccccgagaccggcgagtgcctgtgctacgagggctacatgaaggaccccgtgcacaagcacctgtgcatcagaaacgagtggggcaccaaccagggcccctggccctacaccatcttccagagaggcttcgacctggtgctgggcgagcagcccagcgacaagatcttcagattcacctacaccctgggcgagggcatgtggctgcccctgagcaagagcttcgtgatcccccccgccgagctggccatcaaccccagcgccaagtgcaagaccgacatgaccgtgatggaggacgccgtggaggtgagagaggagctgatgaccagcagcagcttcgacagcctggaggtgctgctggacagcttcggccccgtgagagactgcagcaaggacaacggcggctgcagcaagaacttcagatgcatcagcgacagaaagctggacagcaccggctgcgtgtgccccagcggcctgagccccatgaaggacagcagcggctgctacgacagacacatcggcgtggactgcagcgacggcttcaacggcggctgcgagcagctgtgcctgcagcagatggcccccttccccgacgaccccaccctgtacaacatcctgatgttctgcggctgcatcgaggactacaagctgggcgtggacggcagaagctgccagctgatcaccgagacctgccccgagggcagcgactgcggcgagagcagagagctgcccatgaaccagaccctgttcggcgagatgttcttcggctacaacaaccacagcaaggaggtggccgccggccaggtgctgaagggcaccttcagacagaacaacttcgccagaggcctggaccagcagctgcccgacggcctggtggtggccaccgtgcccctggagaaccagtgcctggaggagatcagcgagcccacccccgaccccgacttcctgaccggcatggtgaacttcagcgaggtgagcggctaccccgtgctgcagcactggaaggtgagaagcgtgatgtaccacatcaagctgaaccaggtggccatcagccaggccctgagcaacgccctgcacagcctggacggcgccaccagcagagccgacttcgtggccctgctggaccagttcggcaaccactacatccaggaggccatctacggcttcgaggagagctgcagcatctggtaccccaacaagcaggtgcagagaagactgtggctggagtacgaggacatcagcaagggcaacagccccagcgacgagagcgaggagagagagagagaccccaaggtgctgaccttccccgagtacatcaccagcctgagcgacagcggcaccaagcacatggccgccggcgtgagaatggagtgccacagcaagggcagatgccccagcagctgccccctgtgccacgtgaccagcagccccgacacccccgccgagcccgtgctgctggaggtgaccaaggccgcccccatctacgagctggtgaccaacaaccagacccagagactgctgcaggaggccaccatgagcagcctgtggtgcagcggcaccggcgacgtgatcgaggactggtgcagatgcgacagcaccgccttcggcgccgacggcctgcccacctgcgcccccctgccccagcccgtgctgagactgagcaccgtgcacgagcccagcagcaccctggtggtgctggagtgggagcacagcgagccccccatcggcgtgcagatcgtggactacctgctgagacaggagaaggtgaccgacagaatggaccacagcaaggtggagaccgagaccgtgctgagcttcgtggacgacatcatcagcggcgccaagagcccctgcgccatgcccagccaggtgcccgacaagcagctgaccaccatcagcctgatcatcagatgcctggagcccgacaccatctacatgttcaccctgtggggcgtggacaacaccggcagaagaagcagacccagcgacgtgatcgtgaagaccccctgccccgtggtggacgacgtgaaggcccaggagatcgccgacaagatctacaacctgttcaacggctacaccagcggcaaggagcagcagaccgcctacaacaccctgctggacctgggcagccccaccctgcacagagtgctgtaccactacaaccagcactacgagagcttcggcgagttcacctggagatgcgaggacgagctgggccccagaaaccagtag

SEQ ID NO: 73408 - DNA, 1323 bp, synthetic construct
  misc_feature 1..1323: note = Description of Artificial Sequence: Synthetic coding sequence
  source 1..1323: mol_type = other DNA
atgaacaccctgctgtgcaagggcatgttctgcctgctgagctgggaggccgacagcagaggcagactgggcgagtacaccctgcagcccctgagcctgcagaccgaggagaccaccgagctgggcagcaagaaggagctgaagagcatgcccttcatcacctacctgagcggcctgctgaccgcccagatgctgagcgacgaccagctgatcagcggcgtggagatcagatgcgaggagaagggcagatgccccagcacctgccacctgtgcagaagacccggcaaggagcagctgagccccacccccgtgctgctggagatcaacagagtggtgcccctgtacaccctgatccaggacaacggcaccaaggaggccttcaagagcgccctgatgagcagctactggtgcagcggcaagggcgacgtgatcgacgactggtgcagatgcgacctgagcgccttcgacgccaacggcctgcccaactgcagccccctgctgcagcccgtgctgagactgagccccaccgtggagcccagcagcaccgtggtgagcctggagtgggtggacgtgcagcccgccatcggcaccaaggtgagcgactacatcctgcagcacaagaaggtggacgagtacaccgacaccgacctgtacaccggcgagttcctgagcttcgccgacgacctgctgagcggcctgggcaccagctgcgtggccgccggcagaagccacggcgaggtgcccgaggtgagcatctacagcgtgatcttcaagtgcctggagcccgacggcctgtacaagttcaccctgtacgccgtggacaccagaggcagacacagcgagctgagcaccgtgaccctgagaaccgcctgccccctggtggacgacaacaaggccgaggagatcgccgacaagatctacaacctgtacaacggctacaccagcggcaaggagcagcagatggcctacaacaccctgatggaggtgagcgccagcatgctgttcagagtgcagcaccactacaacagccactacgagaagttcggcgacttcgtgtggagaagcgaggacgagctgggccccagaaaggcccacctgatcctgagaagactggagagagtgagcagccactgcagcagcctgctgagaagcgcctacatccagagcagagtggagaccgtgccctacctgttctgcagaagcgaggaggtgagacccgccggcatggtgtggtacagcatcctgaaggacaccaagatcacctgcgaggagaagatggtgagcatggccagaaacacctacggcgagagcaagggcagatag

SEQ ID NO: 73409 - DNA, 4020 bp, synthetic construct
  misc_feature 1..4020: note = Description of Artificial Sequence: Synthetic coding sequence
  source 1..4020: mol_type = other DNA
atggccgccgccggcgccagactgagccccggccccggcagcggcctgagaggcagacccagactgtgcttccaccccggccccccccccctgctgcccctgctgctgctgttcctgctgctgctgccccccccccccctgctggccggcgccaccgccgccgccagcagagagcccgacagcccctgcagactgaagaccgtgaccgtgagcaccctgcccgccctgagagagagcgacatcggctggagcggcgccagagccggcgccggcgccggcaccggcgccggcgccgccgccgccgccgccagccccggcagccccggcagcgccggcaccgccgccgagagcagactgctgctgttcgtgagaaacgagctgcccggcagaatcgccgtgcaggacgacctggacaacaccgagctgcccttcttcaccctggagatgagcggcaccgccgccgacatcagcctggtgcactggagacagcagtggctggagaacggcaccctgtacttccacgtgagcatgagcagcagcggccagctggcccaggccaccgcccccaccctgcaggagcccagcgagatcgtggaggagcagatgcacatcctgcacatcagcgtgatgggcggcctgatcgccctgctgctgctgctgctggtgttcaccgtggccctgtacgcccagagaagatggcagaagagaagaagaatcccccagaagagcgccagcaccgaggccacccacgagatccactacatccccagcgtgctgctgggcccccaggccagagagagcttcagaagcagcagactgcagacccacaacagcgtgatcggcgtgcccatcagagagacccccatcctggacgactacgactgcgaggaggacgaggagccccccagaagagccaaccacgtgagcagagaggacgagttcggcagccaggtgacccacaccctggacagcctgggccaccccggcgaggagaaggtggacttcgagaagaaggccgccgccgaggccacccaggagaccgtggagagcctgatgcagaagttcaaggagagcttcagagccaacacccccatcgagatcggccagctgcagccccccctgagaagcaccagcgccggcaagagaaagagaagaagcaagagcagaggcggcatcagcttcggcagagccaagggcaccagcggcagcgaggccgacgacgagacccagctgaccttctacaccgagcagtacagaagcagaagaagaagcaagggcctgctgaagagccccgtgaacaagaccgccctgaccctgatcgccgtgagcagctgcatcctggccatggtgtgcggcagccagatgagctgccccctgaccgtgaaggtgaccctgcacgtgcccgagcacttcatcgccgacggcagcagcttcgtggtgagcgagggcagctacctggacatcagcgactggctgaaccccgccaagctgagcctgtactaccagatcaacgccaccagcccctgggtgagagacctgtgcggccagagaaccaccgacgcctgcgagcagctgtgcgaccccgagaccggcgagtgcagctgccacgagggctacgcccccgaccccgtgcacagacacctgtgcgtgagaagcgactggggccagagcgagggcccctggccctacaccaccctggagagaggctacgacctggtgaccggcgagcaggcccccgagaagatcctgagaagcaccttcagcctgggccagggcctgtggctgcccgtgagcaagagcttcgtggtgccccccgtggagctgagcatcaaccccctggccagctgcaagaccgacgtgctggtgaccgaggaccccgccgacgtgagagaggaggccatgctgagcacctacttcgagaccatcaacgacctgctgagcagcttcggccccgtgagagactgcagcagaaacaacggcggctgcaccagaaacttcaagtgcgtgagcgacagacaggtggacagcagcggctgcgtgtgccccgaggagctgaagcccatgaaggacggcagcggctgctacgaccacagcaagggcatcgactgcagcgacggcttcaacggcggctgcgagcagctgtgcctgcagcagaccctgcccctgccctacgacgccaccagcagcaccatcttcatgttctgcggctgcgtggaggagtacaagctggcccccgacggcaagagctgcctgatgctgagcgacgtgtgcgagggccccaagtgcctgaagcccgacagcaagttcaacgacaccctgttcggcgagatgctgcacggctacaacaacagaacccagcacgtgaaccagggccaggtgttccagatgaccttcagagagaacaacttcatcaaggacttcccccagctggccgacggcctgctggtgatccccctgcccgtggaggagcagtgcagaggcgtgctgagcgagcccctgcccgacctgcagctgctgaccggcgacatcagatacgacgaggccatgggctaccccatggtgcagcagtggagagtgagaagcaacctgtacagagtgaagctgagcaccatcaccctggccgccggcttcaccaacgtgctgaagatcctgaccaaggagagcagcagagaggagctgctgagcttcatccagcactacggcagccactacatcgccgaggccctgtacggcagcgagctgacctgcatcatccacttccccagcaagaaggtgcagcagcagctgtggctgcagtaccagaaggagaccaccgagctgggcagcaagaaggagctgaagagcatgcccttcatcacctacctgagcggcctgctgaccgcccagatgctgagcgacgaccagctgatcagcggcgtggagatcagatgcgaggagaagggcagatgccccagcacctgccacctgtgcagaagacccggcaaggagcagctgagccccacccccgtgctgctggagatcaacagagtggtgcccctgtacaccctgatccaggacaacggcaccaaggaggccttcaagagcgccctgatgagcagctactggtgcagcggcaagggcgacgtgatcgacgactggtgcagatgcgacctgagcgccttcgacgccaacggcctgcccaactgcagccccctgctgcagcccgtgctgagactgagccccaccgtggagcccagcagcaccgtggtgagcctggagtgggtggacgtgcagcccgccatcggcaccaaggtgagcgactacatcctgcagcacaagaaggtggacgagtacaccgacaccgacctgtacaccggcgagttcctgagcttcgccgacgacctgctgagcggcctgggcaccagctgcgtggccgccggcagaagccacggcgaggtgcccgaggtgagcatctacagcgtgatcttcaagtgcctggagcccgacggcctgtacaagttcaccctgtacgccgtggacaccagaggcagacacagcgagctgagcaccgtgaccctgagaaccgcctgccccctggtggacgacaacaaggccgaggagatcgccgacaagatctacaacctgtacaacggctacaccagcggcaaggagcagcagatggcctacaacaccctgatggaggtgagcgccagcatgctgttcagagtgcagcaccactacaacagccactacgagaagttcggcgacttcgtgtggagaagcgaggacgagctgggccccagaaaggcccacctgatcctgagaagactggagagagtgagcagccactgcagcagcctgctgagaagcgcctacatccagagcagagtggagaccgtgccctacctgttctgcagaagcgaggaggtgagacccgccggcatggtgtggtacagcatcctgaaggacaccaagatcacctgcgaggagaagatggtgagcatggccagaaacacctacggcgagagcaagggcagatag

SEQ ID NO: 73410 - DNA, 1188 bp, synthetic construct
  misc_feature 1..1188: note = Description of Artificial Sequence: Synthetic coding sequence
  source 1..1188: mol_type = other DNA
atgcccttcatcacctacctgagcggcctgctgaccgcccagatgctgagcgacgaccagctgatcagcggcgtggagatcagatgcgaggagaagggcagatgccccagcacctgccacctgtgcagaagacccggcaaggagcagctgagccccacccccgtgctgctggagatcaacagagtggtgcccctgtacaccctgatccaggacaacggcaccaaggaggccttcaagagcgccctgatgagcagctactggtgcagcggcaagggcgacgtgatcgacgactggtgcagatgcgacctgagcgccttcgacgccaacggcctgcccaactgcagccccctgctgcagcccgtgctgagactgagccccaccgtggagcccagcagcaccgtggtgagcctggagtgggtggacgtgcagcccgccatcggcaccaaggtgagcgactacatcctgcagcacaagaaggtggacgagtacaccgacaccgacctgtacaccggcgagttcctgagcttcgccgacgacctgctgagcggcctgggcaccagctgcgtggccgccggcagaagccacggcgaggtgcccgaggtgagcatctacagcgtgatcttcaagtgcctggagcccgacggcctgtacaagttcaccctgtacgccgtggacaccagaggcagacacagcgagctgagcaccgtgaccctgagaaccgcctgccccctggtggacgacaacaaggccgaggagatcgccgacaagatctacaacctgtacaacggctacaccagcggcaaggagcagcagatggcctacaacaccctgatggaggtgagcgccagcatgctgttcagagtgcagcaccactacaacagccactacgagaagttcggcgacttcgtgtggagaagcgaggacgagctgggccccagaaaggcccacctgatcctgagaagactggagagagtgagcagccactgcagcagcctgctgagaagcgcctacatccagagcagagtggagaccgtgccctacctgttctgcagaagcgaggaggtgagacccgccggcatggtgtggtacagcatcctgaaggacaccaagatcacctgcgaggagaagatggtgagcatggccagaaacacctactacctgaccctgagcaaggtgagccccttctag

SEQ ID NO: 73411 - DNA, 585 bp, synthetic construct
  misc_feature 1..585: note = Description of Artificial Sequence: Synthetic coding sequence
  source 1..585: mol_type = other DNA
atgcccttcatcacctacctgagcggcctgctgaccgcccagatgctgagcgacgaccagctgatcagcggcgtggagatcagatgcgaggagaagggcagatgccccagcacctgccacctgtgcagaagacccggcaaggagcagctgagccccacccccgtgctgctggagatcaacagagtggtgcccctgtacaccctgatccaggacaacggcaccaaggaggccttcaagagcgccctgatgagcagctactggtgcagcggcaagggcgacgtgatcgacgactggtgcagatgcgacctgagcgccttcgacgccaacggcctgcccaactgcagccccctgctgcagcccgtgctgagactgagccccaccgtggagcccagcagcaccgtggtgagcctggagtgggtggacgtgcagcccgccatcggcaccaaggtgagcgactacatcctgcagcacaagaaggtggacgagtacaccgacaccgacctgtacaccgtgtactgctggatcaccttcatcgacctgagaatcctgaaccagccctgcatccccggcatgaagcccacctag

SEQ ID NO: 73412 - DNA, 3867 bp, synthetic construct
  misc_feature 1..3867: note = Description of Artificial Sequence: Synthetic coding sequence
  source 1..3867: mol_type = other DNA
atggccgccgccggcgccagactgagccccggccccggcagcggcctgagaggcagacccagactgtgcttccaccccggccccccccccctgctgcccctgctgctgctgttcctgctgctgctgccccccccccccctgctggccggcgccaccgccgccgccagcagagagcccgacagcccctgcagactgaagaccgtgaccgtgagcaccctgcccgccctgagagagagcgacatcggctggagcggcgccagagccggcgccggcgccggcaccggcgccggcgccgccgccgccgccgccagccccggcagccccggcagcgccggcaccgccgccgagagcagactgctgctgttcgtgagaaacgagctgcccggcagaatcgccgtgcaggacgacctggacaacaccgagctgcccttcttcaccctggagatgagcggcaccgccgccgacatcagcctggtgcactggagacagcagtggctggagaacggcaccctgtacttccacgtgagcatgagcagcagcggccagctggcccaggccaccgcccccaccctgcaggagcccagcgagatcgtggaggagcagatgcacatcctgcacatcagcgtgatgggcggcctgatcgccctgctgctgctgctgctggtgttcaccgtggccctgtacgcccagagaagatggcagaagagaagaagaatcccccagaagagcgccagcaccgaggccacccacgagatccactacatccccagcgtgctgctgggcccccaggccagagagagcttcagaagcagcagactgcagacccacaacagcgtgatcggcgtgcccatcagagagacccccatcctggacgactacgactgcgaggaggacgaggagccccccagaagagccaaccacgtgagcagagaggacgagttcggcagccaggtgacccacaccctggacagcctgggccaccccggcgaggagaaggtggacttcgagaagaagggcggcatcagcttcggcagagccaagggcaccagcggcagcgaggccgacgacgagacccagctgaccttctacaccgagcagtacagaagcagaagaagaagcaagggcctgctgaagagccccgtgaacaagaccgccctgaccctgatcgccgtgagcagctgcatcctggccatggtgtgcggcagccagatgagctgccccctgaccgtgaaggtgaccctgcacgtgcccgagcacttcatcgccgacggcagcagcttcgtggtgagcgagggcagctacctggacatcagcgactggctgaaccccgccaagctgagcctgtactaccagatcaacgccaccagcccctgggtgagagacctgtgcggccagagaaccaccgacgcctgcgagcagctgtgcgaccccgagaccggcgagtgcagctgccacgagggctacgcccccgaccccgtgcacagacacctgtgcgtgagaagcgactggggccagagcgagggcccctggccctacaccaccctggagagaggctacgacctggtgaccggcgagcaggcccccgagaagatcctgagaagcaccttcagcctgggccagggcctgtggctgcccgtgagcaagagcttcgtggtgccccccgtggagctgagcatcaaccccctggccagctgcaagaccgacgtgctggtgaccgaggaccccgccgacgtgagagaggaggccatgctgagcacctacttcgagaccatcaacgacctgctgagcagcttcggccccgtgagagactgcagcagaaacaacggcggctgcaccagaaacttcaagtgcgtgagcgacagacaggtggacagcagcggctgcgtgtgccccgaggagctgaagcccatgaaggacggcagcggctgctacgaccacagcaagggcatcgactgcagcgacggcttcaacggcggctgcgagcagctgtgcctgcagcagaccctgcccctgccctacgacgccaccagcagcaccatcttcatgttctgcggctgcgtggaggagtacaagctggcccccgacggcaagagctgcctgatgctgagcgacgtgtgcgagggccccaagtgcctgaagcccgacagcaagttcaacgacaccctgttcggcgagatgctgcacggctacaacaacagaacccagcacgtgaaccagggccaggtgttccagatgaccttcagagagaacaacttcatcaaggacttcccccagctggccgacggcctgctggtgatccccctgcccgtggaggagcagtgcagaggcgtgctgagcgagcccctgcccgacctgcagctgctgaccggcgacatcagatacgacgaggccatgggctaccccatggtgcagcagtggagagtgagaagcaacctgtacagagtgaagctgagcaccatcaccctggccgccggcttcaccaacgtgctgaagatcctgaccaaggagagcagcagagaggagctgctgagcttcatccagcactacggcagccactacatcgccgaggccctgtacggcagcgagctgacctgcatcatccacttccccagcaagaaggtgcagcagcagctgtggctgcagtaccagaaggagaccaccgagctgggcagcaagaaggagctgaagagcatgcccttcatcacctacctgagcggcctgctgaccgcccagatgctgagcgacgaccagctgatcagcggcgtggagatcagatgcgaggagaagggcagatgccccagcacctgccacctgtgcagaagacccggcaaggagcagctgagccccacccccgtgctgctggagatcaacagagtggtgcccctgtacaccctgatccaggacaacggcaccaaggaggccttcaagagcgccctgatgagcagctactggtgcagcggcaagggcgacgtgatcgacgactggtgcagatgcgacctgagcgccttcgacgccaacggcctgcccaactgcagccccctgctgcagcccgtgctgagactgagccccaccgtggagcccagcagcaccgtggtgagcctggagtgggtggacgtgcagcccgccatcggcaccaaggtgagcgactacatcctgcagcacaagaaggtggacgagtacaccgacaccgacctgtacaccggcgagttcctgagcttcgccgacgacctgctgagcggcctgggcaccagctgcgtggccgccggcagaagccacggcgaggtgcccgaggtgagcatctacagcgtgatcttcaagtgcctggagcccgacggcctgtacaagttcaccctgtacgccgtggacaccagaggcagacacagcgagctgagcaccgtgaccctgagaaccgcctgccccctggtggacgacaacaaggccgaggagatcgccgacaagatctacaacctgtacaacggctacaccagcggcaaggagcagcagatggcctacaacaccctgatggaggtgagcgccagcatgctgttcagagtgcagcaccactacaacagccactacgagaagttcggcgacttcgtgtggagaagcgaggacgagctgggccccagaaaggcccacctgatcctgagaagactggagagagtgagcagccactgcagcagcctgctgagaagcgcctacatccagagcagagtggagaccgtgccctacctgttctgcagaagcgaggaggtgagacccgccggcatggtgtggtacagcatcctgaaggacaccaagatcacctgcgaggagaagatggtgagcatggccagaaacacctacggcgagagcaagggcagatag

SEQ ID NO: 73413 - DNA, 1188 bp, synthetic construct; identical to SEQ ID NO: 73410
  misc_feature 1..1188: note = Description of Artificial Sequence: Synthetic coding sequence
  source 1..1188: mol_type = other DNA

SEQ ID NO: 73414 - DNA, 4008 bp, synthetic construct
  misc_feature 1..4008: note = Description of Artificial Sequence: Synthetic coding sequence
  source 1..4008: mol_type = other DNA
atggccgccgccggcgccagactgagccccggccccggcagcggcctgagaggcagacccagactgtgcttccaccccggccccccccccctgctgcccctgctgctgctgttcctgctgctgctgccccccccccccctgctggccggcgccaccgccgccgccagcagagagcccgacagcccctgcagactgaagaccgtgaccgtgagcaccctgcccgccctgagagagagcgacatcggctggagcggcgccagagccggcgccggcgccggcaccggcgccggcgccgccgccgccgccgccagccccggcagccccggcagcgccggcaccgccgccgagagcagactgctgctgttcgtgagaaacgagctgcccggcagaatcgccgtgcaggacgacctggacaacaccgagctgcccttcttcaccctggagatgagcggcaccgccgccgacatcagcctggtgcactggagacagcagtggctggagaacggcaccctgtacttccacgtgagcatgagcagcagcggccagctggcccaggccaccgcccccaccctgcaggagcccagcgagatcgtggaggagcagatgcacatcctgcacatcagcgtgatgggcggcctgatcgccctgctgctgctgctgctggtgttcaccgtggccctgtacgcccagagaagatggcagaagagaagaagaatcccccagaagagcgccagcaccgaggccacccacgagatccactacatccccagcgtgctgctgggcccccaggccagagagagcttcagaagcagcagactgcagacccacaacagcgtgatcggcgtgcccatcagagagacccccatcctggacgactacgactgcgaggaggacgaggagccccccagaagagccaaccacgtgagcagagaggacgagttcggcagccaggtgacccacaccctggacagcctgggccaccccggcgaggagaaggtggacttcgagaagaaggccgccgccgaggccacccaggagaccgtggagagcctgatgcagaagttcaaggagagcttcagagccaacacccccatcgagatcggccagctgcagccccccctgagaagcaccagcgccggcaagagaaagagaagaagcaagagcagaggcggcatcagcttcggcagagccaagggcaccagcggcagcgaggccgacgacgagacccagctgaccttctacaccgagcagtacagaagcagaagaagaagcaagggcctgctgaagagccccgtgaacaagaccgccctgaccctgatcgccgtgagcagctgcatcctggccatggtgtgcggcagccagatgagctgccccctgaccgtgaaggtgaccctgcacgtgcccgagcacttcatcgccgacggcagcagcttcgtggtgagcgagggcagctacctggacatcagcgactggctgaaccccgccaagctgagcctgtactaccagatcaacgccaccagcccctgggtgagagacctgtgcggccagagaaccaccgacgcctgcgagcagctgtgcgaccccgagaccggcgagtgcagctgccacgagggctacgcccccgaccccgtgcacagacacctgtgcgtgagaagcgactggggccagagcgagggcccctggccctacaccaccctggagagaggctacgacctggtgaccggcgagcaggcccccgagaagatcctgagcctgggccagggcctgtggctgcccgtgagcaagagcttcgtggtgccccccgtggagctgagcatcaaccccctggccagctgcaagaccgacgtgctggtgaccgaggaccccgccgacgtgagagaggaggccatgctgagcacctacttcgagaccatcaacgacctgctgagcagcttcggccccgtgagagactgcagcagaaacaacggcggctgcaccagaaacttcaagtgcgtgagcgacagacaggtggacagcagcggctgcgtgtgccccgaggagctgaagcccatgaaggacggcagcggctgctacgaccacagcaagggcatcgactgcagcgacggcttcaacggcggctgcgagcagctgtgcctgcagcagaccctgcccctgccctacgacgccaccagcagcaccatcttcatgttctgcggctgcgtggaggagtacaagctggcccccgacggcaagagctgcctgatgctgagcgacgtgtgcgagggccccaagtgcctgaagcccgacagcaagttcaacgacaccctgttcggcgagatgctgcacggctacaacaacagaacccagcacgtgaaccagggccaggtgttccagatgaccttcagagagaacaacttcatcaaggacttcccccagctggccgacggcctgctggtgatccccctgcccgtggaggagcagtgcagaggcgtgctgagcgagcccctgcccgacctgcagctgctgaccggcgacatcagatacgacgaggccatgggctaccccatggtgcagcagtggagagtgagaagcaacctgtacagagtgaagctgagcaccatcaccctggccgccggcttcaccaacgtgctgaagatcctgaccaaggagagcagcagagaggagctgctgagcttcatccagcactacggcagccactacatcgccgaggccctgtacggcagcgagctgacctgcatcatccacttccccagcaagaaggtgcagcagcagctgtggctgcagtaccagaaggagaccaccgagctgggcagcaagaaggagctgaagagcatgcccttcatcacctacctgagcggcctgctgaccgcccagatgctgagcgacgaccagctgatcagcggcgtggagatcagatgcgaggagaagggcagatgccccagcacctgccacctgtgcagaagacccggcaaggagcagctgagccccacccccgtgctgctggagatcaacagagtggtgcccctgtacaccctgatccaggacaacggcaccaaggaggccttcaagagcgccctgatgagcagctactggtgcagcggcaagggcgacgtgatcgacgactggtgcagatgcgacctgagcgccttcgacgccaacggcctgcccaactgcagccccctgctgcagcccgtgctgagactgagccccaccgtggagcccagcagcaccgtggtgagcctggagtgggtggacgtgcagcccgccatcggcaccaaggtgagcgactacatcctgcagcacaagaaggtggacgagtacaccgacaccgacctgtacaccggcgagttcctgagcttcgccgacgacctgctgagcggcctgggcaccagctgcgtggccgccggcagaagccacggcgaggtgcccgaggtgagcatctacagcgtgatcttcaagtgcctggagcccgacggcctgtacaagttcaccctgtacgccgtggacaccagaggcagacacagcgagctgagcaccgtgaccctgagaaccgcctgccccctggtggacgacaacaaggccgaggagatcgccgacaagatctacaacctgtacaacggctacaccagcggcaaggagcagcagatggcctacaacaccctgatggaggtgagcgccagcatgctgttcagagtgcagcaccactacaacagccactacgagaagttcggcgacttcgtgtggagaagcgaggacgagctgggccccagaaaggcccacctgatcctgagaagactggagagagtgagcagccactgcagcagcctgctgagaagcgcctacatccagagcagagtggagaccgtgccctacctgttctgcagaagcgaggaggtgagacccgccggcatggtgtggtacagcatcctgaaggacaccaagatcacctgcgaggagaagatggtgagcatggccagaaacacctacggcgagagcaagggcagatag

SEQ ID NO: 73415 - DNA, 297 bp, synthetic construct
  misc_feature 1..297: note = Description of Artificial Sequence: Synthetic coding sequence
  source 1..297: mol_type = other DNA
tgaatggcctacaacaccctgatggaggtgagcgccagcatgctgttcagagtgcagcaccactacaacagccactacgagaagttcggcgacttcgtgtggagaagcgaggacgagctgggccccagcctgctggagagcttcatgagcctgcaggacatcaacctgctggagagaagacccggcagaccccagagacccggcaaccccctgagcaacgtgagctggagaatcagcgagatcgcccccaccagccacaccgacatgagcgccggcatcaaggagaccgccagctag

SEQ ID NO: 73416 - DNA, 6828 bp, synthetic construct
  misc_feature 1..6828: note = Description of Artificial Sequence: Synthetic coding sequence
  source 1..6828: mol_type = other DNA
atggccgccgagagaagatgcggcagcatgagagacctgagagcccaggtgaccagcggcctgctgcccttccccgaggtgaccctgcaggccctgggcgaggacgagatcaccctggagagcgtgctgagaggcaagttcgccgccggcaagaacggcctggcctgcctggcctgcggcccccagctggaggtggtgaacagcatcaccggcgagagactgagcgcctacagattcagcggcgtgaacgagcagccccccgtggtgctggccgtgaaggagttcagctggcagaagagaaccggcctgctgatcggcctggaggagaccgagggcagcgtgctgtgcctgtacgacctgggcatcagcaaggtggtgaaggccgtggtgctgcccggcagagtgaccgccatcgagcccatcatcaaccacggcggcgccagcgccagcacccagcacctgcaccccagcctgagatggctgttcggcgtggccgccgtggtgaccgacgtgggccagatcctgctggtggacctgtgcctggacgacctgagctgcaaccagaacgaggtggaggccagcgacctggaggtgctgaccggcatccccgccgaggtgccccacatcagagagagcgtgatgagacagggcagacacctgtgcttccagctggtgagccccaccggcaccgccgtgagcaccctgagctacatcagcagaaccaaccagctggccgtgggcttcagcgacggctacctggccctgtggaacatgaagagcatgaagagagagtactacatccagctggagagcggccaggtgcccgtgtacgccgtgaccttccaggagcccgagaacgaccccagaaactgctgctacctgtgggccgtgcagagcacccaggacagcgagggcgacgtgctgagcctgcacctgctgcagctggccttcggcaacagaaagtgcctggccagcggccagatcctgtacgagggcctggagtactgcgaggagagatacaccctggacctgaccggcggcatgttccccctgagaggccagaccagcaacaccaagctgctgggctgccagagcatcgagaagttcagaagccacggcgacagagaggagggcgtgaacgaggccctgagccccgacaccagcgtgagcgtgttcacctggcaggtgaacatctacggccagggcaagcccagcgtgtacctgggcctgttcgacatcaacagatggtaccacgcccagatgcccgacagcctgagaagcggcgagtacctgcacaactgcagctacttcgccctgtggagcctggagagcgtggtgagcagaaccagcccccacggcatcctggacatcctggtgcacgagagaagcctgaacagaggcgtgccccccagctaccccccccccgagcagttcttcaaccccagcacctacaacttcgacgccacctgcctgctgaacagcggcgtggtgcacctgacctgcaccggcttccagaaggagaccctgaccttcctgaagaagagcggccccagcctgaacgagctgatccccgacggctacaacagatgcctggtggccggcctgctgagccccagattcgtggacgtgcagcccagcagcctgagccaggaggagcagctggaggccatcctgagcgccgccatccagaccagcagcctgggcctgctgaccggctacatcagaagatggatcaccgaggagcagcccaacagcgccaccaacctgagattcgtgctggagtggacctggaacaaggtggtgctgaccaaggaggagttcgacagactgtgcgtgcccctgttcgacggcagctgccacttcatggacccccagaccatccagagcatccagcagtgctacctgctgctgagcaacctgaacatcgtgctgagctgcttcgccagcgaggccagagagatcaccgagagaggcctgatcgacctgagcaacaagttcgtggtgagccacctgatctgccagtacgcccaggtggtgctgtggttcagccacagcggcctgctgcccgagggcatcgacgacagcgtgcagctgagcagactgtgctacaactaccccgtgatccagaactactacaccagcagaagacagaagttcgagagactgagcagaggcaagtggaaccccgactgcctgatgatcgacggcctggtgagccagctgggcgagagaatcgagaagctgtggaagagagacgagggcggcaccggcaagtacccccccgccagcctgcacgccgtgctggacatgtacctgctggacggcgtgaccgaggccgccaagcacagcatcaccatctacctgctgctggacatcatgtacagcttccccaacaagaccgacacccccatcgagagcttccccaccgtgttcgccatcagctggggccaggtgaagctgatccagggcttctggctgatcgaccacaacgactacgagagcggcctggacctgctgttccaccccgccaccgccaagcccctgagctggcagcacagcaagatcatccaggccttcatgagccagggcgagcacagacaggccctgagatacatccagaccatgaagcccaccgtgagcagcggcaacgacgtgatcctgcacctgaccgtgctgctgttcaacagatgcatggtggaggcctggaacttcctgagacagcactgcaacagactgaacatcgaggagctgctgaagcacatgtacgaggtgtgccaggagatgggcctgatggaggacctgctgaagctgcccttcaccgacaccgagcaggagtgcctggtgaagttcctgcagagcagcgccagcgtgcagaaccacgagttcctgctggtgcaccacctgcagagagccaactacgtgcccgccctgaagctgaaccagaccctgaagatcaacgtgatgaacgacagagaccccagactgagagagagaagcctggccagaaacagcatcctggaccagtacggcaagatcctgcccagagtgcacagaaagctggccatcgagagagccaagccctaccacctgagcaccagcagcgtgttcagactggtgagcagacccaagcccctgagcgccgtgcccaagcaggtggtgaccggcaccgtgctgaccagaagcgtgttcatcaacaacgtgctgagcaagatcggcgaggtgtgggccagcaaggagcccatcaacagcaccacccccttcaacagcagcaagatcgaggagcccagccccatcgtgtacagcctgcccgcccccgagctgcccgaggccttcttcggcacccccatcagcaaggccagccagaagatcagcagactgctggacctggtggtgcagcccgtgcccagacccagccagtgcagcgagttcatccagcagagcagcatgaagagccccctgtacctggtgagcagaagcctgcccagcagcagccagctgaagggcagcccccaggccatcagcagagccagcgagctgcacctgctggagacccccctggtggtgaagaaggccaagagcctggccatgagcgtgaccaccagcggcttcagcgagttcaccccccagagcatcctgagaagcaccctgagaagcacccccctggccagccccagccccagccccggcagaagcccccagagactgaaggagaccagaatcagcttcgtggaggaggacgtgcaccccaagtggatccccggcgccgccgacgacagcaagctggaggtgttcaccacccccaagaagtgcgccgtgcccgtggagaccgagtggctgaagagcaaggacagaaccaccagcttcttcctgaacagccccgagaaggagcaccaggagatggacgagggcagccagagcctggagaagctggacgtgagcaagggcaacagcagcgtgagcatcaccagcgacgagaccaccctggagtaccaggacgcccccagccccgaggacctggaggagaccgtgttcaccgccagcaagcccaagagcagcagcaccgccctgaccaccaacgtgaccgagcagaccgagaaggacggcgacaaggacgtgttcgccagcgaggtgacccccagcgacctgcagaagcagatgggcaacctggaggacgccgagaccaaggacctgctggtggccgccgaggccttcagcgagctgaaccacctgagccccgtgcagggcaccgaggccagcctgtgcgcccccagcgtgtacgagggcaagatcttcacccagaagagcaaggtgcccgtgctggacgagggcctgaccagcgtggagacctacacccccgccatcagagccaacgacaacaagagcatggccgacgtgctgggcgacggcggcaacagcagcctgaccatcagcgagggccccatcgtgagcgagagaagactgaaccaggaggtggccctgaacctgaaggaggaccacgaggtggaggtgggcgtgctgaaggagagcgtggacctgcccgaggagaagctgcccatcagcgacagcccccccgacacccaggagatccacgtgatcgagcaggagaagctggaggcccaggacagcggcgaggaggccagaaacctgagcttcaacgagctgtaccccagcggcaccctgaagctgcagtacaacttcgacaccatcgaccagcagttctgcgacctggccgacaacaaggacaccgccgagtgcgacatcgccgaggtggacggcgagctgttcgtggcccagagcaacttcaccctgatcctggagggcgaggagggcgaggtggagcccggcgacttcgccagcagcgacgtgctgcccaaggccgccaacaccgccaccgaggagaagctggtgtgcagcggcgagaacgacaaccacggccagatcgccaacctgcccagcgccgtgaccagcgaccagaagagccagaaggtggacaccctgccctacgtgcccgagcccatcaaggtggccatcgccgagaacctgctggacgtgatcaaggacaccagaagcaaggagatcaccagcgacaccatggagcagagcatccacgagaccatccccctggtgagccagaacatcatgtgccccaccaagctggtgaagagcgccttcaagaccgcccaggagaccagcaccatgaccatgaacgtgagccaggtggacgacgtggtgagcagcaagaccagaaccagaggccagagaatccagaacgtgaacgtgaagagcgcccagcaggaggccagcgccgacgtggccacccccaagatgcccggccagagcgtgagaaagaagaccagaaaggccaaggagatcagcgaggccagcgagaacatctacagcgacgtgagaggcctgagccagaaccagcagatcccccagaacagcgtgacccccagaagaggcagaagaaagaaggaggtgaaccaggacatcctggagaacaccagcagcgtggagcaggagctgcagatcaccaccggcagagagagcaagagactgaagagcagccagctgctggagcccgccgtggaggagaccaccaagaaggaggtgaaggtgagcagcgtgaccaagagaacccccagaagaatcaagagaagcgtggagaaccaggagagcgtggagatcatcaacgacctgaaggtgagcaccgtgaccagccccagcagaatgatcagaaagctgagaagcaccaacctggacgccagcgagaacaccggcaacaagcaggacgacaagagcagcgacaagcagctgagaatcaagcacgtgagaagagtgagaggcagagaggtgagccccagcgacgtgagagaggacagcaacctggagagcagccagctgaccgtgcaggccgagttcgacatgagcgccatccccagaaagagaggcagacccagaaagatcaaccccagcgaggacgtgggcagcaaggccgtgaaggaggagagaagccccaagaagaaggaggcccccagcatcagaagaagaagcaccagaaacacccccgccaagagcgagaacgtggacgtgggcaagcccgccctgggcaagagcatcctggtgcccaacgaggagctgagcatggtgatgagcagcaagaagaagctgaccaagaagaccgagagccagagccagaagagaagcctgcacagcgtgagcgaggagagaaccgacgagatgacccacaaggagaccaacgagcaggaggagagactgctggccaccgccagcttcaccaagagcagcagaagcagcagaaccagaagcagcaaggccatcctgctgcccgacctgagcgagcccaacaacgagcccctgttcagccccgccagcgaggtgcccagaaaggccaaggccaagaagatcgaggtgcccgcccagctgaaggagctggtgagcgacctgagcagccagttcgtgatcagcccccccgccctgagaagcagacagaagaacaccagcaacaagaacaagctggaggacgagctgaaggacgacgcccagagcgtggagaccctgggcaagcccaaggccaagagaatcagaaccagcaagaccaagcaggccagcaagaacaccgagaaggagagcgcctggagccccccccccatcgagatcagactgatcagccccctggccagccccgccgacggcgtgaagagcaagcccagaaagaccaccgaggtgaccggcaccggcctgggcagaaacagaaagaagctgagcagctaccccaagcagatcctgagaagaaagatgctgtag

SEQ ID NO: 73417 - DNA, 6906 bp, synthetic construct
  misc_feature 1..6906: note = Description of Artificial Sequence: Synthetic coding sequence
  source 1..6906: mol_type = other DNA
atggacagcctggccggcctgagccccagagaggccgccggcgtgctgagcctgagctgcgtgggcgtgtgcagcacctgcgcctgggcctggccccacggcagcatgagagacctgagagcccaggtgaccagcggcctgctgcccttccccgaggtgaccctgcaggccctgggcgaggacgagatcaccctggagagcgtgctgagaggcaagttcgccgccggcaagaacggcctggcctgcctggcctgcggcccccagctggaggtggtgaacagcatcaccggcgagagactgagcgcctacagattcagcggcgtgaacgagcagccccccgtggtgctggccgtgaaggagttcagctggcagaagagaaccggcctgctgatcggcctggaggagaccgagggcagcgtgctgtgcctgtacgacctgggcatcagcaaggtggtgaaggccgtggtgctgcccggcagagtgaccgccatcgagcccatcatcaaccacggcggcgccagcgccagcacccagcacctgcaccccagcctgagatggctgttcggcgtggccgccgtggtgaccgacgtgggccagatcctgctggtggacctgtgcctggacgacctgagctgcaaccagaacgaggtggaggccagcgacctggaggtgctgaccggcatccccgccgaggtgccccacatcagagagagcgtgatgagacagggcagacacctgtgcttccagctggtgagccccaccggcaccgccgtgagcaccctgagctacatcagcagaaccaaccagctggccgtgggcttcagcgacggctacctggccctgtggaacatgaagagcatgaagagagagtactacatccagctggagagcggccaggtgcccgtgtacgccgtgaccttccaggagcccgagaacgaccccagaaactgctgctacctgtgggccgtgcagagcacccaggacagcgagggcgacgtgctgagcctgcacctgctgcagctggccttcggcaacagaaagtgcctggccagcggccagatcctgtacgagggcctggagtactgcgaggagagatacaccctggacctgaccggcggcatgttccccctgagaggccagaccagcaacaccaagctgctgggctgccagagcatcgagaagttcagaagccacggcgacagagaggagggcgtgaacgaggccctgagccccgacaccagcgtgagcgtgttcacctggcaggtgaacatctacggccagggcaagcccagcgtgtacctgggcctgttcgacatcaacagatggtaccacgcccagatgcccgacagcctgagaagcggcgagtacctgcacaactgcagctacttcgccctgtggagcctggagagcgtggtgagcagaaccagcccccacggcatcctggacatcctggtgcacgagagaagcctgaacagaggcgtgccccccagctaccccccccccgagcagttcttcaaccccagcacctacaacttcgacgccacctgcctgctgaacagcggcgtggtgcacctgacctgcaccggcttccagaaggagaccctgaccttcctgaagaagagcggccccagcctgaacgagctgatccccgacggctacaacagatgcctggtggccggcctgctgagccccagattcgtggacgtgcagcccagcagcctgagccaggaggagcagctggaggccatcctgagcgccgccatccagaccagcagcctgggcctgctgaccggctacatcagaagatggatcaccgaggagcagcccaacagcgccaccaacctgagattcgtgctggagtggacctggaacaaggtggtgctgaccaaggaggagttcgacagactgtgcgtgcccctgttcgacggcagctgccacttcatggacccccagaccatccagagcatccagcagtgctacctgctgctgagcaacctgaacatcgtgctgagctgcttcgccagcgaggccagagagatcaccgagagaggcctgatcgacctgagcaacaagttcgtggtgagccacctgatctgccagtacgcccaggtggtgctgtggttcagccacagcggcctgctgcccgagggcatcgacgacagcgtgcagctgagcagactgtgctacaactaccccgtgatccagaactactacaccagcagaagacagaagttcgagagactgagcagaggcaagtggaaccccgactgcctgatgatcgacggcctggtgagccagctgggcgagagaatcgagaagctgtggaagagagacgagggcggcaccggcaagtacccccccgccagcctgcacgccgtgctggacatgtacctgctggacggcgtgaccgaggccgccaagcacagcatcaccatctacctgctgctggacatcatgtacagcttccccaacaagaccgacacccccatcgagagcttccccaccgtgttcgccatcagctggggccaggtgaagctgatccagggcttctggctgatcgaccacaacgactacgagagcggcctggacctgctgttccaccccgccaccgccaagcccctgagctggcagcacagcaagatcatccaggccttcatgagccagggcgagcacagacaggccctgagatacatccagaccatgaagcccaccgtgagcagcggcaacgacgtgatcctgcacctgaccgtgctgctgttcaacagatgcatggtggaggcctggaacttcctgagacagcactgcaacagactgaacatcgaggagctgctgaagcacatgtacgaggtgtgccaggagatgggcctgatggaggacctgctgaagctgcccttcaccgacaccgagcaggagtgcctggtgaagttcctgcagagcagcgccagcgtgcagaaccacgagttcctgctggtgcaccacctgcagagagccaactacgtgcccgccctgaagctgaaccagaccctgaagatcaacgtgatgaacgacagagaccccagactgagagagagaagcctggccagaaacagcatcctggaccagtacggcaagatcctgcccagagtgcacagaaagctggccatcgagagagccaagccctaccacctgagcaccagcagcgtgttcagactggtgagcagacccaagcccctgagcgccgtgcccaagcaggtggtgaccggcaccgtgctgaccagaagcgtgttcatcaacaacgtgctgagcaagatcggcgaggtgtgggccagcaaggagcccatcaacagcaccacccccttcaacagcagcaagatcgaggagcccagccccatcgtgtacagcctgcccgcccccgagctgcccgaggccttcttcggcacccccatcagcaaggccagccagaagatcagcagactgctggacctggtggtgcagcccgtgcccagacccagccagtgcagcgagttcatccagcagagcagcatgaagagccccctgtacctggtgagcagaagcctgcccagcagcagccagctgaagggcagcccccaggccatcagcagagccagcgagctgcacctgctggagacccccctggtggtgaagaaggccaagagcctggccatgagcgtgaccaccagcggcttcagcgagttcaccccccagagcatcctgagaagcaccctgagaagcacccccctggccagccccagccccagccccggcagaagcccccagagactgaaggagaccagaatcagcttcgtggaggaggacgtgcaccccaagtggatccccggcgccgccgacgacagcaagctggaggtgttcaccacccccaagaagtgcgccgtgcccgtggagaccgagtggctgaagagcaaggacagaaccaccagcttcttcctgaacagccccgagaaggagcaccaggagatggacgagggcagccagagcctggagaagctggacgtgagcaagggcaacagcagcgtgagcatcaccagcgacgagaccaccctggagtaccaggacgcccccagccccgaggacctggaggagaccgtgttcaccgccagcaagcccaagagcagcagcaccgccctgaccaccaacgtgaccgagcagaccgagaaggacggcgacaaggacgtgttcgccagcgaggtgacccccagcgacctgcagaagcagatgggcaacctggaggacgccgagaccaaggacctgctggtggccgccgaggccttcagcgagctgaaccacctgagccccgtgcagggcaccgaggccagcctgtgcgcccccagcgtgtacgagggcaagatcttcacccagaagagcaaggtgcccgtgctggacgagggcctgaccagcgtggagacctacacccccgccatcagagccaacgacaacaagagcatggccgacgtgctgggcgacggcggcaacagcagcctgaccatcagcgagggccccatcgtgagcgagagaagactgaaccaggaggtggccctgaacctgaaggaggaccacgaggtggaggtgggcgtgctgaaggagagcgtggacctgcccgaggagaagctgcccatcagcgacagcccccccgacacccaggagatccacgtgatcgagcaggagaagctggaggcccaggacagcggcgaggaggccagaaacctgagcttcaacgagctgtaccccagcggcaccctgaagctgcagtacaacttcgacaccatcgaccagcagttctgcgacctggccgacaacaaggacaccgccgagtgcgacatcgccgaggtggacggcgagctgttcgtggcccagagcaacttcaccctgatcctggagggcgaggagggcgaggtggagcccggcgacttcgccagcagcgacgtgctgcccaaggccgccaacaccgccaccgaggagaagctggtgtgcagcggcgagaacgacaaccacggccagatcgccaacctgcccagcgccgtgaccagcgaccagaagagccagaaggtggacaccctgccctacgtgcccgagcccatcaaggtggccatcgccgagaacctgctggacgtgatcaaggacaccagaagcaaggagatcaccagcgacaccatggagcagagcatccacgagaccatccccctggtgagccagaacatcatgtgccccaccaagctggtgaagagcgccttcaagaccgcccaggagaccagcaccatgaccatgaacgtgagccaggtggacgacgtggtgagcagcaagaccagaaccagaggccagagaatccagaacgtgaacgtgaagagcgcccagcaggaggccagcgccgacgtggccacccccaagatgcccggccagagcgtgagaaagaagaccagaaaggccaaggagatcagcgaggccagcgagaacatctacagcgacgtgagaggcctgagccagaaccagcagatcccccagaacagcgtgacccccagaagaggcagaagaaagaaggaggtgaaccaggacatcctggagaacaccagcagcgtggagcaggagctgcagatcaccaccggcagagagagcaagagactgaagagcagccagctgctggagcccgccgtggaggagaccaccaagaaggaggtgaaggtgagcagcgtgaccaagagaacccccagaagaatcaagagaagcgtggagaaccaggagagcgtggagatcatcaacgacctgaaggtgagcaccgtgaccagccccagcagaatgatcagaaagctgagaagcaccaacctggacgccagcgagaacaccggcaacaagcaggacgacaagagcagcgacaagcagctgagaatcaagcacgtgagaagagtgagaggcagagaggtgagccccagcgacgtgagagaggacagcaacctggagagcagccagctgaccgtgcaggccgagttcgacatgagcgccatccccagaaagagaggcagacccagaaagatcaaccccagcgaggacgtgggcagcaaggccgtgaaggaggagagaagccccaagaagaaggaggcccccagcatcagaagaagaagcaccagaaacacccccgccaagagcgagaacgtggacgtgggcaagcccgccctgggcaagagcatcctggtgcccaacgaggagctgagcatggtgatgagcagcaagaagaagctgaccaagaagaccgagagccagagccagaagagaagcctgcacagcgtgagcgaggagagaaccgacgagatgacccacaaggagaccaacgagcaggaggagagactgctggccaccgccagcttcaccaagagcagcagaagcagcagaaccagaagcagcaaggccatcctgctgcccgacctgagcgagcccaacaacgagcccctgttcagccccgccagcgaggtgcccagaaaggccaaggccaagaagatcgaggtgcccgcccagctgaaggagctggtgagcgacctgagcagccagttcgtgatcagcccccccgccctgagaagcagacagaagaacaccagcaacaagaacaagctggaggacgagctgaaggacgacgcccagagcgtggagaccctgggcaagcccaaggccaagagaatcagaaccagcaagaccaagcaggccagcaagaacaccgagaaggagagcgcctggagccccccccccatcgagatcagactgatcagccccctggccagccccgccgacggcgtgaagagcaagcccagaaagaccaccgaggtgaccggcaccggcctgggcagaaacagaaagaagctgagcagctaccccaagcagatcctgagaagaaagatgctgtag

SEQ ID NO: 73418 - DNA, 6801 bp, synthetic construct
  misc_feature 1..6801: note = Description of Artificial Sequence: Synthetic coding sequence
  source 1..6801: mol_type = other DNA
atgagagacctgagagcccaggtgaccagcggcctgctgcccttccccgaggtgaccctgcaggccctgggcgaggacgagatcaccctggagagcgtgctgagaggcaagttcgccgccggcaagaacggcctggcctgcctggcctgcggcccccagctggaggtggtgaacagcatcaccggcgagagactgagcgcctacagattcagcggcgtgaacgagcagccccccgtggtgctggccgtgaaggagttcagctggcagaagagaaccggcctgctgatcggcctggaggagaccgagggcagcgtgctgtgcctgtacgacctgggcatcagcaaggtggtgaaggccgtggtgctgcccggcagagtgaccgccatcgagcccatcatcaaccacggcggcgccagcgccagcacccagcacctgcaccccagcctgagatggctgttcggcgtggccgccgtggtgaccgacgtgggccagatcctgctggtggacctgtgcctggacgacctgagctgcaaccagaacgaggtggaggccagcgacctggaggtgctgaccggcatccccgccgaggtgccccacatcagagagagcgtgatgagacagggcagacacctgtgcttccagctggtgagccccaccggcaccgccgtgagcaccctgagctacatcagcagaaccaaccagctggccgtgggcttcagcgacggctacctggccctgtggaacatgaagagcatgaagagagagtactacatccagctggagagcggccaggtgcccgtgtacgccgtgaccttccaggagcccgagaacgaccccagaaactgctgctacctgtgggccgtgcagagcacccaggacagcgagggcgacgtgctgagcctgcacctgctgcagctggccttcggcaacagaaagtgcctggccagcggccagatcctgtacgagggcctggagtactgcgaggagagatacaccctggacctgaccggcggcatgttccccctgagaggccagaccagcaacaccaagctgctgggctgccagagcatcgagaagttcagaagccacggcgacagagaggagggcgtgaacgaggccctgagccccgacaccagcgtgagcgtgttcacctggcaggtgaacatctacggccagggcaagcccagcgtgtacctgggcctgttcgacatcaacagatggtaccacgcccagatgcccgacagcctgagaagcggcgagtacctgcacaactgcagctacttcgccctgtggagcctggagagcgtggtgagcagaaccagcccccacggcatcctggacatcctggtgcacgagagaagcctgaacagaggcgtgccccccagctaccccccccccgagcagttcttcaaccccagcacctacaacttcgacgccacctgcctgctgaacagcggcgtggtgcacctgacctgcaccggcttccagaaggagaccctgaccttcctgaagaagagcggccccagcctgaacgagctgatccccgacggctacaacagatgcctggtggccggcctgctgagccccagattcgtggacgtgcagcccagcagcctgagccaggaggagcagctggaggccatcctgagcgccgccatccagaccagcagcctgggcctgctgaccggctacatcagaagatggatcaccgaggagcagcccaacagcgccaccaacctgagattcgtgctggagtggacctggaacaaggtggtgctgaccaaggaggagttcgacagactgtgcgtgcccctgttcgacggcagctgccacttcatggacccccagaccatccagagcatccagcagtgctacctgctgctgagcaacctgaacatcgtgctgagctgcttcgccagcgaggccagagagatcaccgagagaggcctgatcgacctgagcaacaagttcgtggtgagccacctgatctgccagtacgcccaggtggtgctgtggttcagccacagcggcctgctgcccgagggcatcgacgacagcgtgcagctgagcagactgtgctacaactaccccgtgatccagaactactacaccagcagaagacagaagttcgagagactgagcagaggcaagtggaaccccgactgcctgatgatcgacggcctggtgagccagctgggcgagagaatcgagaagctgtggaagagagacgagggcggcaccggcaagtacccccccgccagcctgcacgccgtgctggacatgtacctgctggacggcgtgaccgaggccgccaagcacagcatcaccatctacctgctgctggacatcatgtacagcttccccaacaagaccgacacccccatcgagagcttccccaccgtgttcgccatcagctggggccaggtgaagctgatccagggcttctggctgatcgaccacaacgactacgagagcggcctggacctgctgttccaccccgccaccgccaagcccctgagctggcagcacagcaagatcatccaggccttcatgagccagggcgagcacagacaggccctgagatacatccagaccatgaagcccaccgtgagcagcggcaacgacgtgatcctgcacctgaccgtgctgctgttcaacagatgcatggtggaggcctggaacttcctgagacagcactgcaacagactgaacatcgaggagctgctgaagcacatgtacgaggtgtgccaggagatgggcctgatggaggacctgctgaagctgcccttcaccgacaccgagcaggagtgcctggtgaagttcctgcagagcagcgccagcgtgcagaaccacgagttcctgctggtgcaccacctgcagagagccaactacgtgcccgccctgaagctgaaccagaccctgaagatcaacgtgatgaacgacagagaccccagactgagagagagaagcctggccagaaacagcatcctggaccagtacggcaagatcctgcccagagtgcacagaaagctggccatcgagagagccaagccctaccacctgagcaccagcagcgtgttcagactggtgagcagacccaagcccctgagcgccgtgcccaagcaggtggtgaccggcaccgtgctgaccagaagcgtgttcatcaacaacgtgctgagcaagatcggcgaggtgtgggccagcaaggagcccatcaacagcaccacccccttcaacagcagcaagatcgaggagcccagccccatcgtgtacagcctgcccgcccccgagctgcccgaggccttcttcggcacccccatcagcaaggccagccagaagatcagcagactgctggacctggtggtgcagcccgtgcccagacccagccagtgcagcgagttcatccagcagagcagcatgaagagccccctgtacctggtgagcagaagcctgcccagcagcagccagctgaagggcagcccccaggccatcagcagagccagcgagctgcacctgctggagacccccctggtggtgaagaaggccaagagcctggccatgagcgtgaccaccagcggcttcagcgagttcaccccccagagcatcctgagaagcaccctgagaagcacccccctggccagccccagccccagccccggcagaagcccccagagactgaaggagaccagaatcagcttcgtggaggaggacgtgcaccccaagtggatccccggcgccgccgacgacagcaagctggaggtgttcaccacccccaagaagtgcgccgtgcccgtggagaccgagtggctgaagagcaaggacagaaccaccagcttcttcctgaacagccccgagaaggagcaccaggagatggacgagggcagccagagcctggagaagctggacgtgagcaagggcaacagcagcgtgagcatcaccagcgacgagaccaccctggagtaccaggacgcccccagccccgaggacctggaggagaccgtgttcaccgccagcaagcccaagagcagcagcaccgccctgaccaccaacgtgaccgagcagaccgagaaggacggcgacaaggacgtgttcgccagcgaggtgacccccagcgacctgcagaagcagatgggcaacctggaggacgccgagaccaaggacctgctggtggccgccgaggccttcagcgagctgaaccacctgagccccgtgcagggcaccgaggccagcctgtgcgcccccagcgtgtacgagggcaagatcttcacccagaagagcaaggtgcccgtgctggacgagggcctgaccagcgtggagacctacacccccgccatcagagccaacgacaacaagagcatggccgacgtgctgggcgacggcggcaacagcagcctgaccatcagcgagggccccatcgtgagcgagagaagactgaaccaggaggtggccctgaacctgaaggaggaccacgaggtggaggtgggcgtgctgaaggagagcgtggacctgcccgaggagaagctgcccatcagcgacagcccccccgacacccaggagatccacgtgatcgagcaggagaagctggaggcccaggacagcggcgaggaggccagaaacctgagcttcaacgagctgtaccccagcggcaccctgaagctgcagtacaacttcgacaccatcgaccagcagttctgcgacctggccgacaacaaggacaccgccgagtgcgacatcgccgaggtggacggcgagctgttcgtggcccagagcaacttcaccctgatcctggagggcgaggagggcgaggtggagcccggcgacttcgccagcagcgacgtgctgcccaaggccgccaacaccgccaccgaggagaagctggtgtgcagcggcgagaacgacaaccacggccagatcgccaacctgcccagcgccgtgaccagcgaccagaagagccagaaggtggacaccctgccctacgtgcccgagcccatcaaggtggccatcgccgagaacctgctggacgtgatcaaggacaccagaagcaaggagatcaccagcgacaccatggagcagagcatccacgagaccatccccctggtgagccagaacatcatgtgccccaccaagctggtgaagagcgccttcaagaccgcccaggagaccagcaccatgaccatgaacgtgagccaggtggacgacgtggtgagcagcaagaccagaaccagaggccagagaatccagaacgtgaacgtgaagagcgcccagcaggaggccagcgccgacgtggccacccccaagatgcccggccagagcgtgagaaagaagaccagaaaggccaaggagatcagcgaggccagcgagaacatctacagcgacgtgagaggcctgagccagaaccagcagatcccccagaacagcgtgacccccagaagaggcagaagaaagaaggaggtgaaccaggacatcctggagaacaccagcagcgtggagcaggagctgcagatcaccaccggcagagagagcaagagactgaagagcagccagctgctggagcccgccgtggaggagaccaccaagaaggaggtgaaggtgagcagcgtgaccaagagaacccccagaagaatcaagagaagcgtggagaaccaggagagcgtggagatcatcaacgacctgaaggtgagcaccgtgaccagccccagcagaatgatcagaaagctgagaagcaccaacctggacgccagcgagaacaccggcaacaagcaggacgacaagagcagcgacaagcagctgagaatcaagcacgtgagaagagtgagaggcagagaggtgagccccagcgacgtgagagaggacagcaacctggagagcagccagctgaccgtgcaggccgagttcgacatgagcgccatccccagaaagagaggcagacccagaaagatcaaccccagcgaggacgtgggcagcaaggccgtgaaggaggagagaagccccaagaagaaggaggcccccagcatcagaagaagaagcaccagaaacacccccgccaagagcgagaacgtggacgtgggcaagcccgccctgggcaagagcatcctggtgcccaacgaggagctgagcatggtgatgagcagcaagaagaagctgaccaagaagaccgagagccagagccagaagagaagcctgcacagcgtgagcgaggagagaaccgacgagatgacccacaaggagaccaacgagcaggaggagagactgctggccaccgccagcttcaccaagagcagcagaagcagcagaaccagaagcagcaaggccatcctgctgcccgacctgagcgagcccaacaacgagcccctgttcagccccgccagcgaggtgcccagaaaggccaaggccaagaagatcgaggtgcccgcccagctgaaggagctggtgagcgacctgagcagccagttcgtgatcagcccccccgccctgagaagcagacagaagaacaccagcaacaagaacaagctggaggacgagctgaaggacgacgcccagagcgtggagaccctgggcaagcccaaggccaagagaatcagaaccagcaagaccaagcaggccagcaagaacaccgagaaggagagcgcctggagccccccccccatcgagatcagactgatcagccccctggccagccccgccgacggcgtgaagagcaagcccagaaagaccaccgaggtgaccggcaccggcctgggcagaaacagaaagaagctgagcagctaccccaagcagatcctgagaagaaagatgctgtag

SEQ ID NO: 73419 - DNA, 3567 bp, synthetic construct
  misc_feature 1..3567: note = Description of Artificial Sequence: Synthetic coding sequence
  source 1..3567: mol_type = other DNA
atgaaggccgccgacgagcccgcctacctgaccgtgggcaccgacgtgagcgccaagtacagaggcgccttctgcgaggccaagatcaagaccgtgaagagactggtgaaggtgaaggtgctgctgaagcaggacaacaccacccagctggtgcaggacgaccaggtgaagggccccctgagagtgggcgccatcgtggagaccagaaccagcgacggcagcttccaggaggccatcatcagcaagctgaccgacgccagctggtacaccgtggtgttcgacgacggcgacgagagaaccctgagaagaaccagcctgtgcctgaagggcgagagacacttcgccgagagcgagaccctggaccagctgcccctgaccaaccccgagcacttcggcacccccgtgatcgccaagaagaccaacagaggcagaagaagcagcctgcccgtgaccgaggacgagaaggaggaggagagcagcgaggaggaggacgaggacaagagaagactgaacgacgagctgctgggcaaggtggtgagcgtggtgagcgccaccgagagaaccgagtggtaccccgccctggtgatcagccccagctgcaacgacgacatcaccgtgaagaaggaccagtgcctggtgagaagcttcatcgacagcaagttctacagcatcgccagaaaggacatcaaggaggtggacatcctgaacctgcccgagagcgagctgagcaccaagcccggcctgcagaaggccagcatcttcctgaagaccagagtggtgcccgacaactggaagatggacatcagcgagatcctggagagcagcagcagcgacgacgaggacggccccgccgaggagaacgacgaggagaaggagaaggaggccaagaagaccgaggaggaggtgcccgaggaggagctggaccccgaggagagagacaacttcctgcagcagctgtacaagttcatggaggacagaggcacccccatcaacaagccccccgtgctgggctacaaggacctgaacctgttcaagctgttcagactggtgtaccaccagggcggctgcgacaacatcgacagcggcgccgtgtggaagcagatctacatggacctgggcatccccatcctgaacagcgccgccagctacaacgtgaagaccgcctacagaaagtacctgtacggcttcgaggagtactgcagaagcgccaacatccagttcagaaccgtgcaccaccacgagcccaaggtgaaggaggagaagaaggacctggaggagagcatggaggaggccctgaagctggaccaggagatgcccctgaccgaggtgaagagcgagcccgaggagaacatcgacagcaacagcgagagcgagagagaggagatcgagctgaagagccccagaggcagaagaagaatcgccagagacgtgaacagcatcaagaaggagatcgaggaggagaagaccgaggacaagctgaaggacaacgacaccgagaacaaggacgtggacgacgactacgagaccgccgagaagaaggagaacgagctgctgctgggcagaaagaacacccccaagcagaaggagaagaagatcaagaagcaggaggacagcgacaaggacagcgacgaggaggaggagaagagccaggagagagaggagaccgagagcaagtgcgacagcgagggcgaggaggacgaggaggacatggagccctgcctgaccggcaccaaggtgaaggtgaagtacggcagaggcaagacccagaagatctacgaggccagcatcaagagcaccgagatcgacgacggcgaggtgctgtacctggtgcactactacggctggaacgtgagatacgacgagtgggtgaaggccgacagaatcatctggcccctggacaagggcggccccaagaagaagcagaagaagaaggccaagaacaaggaggacagcgagaaggacgagaagagagacgaggagagacagaagagcaagagaggcagaccccccctgaagagcaccctgagcagcaacatgccctacggcctgagcaagaccgccaacagcgagggcaagagcgacagctgcagcagcgacagcgagaccgaggacgccctggagaagaacctgatcaacgaggagctgagcctgaaggacgagctggagaagaacgagaacctgaacgacgacaagctggacgaggagaaccccaagatcagcgcccacatcctgaaggagaacgacagaacccagatgcagcccctggagaccctgaagctggaggtgggcgagaacgagcagatcgtgcagatcttcggcaacaagatggagaagaccgaggaggtgaagaaggaggccgagaagagccccaagggcaagggcagaagaagcaagaccaaggacctgagcctggagatcatcaagatcagcagcttcggccagaacgaggccggcagcgagccccacatcgaggcccacagcctggagctgagcagcctggacaacaagaacttcagcagcgccaccgaggacgagatcgaccagtgcgtgaaggagaagaagctgaagagaaagatcctgggccagagcagccccgagaagaagatcagaatcgagaacggcatggagatgaccaacaccgtgagccaggagagaaccagcgactgcatcggcagcgagggcatgaagaacctgaacttcgagcagcacttcgagagagagaacgagggcatgcccagcctgatcgccgagagcaaccagtgcatccagcagctgaccagcgagagattcgacagccccgccgaggagaccgtgaacatccccctgaaggaggacgaggacgccatgcccctgatcggccccgagaccctggtgtgccacgaggtggacctggacgacctggacgagaaggacaagaccagcatcgaggacgtggccgtggagagcagcgagagcaacagcctggtgagcatcccccccgccctgccccccgtggtgcagcacaacttcagcgtggccagccccctgaccctgagccaggacgagagcagaagcgtgaagagcgagagcgacatcaccatcgaggtggacagcatcgccgaggagagccaggagggcctgtgcgagagagagagcgccaacggcttcgagaccaacgtggccagcggcacctgcagcatcatcgtgcaggagagagagagcagagagaagggccagaagagacccagcgacggcaacagcggcctgatggccaagaagcagaagagaacccccaagagaaccagcgccgccgccaagaacgagaagaacggcaccgacgagctggacaacatgaacagcaccgagagaatcagcttcctgcaggagaagctgcaggagatcagaaagtactacatgagcctgaagagcgaggtggccaccatcgacagaagaagaaagagactgaagaagaaggacagagaggtgagccacgccggcgccagcatgagcagcgccagcagcgacaccggcatgagccccagcagcagcagccccccccagaacgtgctggccgtggagtgcagatag

SEQ ID NO: 73420 - DNA, 3774 bp, synthetic construct
  misc_feature 1..3774: note = Description of Artificial Sequence: Synthetic coding sequence
  source 1..3774: mol_type = other DNA
atgaaggccgccgacgagcccgcctacctgaccgtgggcaccgacgtgagcgccaagtacagaggcgccttctgcgaggccaagatcaagaccgtgaagagactggtgaaggtgaaggtgctgctgaagcaggacaacaccacccagctggtgcaggacgaccaggtgaagggccccctgagagtgggcgccatcgtggagaccagaaccagcgacggcagcttccaggaggccatcatcagcaagctgaccgacgccagctggtacaccgtggtgttcgacgacggcgacgagagaaccctgagaagaaccagcctgtgcctgaagggcgagagacacttcgccgagagcgagaccctggaccagctgcccctgaccaaccccgagcacttcggcacccccgtgatcgccaagaagaccaacagaggcagaagaagcagcctgcccgtgaccgaggacgagaaggaggaggagagcagcgaggaggaggacgaggacaagagaagactgaacgacgagctgctgggcaaggtggtgagcgtggtgagcgccaccgagagaaccgagtggtaccccgccctggtgatcagccccagctgcaacgacgacatcaccgtgaagaaggaccagtgcctggtgagaagcttcatcgacagcaagttctacagcatcgccagaaaggacatcaaggaggtggacatcctgaacctgcccgagagcgagctgagcaccaagcccggcctgcagaaggccagcatcttcctgaagaccagagtggtgcccgacaactggaagatggacatcagcgagatcctggagagcagcagcagcgacgacgaggacggccccgccgaggagaacgacgaggagaaggagaaggaggccaagaagaccgaggaggaggtgcccgaggaggagctggaccccgaggagagagacaacttcctgcagcagctgtacaagttcatggaggacagaggcacccccatcaacaagccccccgtgctgggctacaaggacctgaacctgttcaagctgttcagactggtgtaccaccagggcggctgcgacaacatcgacagcggcgccgtgtggaagcagatctacatggacctgggcatccccatcctgaacagcgccgccagctacaacgtgaagaccgcctacagaaagtacctgtacggcttcgaggagtactgcagaagcgccaacatccagttcagaaccgtgcaccaccacgagcccaaggtgaaggaggagaagaaggacctggaggagagcatggaggaggccctgaagctggaccaggagatgcccctgaccgaggtgaagagcgagcccgaggagaacatcgacagcaacagcgagagcgagagagaggagatcgagctgaagagccccagaggcagaagaagaatcgccagagacgtgaacagcatcaagaaggagatcgaggaggagaagaccgaggacaagctgaaggacaacgacaccgagaacaaggacgtggacgacgactacgagaccgccgagaagaaggagaacgagctgctgctgggcagaaagaacacccccaagcagaaggagaagaagatcaagaagcaggaggacagcgacaaggacagcgacgaggaggaggagaagagccaggagagagaggagaccgagagcaagtgcgacagcgagggcgaggaggacgaggaggacatggagccctgcctgaccggcaccaaggtgaaggtgaagtacggcagaggcaagacccagaagatctacgaggccagcatcaagagcaccgagatcgacgacggcgaggtgctgtacctggtgcactactacggctggaacgtgagatacgacgagtgggtgaaggccgacagaatcatctggcccctggacaagggcggccccaagaagaagcagaagaagaaggccaagaacaaggaggacagcgagaaggacgagaagagagacgaggagagacagaagagcaagagaggcagaccccccctgaagagcaccctgagcagcaacatgccctacggcctgagcaagaccgccaacagcgagggcaagagcgacagctgcagcagcgacagcgagaccgaggacgccctggagaagaacctgatcaacgaggagctgagcctgaaggacgagctggagaagaacgagaacctgaacgacgacaagctggacgaggagaaccccaagatcagcgcccacatcctgaaggagaacgacagaacccagatgcagcccctggagaccctgaagctggaggtgggcgagaacgagcagatcgtgcagatcttcggcaacaagatggagaagaccgaggaggtgaagaaggaggccgagaagagccccaagggcaagggcagaagaagcaagaccaaggacctgagcctggagatcatcaagatcagcagcttcggccagaacgaggccggcagcgagccccacatcgaggcccacagcctggagctgagcagcctggacaacaagaacttcagcagcgccaccgaggacgagatcgaccagtgcgtgaaggagaagaagctgaagagaaagatcctgggccagagcagccccgagaagaagatcagaatcgagaacggcatggagatgaccaacaccgtgagccaggagagaaccagcgactgcatcggcagcgagggcatgaagaacctgaacttcgagcagcacttcgagagagagaacgagggcatgcccagcctgatcgccgagagcaaccagtgcatccagcagctgaccagcgagagattcgacagccccgccgaggagaccgtgaacatccccctgaaggaggacgaggacgccatgcccctgatcggccccgagaccctggtgtgccacgaggtggacctggacgacctggacgagaaggacaagaccagcatcgaggacgtggccgtggagagcagcgagagcaacagcctggtgagcatcccccccgccctgccccccgtggtgcagcacaacttcagcgtggccagccccctgaccctgagccaggacgagagcagaagcgtgaagagcgagagcgacatcaccatcgaggtggacagcatcgccgaggagagccaggagggcctgtgcgagagagagagcgccaacggcttcgagaccaacgtggccagcggcacctgcagcatcatcgtgcaggagagagagagcagagagaagggccagaagagacccagcgacggcaacagcggcctgatggccaagaagcagaagagaacccccaagagaaccagcgccgccgccaagaacgagaagaacggcaccggccagagcagcgacagcgaggacctgcccgtgctggacaacagcagcaagtgcacccccgtgaagcacctgaacgtgagcaagccccagaagctggccagaagccccgccagaatcagcccccacatcaaggacggcgagaaggacaagcacagagagaagcaccccaacagcagccccagaacctacaagtggagcttccagctgaacgagctggacaacatgaacagcaccgagagaatcagcttcctgcaggagaagctgcaggagatcagaaagtactacatgagcctgaagagcgaggtggccaccatcgacagaagaagaaagagactgaagaagaaggacagagaggtgagccacgccggcgccagcatgagcagcgccagcagcgacaccggcatgagccccagcagcagcagccccccccagaacgtgctggccgtggagtgcagatag

SEQ ID NO: 73421 - DNA, 3612 bp, synthetic construct
  misc_feature 1..3612: note = Description of Artificial Sequence: Synthetic coding sequence
  source 1..3612: mol_type = other DNA
atgaaggccgccgacgagcccgcctacctgaccgtgggcaccgacgtgagcgccaagtacagaggcgccttctgcgaggccaagatcaagaccgtgaagagactggtgaaggtgaaggtgctgctgaagcaggacaacaccacccagctggtgcaggacgaccaggtgaagggccccctgagagtgggcgccatcgtggagaccagaaccagcgacggcagcttccaggaggccatcatcagcaagctgaccgacgccagctggtacaccgtggtgttcgacgacggcgacgagagaaccctgagaagaaccagcctgtgcctgaagggcgagagacacttcgccgagagcgagaccctggaccagctgcccctgaccaaccccgagcacttcggcacccccgtgatcgccaagaagaccaacagaggcagaagaagcagcctgcccgtgaccgaggacgagaaggaggaggagagcagcgaggaggaggacgaggacaagagaagactgaacgacgagctgctgggcaaggtggtgagcgtggtgagcgccaccgagagaaccgagtggtaccccgccctggtgatcagccccagctgcaacgacgacatcaccgtgaagaaggaccagtgcctggtgagaagcttcatcgacagcaagttctacagcatcgccagaaaggacatcaaggaggtggacatcctgaacctgcccgagagcgagctgagcaccaagcccggcctgcagaaggccagcatcttcctgaagaccagagtggtgcccgacaactggaagatggacatcagcgagatcctggagagcagcagcagcgacgacgaggacggccccgccgaggagaacgacgaggagaaggagaaggaggccaagaagaccgaggaggaggtgcccgaggaggagctggaccccgaggagagagacaacttcctgcagcagctgtacaagttcatggaggacagaggcacccccatcaacaagccccccgtgctgggctacaaggacctgaacctgttcaagctgttcagactggtgtaccaccagggcggctgcgacaacatcgacagcggcgccgtgtggaagcagatctacatggacctgggcatccccatcctgaacagcgccgccagctacaacgtgaagaccgcctacagaaagtacctgtacggcttcgaggagtactgcagaagcgccaacatccagttcagaaccgtgcaccaccacgagcccaaggtgaaggaggagaagaaggacctggaggagagcatggaggaggccctgaagctggaccaggagatgcccctgaccgaggtgaagagcgagcccgaggagaacatcgacagcaacagcgagagcgagagagaggagatcgagctgaagagccccagaggcagaagaagaatcgccagagacgtgaacagcatcaagaaggagatcgaggaggagaagaccgaggacaagctgaaggacaacgacaccgagaacaaggacgtggacgacgactacgagaccgccgagaagaaggagaacgagctgctgctgggcagaaagaacacccccaagcagaaggagaagaagatcaagaagcaggaggacagcgacaaggacagcgacgaggaggaggagaagagccaggagagagaggagaccgagagcaagtgcgacagcgagggcgaggaggacgaggaggacatggagccctgcctgaccggcaccaaggtgaaggtgaagtacggcagaggcaagacccagaagatctacgaggccagcatcaagagcaccgagatcgacgacggcgaggtgctgtacctggtgcactactacggctggaacgtgagatacgacgagtgggtgaaggccgacagaatcatctggcccctggacaagggcggccccaagaagaagcagaagaagaaggccaagaacaaggaggacagcgagaaggacgagaagagagacgaggagagacagaagagcaagagaggcagaccccccctgaagagcaccctgagcagcaacatgccctacggcctgagcaagaccgccaacagcgagggcaagagcgacagctgcagcagcgacagcgagaccgaggacgccctggagaagaacctgatcaacgaggagctgagcctgaaggacgagctggagaagaacgagaacctgaacgacgacaagctggacgaggagaaccccaagatcagcgcccacatcctgaaggagaacgacagaacccagatgcagcccctggagaccctgaagctggaggtgggcgagaacgagcagatcgtgcagatcttcggcaacaagatggagaagaccgaggaggtgaagaaggaggccgagaagagccccaagggcaagggcagaagaagcaagaccaaggacctgagcctggagatcatcaagatcagcagcttcggccagaacgaggccggcagcgagccccacatcgaggcccacagcctggagctgagcagcctggacaacaagaacttcagcagcgccaccgaggacgagatcgaccagtgcgtgaaggagaagaagctgaagagaaagatcctgggccagagcagccccgagaagaagatcagaatcgagaacggcatggagatgaccaacaccgtgagccaggagagaaccagcgactgcatcggcagcgagggcatgaagaacctgaacttcgagcagcacttcgagagagagaacgagggcatgcccagcctgatcgccgagagcaaccagtgcatccagcagctgaccagcgagagattcgacagccccgccgaggagaccgtgaacatccccctgaaggaggacgaggacgccatgcccctgatcggccccgagaccctggtgtgccacgaggtggacctggacgacctggacgagaaggacaagaccagcatcgaggacgtggccgtggagagcagcgagagcaacagcctggtgagcatcccccccgccctgccccccgtggtgcagcacaacttcagcgtggccagccccctgaccctgagccaggacgagagcagaagcgtgaagagcgagagcgacatcaccatcgaggtggacagcatcgccgaggagagccaggagggcctgtgcgagagagagagcgccaacggcttcgagaccaacgtggccagcggcacctgcagcatcatcgtgcaggagagagagagcagagagaagggccagaagagacccagcgacggcaacagcggcctgatggccaagaagcagaagagaacccccaagagaaccagcgccgccgccaagaacgagaagaacggcaccggccagagcagcgacagcgaggacctgcccgtgctggacaacagcaacgagctggacaacatgaacagcaccgagagaatcagcttcctgcaggagaagctgcaggagatcagaaagtactacatgagcctgaagagcgaggtggccaccatcgacagaagaagaaagagactgaagaagaaggacagagaggtgagccacgccggcgccagcatgagcagcgccagcagcgacaccggcatgagccccagcagcagcagccccccccagaacgtgctggccgtggagtgcagatag

SEQ ID NO: 73422 - DNA, 165 bp, synthetic construct
  misc_feature 1..165: note = Description of Artificial Sequence: Synthetic coding sequence
  source 1..165: mol_type = other DNA
atgaaggccgccgacgagcccgcctacctgaccgtgggcaccgacgtgagcgccaagtacagaggcgccttctgcgaggccaagatcaagaccgtgaagagactggtgaaggtgaaggtgctgctgaagcaggacaacaccacccagctggtgcaggacgactag

SEQ ID NO: 73423 - DNA, 3567 bp, synthetic construct; identical to SEQ ID NO: 73419
  misc_feature 1..3567: note = Description of Artificial Sequence: Synthetic coding sequence
  source 1..3567: mol_type = other DNA

SEQ ID NO: 73424 - DNA, 3939 bp, synthetic construct
  misc_feature 1..3939: note = Description of Artificial Sequence: Synthetic coding sequence
  source 1..3939: mol_type = other DNA
atgaaggccctggacgagcccccctacctgaccgtgggcaccgacgtgagcgccaagtacagaggcgccttctgcgaggccaagatcaagaccgccaagagactggtgaaggtgaaggtgaccttcagacacgacagcagcaccgtggaggtgcaggacgaccacatcaagggccccctgaaggtgggcgccatcgtggaggtgaagaacctggacggcgcctaccaggaggccgtgatcaacaagctgaccgacgccagctggtacaccgtggtgttcgacgacggcgacgagaagaccctgagaagaagcagcctgtgcctgaagggcgagagacacttcgccgagagcgagaccctggaccagctgcccctgaccaaccccgagcacttcggcacccccgtgatcggcaagaagaccaacagaggcagaagaagcaaccacatccccgaggaggagagcagcagcagcagcagcgacgaggacgaggacgacagaaagcagatcgacgagctgctgggcaaggtggtgtgcgtggactacatcagcctggacaagaagaaggccctgtggttccccgccctggtggtgtgccccgactgcagcgacgagatcgccgtgaagaaggacaacatcctggtgagaagcttcaaggacggcaagttcaccagcgtgcccagaaaggacgtgcacgagatcaccagcgacaccgcccccaagcccgacgccgtgctgaagcaggccttcgagcaggccctggagttccacaagagcagaaccatccccgccaactggaagaccgagctgaaggaggacagcagcagcagcgaggccgaggaggaggaggaggaggaggacgacgagaaggagaaggaggacaacagcagcgaggaggaggaggagatcgagcccttccccgaggagagagagaacttcctgcagcagctgtacaagttcatggaggacagaggcacccccatcaacaagagacccgtgctgggctacagaaacctgaacctgttcaagctgttcagactggtgcacaagctgggcggcttcgacaacatcgagagcggcgccgtgtggaagcaggtgtaccaggacctgggcatccccgtgctgaacagcgccgccggctacaacgtgaagtgcgcctacaagaagtacctgtacggcttcgaggagtactgcagaagcgccaacatcgagttccagatggccctgcccgagaaggtggtgaacaagcagtgcaaggagtgcgagaacgtgaaggagatcaaggtgaaggaggagaacgagaccgagatcaaggagatcaagatggaggaggagagaaacatcatccccagagaggagaagcccatcgaggacgagatcgagagaaaggagaacatcaagcccagcctgggcagcaagaagaacctgctggagagcatccccacccacagcgaccaggagaaggaggtgaacatcaagaagcccgaggacaacgagaacctggacgacaaggacgacgacaccaccagagtggacgagagcctgaacatcaaggtggaggccgaggaggagaaggccaagagcggcgacgagaccaacaaggaggaggacgaggacgacgaggaggccgaggaggaggaggaggaggaggaggaggaggaggacgaggacgacgacgacaacaacgaggaggaggagttcgagtgctacccccccggcatgaaggtgcaggtgagatacggcagaggcaagaaccagaagatgtacgaggccagcatcaaggacagcgacgtggagggcggcgaggtgctgtacctggtgcactactgcggctggaacgtgagatacgacgagtggatcaaggccgacaagatcgtgagacccgccgacaagaacgtgcccaagatcaagcacagaaagaagatcaagaacaagctggacaaggagaaggacaaggacgagaagtacagccccaagaactgcaagctgagaagactgagcaagccccccttccagaccaaccccagccccgagatggtgagcaagctggacctgaccgacgccaagaacagcgacaccgcccacatcaagagcatcgagatcaccagcatcctgaacggcctgcaggccagcgagagcagcgccgaggacagcgagcaggaggacgagagaggcgcccaggacatggacaacaacggcaaggaggagagcaagatcgaccacctgaccaacaacagaaacgacctgatcagcaaggaggagcagaacagcagcagcctgctggaggagaacaaggtgcacgccgacctggtgatcagcaagcccgtgagcaagagccccgagagactgagaaaggacatcgaggtgctgagcgaggacaccgactacgaggaggacgaggtgaccaagaagagaaaggacgtgaagaaggacaccaccgacaagagcagcaagccccagatcaagagaggcaagagaagatactgcaacaccgaggagtgcctgaagaccggcagccccggcaagaaggaggagaaggccaagaacaaggagagcctgtgcatggagaacagcagcaacagcagcagcgacgaggacgaggaggagaccaaggccaagatgacccccaccaagaagtacaacggcctggaggagaagagaaagagcctgagaaccaccggcttctacagcggcttcagcgaggtggccgagaagagaatcaagctgctgaacaacagcgacgagagactgcagaacagcagagccaaggacagaaaggacgtgtggagcagcatccagggccagtggcccaagaagaccctgaaggagctgttcagcgacagcgacaccgaggccgccgccagccccccccaccccgcccccgaggagggcgtggccgaggagagcctgcagaccgtggccgaggaggagagctgcagccccagcgtggagctggagaagcccccccccgtgaacgtggacagcaagcccatcgaggagaagaccgtggaggtgaacgacagaaaggccgagttccccagcagcggcagcaacagcgtgctgaacaccccccccaccacccccgagagccccagcagcgtgaccgtgaccgagggcagcagacagcagagcagcgtgaccgtgagcgagcccctggcccccaaccaggaggaggtgagaagcatcaagagcgagaccgacagcaccatcgaggtggacagcgtggccggcgagctgcaggacctgcagagcgagggcaacagcagccccgccggcttcgacgccagcgtgagcagcagcagcagcaaccagcccgagcccgagcaccccgagaaggcctgcaccggccagaagagagtgaaggacgcccagggcggcggcagcagcagcaagaagcagaagagaagccacaaggccaccgtggtgaacaacaagaagaagggcaagggcaccaacagcagcgacagcgaggagctgagcgccggcgagagcatcaccaagagccagcccgtgaagagcgtgagcaccggcatgaagagccacagcaccaagagccccgccagaacccagagccccggcaagtgcggcaagaacggcgacaaggaccccgacctgaaggagcccagcaacagactgcccaaggtgtacaagtggagcttccagatgagcgacctggagaacatgaccagcgccgagagaatcaccatcctgcaggagaagctgcaggagatcagaaagcactacctgagcctgaagagcgaggtggccagcatcgacagaagaagaaagagactgaagaagaaggagagagagagcgccgccaccagcagcagcagcagcagccccagcagcagcagcatcaccgccgccgtgatgctgaccctggccgagcccagcatgagcagcgccagccagaacggcatgagcgtggagtgcagatag

SEQ ID NO: 73425 - DNA, 3681 bp, synthetic construct
  misc_feature 1..3681: note = Description of Artificial Sequence: Synthetic coding sequence
  source 1..3681: mol_type = other DNA
atgaaggccctggacgagcccccctacctgaccgtgggcaccgacgtgagcgccaagtacagaggcgccttctgcgaggccaagatcaagaccgccaagagactggtgaaggtgaaggtgaccttcagacacgacagcagcaccgtggaggtgcaggacgaccacatcaagggccccctgaaggtgggcgccatcgtggaggtgaagaacctggacggcgcctaccaggaggccgtgatcaacaagctgaccgacgccagctggtacaccgtggtgttcgacgacggcgacgagaagaccctgagaagaagcagcctgtgcctgaagggcgagagacacttcgccgagagcgagaccctggaccagctgcccctgaccaaccccgagcacttcggcacccccgtgatcggcaagaagaccaacagaggcagaagaagcaaccacatccccgaggaggagagcagcagcagcagcagcgacgaggacgaggacgacagaaagcagatcgacgagctgctgggcaaggtggtgtgcgtggactacatcagcctggacaagaagaaggccctgtggttccccgccctggtggtgtgccccgactgcagcgacgagatcgccgtgaagaaggacaacatcctggtgagaagcttcaaggacggcaagttcaccagcgtgcccagaaaggacgtgcacgagatcaccagcgacaccgcccccaagcccgacgccgtgctgaagcaggccttcgagcaggccctggagttccacaagagcagaaccatccccgccaactggaagaccgagctgaaggaggacagcagcagcagcgaggccgaggaggaggaggaggaggaggacgacgagaaggagaaggaggacaacagcagcgaggaggaggaggagatcgagcccttccccgaggagagagagaacttcctgcagcagctgtacaagttcatggaggacagaggcacccccatcaacaagagacccgtgctgggctacagaaacctgaacctgttcaagctgttcagactggtgcacaagctgggcggcttcgacaacatcgagagcggcgccgtgtggaagcaggtgtaccaggacctgggcatccccgtgctgaacagcgccgccggctacaacgtgaagtgcgcctacaagaagtacctgtacggcttcgaggagtactgcagaagcgccaacatcgagttccagatggccctgcccgagaaggtggtgaacaagcagtgcaaggagtgcgagaacgtgaaggagatcaaggtgaaggaggagaacgagaccgagatcaaggagatcaagatggaggaggagagaaacatcatccccagagaggagaagcccatcgaggacgagatcgagagaaaggagaacatcaagcccagcctgggcagcaagaagaacctgctggagagcatccccacccacagcgaccaggagaaggaggtgaacatcaagaagcccgaggacaacgagaacctggacgacaaggacgacgacaccaccagagtggacgagagcctgaacatcaaggtggaggccgaggaggagaaggccaagagcggctacgacgagtggatcaaggccgacaagatcgtgagacccgccgacaagaacgtgcccaagatcaagcacagaaagaagatcaagaacaagctggacaaggagaaggacaaggacgagaagtacagccccaagaactgcaagctgagaagactgagcaagccccccttccagaccaaccccagccccgagatggtgagcaagctggacctgaccgacgccaagaacagcgacaccgcccacatcaagagcatcgagatcaccagcatcctgaacggcctgcaggccagcgagagcagcgccgaggacagcgagcaggaggacgagagaggcgcccaggacatggacaacaacggcaaggaggagagcaagatcgaccacctgaccaacaacagaaacgacctgatcagcaaggaggagcagaacagcagcagcctgctggaggagaacaaggtgcacgccgacctggtgatcagcaagcccgtgagcaagagccccgagagactgagaaaggacatcgaggtgctgagcgaggacaccgactacgaggaggacgaggtgaccaagaagagaaaggacgtgaagaaggacaccaccgacaagagcagcaagccccagatcaagagaggcaagagaagatactgcaacaccgaggagtgcctgaagaccggcagccccggcaagaaggaggagaaggccaagaacaaggagagcctgtgcatggagaacagcagcaacagcagcagcgacgaggacgaggaggagaccaaggccaagatgacccccaccaagaagtacaacggcctggaggagaagagaaagagcctgagaaccaccggcttctacagcggcttcagcgaggtggccgagaagagaatcaagctgctgaacaacagcgacgagagactgcagaacagcagagccaaggacagaaaggacgtgtggagcagcatccagggccagtggcccaagaagaccctgaaggagctgttcagcgacagcgacaccgaggccgccgccagccccccccaccccgcccccgaggagggcgtggccgaggagagcctgcagaccgtggccgaggaggagagctgcagccccagcgtggagctggagaagcccccccccgtgaacgtggacagcaagcccatcgaggagaagaccgtggaggtgaacgacagaaaggccgagttccccagcagcggcagcaacagcgtgctgaacaccccccccaccacccccgagagccccagcagcgtgaccgtgaccgagggcagcagacagcagagcagcgtgaccgtgagcgagcccctggcccccaaccaggaggaggtgagaagcatcaagagcgagaccgacagcaccatcgaggtggacagcgtggccggcgagctgcaggacctgcagagcgagggcaacagcagccccgccggcttcgacgccagcgtgagcagcagcagcagcaaccagcccgagcccgagcaccccgagaaggcctgcaccggccagaagagagtgaaggacgcccagggcggcggcagcagcagcaagaagcagaagagaagccacaaggccaccgtggtgaacaacaagaagaagggcaagggcaccaacagcagcgacagcgaggagctgagcgccggcgagagcatcaccaagagccagcccgtgaagagcgtgagcaccggcatgaagagccacagcaccaagagccccgccagaacccagagccccggcaagtgcggcaagaacggcgacaaggaccccgacctgaaggagcccagcaacagactgcccaaggtgtacaagtggagcttccagatgagcgacctggagaacatgaccagcgccgagagaatcaccatcctgcaggagaagctgcaggagatcagaaagcactacctgagcctgaagagcgaggtggccagcatcgacagaagaagaaagagactgaagaagaaggagagagagagcgccgccaccagcagcagcagcagcagccccagcagcagcagcatcaccgccgccgtgatgctgaccctggccgagcccagcatgagcagcgccagccagaacggcatgagcgtggagtgcagatag

SEQ ID NO: 73426 - DNA, 3939 bp, synthetic construct; identical to SEQ ID NO: 73424
  misc_feature 1..3939: note = Description of Artificial Sequence: Synthetic coding sequence
  source 1..3939: mol_type = other DNA

SEQ ID NO: 73427 - DNA, 3462 bp, synthetic construct
  misc_feature 1..3462: note = Description of Artificial Sequence: Synthetic coding sequence
  source 1..3462: mol_type = other DNA
atgaaggccctggacgagcccccctacctgaccgtgggcaccgacgtgagcgccaagtacagaggcgccttctgcgaggccaagatcaagaccgccaagagactggtgaaggtgaaggtgaccttcagacacgacagcagcaccgtggaggtgcaggacgaccacatcaagggccccctgaaggtgggcgccatcgtggaggtgaagaacctggacggcgcctaccaggaggccgtgatcaacaagctgaccgacgccagctggtacaccgtggtgttcgacgacggcgacgagaagaccctgagaagaagcagcctgtgcctgaagggcgagagacacttcgccgagagcgagaccctggaccagctgcccctgaccaaccccgagcacttcggcacccccgtgatcggcaagaagaccaacagaggcagaagaagcaaccacatccccgaggaggagagcagcagcagcagcagcgacgaggacgaggacgacagaaagcagatcgacgagctgctgggcaaggtggtgtgcgtggactacatcagcctggacaagaagaaggccctgtggttccccgccctggtggtgtgccccgactgcagcgacgagatcgccgtgaagaaggacaacatcctggtgagaagcttcaaggacggcaagttcaccagcgtgcccagaaaggacgtgcacgagatcaccagcgacaccgcccccaagcccgacgccgtgctgaagcaggccttcgagcaggccctggagttccacaagagcagaaccatccccgccaactggaagaccgagctgaaggaggacagcagcagcagcgaggccgaggaggaggaggaggaggaggacgacgagaaggagaaggaggacaacagcagcgaggaggaggaggagatcgagcccttccccgaggagagagagaacttcctgcagcagctgtacaagttcatggaggacagaggcacccccatcaacaagagacccgtgctgggctacagaaacctgaacctgttcaagctgttcagactggtgcacaagctgggcggcttcgacaacatcgagagcggcgccgtgtggaagcaggtgtaccaggacctgggcatccccgtgctgaacagcgccgccggctacaacgtgaagtgcgcctacaagaagtacctgtacggcttcgaggagtactgcagaagcgccaacatcgagttccagatggccctgcccgagaaggtggtgaacaagcagtgcaaggagtgcgagaacgtgaaggagatcaaggtgaaggaggagaacgagaccgagatcaaggagatcaagatggaggaggagagaaacatcatccccagagaggagaagcccatcgaggacgagatcgagagaaaggagaacatcaagcccagcctgggcagcaagaagaacctgctggagagcatccccacccacagcgaccaggagaaggaggtgaacatcaagaagcccgaggacaacgagaacctggacgacaaggacgacgacaccaccagagtggacgagagcctgaacatcaaggtggaggccgaggaggagaaggccaagagcggcgacgagaccaacaaggaggaggacgaggacgacgaggaggccgaggaggaggaggaggaggaggaggaggaggaggacgaggacgacgacgacaacaacgaggaggaggagttcgagtgctacccccccggcatgaaggtgcaggtgagatacggcagaggcaagaaccagaagatgtacgaggccagcatcaaggacagcgacgtggagggcggcgaggtgctgtacctggtgcactactgcggctggaacgtgagatacgacgagtggatcaaggccgacaagatcgtgagacccgccgacaagaacgtgcccaagatcaagcacagaaagaagatcaagaacaagctggacaaggagaaggacaaggacgagaagtacagccccaagaactgcaagctgagaagactgagcaagccccccttccagaccaaccccagccccgagatggtgagcaagctggacctgaccgacgccaagaacagcgacaccgcccacatcaagagcatcgagatcaccagcatcctgaacggcctgcaggccagcgagagcagcgccgaggacagcgagcaggaggacgagagaggcgcccaggacatggacaacaacggcaaggaggagagcaagatcgaccacctgaccaacaacagaaacgacctgatcagcaaggaggagcagaacagcagcagcctgctggaggagaacaaggtgcacgccgacctggtgatcagcaagcccgtgagcaagagccccgagagactgagaaaggacatcgaggtgctgagcgaggacaccgactacgaggaggacgaggtgaccaagaagagaaaggacgtgaagaaggacaccaccgacaagagcagcaagccccagatcaagagaggcaagagaagatactgcaacaccgaggagtgcctgaagaccggcagccccggcaagaaggaggagaaggccaagaacaaggagagcctgtgcatggagaacagcagcaacagcagcagcgacgaggacgaggaggagaccaaggccaagatgacccccaccaagaagtacaacggcctggaggagaagagaaagagcctgagaaccaccggcttctacagcggcttcagcgaggtggccgagaagagaatcaagctgctgaacaacagcgacgagagactgcagaacagcagagccaaggacagaaaggacgtgtggagcagcatccagggccagtggcccaagaagaccctgaaggagctgttcagcgacagcgacaccgaggccgccgccagccccccccaccccgcccccgaggagggcgtggccgaggagagcctgcagaccgtggccgaggaggagagctgcagccccagcgtggagctggagaagcccccccccgtgaacgtggacagcaagcccatcgaggagaagaccgtggaggtgaacgacagaaaggccgagttccccagcagcggcagcaacagcgtgctgaacaccccccccaccacccccgagagccccagcagcgtgaccgtgaccgagggcagcagacagcagagcagcgtgaccgtgagcgagcccctggcccccaaccaggaggaggtgagaagcatcaagagcgagaccgacagcaccatcgaggtggacagcgtggccggcgagctgcaggacctgcagagcgagggcaacagcagccccgccggcttcgacgccagcgtgagcagcagcagcagcaaccagcccgagcccgagcaccccgagaaggcctgcaccggccagaagagagtgaaggacgcccagggcggcggcagcagcagcaagaagcagaagagaagccacaaggccaccgtggtgaacaacaagaagaagggcaagggcatcctgccccactag

SEQ ID NO: 73428 - DNA, 1452 bp, synthetic construct
  misc_feature 1..1452: note = Description of Artificial Sequence: Synthetic coding sequence
  source 1..1452: mol_type = other DNA
atgaaggccctggacgagcccccctacctgaccgtgggcaccgacgtgagcgccaagtacagaggcgccttctgcgaggccaagatcaagaccgccaagagactggtgaaggtgaaggtgaccttcagacacgacagcagcaccgtggaggtgcaggacgaccacatcaagggccccctgaaggtgggcgccatcgtggaggtgaagaacctggacggcgcctaccaggaggccgtgatcaacaagctgaccgacgccagctggtacaccgtggtgttcgacgacggcgacgagaagaccctgagaagaagcagcctgtgcctgaagggcgagagacacttcgccgagagcgagaccctggaccagctgcccctgaccaaccccgagcacttcggcacccccgtgatcggcaagaagaccaacagaggcagaagaagcaaccacatccccgaggaggagagcagcagcagcagcagcgacgaggacgaggacgacagaaagcagatcgacgagctgctgggcaaggtggtgtgcgtggactacatcagcctggacaagaagaaggccctgtggttccccgccctggtggtgtgccccgactgcagcgacgagatcgccgtgaagaaggacaacatcctggtgagaagcttcaaggacggcaagttcaccagcgtgcccagaaaggacgtgcacgagatcaccagcgacaccgcccccaagcccgacgccgtgctgaagcaggccttcgagcaggccctggagttccacaagagcagaaccatccccgccaactggaagaccgagctgaaggaggacagcagcagcagcgaggccgaggaggaggaggaggaggaggacgacgagaaggagaaggaggacaacagcagcgaggaggaggaggagatcgagcccttccccgaggagagagagaacttcctgcagcagctgtacaagttcatggaggacagaggcacccccatcaacaagagacccgtgctgggctacagaaacctgaacctgttcaagctgttcagactggtgcacaagctgggcggcttcgacaacatcgagagcggcgccgtgtggaagcaggtgtaccaggacctgggcatccccgtgctgaacagcgccgccggctacaacgtgaagtgcgcctacaagaagtacctgtacggcttcgaggagtactgcagaagcgccaacatcgagttccagatggccctgcccgagaaggtggtgaacaagcagtgcaaggagtgcgagaacgtgaaggagatcaaggtgaaggaggagaacgagaccgagatcaaggagatcaagatggaggaggagagaaacatcatccccagagaggagaagcccatcgaggacgagatcgagagaaaggagaacatcaagcccagcctgggcagcaagaagaacctgctggagagcatccccacccacagctag

SEQ ID NO: 73429 - DNA, 1968 bp, synthetic construct
  misc_feature 1..1968: note = Description of Artificial Sequence: Synthetic coding sequence
  source 1..1968: mol_type = other DNA
atgaaggccctggacgagcccccctacctgaccgtgggcaccgacgtgagcgccaagtacagaggcgccttctgcgaggccaagatcaagaccgccaagagactggtgaaggtgaaggtgaccttcagacacgacagcagcaccgtggaggtgcaggacgaccacatcaagggccccctgaaggtgggcgccatcgtggaggtgaagaacctggacggcgcctaccaggaggccgtgatcaacaagctgaccgacgccagctggtacaccgtggtgttcgacgacggcgacgagaagaccctgagaagaagcagcctgtgcctgaagggcgagagacacttcgccgagagcgagaccctggaccagctgcccctgaccaaccccgagcacttcggcacccccgtgatcggcaagaagaccaacagaggcagaagaagcaaccacatccccgaggaggagagcagcagcagcagcagcgacgaggacgaggacgacagaaagcagatcgacgagctgctgggcaaggtggtgtgcgtggactacatcagcctggacaagaagaaggccctgtggttccccgccctggtggtgtgccccgactgcagcgacgagatcgccgtgaagaaggacaacatcctggtgagaagcttcaaggacggcaagttcaccagcgtgcccagaaaggacgtgcacgagatcaccagcgacaccgcccccaagcccgacgccgtgctgaagcaggccttcgagcaggccctggagttccacaagagcagaaccatccccgccaactggaagaccgagctgaaggaggacagcagcagcagcgaggccgaggaggaggaggaggaggaggacgacgagaaggagaaggaggacaacagcagcgaggaggaggaggagatcgagcccttccccgaggagagagagaacttcctgcagcagctgtacaagttcatggaggacagaggcacccccatcaacaagagacccgtgctgggctacagaaacctgaacctgttcaagctgttcagactggtgcacaagctgggcggcttcgacaacatcgagagcggcgccgtgtggaagcaggtgtaccaggacctgggcatccccgtgctgaacagcgccgccggctacaacgtgaagtgcgcctacaagaagtacctgtacggcttcgaggagtactgcagaagcgccaacatcgagttccagatggccctgcccgagaaggtggtgaacaagcagtgcaaggagtgcgagaacgtgaaggagatcaaggtgaaggaggagaacgagaccgagatcaaggagatcaagatggaggaggagagaaacatcatccccagagaggagaagcccatcgaggacgagatcgagagaaaggagaacatcaagcccagcctgggcagcaagaagaacctgctggagagcatccccacccacagcgaccaggagaaggaggtgaacatcaagaagcccgaggacaacgagaacctggacgacaaggacgacgacaccaccagagtggacgagagcctgaacatcaaggtggaggccgaggaggagaaggccaagagcggcgacgagaccaacaaggaggaggacgaggacgacgaggaggccgaggaggaggaggaggaggaggaggaggaggaggacgaggacgacgacgacaacaacgaggaggaggagttcgagtgctacccccccggcatgaaggtgcaggtgagatacggcagaggcaagaaccagaagatgtacgaggccagcatcaaggacagcgacgtggagggcggcgaggtgctgtacctggtgcactactgcggctggaacgtgagatacgacgagtggatcaaggccgacaagatcgtgagacccgccgacaagaacgtgcccaagatcaagcacagaaagaagatcaagaacagcgtgtacaagaagaagaagaagaagaagaacaagtag

SEQ ID NO: 73430 - DNA, 1785 bp, synthetic construct
  misc_feature 1..1785: note = Description of Artificial Sequence: Synthetic coding sequence
  source 1..1785: mol_type = other DNA
atggccgcccccgtgaagggcaacagaaagcagagcaccgagggcgacgccctggacccccccgccagccccaagcccgccggcaagcagaacggcatccagaaccccatcagcctggaggacagccccgaggccggcggcgagagagaggaggagcaggagagagaggaggagcaggccttcctggtgagcctgtacaagttcatgaaggagagacacacccccatcgagagagtgccccacctgggcttcaagcagatcaacctgtggaagatctacaaggccgtggagaagctgggcgcctacgagctggtgaccggcagaagactgtggaagaacgtgtacgacgagctgggcggcagccccggcagcaccagcgccgccacctgcaccagaagacactacgagagactggtgctgccctacgtgagacacctgaagggcgaggacgacaagcccctgcccaccagcaagcccagaaagcagtacaagatggccaaggagaacagaggcgacgacggcgccaccgagagacccaagaaggccaaggaggagagaagaatggaccagatgatgcccggcaagaccaaggccgacgccgccgaccccgcccccctgcccagccaggagccccccagaaacagcaccgagcagcagggcctggccagcggcagcagcgtgagcttcgtgggcgccagcggctgccccgaggcctacaagagactgctgagcagcttctactgcaagggcacccacggcatcatgagccccctggccaagaagaagctgctggcccaggtgagcaaggtggaggccctgcagtgccaggaggagggctgcagacacggcgccgagccccaggccagccccgccgtgcacctgcccgagagcccccagagccccaagggcctgaccgagaacagcagacacagactgaccccccaggagggcctgcaggcccccggcggcagcctgagagaggaggcccaggccggcccctgccccgccgcccccatcttcaagggctgcttctacacccaccccaccgaggtgctgaagcccgtgagccagcaccccagagacttcttcagcagactgaaggacggcgtgctgctgggcccccccggcaaggagggcctgagcgtgaaggagccccagctggtgtggggcggcgacgccaacagacccagcgccttccacaagggcggcagcagaaagggcatcctgtaccccaagcccaaggcctgctgggtgagccccatggccaaggtgcccgccgagagccccaccctgccccccaccttccccagcagccccggcctgggcagcaagagaagcctggaggaggagggcgccgcccacagcggcaagagactgagagccgtgagccccttcctgaaggaggccgacgccaagaagtgcggcgccaagcccgccggcagcggcctggtgagctgcctgctgggccccgccctgggccccgtgccccccgaggcctacagaggcaccatgctgcactgccccctgaacttcaccggcacccccggccccctgaagggccaggccgccctgcccttcagccccctggtgatccccgccttccccgcccacttcctggccaccgccggccccagccccatggccgccggcctgatgcacttcccccccaccagcttcgacagcgccctgagacacagactgtgccccgccagcagcgcctggcacgccccccccgtgaccacctacgccgccccccacttcttccacctgaacaccaagctgtag

SEQ ID NO: 73431 - DNA, 1917 bp, synthetic construct
  misc_feature 1..1917: note = Description of Artificial Sequence: Synthetic coding sequence
  source 1..1917: mol_type = other DNA
atggccgcccccgtgaagggcaacagaaagcagagcaccgagggcgacgccctggacccccccgccagccccaagcccgccggcaagcagaacggcatccagaaccccatcagcctggaggacagccccgaggccggcggcgagagagaggaggagcaggagagagaggaggagcaggccttcctggtgagcctgtacaagttcatgaaggagagacacacccccatcgagagagtgccccacctgggcttcaagcagatcaacctgtggaagatctacaaggccgtggagaagctgggcgcctacgagctggtgaccggcagaagactgtggaagaacgtgtacgacgagctgggcggcagccccggcagcaccagcgccgccacctgcaccagaagacactacgagagactggtgctgccctacgtgagacacctgaagggcgaggacgacaagcccctgcccaccagcaagcccagaaagcagtacaagatggccaaggagaacagaggcgacgacggcgccaccgagagacccaagaaggccaaggaggagagaagaatggaccagatgatgcccggcaagaccaaggccgacgccgccgaccccgcccccctgcccagccaggagccccccagaaacagcaccgagcagcagggcctggccagcggcagcagcgtgagcttcgtgggcgccagcggctgccccgaggcctacaagagactgctgagcagcttctactgcaagggcacccacggcatcatgagccccctggccaagaagaagctgctggcccaggtgagcaaggtggaggccctgcagtgccaggaggagggctgcagacacggcgccgagccccaggccagccccgccgtgcacctgcccgagagcccccagagccccaagggcctgaccgagaacagcagacacagactgaccccccaggagggcctgcaggcccccggcggcagcctgagagaggaggcccaggccggcccctgccccgccgcccccatcttcaagggctgcttctacacccaccccaccgaggtgctgaagcccgtgagccagcaccccagagacttcttcagcagactgaaggacggcgtgctgctgggcccccccggcaaggagggcctgagcgtgaaggagccccagctggtgtggggcggcgacgccaacagacccagcgccttccacaagggcggcagcagaaagggcatcctgtaccccaagcccaaggcctgctgggtgagccccatggccaaggtgcccgccgagagccccaccctgccccccaccttccccagcagccccggcctgggcagcaagagaagcctggaggaggagggcgccgcccacagcggcaagagactgagagccgtgagccccttcctgaaggaggccgacgccaagaagtgcggcgccaagcccgccggcagcggcctggtgagctgcctgctgggccccgccctgggccccgtgccccccgaggcctacagaggcaccatgctgcactgccccctgaacttcaccggcacccaccaccagagccagcccatgcagagacccaccagcagcaccagcacccccagctgcagacccgcccacggcgtggtgtacaccgtggagagcaccggcgcctacaacagacaggtgctgctgcccggcggcagcgagctggtgcccgccacccaggacaccagagccatgcccctggccggccagcccggcaccagcgaggaggagggcagcggcaagaccggcttcatcagcagacagcagcccgagcccagaagcagaggccccagctgctacaaggccctgggcgaggacggccagctgcccctgccccagagcggcgccagaagcacccaggtggcccacggcaagagcaacaagaagacccccgtgtag

SEQ ID NO: 73432 - DNA, 1581 bp, synthetic construct
  misc_feature 1..1581: note = Description of Artificial Sequence: Synthetic coding sequence
  source 1..1581: mol_type = other DNA
atgaaggagagacacacccccatcgagagagtgccccacctgggcttcaagcagatcaacctgtggaagatctacaaggccgtggagaagctgggcgcctacgagctggtgaccggcagaagactgtggaagaacgtgtacgacgagctgggcggcagccccggcagcaccagcgccgccacctgcaccagaagacactacgagagactggtgctgccctacgtgagacacctgaagggcgaggacgacaagcccctgcccaccagcaagcccagaaagcagtacaagatggccaaggagaacagaggcgacgacggcgccaccgagagacccaagaaggccaaggaggagagaagaatggaccagatgatgcccggcaagaccaaggccgacgccgccgaccccgcccccctgcccagccaggagccccccagaaacagcaccgagcagcagggcctggccagcggcagcagcgtgagcttcgtgggcgccagcggctgccccgaggcctacaagagactgctgagcagcttctactgcaagggcacccacggcatcatgagccccctggccaagaagaagctgctggcccaggtgagcaaggtggaggccctgcagtgccaggaggagggctgcagacacggcgccgagccccaggccagccccgccgtgcacctgcccgagagcccccagagccccaagggcctgaccgagaacagcagacacagactgaccccccaggagggcctgcaggcccccggcggcagcctgagagaggaggcccaggccggcccctgccccgccgcccccatcttcaagggctgcttctacacccaccccaccgaggtgctgaagcccgtgagccagcaccccagagacttcttcagcagactgaaggacggcgtgctgctgggcccccccggcaaggagggcctgagcgtgaaggagccccagctggtgtggggcggcgacgccaacagacccagcgccttccacaagggcggcagcagaaagggcatcctgtaccccaagcccaaggcctgctgggtgagccccatggccaaggtgcccgccgagagccccaccctgccccccaccttccccagcagccccggcctgggcagcaagagaagcctggaggaggagggcgccgcccacagcggcaagagactgagagccgtgagccccttcctgaaggaggccgacgccaagaagtgcggcgccaagcccgccggcagcggcctggtgagctgcctgctgggccccgccctgggccccgtgccccccgaggcctacagaggcaccatgctgcactgccccctgaacttcaccggcacccccggccccctgaagggccaggccgccctgcccttcagccccctggtgatccccgccttccccgcccacttcctggccaccgccggccccagccccatggccgccggcctgatgcacttcccccccaccagcttcgacagcgccctgagacacagactgtgccccgccagcagcgcctggcacgccccccccgtgaccacctacgccgccccccacttcttccacctgaacaccaagctgtag

SEQ ID NO: 73433 - DNA, 3567 bp, synthetic construct
  misc_feature 1..3567: note = Description of Artificial Sequence: Synthetic coding sequence
  source 1..3567: mol_type = other DNA
atggagcccaacagcctgcagtgggtgggcagcccctgcggcctgcacggcccctacatcttctacaaggccttccagttccacctggagggcaagcccagaatcctgagcctgggcgacttcttcttcgtgagatgcacccccaaggaccccatctgcatcgccgagctgcagctgctgtgggaggagagaaccagcagacagctgctgagcagcagcaagctgtacttcctgcccgaggacaccccccagggcagaaacagcgaccacggcgaggacgaggtgatcgccgtgagcgagaaggtgatcgtgaagctggaggacctggtgaagtgggtgcacagcgacttcagcaagtggagatgcggcttccacgccggccccgtgaagaccgaggccctgggcagaaacggccagaaggaggccctgctgaagtacagacagagcaccctgaacagcggcctgaacttcaaggacgtgctgaaggagaaggccgacctgggcgaggacgaggaggagaccaacgtgatcgtgctgagctacccccagtactgcagatacagaagcatgctgaagagaatccaggacaagcccagcagcatcctgaccgaccagttcgccctggccctgggcggcatcgccgtggtgagcagaaacccccagatcctgtactgcagagacaccttcgaccaccccaccctgatcgagaacgagagcatctgcgacgagttcgcccccaacctgaagggcagacccagaaagaagaagccctgcccccagagaagagacagcttcagcggcgtgaaggacagcaacaacaacagcgacggcaaggccgtggccaaggtgaagtgcgaggccagaagcgccctgaccaagcccaagaacaaccacaactgcaagaaggtgagcaacgaggagaagcccaaggtggccatcggcgaggagtgcagagccgacgagcaggccttcctggtggccctgtacaagtacatgaaggagagaaagacccccatcgagagaatcccctacctgggcttcaagcagatcaacctgtggaccatgttccaggccgcccagaagctgggcggctacgagaccatcaccgccagaagacagtggaagcacatctacgacgagctgggcggcaaccccggcagcaccagcgccgccacctgcaccagaagacactacgagagactgatcctgccctacgagagattcatcaagggcgaggaggacaagcccctgccccccatcaagcccagaaagcaggagaacagcagccaggagaacgagaacaagaccaaggtgagcggcaccaagagaatcaagcacgagatccccaagagcaagaaggagaaggagaacgcccccaagccccaggacgccgccgaggtgagcagcgagcaggagaaggagcaggagaccctgatcagccagaagagcatccccgagcccctgcccgccgccgacatgaagaagaagatcgagggctaccaggagttcagcgccaagcccctggccagcagagtggaccccgagaaggacaacgagaccgaccagggcagcaacagcgagaaggtggccgaggaggccggcgagaagggccccaccccccccctgcccagcgcccccctggcccccgagaaggacagcgccctggtgcccggcgccagcaagcagcccctgaccagccccagcgccctggtggacagcaagcaggagagcaagctgtgctgcttcaccgagagccccgagagcgagccccaggaggccagcttccccagcttccccaccacccagccccccctggccaaccagaacgagaccgaggacgacaagctgcccgccatggccgactacatcgccaactgcaccgtgaaggtggaccagctgggcagcgacgacatccacaacgccctgaagcagacccccaaggtgctggtggtgcagagcttcgacatgttcaaggacaaggacctgaccggccccatgaacgagaaccacggcctgaactacacccccctgctgtacagcagaggcaaccccggcatcatgagccccctggccaagaagaagctgctgagccaggtgagcggcgccagcctgagcagcagctacccctacggcagccccccccccctgatcagcaagaagaagctgatcgccagagacgacctgtgcagcagcctgagccagacccaccacggccagagcaccgaccacatggccgtgagcagacccagcgtgatccagcacgtgcagagcttcagaagcaagcccagcgaggagagaaagaccatcaacgacatcttcaagcacgagaagctgagcagaagcgacccccacagatgcagcttcagcaagcaccacctgaaccccctggccgacagctacgtgctgaagcaggagatccaggagggcaaggacaagctgctggagaagagagccctgccccacagccacatgcccagcttcctggccgacttctacagcagcccccacctgcacagcctgtacagacacaccgagcaccacctgcacaacgagcagaccagcaagtaccccagcagagacatgtacagagagagcgagaacagcagcttccccagccacagacaccaggagaagctgcacgtgaactacctgaccagcctgcacctgcaggacaagaagagcgccgccgccgaggcccccaccgacgaccagcccaccgacctgagcctgcccaagaacccccacaagcccaccggcaaggtgctgggcctggcccacagcaccaccggcccccaggagagcaagggcatcagccagttccaggtgctgggcagccagagcagagactgccaccccaaggcctgcagagtgagccccatgaccatgagcggccccaagaagtaccccgagagcctgagcagaagcggcaagccccaccacgtgagactggagaacttcagaaagatggagggcatggtgcaccccatcctgcacagaaagatgagcccccagaacatcggcgccgccagacccatcaagagaagcctggaggacctggacctggtgatcgccggcaagaaggccagagccgtgagccccctggaccccagcaaggaggtgagcggcaaggagaaggccagcgagcaggagagcgagggcagcaaggccgcccacggcggccacagcggcggcggcagcgagggccacaagctgcccctgagcagccccatcttccccggcctgtacagcggcagcctgtgcaacagcggcctgaacagcagactgcccgccggctacagccacagcctgcagtacctgaagaaccagaccgtgctgagccccctgatgcagcccctggccttccacagcctggtgatgcagagaggcatcttcaccagccccaccaacagccagcagctgtacagacacctggccgccgccacccccgtgggcagcagctacggcgacctgctgcacaacagcatctaccccctggccgccatcaacccccaggccgccttccccagcagccagctgagcagcgtgcaccccagcaccaagctgtag

SEQ ID NO: 73434 - DNA, 2838 bp, synthetic construct
  misc_feature 1..2838: note = Description of Artificial Sequence: Synthetic coding sequence
  source 1..2838: mol_type = other DNA
atggcccccaacctgaagggcagacccagaaagaagaagccctgcccccagagaagagacagcttcagcggcgtgaaggacagcaacaacaacagcgacggcaaggccgtggccaaggtgaagtgcgaggccagaagcgccctgaccaagcccaagaacaaccacaactgcaagaaggtgagcaacgaggagaagcccaaggtggccatcggcgaggagtgcagagccgacgagcaggccttcctggtggccctgtacaagtacatgaaggagagaaagacccccatcgagagaatcccctacctgggcttcaagcagatcaacctgtggaccatgttccaggccgcccagaagctgggcggctacgagaccatcaccgccagaagacagtggaagcacatctacgacgagctgggcggcaaccccggcagcaccagcgccgccacctgcaccagaagacactacgagagactgatcctgccctacgagagattcatcaagggcgaggaggacaagcccctgccccccatcaagcccagaaagcaggagaacagcagccaggagaacgagaacaagaccaaggtgagcggcaccaagagaatcaagcacgagatccccaagagcaagaaggagaaggagaacgcccccaagccccaggacgccgccgaggtgagcagcgagcaggagaaggagcaggagaccctgatcagccagaagagcatccccgagcccctgcccgccgccgacatgaagaagaagatcgagggctaccaggagttcagcgccaagcccctggccagcagagtggaccccgagaaggacaacgagaccgaccagggcagcaacagcgagaaggtggccgaggaggccggcgagaagggccccaccccccccctgcccagcgcccccctggcccccgagaaggacagcgccctggtgcccggcgccagcaagcagcccctgaccagccccagcgccctggtggacagcaagcaggagagcaagctgtgctgcttcaccgagagccccgagagcgagccccaggaggccagcttccccagcttccccaccacccagccccccctggccaaccagaacgagaccgaggacgacaagctgcccgccatggccgactacatcgccaactgcaccgtgaaggtggaccagctgggcagcgacgacatccacaacgccctgaagcagacccccaaggtgctggtggtgcagagcttcgacatgttcaaggacaaggacctgaccggccccatgaacgagaaccacggcctgaactacacccccctgctgtacagcagaggcaaccccggcatcatgagccccctggccaagaagaagctgctgagccaggtgagcggcgccagcctgagcagcagctacccctacggcagccccccccccctgatcagcaagaagaagctgatcgccagagacgacctgtgcagcagcctgagccagacccaccacggccagagcaccgaccacatggccgtgagcagacccagcgtgatccagcacgtgcagagcttcagaagcaagcccagcgaggagagaaagaccatcaacgacatcttcaagcacgagaagctgagcagaagcgacccccacagatgcagcttcagcaagcaccacctgaaccccctggccgacagctacgtgctgaagcaggagatccaggagggcaaggacaagctgctggagaagagagccctgccccacagccacatgcccagcttcctggccgacttctacagcagcccccacctgcacagcctgtacagacacaccgagcaccacctgcacaacgagcagaccagcaagtaccccagcagagacatgtacagagagagcgagaacagcagcttccccagccacagacaccaggagaagctgcacgtgaactacctgaccagcctgcacctgcaggacaagaagagcgccgccgccgaggcccccaccgacgaccagcccaccgacctgagcctgcccaagaacccccacaagcccaccggcaaggtgctgggcctggcccacagcaccaccggcccccaggagagcaagggcatcagccagttccaggtgctgggcagccagagcagagactgccaccccaaggcctgcagagtgagccccatgaccatgagcggccccaagaagtaccccgagagcctgagcagaagcggcaagccccaccacgtgagactggagaacttcagaaagatggagggcatggtgcaccccatcctgcacagaaagatgagcccccagaacatcggcgccgccagacccatcaagagaagcctggaggacctggacctggtgatcgccggcaagaaggccagagccgtgagccccctggaccccagcaaggaggtgagcggcaaggagaaggccagcgagcaggagagcgagggcagcaaggccgcccacggcggccacagcggcggcggcagcgagggccacaagctgcccctgagcagccccatcttccccggcctgtacagcggcagcctgtgcaacagcggcctgaacagcagactgcccgccggctacagccacagcctgcagtacctgaagaaccagaccgtgctgagccccctgatgcagcccctggccttccacagcctggtgatgcagagaggcatcttcaccagccccaccaacagccagcagctgtacagacacctggccgccgccacccccgtgggcagcagctacggcgacctgctgcacaacagcatctaccccctggccgccatcaacccccaggccgccttccccagcagccagctgagcagcgtgcaccccagcaccaagctgtag

SEQ ID NO: 73435 - DNA, 1134 bp, synthetic construct
  misc_feature 1..1134: note = Description of Artificial Sequence: Synthetic coding sequence
  source 1..1134: mol_type = other DNA
atgggcaccaccgaggccaccctgagaatggagaacgtggacgtgaaggaggagtggcaggacgaggacctgcccagacccctgcccgaggagaccggcgtggagctgctgggcagccccgtggaggacaccagcagcccccccaacaccctgaacttcaacggcgcccacagaaagagaaagaccctggtggcccccgagatcaacatcagcctggaccagagcgagggcagcctgctgagcgacgacttcctggacacccccgacgacctggacatcaacgtggacgacatcgagacccccgacgagaccgacagcctggagttcctgggcaacggcaacgagctggagtgggaggacgacacccccgtggccaccgccaagaacatgcccggcgacagcgccgacctgttcggcgacggcaccaccgaggacggcagcgccgccaacggcagactgtggagaaccgtgatcatcggcgagcaggagcacagaatcgacctgcacatgatcagaccctacatgaaggtggtgacccacggcggctactacggcgagggcctgaacgccatcatcgtgttcgccgcctgcttcctgcccgacagcagcctgcccgactaccactacatcatggagaacctgttcctgtacgtgatcagcagcctggagctgctggtggccgaggactacatgatcgtgtacctgaacggcgccacccccagaagaagaatgcccggcatcggctggctgaagaagtgctaccagatgatcgacagaagactgagaaagaacctgaagagcctgatcatcgtgcaccccagctggttcatcagaaccgtgctggccatcagcagacccttcatcagcgtgaagttcatcaacaagatccagtacgtgcacagcctggaggacctggagcagctgatccccatggagcacgtgcagatccccgactgcgtgctgcagtacgaggaggagagactgaaggccagaagagagagcgccagaccccagcccgagttcgtgctgcccagaagcgaggagaagcccgaggtggcccccgtggagaacagaagcgccctggtgagcgaggaccaggagaccagcctgcagcccctgcacagaagcagctag

SEQ ID NO: 73436 - DNA, 1116 bp, synthetic construct
  misc_feature 1..1116: note = Description of Artificial Sequence: Synthetic coding sequence
  source 1..1116: mol_type = other DNA
atgggcaccaccgaggccaccctgagaatggagaacgtggacgtgaaggaggagtggcaggacgaggacctgcccagacccctgcccgaggagaccggcgtggagctgctgggcagccccgtggaggacaccagcagcccccccaacaccctgaacttcaacggcgcccacagaaagagaaagaccctggtggcccccgagatcaacatcagcctggaccagagcgagggcagcctgctgagcgacgacttcctggacacccccgacgacctggacatcaacgtggacgacatcgagacccccgacgagaccgacagcctggagttcctgggcaacggcaacgagctggagtgggaggacgacacccccgtggccaccgccaagaacatgcccggcgacagcgccgacctgttcggcgacggcaccaccgaggacggcagcgccgccaacggcagactgtggagaaccgtgatcatcggcgagcaggagcacagaatcgacctgcacatgatcagaccctacatgaaggtggtgacccacggcggctactacggcgagggcctgaacgccatcatcgtgttcgccgcctgcttcctgcccgacagcagcctgcccgactaccactacatcatggagaacctgttcctgtacgtgatcagcagcctggagctgctggtggccgaggactacatgatcgtgtacctgaacggcgccacccccagaagaagaatgcccggcatcggctggctgaagaagtgctaccagatgatcgacagaagactgagaaagaacctgaagagcctgatcatcgtgcaccccagctggttcatcagaaccgtgctggccatcagcagacccttcatcagcgtgaagttcatcaacaagatccagtacgtgcacagcctggaggacctggagcagctgatccccatggagcacgtgcagatccccgactgcgtgctgcagtacgaggaggagagactgaaggccagaagagagagcgccagaccccagcccgagttcgtgctgcccagaagcgaggagaagcccgaggtggcccccgtggagaacagaagcgccctggtgagcgaggaccaggagaccagaatgagctag

SEQ ID NO: 73437 - DNA, 1134 bp, synthetic construct
  misc_feature 1..1134: note = Description of Artificial Sequence: Synthetic coding sequence
  source 1..1134: mol_type = other DNA
atggccggcagaagaagcagccagcccggcatcgccctgcacaaccccggcaaccaccaggtgcagaacccccagggcagactggagaccgtgagacccctgcccgaggagaccggcgtggagctgctgggcagccccgtggaggacaccagcagcccccccaacaccctgaacttcaacggcgcccacagaaagagaaagaccctggtggcccccgagatcaacatcagcctggaccagagcgagggcagcctgctgagcgacgacttcctggacacccccgacgacctggacatcaacgtggacgacatcgagacccccgacgagaccgacagcctggagttcctgggcaacggcaacgagctggagtgggaggacgacacccccgtggccaccgccaagaacatgcccggcgacagcgccgacctgttcggcgacggcaccaccgaggacggcagcgccgccaacggcagactgtggagaaccgtgatcatcggcgagcaggagcacagaatcgacctgcacatgatcagaccctacatgaaggtggtgacccacggcggctactacggcgagggcctgaacgccatcatcgtgttcgccgcctgcttcctgcccgacagcagcctgcccgactaccactacatcatggagaacctgttcctgtacgtgatcagcagcctggagctgctggtggccgaggactacatgatcgtgtacctgaacggcgccacccccagaagaagaatgcccggcatcggctggctgaagaagtgctaccagatgatcgacagaagactgagaaagaacctgaagagcctgatcatcgtgcaccccagctggttcatcagaaccgtgctggccatcagcagacccttcatcagcgtgaagttcatcaacaagatccagtacgtgcacagcctggaggacctggagcagctgatccccatggagcacgtgcagatccccgactgcgtgctgcagtacgaggaggagagactgaaggccagaagagagagcgccagaccccagcccgagttcgtgctgcccagaagcgaggagaagcccgaggtggcccccgtggagaacagaagcgccctggtgagcgaggaccaggagaccagcatgagctag

SEQ ID NO: 73438 - DNA, 1116 bp, synthetic construct
  misc_feature 1..1116: note = Description of Artificial Sequence: Synthetic coding sequence
  source 1..1116: mol_type = other DNA
atgggcaccaccgaggccaccctgagaatggagaacgtggacgtgaaggaggagtggcaggacgaggacctgcccagacccctgcccgaggagaccggcgtggagctgctgggcagccccgtggaggacaccagcagcccccccaacaccctgaacttcaacggcgcccacagaaagagaaagaccctggtggcccccgagatcaacatcagcctggaccagagcgagggcagcctgctgagcgacgacttcctggacacccccgacgacctggacatcaacgtggacgacatcgagacccccgacgagaccgacagcctggagttcctgggcaacggcaacgagctggagtgggaggacgacacccccgtggccaccgccaagaacatgcccggcgacagcgccgacctgttcggcgacggcaccaccgaggacggcagcgccgccaacggcagactgtggagaaccgtgatcatcggcgagcaggagcacagaatcgacctgcacatgatcagaccctacatgaaggtggtgacccacggcggctactacggcgagggcctgaacgccatcatcgtgttcgccgcctgcttcctgcccgacagcagcctgcccgactaccactacatcatggagaacctgttcctgtacgtgatcagcagcctggagctgctggtggccgaggactacatgatcgtgtacctgaacggcgccacccccagaagaagaatgcccggcatcggctggctgaagaagtgctaccagatgatcgacagaagactgagaaagaacctgaagagcctgatcatcgtgcaccccagctggttcatcagaaccgtgctggccatcagcagacccttcatcagcgtgaagttcatcaacaagatccagtacgtgcacagcctggaggacctggagcagctgatccccatggagcacgtgcagatccccgactgcgtgctgcagtacgaggaggagagactgaaggccagaagagagagcgccagaccccagcccgagttcgtgctgcccagaagcgaggagaagcccgaggtggcccccgtggagaacagaagcgccctggtgagcgaggaccaggagaccagcatgagctag

SEQ ID NO: 73439 - DNA, 1050 bp, synthetic construct
  misc_feature 1..1050: note = Description of Artificial Sequence: Synthetic coding sequence
  source 1..1050: mol_type = other DNA
atgggcaccaccgaggccaccctgagaatggagaacgtggacgtgaaggaggagtggcaggacgaggaccccccccccaacaccctgaacttcaacggcgcccacagaaagagaaagaccctggtggcccccgagatcaacatcagcctggaccagagcgagggcagcctgctgagcgacgacttcctggacacccccgacgacctggacatcaacgtggacgacatcgagacccccgacgagaccgacagcctggagttcctgggcaacggcaacgagctggagtgggaggacgacacccccgtggccaccgccaagaacatgcccggcgacagcgccgacctgttcggcgacggcaccaccgaggacggcagcgccgccaacggcagactgtggagaaccgtgatcatcggcgagcaggagcacagaatcgacctgcacatgatcagaccctacatgaaggtggtgacccacggcggctactacggcgagggcctgaacgccatcatcgtgttcgccgcctgcttcctgcccgacagcagcctgcccgactaccactacatcatggagaacctgttcctgtacgtgatcagcagcctggagctgctggtggccgaggactacatgatcgtgtacctgaacggcgccacccccagaagaagaatgcccggcatcggctggctgaagaagtgctaccagatgatcgacagaagactgagaaagaacctgaagagcctgatcatcgtgcaccccagctggttcatcagaaccgtgctggccatcagcagacccttcatcagcgtgaagttcatcaacaagatccagtacgtgcacagcctggaggacctggagcagctgatccccatggagcacgtgcagatccccgactgcgtgctgcagtacgaggaggagagactgaaggccagaagagagagcgccagaccccagcccgagttcgtgctgcccagaagcgaggagaagcccgaggtggcccccgtggagaacagaagcgccctggtgagcgaggaccaggagaccagaatgagctag

SEQ ID NO: 73440 - DNA, 2448 bp, synthetic construct
  misc_feature 1..2448: note = Description of Artificial Sequence: Synthetic coding sequence
  source 1..2448: mol_type = other DNA
atgaagagcaaccaggagagaagcaacgagtgcctgccccccaagaagagagagatccccgccaccagcagaagcagcgaggagaaggcccccaccctgcccagcgacaaccacagagtggagggcaccgcctggctgcccggcaaccccggcggcagaggccacggcggcggcagacacggccccgccggcaccagcgtggagctgggcctgcagcagggcatcggcctgcacaaggccctgagcaccggcctggactacagcccccccagcgcccccagaagcgtgcccgtggccaccaccctgcccgccgcctacgccaccccccagcccggcacccccgtgagccccgtgcagtacgcccacctgccccacaccttccagttcatcggcagcagccagtacagcggcacctacgccagcttcatccccagccagctgatcccccccaccgccaaccccgtgaccagcgccgtggccagcgccgccggcgccaccacccccagccagagaagccagctggaggcctacagcaccctgctggccaacatgggcagcctgagccagacccccggccacaaggccgagcagcagcagcagcagcagcagcagcagcagcagcagcaccagcaccagcagcagcagcagcagcagcagcagcagcagcagcagcagcacctgagcagagcccccggcctgatcacccccggcagccccccccccgcccagcagaaccagtacgtgcacatcagcagcagcccccagaacaccggcagaaccgccagcccccccgccatccccgtgcacctgcacccccaccagaccatgatcccccacaccctgaccctgggcccccccagccaggtggtgatgcagtacgccgacagcggcagccacttcgtgcccagagaggccaccaagaaggccgagagcagcagactgcagcaggccatccaggccaaggaggtgctgaacggcgagatggagaagagcagaagatacggcgcccccagcagcgccgacctgggcctgggcaaggccggcggcaagagcgtgccccacccctacgagagcagacacgtggtggtgcaccccagccccagcgactacagcagcagagaccccagcggcgtgagagccagcgtgatggtgctgcccaacagcaacacccccgccgccgacctggaggtgcagcaggccacccacagagaggccagccccagcaccctgaacgacaagagcggcctgcacctgggcaagcccggccacagaagctacgccctgagcccccacaccgtgatccagaccacccacagcgccagcgagcccctgcccgtgggcctgcccgccaccgccttctacgccggcacccagccccccgtgatcggctacctgagcggccagcagcaggccatcacctacgccggcagcctgccccagcacctggtgatccccggcacccagcccctgctgatccccgtgggcagcaccgacatggaggccagcggcgccgcccccgccatcgtgaccagcagcccccagttcgccgccgtgccccacaccttcgtgaccaccgccctgcccaagagcgagaacttcaaccccgaggccctggtgacccaggccgcctaccccgccatggtgcaggcccagatccacctgcccgtggtgcagagcgtggccagccccgccgccgccccccccaccctgcccccctacttcatgaagggcagcatcatccagctggccaacggcgagctgaagaaggtggaggacctgaagaccgaggacttcatccagagcgccgagatcagcaacgacctgaagatcgacagcagcaccgtggagagaatcgaggacagccacagccccggcgtggccgtgatccagttcgccgtgggcgagcacagagcccaggtgagcgtggaggtgctggtggagtaccccttcttcgtgttcggccagggctggagcagctgctgccccgagagaaccagccagctgttcgacctgccctgcagcaagctgagcgtgggcgacgtgtgcatcagcctgaccctgaagaacctgaagaacggcagcgtgaagaagggccagcccgtggaccccgccagcgtgctgctgaagcacagcaaggccgacggcctggccggcagcagacacagatacgccgagcaggagaacggcatcaaccagggcagcgcccagatgctgagcgagaacggcgagctgaagttccccgagaagatgggcctgcccgccgcccccttcctgaccaagatcgagcccagcaagcccgccgccaccagaaagagaagatggagcgcccccgagagcagaaagctggagaagagcgaggacgagccccccctgaccctgcccaagcccagcctgatcccccaggaggtgaagatctgcatcgagggcagaagcaacgtgggcaagtag

SEQ ID NO: 73441 - DNA, 2448 bp, synthetic construct; identical to SEQ ID NO: 73440
  misc_feature 1..2448: note = Description of Artificial Sequence: Synthetic coding sequence
  source 1..2448: mol_type = other DNA

SEQ ID NO: 73442 - DNA, 2448 bp, synthetic construct; identical to SEQ ID NO: 73440
  misc_feature 1..2448: note = Description of Artificial Sequence: Synthetic coding sequence
  source 1..2448: mol_type = other DNA

SEQ ID NO: 73443 - DNA, 1428 bp, synthetic construct
  misc_feature 1..1428: note = Description of Artificial Sequence: Synthetic coding sequence
  source 1..1428: mol_type = other DNA
atggccgcccccagacccccccccgccagactgagcggcgtgatggtgcccgcccccatccaggacctggaggccctgagagccctgaccgccctgttcaaggagcagagaaacagagagaccgcccccagaaccatcttccagagagtgctggacatcctgaagaagagcagccacgccgtggagctggcctgcagagaccccagccaggtggagaacctggccagcagcctgcagctgatcaccgagtgcttcagatgcctgagaaacgcctgcatcgagtgcagcgtgaaccagaacagcatcagaaacctggacaccatcggcgtggccgtggacctgatcctgctgttcagagagctgagagtggagcaggagagcctgctgaccgccttcagatgcggcctgcagttcctgggcaacatcgccagcagaaacgaggacagccagagcatcgtgtgggtgcacgccttccccgagctgttcctgagctgcctgaaccaccccgacaagaagatcgtggcctacagcagcatgatcctgttcaccagcctgaaccacgagagaatgaaggagctggaggagaacctgaacatcgccatcgacgtgatcgacgcctaccagaagcaccccgagagcgagtggcccttcctgatcatcaccgacctgttcctgaagagccccgagctggtgcaggccatgttccccaagctgaacaaccaggagagagtgaccctgctggacctgatgatcgccaagatcaccagcgacgagcccctgaccaaggacgacatccccgtgttcctgagacacgccgagctgatcgccagcaccttcgtggaccagtgcaagaccgtgctgaagctggccagcgaggagccccccgacgacgaggaggccctggccaccatcagactgctggacgtgctgtgcgagatgaccgtgaacaccgagctgctgggctacctgcaggtgttccccggcctgctggagagagtgatcgacctgctgagagtgatccacgtggccggcaaggagaccaccaacatcttcagcaactgcggctgcgtgagagccgagggcgacatcagcaacgtggccaacggcttcaagagccacctgatcagactgatcggcaacctgtgctacaagaacaaggacaaccaggacaaggtgaacgagctggacggcatccccctgatcctggacaactgcaacatcagcgacagcaaccccttcctgacccagtgggtgatctacgccatcagaaacctgaccgaggacaacagccagaaccaggacctgatcgccaagatggaggagcagggcctggccgacgccagcctgctgaagaaggtgggcttcgaggtggagaagaagggcgagaagctgatcctgaagagcaccagagacacccccaagccctag

SEQ ID NO: 73444 - DNA, 1236 bp, synthetic construct
  misc_feature 1..1236: note = Description of Artificial Sequence: Synthetic coding sequence
  source 1..1236: mol_type = other DNA
atggccgcccccagacccccccccgccagactgagcggcgtgatggtgcccgcccccatccaggacctggaggccctgagagccctgaccgccctgttcaaggagcagagaaacagaaacctggacaccatcggcgtggccgtggacctgatcctgctgttcagagagctgagagtggagcaggagagcctgctgaccgccttcagatgcggcctgcagttcctgggcaacatcgccagcagaaacgaggacagccagagcatcgtgtgggtgcacgccttccccgagctgttcctgagctgcctgaaccaccccgacaagaagatcgtggcctacagcagcatgatcctgttcaccagcctgaaccacgagagaatgaaggagctggaggagaacctgaacatcgccatcgacgtgatcgacgcctaccagaagcaccccgagagcgagtggcccttcctgatcatcaccgacctgttcctgaagagccccgagctggtgcaggccatgttccccaagctgaacaaccaggagagagtgaccctgctggacctgatgatcgccaagatcaccagcgacgagcccctgaccaaggacgacatccccgtgttcctgagacacgccgagctgatcgccagcaccttcgtggaccagtgcaagaccgtgctgaagctggccagcgaggagccccccgacgacgaggaggccctggccaccatcagactgctggacgtgctgtgcgagatgaccgtgaacaccgagctgctgggctacctgcaggtgttccccggcctgctggagagagtgatcgacctgctgagagtgatccacgtggccggcaaggagaccaccaacatcttcagcaactgcggctgcgtgagagccgagggcgacatcagcaacgtggccaacggcttcaagagccacctgatcagactgatcggcaacctgtgctacaagaacaaggacaaccaggacaaggtgaacgagctggacggcatccccctgatcctggacaactgcaacatcagcgacagcaaccccttcctgacccagtgggtgatctacgccatcagaaacctgaccgaggacaacagccagaaccaggacctgatcgccaagatggaggagcagggcctggccgacgccagcctgctgaagaaggtgggcttcgaggtggagaagaagggcgagaagctgatcctgaagagcaccagagacacccccaagccctag

SEQ ID NO: 73445 - DNA, 1362 bp, synthetic construct
  misc_feature 1..1362: note = Description of Artificial Sequence: Synthetic coding sequence
  source 1..1362: mol_type = other DNA
atggccgcccccagacccccccccgccagactgagcggcgtgatggtgcccgcccccatccaggacctggaggccctgagagccctgaccgccctgttcaaggagcagagaaacagagagaccgcccccagaaccatcttccagagagtgctggacatcctgaagaagagcagccacgccgtggagctggcctgcagagaccccagccaggtggagaacctggccagcagcctgcagctgatcaccgagtgcttcagatgcctgagaaacgcctgcatcgagtgcagcgtgaaccagaacagcatcagaaacctggacaccatcggcgtggccgtggacctgatcctgctgttcagagagctgagagtggagcaggagagcctgctgaccgccttcagatgcggcctgcagttcctgggcaacatcgccagcagaaacgaggacagccagagcatcgtgtgggtgcacgccttccccgagctgttcctgagctgcctgaaccaccccgacaagaagatcgtggcctacagcagcatgatcctgttcaccagcctgaaccacgagagaatgaaggagctggaggagaacctgaacatcgccatcgacgtgatcgacgcctaccagaagcaccccgagagcgagtggcccttcctgatcatcaccgacctgttcctgaagagccccgagctggtgcaggccatgttccccaagctgaacaaccaggagagagtgaccctgctggacctgatgatcgccaagatcaccagcgacgagcccctgaccaaggacgacatccccgtgttcctgagacacgccgagctgatcgccagcaccttcgtggaccagtgcaagaccgtgctgaagctggccagcgaggagccccccgtgatgtacccctacatgagaatcgtgggcaagttcagactgctggacgtgctgtgcgagatgaccgtgaacaccgagctgctgggctacctgcaggtgttccccggcctgctggagagagtgatcgacctgctgagagtgatccacgtggccggcaaggagaccaccaacatcttcagcaactgcggctgcgtgagagccgagggcgacatcagcaacgtggccaacggcttcaagagccacctgatcagactgatcggcaacctgtgctacaagaacaaggacaaccaggacaaggtgaacgagctggacggcatccccctgatcctggacaactgcaacatcagcgacagcaacccctgcagcgaccccgtgggcgacatctgccaccccaagccctacagaagacagcagcccaagcccagattcgactgcaaggacggcggcaccggcgccggcagatgcatccccacctag

SEQ ID NO: 73446 - DNA, 2070 bp, synthetic construct
  misc_feature 1..2070: note = Description of Artificial Sequence: Synthetic coding sequence
  source 1..2070: mol_type = other DNA
atgaagcccgtgcacgagagaagccaggagtgcctgccccccaagaagagagacctgcccgtgaccagcgaggacatgggcagaaccaccagctgcagcaccaaccacacccccagcagcgacgccagcgagtggagcagaggcgtggtggtggccggccagagccaggccggcgccagagtgagcctgggcggcgacggcgccgaggccatcaccggcctgaccgtggaccagtacggcatgctgtacaaggtggccgtgccccccgccaccttcagccccaccggcctgcccagcgtggtgaacatgagccccctgccccccaccttcaacgtggccagcagcctgatccagcaccccggcatccactacccccccctgcactacgcccagctgcccagcaccagcctgcagttcatcggcagcccctacagcctgccctacgccgtgccccccaacttcctgcccagccccctgctgagccccagcgccaacctggccaccagccacctgccccacttcgtgccctacgccagcctgctggccgagggcgccaccccccccccccaggcccccagccccgcccacagcttcaacaaggcccccagcgccaccagccccagcggccagctgccccaccacagcagcacccagcccctggacctggcccccggcagaatgcccatctactaccagatgagcagactgcccgccggctacaccctgcacgagaccccccccgccggcgccagccccgtgctgaccccccaggagagccagagcgccctggaggccgccgccgccaacggcggccagagacccagagagagaaacctggtgagaagagagagcgaggccctggacagccccaacagcaagggcgagggccagggcctggtgcccgtggtggagtgcgtggtggacggccagctgttcagcggcagccagacccccagagtggaggtggccgcccccgcccacagaggcacccccgacaccgacctggaggtgcagagagtggtgggcgccctggccagccaggactacagagtggtggccgcccagagaaaggaggagcccagccccctgaacctgagccaccacacccccgaccaccagggcgagggcagaggcagcgccagaaaccccgccgagctggccgagaagagccaggccagaggcttctacccccagagccaccaggagcccgtgaagcacagacccctgcccaaggccatggtggtggccaacggcaacctggtgcccaccggcaccgacagcggcctgctgcccgtgggcagcgagatcctggtggccagcagcctggacgtgcaggccagagccaccttccccgacaaggagcccacccccccccccatcaccagcagccacctgcccagccacttcatgaagggcgccatcatccagctggccaccggcgagctgaagagagtggaggacctgcagacccaggacttcgtgagaagcgccgaggtgagcggcggcctgaagatcgacagcagcaccgtggtggacatccaggagagccagtggcccggcttcgtgatgctgcacttcgtggtgggcgagcagcagagcaaggtgagcatcgaggtgccccccgagcaccccttcttcgtgtacggccagggctggagcagctgcagccccggcagaaccacccagctgttcagcctgccctgccacagactgcaggtgggcgacgtgtgcatcagcatcagcctgcagagcctgaacagcaacagcgtgagccaggccagctgcgccccccccagccagctgggcccccccagagagagacccgagagaaccgtgctgggcagcagagagctgtgcgacagcgagggcaagagccagcccgccggcgagggcagcagagtggtggagcccagccagcccgagagcggcgcccaggcctgctggcccgcccccagcttccagagatacagcatgcagggcgaggaggccagagccgccctgctgagacccagcttcatcccccaggaggtgaagctgagcatcgagggcagaagcaacgccggcaagtag

SEQ ID NO: 73447 - DNA, 3942 bp, synthetic construct
  misc_feature 1..3942: note = Description of Artificial Sequence: Synthetic coding sequence
  source 1..3942: mol_type = other DNA
atgagaagcgccgccgccgcccccagaagccccgccgtggccaccgagagcagaagattcgccgccgccagatggcccggctggagaagcctgcagagacccgccagaagaagcggcagaggcggcggcggcgccgcccccggcccctaccccagcgccgccccccccccccccggccccggccccccccccagcagacagagcagcccccccagcgccagcgactgcttcggcagcaacggcaacggcggcggcgccttcagacccggcagcagaagactgctgggcctgggcggcccccccagacccttcgtggtgctgctgctgcccctggccagccccggcgccccccccgccgcccccaccagagccagccccctgggcgccagagccagcccccccagaagcggcgtgagcctggccagacccgcccccggctgccccagacccgcctgcgagcccgtgtacggccccctgaccatgagcctgaagccccagcagcagcagcagcagcagcagcagcagcagcagcagcagcagcagcagcagcagcagcagcagcagcccccccccgccgccgccaacgtgagaaagcccggcggcagcggcctgctggccagccccgccgccgcccccagccccagcagcagcagcgtgagcagcagcagcgccaccgcccccagcagcgtggtggccgccaccagcggcggcggcagacccggcctgggcagaggcagaaacagcaacaagggcctgccccagagcaccatcagcttcgacggcatctacgccaacatgagaatggtgcacatcctgaccagcgtggtgggcagcaagtgcgaggtgcaggtgaagaacggcggcatctacgagggcgtgttcaagacctacagccccaagtgcgacctggtgctggacgccgcccacgagaagagcaccgagagcagcagcggccccaagagagaggagatcatggagagcatcctgttcaagtgcagcgacttcgtggtggtgcagttcaaggacatggacagcagctacgccaagagagacgccttcaccgacagcgccatcagcgccaaggtgaacggcgagcacaaggagaaggacctggagccctgggacgccggcgagctgaccgccaacgaggagctggaggccctggagaacgacgtgagcaacggctgggaccccaacgacatgttcagatacaacgaggagaactacggcgtggtgagcacctacgacagcagcctgagcagctacaccgtgcccctggagagagacaacagcgaggagttcctgaagagagaggccagagccaaccagctggccgaggagatcgagagcagcgcccagtacaaggccagagtggccctggagaacgacgacagaagcgaggaggagaagtacaccgccgtgcagagaaacagcagcgagagagagggccacagcatcaacaccagagagaacaagtacatcccccccggccagagaaacagagaggtgatcagctggggcagcggcagacagaacagccccagaatgggccagcccggcagcggcagcatgcccagcagaagcaccagccacaccagcgacttcaaccccaacagcggcagcgaccagagagtggtgaacggcggcgtgccctggcccagcccctgccccagccccagcagcagaccccccagcagataccagagcggccccaacagcctgccccccagagccgccacccccaccagaccccccagcagaccccccagcagacccagcagaccccccagccaccccagcgcccacggcagccccgcccccgtgagcaccatgcccaagagaatgagcagcgagggcccccccagaatgagccccaaggcccagagacaccccagaaaccacagagtgagcgccggcagaggcagcatcagcagcggcctggagttcgtgagccacaacccccccagcgaggccgccaccccccccgtggccagaaccagccccagcggcggcacctggagcagcgtggtgagcggcgtgcccagactgagccccaagacccacagacccagaagccccagacagaacagcatcggcaacacccccagcggccccgtgctggccagcccccaggccggcatcatccccaccgaggccgtggccatgcccatccccgccgccagccccacccccgccagccccgccagcaacagagccgtgacccccagcagcgaggccaaggacagcagactgcaggaccagagacagaacagccccgccggcaacaaggagaacatcaagcccaacgagaccagccccagcttcagcaaggccgagaacaagggcatcagccccgtggtgagcgagcacagaaagcagatcgacgacctgaagaagttcaagaacgacttcagactgcagcccagcagcaccagcgagagcatggaccagctgctgaacaagaacagagagggcgagaagagcagagacctgatcaaggacaagatcgagcccagcgccaaggacagcttcatcgagaacagcagcagcaactgcaccagcggcagcagcaagcccaacagccccagcatcagccccagcatcctgagcaacaccgagcacaagagaggccccgaggtgaccagccagggcgtgcagaccagcagccccgcctgcaagcaggagaaggacgacaaggaggagaagaaggacgccgccgagcaggtgagaaagagcaccctgaaccccaacgccaaggagttcaaccccagaagcttcagccagcccaagcccagcaccacccccaccagccccagaccccaggcccagcccagccccagcatggtgggccaccagcagcccacccccgtgtacacccagcccgtgtgcttcgcccccaacatgatgtaccccgtgcccgtgagccccggcgtgcagcccctgtaccccatccccatgacccccatgcccgtgaaccaggccaagacctacagagccgtgcccaacatgccccagcagagacaggaccagcaccaccagagcgccatgatgcaccccgccagcgccgccggcccccccatcgccgccaccccccccgcctacagcacccagtacgtggcctacagcccccagcagttccccaaccagcccctggtgcagcacgtgccccactaccagagccagcacccccacgtgtacagccccgtgatccagggcaacgccagaatgatggccccccccacccacgcccagcccggcctggtgagcagcagcgccacccagtacggcgcccacgagcagacccacgccatgtacgcctgccccaagctgccctacaacaaggagaccagccccagcttctacttcgccatcagcaccggcagcctggcccagcagtacgcccaccccaacgccaccctgcacccccacaccccccacccccagcccagcgccacccccaccggccagcagcagagccagcacggcggcagccaccccgcccccagccccgtgcagcaccaccagcaccaggccgcccaggccctgcacctggccagcccccagcagcagagcgccatctaccacgccggcctggcccccaccccccccagcatgacccccgccagcaacacccagagcccccagaacagcttccccgccgcccagcagaccgtgttcaccatccaccccagccacgtgcagcccgcctacaccaaccccccccacatggcccacgtgccccaggcccacgtgcagagcggcatggtgcccagccaccccaccgcccacgcccccatgatgctgatgaccacccagccccccggcggcccccaggccgccctggcccagagcgccctgcagcccatccccgtgagcaccaccgcccacttcccctacatgacccaccccagcgtgcaggcccaccaccagcagcagctgtag

SEQ ID NO: 73448 - DNA, 2988 bp, synthetic construct
  misc_feature 1..2988: note = Description of Artificial Sequence: Synthetic coding sequence
  source 1..2988: mol_type = other DNA
atgagaagcgccgccgccgcccccagaagccccgccgtggccaccgagagcagaagattcgccgccgccagatggcccggctggagaagcctgcagagacccgccagaagaagcggcagaggcggcggcggcgccgcccccggcccctaccccagcgccgccccccccccccccggccccggccccccccccagcagacagagcagcccccccagcgccagcgactgcttcggcagcaacggcaacggcggcggcgccttcagacccggcagcagaagactgctgggcctgggcggcccccccagacccttcgtggtgctgctgctgcccctggccagccccggcgccccccccgccgcccccaccagagccagccccctgggcgccagagccagcccccccagaagcggcgtgagcctggccagacccgcccccggctgccccagacccgcctgcgagcccgtgtacggccccctgaccatgagcctgaagccccagcagcagcagcagcagcagcagcagcagcagcagcagcagcagcagcagcagcagcagcagcagcagcccccccccgccgccgccaacgtgagaaagcccggcggcagcggcctgctggccagccccgccgccgcccccagccccagcagcagcagcgtgagcagcagcagcgccaccgcccccagcagcgtggtggccgccaccagcggcggcggcagacccggcctgggcagaggcagaaacagcaacaagggcctgccccagagcaccatcagcttcgacggcatctacgccaacatgagaatggtgcacatcctgaccagcgtggtgggcagcaagtgcgaggtgcaggtgaagaacggcggcatctacgagggcgtgttcaagacctacagccccaagtgcgacctggtgctggacgccgcccacgagaagagcaccgagagcagcagcggccccaagagagaggagatcatggagagcatcctgttcaagtgcagcgacttcgtggtggtgcagttcaaggacatggacagcagctacgccaagagagacgccttcaccgacagcgccatcagcgccaaggtgaacggcgagcacaaggagaaggacctggagccctgggacgccggcgagctgaccgccaacgaggagctggaggccctggagaacgacgtgagcaacggctgggaccccaacgacatgttcagatacaacgaggagaactacggcgtggtgagcacctacgacagcagcctgagcagctacaccgtgcccctggagagagacaacagcgaggagttcctgaagagagaggccagagccaaccagctggccgaggagatcgagagcagcgcccagtacaaggccagagtggccctggagaacgacgacagaagcgaggaggagaagtacaccgccgtgcagagaaacagcagcgagagagagggccacagcatcaacaccagagagaacaagtacatcccccccggccagagaaacagagaggtgatcagctggggcagcggcagacagaacagccccagaatgggccagcccggcagcggcagcatgcccagcagaagcaccagccacaccagcgacttcaaccccaacagcggcagcgaccagagagtggtgaacggcggcgtgccctggcccagcccctgccccagccccagcagcagaccccccagcagataccagagcggccccaacagcctgccccccagagccgccacccccaccagaccccccagcagaccccccagcagacccagcagaccccccagccaccccagcgcccacggcagccccgcccccgtgagcaccatgcccaagagaatgagcagcgagggcccccccagaatgagccccaaggcccagagacaccccagaaaccacagagtgagcgccggcagaggcagcatcagcagcggcctggagttcgtgagccacaacccccccagcgaggccgccaccccccccgtggccagaaccagccccagcggcggcacctggagcagcgtggtgagcggcgtgcccagactgagccccaagacccacagacccagaagccccagacagaacagcatcggcaacacccccagcggccccgtgctggccagcccccaggccggcatcatccccaccgaggccgtggccatgcccatccccgccgccagccccacccccgccagccccgccagcaacagagccgtgacccccagcagcgaggccaaggacagcagactgcaggaccagagacagaacagccccgccggcaacaaggagaacatcaagcccaacgagaccagccccagcttcagcaaggccgagaacaagggcatcagccccgtggtgagcgagcacagaaagcagatcgacgacctgaagaagttcaagaacgacttcagactgcagcccagcagcaccagcgagagcatggaccagctgctgaacaagaacagagagggcgagaagagcagagacctgatcaaggacaagatcgagcccagcgccaaggacagcttcatcgagaacagcagcagcaactgcaccagcggcagcagcaagcccaacagccccagcatcagccccagcatcctgagcaacaccgagcacaagagaggccccgaggtgaccagccagggcgtgcagaccagcagccccgcctgcaagcaggagaaggacgacaaggaggagaagaaggacgccgccgagcaggtgagaaagagcaccctgaaccccaacgccaaggagttcaaccccagaagcttcagccagcccaagcccagcaccacccccaccagccccagaccccaggcccagcccagccccagcatggtgggccaccagcagcccacccccgtgtacacccagcccgtgtgcttcgcccccaacatgatgtaccccgtgcccgtgagccccggcgtgcagtaccagatctgccccaacagcggcaagaccagcatcatcagagtgccctag

SEQ ID NO: 73449 - DNA, 3189 bp, synthetic construct
  misc_feature 1..3189: note = Description of Artificial Sequence: Synthetic coding sequence
  source 1..3189: mol_type = other DNA
atgctgaagccccagcccctgcagcagcccagccagccccagcagcccccccccacccagcaggccgtggccagaagaccccccggcggcaccagcccccccaacggcggcctgcccggccccctggccaccagcgccgccccccccggcccccccgccgccgccagcccctgcctgggccccgtggccgccgccggcagcggcctgagaagaggcgccgagggcatcctggccccccagcccccccccccccagcagcaccaggagagacccggcgccgccgccatcggcagcgccagaggccagagcaccggcaagggccccccccagagccccgtgttcgagggcgtgtacaacaacagcagaatgctgcacttcctgaccgccgtggtgggcagcacctgcgacgtgaaggtgaagaacggcaccacctacgagggcatcttcaagaccctgagcagcaagttcgagctggccgtggacgccgtgcacagaaaggccagcgagcccgccggcggccccagaagagaggacatcgtggacaccatggtgttcaagcccagcgacgtgatgctggtgcacttcagaaacgtggacttcaactacgccaccaaggacaagttcaccgacagcgccatcgccatgaacagcaaggtgaacggcgagcacaaggagaaggtgctgcagagatgggagggcggcgacagcaacagcgacgactacgacctggagagcgacatgagcaacggctgggaccccaacgagatgttcaagttcaacgaggagaactacggcgtgaagaccacctacgacagcagcctgagcagctacaccgtgcccctggagaaggacaacagcgaggagttcagacagagagagctgagagccgcccagctggccagagagatcgagagcagcccccagtacagactgagaatcgccatggagaacgacgacggcagaaccgaggaggagaagcacagcgccgtgcagagacagggcagcggcagagagagccccagcctggccagcagagagggcaagtacatccccctgccccagagagtgagagagggccccagaggcggcgtgagatgcagcagcagcagaggcggcagacccggcctgagcagcctgccccccagaggcccccaccacctggacaacagcagccccggccccggcagcgaggccagaggcatcaacggcggccccagcagaatgagccccaaggcccagagacccctgagaggcgccaagaccctgagcagccccagcaacagacccagcggcgagaccagcgtgccccccccccccgccgtgggcagaatgtacccccccagaagccccaagagcgccgcccccgcccccatcagcgccagctgccccgagccccccatcggcagcgccgtgcccaccagcagcgccagcatccccgtgaccagcagcgtgagcgaccccggcgtgggcagcatcagccccgccagccccaagatcagcctggcccccaccgacgtgaaggagctgagcaccaaggagcccggcagaaccctggagccccaggagctggccagaatcgccggcaaggtgcccggcctgcagaacgagcagaagagattccagctggaggagctgagaaagttcggcgcccagttcaagctgcagcccagcagcagccccgagaacagcctggaccccttcccccccagaatcctgaaggaggagcccaagggcaaggagaaggaggtggacggcctgctgaccagcgagcccatgggcagccccgtgagcagcaagaccgagagcgtgagcgacaaggaggacaagccccccctggcccccagcggcggcaccgagggccccgagcagcccccccccccctgccccagccagaccggcagcccccccgtgggcctgatcaagggcgaggacaaggacgagggccccgtggccgagcaggtgaagaagagcaccctgaaccccaacgccaaggagttcaaccccaccaagcccctgctgagcgtgaacaagagcaccagcacccccaccagccccggccccagaacccacagcacccccagcatccccgtgctgaccgccggccagagcggcctgtacagcccccagtacatcagctacatcccccagatccacatgggccccgccgtgcaggccccccagatgtacccctaccccgtgagcaacagcgtgcccggccagcagggcaagtacagaggcgccaagggcagcctgcccccccagagaagcgaccagcaccagcccgccagcgccccccccatgatgcaggccgccgccgccgccggcccccccctggtggccgccaccccctacagcagctacatcccctacaacccccagcagttccccggccagcccgccatgatgcagcccatggcccactaccccagccagcccgtgttcgcccccatgctgcagagcaaccccagaatgctgaccagcggcagccacccccaggccatcgtgagcagcagcaccccccagtaccccagcgccgagcagcccaccccccaggccctgtacgccaccgtgcaccagagctacccccaccacgccacccagctgcacgcccaccagccccagcccgccaccacccccaccggcagccagccccagagccagcacgccgcccccagccccgtgcagcaccaggccggccaggccccccacctgggcagcggccagccccagcagaacctgtaccaccccggcgccctgaccggcaccccccccagcctgccccccggccccagcgcccagagcccccagagcagcttcccccagcccgccgccgtgtacgccatccaccaccagcagctgccccacggcttcaccaacatggcccacgtgacccaggcccacgtgcagaccggcatcaccgccgccccccccccccaccccggcgccccccaccccccccaggtgatgctgctgcaccccccccagagccacggcggccccccccagggcgccgtgccccagagcggcgtgcccgccctgagcgccagcacccccagcccctacccctacatcggccacccccagggcgagcagcccggccaggcccccggcttccccggcggcgccgacgacagaatcccccccctgcccccccccggcgagctgaagatcgtgctggccgccacctag

SEQ ID NO: 73450 - DNA, 3228 bp, synthetic construct
  misc_feature 1..3228: note = Description of Artificial Sequence: Synthetic coding sequence
  source 1..3228: mol_type = other DNA
atgctgaagccccagcccctgcagcagcccagccagccccagcagcccccccccacccagcaggccgtggccagaagaccccccggcggcaccagcccccccaacggcggcctgcccggccccctggccaccagcgccgccccccccggcccccccgccgccgccagcccctgcctgggccccgtggccgccgccggcagcggcctgagaagaggcgccgagggcatcctggccccccagcccccccccccccagcagcaccaggagagacccggcgccgccgccatcggcagcgccagaggccagagcaccggcaagggccccccccagagccccgtgttcgagggcgtgtacaacaacagcagaatgctgcacttcctgaccgccgtggtgggcagcacctgcgacgtgaaggtgaagaacggcaccacctacgagggcatcttcaagaccctgagcagcaagttcgagctggccgtggacgccgtgcacagaaaggccagcgagcccgccggcggccccagaagagaggacatcgtggacaccatggtgttcaagcccagcgacgtgatgctggtgcacttcagaaacgtggacttcaactacgccaccaaggacaagttcaccgacagcgccatcgccatgaacagcaaggtgaacggcgagcacaaggagaaggtgctgcagagatgggagggcggcgacagcaacagcgacgactacgacctggagagcgacatgagcaacggctgggaccccaacgagatgttcaagttcaacgaggagaactacggcgtgaagaccacctacgacagcagcctgagcagctacaccgtgcccctggagaaggacaacagcgaggagttcagacagagagagctgagagccgcccagctggccagagagatcgagagcagcccccagtacagactgagaatcgccatggagaacgacgacggcagaaccgaggaggagaagcacagcgccgtgcagagacagggcagcggcagagagagccccagcctggccagcagagagggcaagtacatccccctgccccagagagtgagagagggccccagaggcggcgtgagatgcagcagcagcagaggcggcagacccggcctgagcagcctgccccccagaggcccccaccacctggacaacagcagccccggccccggcagcgaggccagaggcatcaacggcggccccagcagaatgagccccaaggcccagagacccctgagaggcgccaagaccctgagcagccccagcaacagacccagcggcgagaccagcgtgccccccccccccgccgtgggcagaatgtacccccccagaagccccaagagcgccgcccccgcccccatcagcgccagctgccccgagccccccatcggcagcgccgtgcccaccagcagcgccagcatccccgtgaccagcagcgtgagcgaccccggcgtgggcagcatcagccccgccagccccaagatcagcctggcccccaccgacgtgaaggagctgagcaccaaggagcccggcagaaccctggagccccaggagctggccagaatcgccggcaaggtgcccggcctgcagaacgagcagaagagattccagctggaggagctgagaaagttcggcgcccagttcaagctgcagcccagcagcagccccgagaacagcctggaccccttcccccccagaatcctgaaggaggagcccaagggcaaggagaaggaggtggacggcctgctgaccagcgagcccatgggcagccccgtgagcagcaagaccgagagcgtgagcgacaaggaggacaagccccccctggcccccagcggcggcaccgagggccccgagcagcccccccccccctgccccagccagaccggcagcccccccgtgggcctgatcaagggcgaggacaaggacgagggccccgtggccgagcaggtgaagaagagcaccctgaaccccaacgccaaggagttcaaccccaccaagcccctgctgagcgtgaacaagagcaccagcacccccaccagccccggccccagaacccacagcacccccagcatccccgtgctgaccgccggccagagcggcctgtacagcccccagtacatcagctacatcccccagatccacatgggccccgccgtgcaggccccccagatgtacccctaccccgtgagcaacagcgtgcccggccagcagggcaagtacagaggcgccaagggcagcctgcccccccagagaagcgaccagcaccagcccgccagcgccccccccatgatgcaggccgccgccgccgccggcccccccctggtggccgccaccccctacagcagctacatcccctacaacccccagcagttccccggccagcccgccatgatgcagcccatggcccactaccccagccagcccgtgttcgcccccatgctgcagagcaaccccagaatgctgaccagcggcagccacccccaggccatcgtgagcagcagcaccccccagtaccccagcgccgagcagcccaccccccaggccctgtacgccaccgtgcaccagagctacccccaccacgccacccagctgcacgcccaccagccccagcccgccaccacccccaccggcagccagccccagagccagcacgccgcccccagccccgtgcagcaccaggccggccaggccccccacctgggcagcggccagccccagcagaacctgtaccaccccggcgccctgaccggcaccccccccagcctgccccccggccccagcgcccagagcccccagagcagcttcccccagcccgccgccgtgtacgccatccaccaccagcagctgccccacggcttcaccaacatggcccacgtgacccaggcccacgtgcagaccggcatcaccgccgccccccccccccaccccggcgccccccaccccccccaggtgatgctgctgcaccccccccagagccacggcggccccccccagggcgccgtgccccagagcggcgtgcccgccctgagcgccagcacccccagcccctacccctacatcggccacccccagggcgagcagcccggccaggcccccggcttccccggcggcgccgacgacagaatcagagagttcagcctggccggcggcatctggcacggcagagccgagggcctgcaggtgggccaggacgccagagtgctgggcggcgagtag

SEQ ID NO: 73451 - DNA, 3135 bp, synthetic construct
  misc_feature 1..3135: note = Description of Artificial Sequence: Synthetic coding sequence
  source 1..3135: mol_type = other DNA
atgctgaagccccagcccctgcagcagcccagccagccccagcagcccccccccacccagcaggccgtggccagaagaccccccggcggcaccagcccccccaacggcggcctgcccggccccctggccaccagcgccgccccccccggcccccccgccgccgccagcccctgcctgggccccgtggccgccgccggcagcggcctgagaagaggcgccgagggcatcctggccccccagcccccccccccccagcagcaccaggagagacccggcgccgccgccatcggcagcgccagaggccagagcaccggcaagggccccccccagagccccgtgttcgagggcgtgtacaacaacagcagaatgctgcacttcctgaccgccgtggtgggcagcacctgcgacgtgaaggtgaagaacggcaccacctacgagggcatcttcaagaccctgagcagcaagttcgagctggccgtggacgccgtgcacagaaaggccagcgagcccgccggcggccccagaagagaggacatcgtggacaccatggtgttcaagcccagcgacgtgatgctggtgcacttcagaaacgtggacttcaactacgccaccaaggacaagttcaccgacagcgccatcgccatgaacagcaaggtgaacggcgagcacaaggagaaggtgctgcagagatgggagggcggcgacagcaacagcgacgactacgacctggagagcgacatgagcaacggctgggaccccaacgagatgttcaagttcaacgaggagaactacggcgtgaagaccacctacgacagcagcctgagcagctacaccgtgcccctggagaaggacaacagcgaggagttcagacagagagagctgagagccgcccagctggccagagagatcgagagcagcccccagtacagactgagaatcgccatggagaacgacgacggcagaaccgaggaggagaagcacagcgccgtgcagagacagggcagcggcagagagagccccagcctggccagcagagagggcaagtacatccccctgccccagagagtgagagagggccccagaggcggcgtgagatgcagcagcagcagaggcggcagacccggcctgagcagcctgccccccagaggcccccaccacctggacaacagcagccccggccccggcagcgaggccagaggcatcaacggcggccccagcagaatgagccccaaggcccagagacccctgagaggcgccaagaccctgagcagccccagcaacagacccagcggcgagaccagcgtgccccccccccccgccgtgggcagaatgtacccccccagaagccccaagagcgccgcccccgcccccatcagcgccagctgccccgagccccccatcggcagcgccgtgcccaccagcagcgccagcatccccgtgaccagcagcgtgagcgaccccggcgtgggcagcatcagccccgccagccccaagatcagcctggcccccaccgacgtgaaggagctgagcaccaaggagcccggcagaaccctggagccccaggagctggccagaatcgccggcaaggtgcccggcctgcagaacgagcagaagagattccagctggaggagctgagaaagttcggcgcccagttcaagctgcagcccagcagcagccccgagaacagcctggaccccttcccccccagaatcctgaaggaggagcccaagggcaaggagaaggaggtggacggcctgctgaccagcgagcccatgggcagccccgtgagcagcaagaccgagagcgtgagcgacaaggaggacaagccccccctggcccccagcggcggcaccgagggccccgagcagcccccccccccctgccccagccagaccggcagcccccccgtgggcctgatcaagggcgaggacaaggacgagggccccgtggccgagcaggtgaagaagagcaccctgaaccccaacgccaaggagttcaaccccaccaagcccctgctgagcgtgaacaagagcaccagcacccccaccagccccggccccagaacccacagcacccccagcatccccgtgctgaccgccggccagagcggcctgtacagcccccagtacatcagctacatcccccagatccacatgggccccgccgtgcaggccccccagatgtacccctaccccgtgagcaacagcgtgcccggccagcagggcaagtacagaggcgccaagggcagcctgcccccccagagaagcgaccagcaccagcccgccagcgccccccccatgatgcaggccgccgccgccgccggcccccccctggtggccgccaccccctacagcagctacatcccctacaacccccagcagttccccggccagcccgccatgatgcagcccatggcccactaccccagccagcccgtgttcgcccccatgctgcagagcaaccccagaatgctgaccagcggcagccacccccaggccatcgtgagcagcagcaccccccagtaccccagcgccgagcagcccaccccccaggccctgtacgccaccgtgcaccagagctacccccaccacgccacccagctgcacgcccaccagccccagcccgccaccacccccaccggcagccagccccagagccagcacgccgcccccagccccgtgcagcaccaggccggccaggccccccacctgggcagcggccagccccagcagaacctgtaccaccccggcgccctgaccggcaccccccccagcctgccccccggccccagcgcccagagcccccagagcagcttcccccagcccgccgccgtgtacgccatccaccaccagcagctgccccacggcttcaccaacatggcccacgtgacccaggcccacgtgcagaccggcatcaccgccgccccccccccccaccccggcgccccccaccccccccaggtgatgctgctgcaccccccccagagccacggcggccccccccagggcgccgtgccccagagcggcgtgcccgccctgagcgccagcacccccagcccctacccctacatcggccacccccaggtgcagagccaccccagccagcagctgcccttccacccccccggcaactag

SEQ ID NO: 73452 - DNA, 1203 bp, synthetic construct
  misc_feature 1..1203: note = Description of Artificial Sequence: Synthetic coding sequence
  source 1..1203: mol_type = other DNA
atgctgaagccccagcccctgcagcagcccagccagccccagcagcccccccccacccagcaggccgtggccagaagaccccccggcggcaccagcccccccaacggcggcctgcccggccccctggccaccagcgccgccccccccggcccccccgccgccgccagcccctgcctgggccccgtggccgccgccggcagcggcctgagaagaggcgccgagggcatcctggccccccagcccccccccccccagcagcaccaggagagacccggcgccgccgccatcggcagcgccagaggccagagcaccggcaagggccccccccagagccccgtgttcgagggcgtgtacaacaacagcagaatgctgcacttcctgaccgccgtggtgggcagcacctgcgacgtgaaggtgaagaacggcaccacctacgagggcatcttcaagaccctgagcagcaagttcgagctggccgtggacgccgtgcacagaaaggccagcgagcccgccggcggccccagaagagaggacatcgtggacaccatggtgttcaagcccagcgacgtgatgctggtgcacttcagaaacgtggacttcaactacgccaccaaggacaagttcaccgacagcgccatcgccatgaacagcaaggtgaacggcgagcacaaggagaaggtgctgcagagatgggagggcggcgacagcaacagcgacgactacgacctggagagcgacatgagcaacggctgggaccccaacgagatgttcaagttcaacgaggagaactacggcgtgaagaccacctacgacagcagcctgagcagctacaccgtgcccctggagaaggacaacagcgaggagttcagacagagagagctgagagccgcccagctggccagagagatcgagagcagcccccagtacagactgagaatcgccatggagaacgacgacggcagaaccgaggaggagaagcacagcgccgtgcagagacagggcagcggcagagagagccccagcctggccagcagagagggcaagtacatccccctgcccccccacagaggccagggccagggccccgccggcgtgggcggcagctgcagcgcccccgccagaccccaccccgtgctgcccagccaccccctgatctacagccccgccggcgacggcagaagcttcatcttctactacctgtag

SEQ ID NO: 73453 - DNA, 3135 bp, synthetic construct
  misc_feature 1..3135: note = Description of Artificial Sequence: Synthetic coding sequence
  source 1..3135: mol_type = other DNA
atgctgaagccccagcccctgcagcagcccagccagccccagcagcccccccccacccagcaggccgtggccagaagaccccccggcggcaccagcccccccaacggcggcctgcccggccccctggccaccagcgccgccccccccggcccccccgccgccgccagcccctgcctgggccccgtggccgccgccggcagcggcctgagaagaggcgccgagggcatcctggccccccagcccccccccccccagcagcaccaggagagacccggcgccgccgccatcggcagcgccagaggccagagcaccggcaagggccccccccagagccccgtgttcgagggcgtgtacaacaacagcagaatgctgcacttcctgaccgccgtggtgggcagcacctgcgacgtgaaggtgaagaacggcaccacctacgagggcatcttcaagaccctgagcagcaagttcgagctggccgtggacgccgtgcacagaaaggccagcgagcccgccggcggccccagaagagaggacatcgtggacaccatggtgttcaagcccagcgacgtgatgctggtgcacttcagaaacgtggacttcaactacgccaccaaggacaagttcaccgacagcgccatcgccatgaacagcaaggtgaacggcgagcacaaggagaaggtgctgcagagatgggagggcggcgacagcaacagcgacgactacgacctggagagcgacatgagcaacggctgggaccccaacgagatgttcaagttcaacgaggagaactacggcgtgaagaccacctacgacagcagcctgagcagctacaccgtgcccctggagaaggacaacagcgaggagttcagacagagagagctgagagccgcccagctggccagagagatcgagagcagcccccagtacagactgagaatcgccatggagaacgacgacggcagaaccgaggaggagaagcacagcgccgtgcagagacagggcagcggcagagagagccccagcctggccagcagagagggcaagtacatccccctgccccagagagtgagagagggccccagaggcggcgtgagatgcagcagcagcagaggcggcagacccggcctgagcagcctgccccccagaggcccccaccacctggacaacagcagccccggccccggcagcgaggccagaggcatcaacggcggccccagcagaatgagccccaaggcccagagacccctgagaggcgccaagaccctgagcagccccagcaacagacccagcggcgagaccagcgtgccccccccccccgccgtgggcagaatgtacccccccagaagccccaagagcgccgcccccgcccccatcagcgccagctgccccgagccccccatcggcagcgccgtgcccaccagcagcgccagcatccccgtgaccagcagcgtgagcgaccccggcgtgggcagcatcagccccgccagccccaagatcagcctggcccccaccgacgtgaaggagctgagcaccaaggagcccggcagaaccctggagccccaggagctggccagaatcgccggcaaggtgcccggcctgcagaacgagcagaagagattccagctggaggagctgagaaagttcggcgcccagttcaagctgcagcccagcagcagccccgagaacagcctggaccccttcccccccagaatcctgaaggaggagcccaagggcaaggagaaggaggtggacggcctgctgaccagcgagcccatgggcagccccgtgagcagcaagaccgagagcgtgagcgacaaggaggacaagccccccctggcccccagcggcggcaccgagggccccgagcagcccccccccccctgccccagccagaccggcagcccccccgtgggcctgatcaagggcgaggacaaggacgagggccccgtggccgagcaggtgaagaagagcaccctgaaccccaacgccaaggagttcaaccccaccaagcccctgctgagcgtgaacaagagcaccagcacccccaccagccccggccccagaacccacagcacccccagcatccccgtgctgaccgccggccagagcggcctgtacagcccccagtacatcagctacatcccccagatccacatgggccccgccgtgcaggccccccagatgtacccctaccccgtgagcaacagcgtgcccggccagcagggcaagtacagaggcgccaagggcagcctgcccccccagagaagcgaccagcaccagcccgccagcgccccccccatgatgcaggccgccgccgccgccggcccccccctggtggccgccaccccctacagcagctacatcccctacaacccccagcagttccccggccagcccgccatgatgcagcccatggcccactaccccagccagcccgtgttcgcccccatgctgcagagcaaccccagaatgctgaccagcggcagccacccccaggccatcgtgagcagcagcaccccccagtaccccagcgccgagcagcccaccccccaggccctgtacgccaccgtgcaccagagctacccccaccacgccacccagctgcacgcccaccagccccagcccgccaccacccccaccggcagccagccccagagccagcacgccgcccccagccccgtgcagcaccaggccggccaggccccccacctgggcagcggccagccccagcagaacctgtaccaccccggcgccctgaccggcaccccccccagcctgccccccggccccagcgcccagagcccccagagcagcttcccccagcccgccgccgtgtacgccatccaccaccagcagctgccccacggcttcaccaacatggcccacgtgacccaggcccacgtgcagaccggcatcaccgccgccccccccccccaccccggcgccccccaccccccccaggtgatgctgctgcaccccccccagagccacggcggccccccccagggcgccgtgccccagagcggcgtgcccgccctgagcgccagcacccccagcccctacccctacatcggccacccccaggcccccctgcccccccccggcgagctgaagatcgtgctggccgccacctag

SEQ ID NO: 73454 - DNA, 3294 bp, synthetic construct
  misc_feature 1..3294: note = Description of Artificial Sequence: Synthetic coding sequence
  source 1..3294: mol_type = other DNA
atgctgaagccccagcccctgcagcagcccagccagccccagcagcccccccccacccagcaggccgtggccagaagaccccccggcggcaccagcccccccaacggcggcctgcccggccccctggccaccagcgccgccccccccggcccccccgccgccgccagcccctgcctgggccccgtggccgccgccggcagcggcctgagaagaggcgccgagggcatcctggccccccagcccccccccccccagcagcaccaggagagacccggcgccgccgccatcggcagcgccagaggccagagcaccggcaagggccccccccagagccccgtgttcgagggcgtgtacaacaacagcagaatgctgcacttcctgaccgccgtggtgggcagcacctgcgacgtgaaggtgaagaacggcaccacctacgagggcatcttcaagaccctgagcagcaagttcgagctggccgtggacgccgtgcacagaaaggccagcgagcccgccggcggccccagaagagaggacatcgtggacaccatggtgttcaagcccagcgacgtgatgctggtgcacttcagaaacgtggacttcaactacgccaccaaggacaagttcaccgacagcgccatcgccatgaacagcaaggtgaacggcgagcacaaggagaaggtgctgcagagatgggagggcggcgacagcaacagcgacgactacgacctggagagcgacatgagcaacggctgggaccccaacgagatgttcaagttcaacgaggagaactacggcgtgaagaccacctacgacagcagcctgagcagctacaccgtgcccctggagaaggacaacagcgaggagttcagacagagagagctgagagccgcccagctggccagagagatcgagagcagcccccagtacagactgagaatcgccatggagaacgacgacggcagaaccgaggaggagaagcacagcgccgtgcagagacagggcagcggcagagagagccccagcctggccagcagagagggcaagtacatccccctgccccagagagtgagagagggccccagaggcggcgtgagatgcagcagcagcagaggcggcagacccggcctgagcagcctgccccccagaggcccccaccacctggacaacagcagccccggccccggcagcgaggccagaggcatcaacggcggccccagcagaatgagccccaaggcccagagacccctgagaggcgccaagaccctgagcagccccagcaacagacccagcggcgagaccagcgtgccccccccccccgccgtgggcagaatgtacccccccagaagccccaagagcgccgcccccgcccccatcagcgccagctgccccgagccccccatcggcagcgccgtgcccaccagcagcgccagcatccccgtgaccagcagcgtgagcgaccccggcgtgggcagcatcagccccgccagccccaagatcagcctggcccccaccgacgtgaaggagctgagcaccaaggagcccggcagaaccctggagccccaggagctggccagaatcgccggcaaggtgcccggcctgcagaacgagcagaagagattccagctggaggagctgagaaagttcggcgcccagttcaagctgcagcccagcagcagccccgagaacagcctggaccccttcccccccagaatcctgaaggaggagcccaagggcaaggagaaggaggtggacggcctgctgaccagcgagcccatgggcagccccgtgagcagcaagaccgagagcgtgagcgacaaggaggacaagccccccctggcccccagcggcggcaccgagggccccgagcagcccccccccccctgccccagccagaccggcagcccccccgtgggcctgatcaagggcgaggacaaggacgagggccccgtggccgagcaggtgaagaagagcaccctgaaccccaacgccaaggagttcaaccccaccaagcccctgctgagcgtgaacaagagcaccagcacccccaccagccccggccccagaacccacagcacccccagcatccccgtgctgaccgccggccagagcggcctgtacagcccccagtacatcagctacatcccccagatccacatgggccccgccgtgcaggccccccagatgtacccctaccccgtgagcaacagcgtgcccggccagcagggcaagtacagaggcgccaagggcagcctgcccccccagagaagcgaccagcaccagcccgccagcgccccccccatgatgcaggccgccgccgccgccggcccccccctggtggccgccaccccctacagcagctacatcccctacaacccccagcagttccccggccagcccgccatgatgcagcccatggcccactaccccagccagcccgtgttcgcccccatgctgcagagcaaccccagaatgctgaccagcggcagccacccccaggccatcgtgagcagcagcaccccccagtaccccagcgccgagcagcccaccccccaggccctgtacgccaccgtgcaccagagctacccccaccacgccacccagctgcacgcccaccagccccagcccgccaccacccccaccggcagccagccccagagccagcacgccgcccccagccccgtgcagcaccaggccggccaggccccccacctgggcagcggccagccccagcagaacctgtaccaccccggcgccctgaccggcaccccccccagcctgccccccggccccagcgcccagagcccccagagcagcttcccccagcccgccgccgtgtacgccatccaccaccagcagctgccccacggcttcaccaacatggcccacgtgacccaggcccacgtgcagaccggcatcaccgccgccccccccccccaccccggcgccccccaccccccccaggtgatgctgctgcaccccccccagagccacggcggccccccccagggcgccgtgccccagagcggcgtgcccgccctgagcgccagcacccccagcccctacccctacatcggccacccccagggcgagcagcccggccaggcccccggcttccccggcggcgccgacgacagaatcctgtgcagagtgggcagaagccacagcagaagaagacagggcctggcccccggcagcgtgctgtgcttcccccccagcagcctgagctgcgaccccgccgcccccctgcccaccgccagccccgccctgagcgaccccgactgcctgctgacctag

SEQ ID NO: 73455 - DNA, 2679 bp, synthetic construct
  misc_feature 1..2679: note = Description of Artificial Sequence: Synthetic coding sequence
  source 1..2679: mol_type = other DNA
atgagcgagagagccgccgacgacgtgagaggcgagcccagaagagccgccgccgccgccggcggcgccgccgccgccgccgccagacagcagcagcagcagcagcagcagcagcagcccccccccccccagccccagagacagcagcaccccccccccccccccagaagaaccagacccgaggacggcggccccggcgccgccagcaccagcgccgccgccatggccaccgtgggcgagagaagacccctgcccagccccgaggtgatgctgggccagagctggaacctgtgggtggaggccagcaagctgcccggcaaggacggcaccgagctggacgagagcttcaaggagttcggcaagaacagagaggtgatgggcctgtgcagagaggacatgcccatcttcggcttctgccccgcccacgacgacttctacctggtggtgtgcaacgactgcaaccaggtggtgaagccccaggccttccagagccactacgagagaagacacagcagcagcagcaagccccccctggccgtgccccccaccagcgtgttcagcttcttccccagcctgagcaagagcaagggcggcagcgccagcggcagcaacagaagcagcagcggcggcgtgctgagcgccagcagcagcagcagcaagctgctgaagagccccaaggagaagctgcagctgagaggcaacaccagacccatgcaccccatccagcagagcagagtgccccacggcagaatcatgacccccagcgtgaaggtggagaagatccaccccaagatggacggcaccctgctgaagagcgccgtgggccccacctgccccgccaccgtgagcagcctggtgaagcccggcctgaactgccccagcatccccaagcccaccctgcccagccccggccagatcctgaacggcaagggcctgcccgccccccccaccctggagaagaagcccgaggacaacagcaacaacagaaagttcctgaacaagagactgagcgagagagagttcgaccccgacatccactgcggcgtgatcgacctggacaccaagaagccctgcaccagaagcctgacctgcaagacccacagcctgacccagagaagagccgtgcagggcagaagaaagagattcgacgtgctgctggccgagcacaagaacaagaccagagagaaggagctgatcagacaccccgacagccagcagcccccccagcccctgagagacccccaccccgccccccccagaaccagccaggagccccaccagaacccccacggcgtgatccccagcgagagcaagcccttcgtggccagcaagcccaagccccacacccccagcctgcccagaccccccggctgccccgcccagcagggcggcagcgcccccatcgaccccccccccgtgcacgagagcccccacccccccctgcccgccaccgagcccgccagcagactgagcagcgaggagggcgagggcgacgacaaggaggagagcgtggagaagctggactgccactacagcggccaccacccccagcccgccagcttctgcaccttcggcagcagacagatcggcagaggctactacgtgttcgacagcagatggaacagactgagatgcgccctgaacctgatggtggagaagcacctgaacgcccagctgtggaagaagatcccccccgtgcccagcaccaccagccccatcagcaccagaatcccccacagaaccaacagcgtgcccaccagccagtgcggcgtgagctacctggccgccgccaccgtgagcaccagccccgtgctgctgagcagcacctgcatcagccccaacagcaagagcgtgcccgcccacggcaccaccctgaacgcccagcccgccgccagcggcgccatggaccccgtgtgcagcatgcagagcagacaggtgagcagcagcagcagcagccccagcacccccagcggcctgagcagcgtgcccagcagccccatgagcagaaagccccagaagctgaagagcagcaagagcctgagacccaaggagagcagcggcaacagcaccaactgccagaacgccagcagcagcaccagcggcggcagcggcaagaagagaaagaacagcagccccctgctggtgcacagcagcagcagcagcagcagcagcagcagcagcagccacagcatggagagcttcagaaagaactgcgtggcccacagcggccccccctaccccagcaccgtgaccagcagccacagcatcggcctgaactgcgtgaccaacaaggccaacgccgtgaacgtgagacacgaccagagcggcagaggcccccccaccggcagccccgccgagagcatcaagagaatgagcgtgatggtgaacagcagcgacagcaccctgagcctgggccccttcatccaccagagcaacgagctgcccgtgaacagccacggcagcttcagccacagccacacccccctggacaagctgatcggcaagaagagaaagtgcagccccagcagcagcagcatcaacaacagcagcagcaagcccaccaaggtggccaaggtgcccgccgtgaacaacgtgcacatgaagcacaccggcaccatccccggcgcccagggcctgatgaacagcagcctgctgcaccagcccaaggccagaccctag

SEQ ID NO: 73456 - DNA, 2838 bp, synthetic construct
  misc_feature 1..2838: note = Description of Artificial Sequence: Synthetic coding sequence
  source 1..2838: mol_type = other DNA
atgagcgagagagccgccgacgacgtgagaggcgagcccagaagagccgccgccgccgccggcggcgccgccgccgccgccgccagacagcagcagcagcagcagcagcagcagcagcccccccccccccagccccagagacagcagcaccccccccccccccccagaagaaccagacccgaggacggcggccccggcgccgccagcaccagcgccgccgccatggccaccgtgggcgagagaagacccctgcccagccccgaggtgatgctgggccagagctggaacctgtgggtggaggccagcaagctgcccggcaaggacggcaccgagctggacgagagcttcaaggagttcggcaagaacagagaggtgatgggcctgtgcagagaggacatgcccatcttcggcttctgccccgcccacgacgacttctacctggtggtgtgcaacgactgcaaccaggtggtgaagccccaggccttccagagccactacgagagaagacacagcagcagcagcaagccccccctggccgtgccccccaccagcgtgttcagcttcttccccagcctgagcaagagcaagggcggcagcgccagcggcagcaacagaagcagcagcggcggcgtgctgagcgccagcagcagcagcagcaagctgctgaagagccccaaggagaagctgcagctgagaggcaacaccagacccatgcaccccatccagcagagcagagtgccccacggcagaatcatgacccccagcgtgaaggtggagaagatccaccccaagatggacggcaccctgctgaagagcgccgtgggccccacctgccccgccaccgtgagcagcctggtgaagcccggcctgaactgccccagcatccccaagcccaccctgcccagccccggccagatcctgaacggcaagggcctgcccgccccccccaccctggagaagaagcccgaggacaacagcaacaacagaaagttcctgaacaagagactgagcgagagagagttcgaccccgacatccactgcggcgtgatcgacctggacaccaagaagccctgcaccagaagcctgacctgcaagacccacagcctgacccagagaagagccgtgcagggcagaagaaagagattcgacgtgctgctggccgagcacaagaacaagaccagagagaaggagctgatcagacaccccgacagccagcagcccccccagcccctgagagacccccaccccgccccccccagaaccagccaggagccccaccagaacccccacggcgtgatccccagcgagagcaagcccttcgtggccagcaagcccaagccccacacccccagcctgcccagaccccccggctgccccgcccagcagggcggcagcgcccccatcgaccccccccccgtgcacgagagcccccacccccccctgcccgccaccgagcccgccagcagactgagcagcgaggagggcgagggcgacgacaaggaggagagcgtggagaagctggactgccactacagcggccaccacccccagcccgccagcttctgcaccttcggcagcagacagatcggcagaggctactacgtgttcgacagcagatggaacagactgagatgcgccctgaacctgatggtggagaagcacctgaacgcccagctgtggaagaagatcccccccgtgcccagcaccaccagccccatcagcaccagaatcccccacagaaccaacagcgtgcccaccagccagtgcggcgtgagctacctggccgccgccaccgtgagcaccagccccgtgctgctgagcagcacctgcatcagccccaacagcaagagcgtgcccgcccacggcaccaccctgaacgcccagcccgccgccagcggcgccatggaccccgtgtgcagcatgcagagcagacaggtgagcagcagcagcagcagccccagcacccccagcggcctgagcagcgtgcccagcagccccatgagcagaaagccccagaagctgaagagcagcaagagcctgagacccaaggagagcagcggcaacagcaccaactgccagaacgccagcagcagcaccagcggcggcagcggcaagaagagaaagaacagcagccccctgctggtgcacagcagcagcagcagcagcagcagcagcagcagcagccacagcatggagagcttcagaaagaactgcgtggcccacagcggccccccctaccccagcaccgtgaccagcagccacagcatcggcctgaactgcgtgaccaacaaggccaacgccgtgaacgtgagacacgaccagagcggcagaggcccccccaccggcagccccgccgagagcatcaagagaatgagcgtgatggtgaacagcagcgacagcaccctgagcctgggccccttcatccaccagagcaacgagctgcccgtgaacagccacggcagcttcagccacagccacacccccctggacaagctgatcggcaagaagagaaagtgcagccccagcagcagcagcatcaacaacagcagcagcaagcccaccaaggtggccaaggtgcccgccgtgaacaacgtgcacatgaagcacaccggcaccatccccggcgcccagggcctgatgaacagcagcctgctgcaccaggacatcagcagcccctgcctgagaaccggcatcagcgccaccagcccccagagccccgacctgaagagcaagggcaccagcctgaccgccgagaacagcaccggcagaaacaacgccgacaccttcgaggacaagctgcacctgcacagcgccctgtggacccccagatgcctgtag

SEQ ID NO: 73457 - DNA, 81 bp, synthetic construct
  misc_feature 1..81: note = Description of Artificial Sequence: Synthetic coding sequence
  source 1..81: mol_type = other DNA
atgagcgagagagccgccgacgacgtgagaggcgagcccagaagagccgccgccgccgccggcggcgccgccgccgcctag

SEQ ID NO: 73458 - DNA, 2679 bp, synthetic construct; identical to SEQ ID NO: 73455
  misc_feature 1..2679: note = Description of Artificial Sequence: Synthetic coding sequence
  source 1..2679: mol_type = other DNA

SEQ ID NO: 73459 - DNA, 2838 bp, synthetic construct; identical to SEQ ID NO: 73456
  misc_feature 1..2838: note = Description of Artificial Sequence: Synthetic coding sequence
  source 1..2838: mol_type = other DNA

SEQ ID NO: 73460 - DNA, 393 bp, synthetic construct
  misc_feature 1..393: note = Description of Artificial Sequence: Synthetic coding sequence
  source 1..393: mol_type = other DNA
atgagcgagagagccgccgacgacgtgagaggcgagcccagaagagccgccgccgccgccggcggcgccgccgccgccgccgccagacagcagcagcagcagcagcagcagcagcagcccccccccccccagccccagagacagcagcaccccccccccccccccagaagaaccagacccgaggacggcggccccggcgccgccagcaccagcgccgccgccatggccaccgtgggcgagagaagacccctgcccagccccgaggtgatgctgggccagagctggaacctgtgggtggaggccagcaagctgcccggcaaggacggcgacagaatcggcagaaagttccagggcgtgtggaacagagaggtgatgggcctgtgcagagagtag

SEQ ID NO: 73461 - DNA, 2244 bp, synthetic construct
  misc_feature 1..2244: note = Description of Artificial Sequence: Synthetic coding sequence
  source 1..2244: mol_type = other DNA
atggagggcagcaagacccccctgcagagcagccccagcgcccaggagctgaaggcccccctggagagaagacacagcagcagcagcaagccccccctggccgtgccccccaccagcgtgttcagcttcttccccagcctgagcaagagcaagggcggcagcgccagcggcagcaacagaagcagcagcggcggcgtgctgagcgccagcagcagcagcagcaagctgctgaagagccccaaggagaagctgcagctgagaggcaacaccagacccatgcaccccatccagcagagcagagtgccccacggcagaatcatgacccccagcgtgaaggtggagaagatccaccccaagatggacggcaccctgctgaagagcgccgtgggccccacctgccccgccaccgtgagcagcctggtgaagcccggcctgaactgccccagcatccccaagcccaccctgcccagccccggccagatcctgaacggcaagggcctgcccgccccccccaccctggagaagaagcccgaggacaacagcaacaacagaaagttcctgaacaagagactgagcgagagagagttcgaccccgacatccactgcggcgtgatcgacctggacaccaagaagccctgcaccagaagcctgacctgcaagacccacagcctgacccagagaagagccgtgcagggcagaagaaagagattcgacgtgctgctggccgagcacaagaacaagaccagagagaaggagctgatcagacaccccgacagccagcagcccccccagcccctgagagacccccaccccgccccccccagaaccagccaggagccccaccagaacccccacggcgtgatccccagcgagagcaagcccttcgtggccagcaagcccaagccccacacccccagcctgcccagaccccccggctgccccgcccagcagggcggcagcgcccccatcgaccccccccccgtgcacgagagcccccacccccccctgcccgccaccgagcccgccagcagactgagcagcgaggagggcgagggcgacgacaaggaggagagcgtggagaagctggactgccactacagcggccaccacccccagcccgccagcttctgcaccttcggcagcagacagatcggcagaggctactacgtgttcgacagcagatggaacagactgagatgcgccctgaacctgatggtggagaagcacctgaacgcccagctgtggaagaagatcccccccgtgcccagcaccaccagccccatcagcaccagaatcccccacagaaccaacagcgtgcccaccagccagtgcggcgtgagctacctggccgccgccaccgtgagcaccagccccgtgctgctgagcagcacctgcatcagccccaacagcaagagcgtgcccgcccacggcaccaccctgaacgcccagcccgccgccagcggcgccatggaccccgtgtgcagcatgcagagcagacaggtgagcagcagcagcagcagccccagcacccccagcggcctgagcagcgtgcccagcagccccatgagcagaaagccccagaagctgaagagcagcaagagcctgagacccaaggagagcagcggcaacagcaccaactgccagaacgccagcagcagcaccagcggcggcagcggcaagaagagaaagaacagcagccccctgctggtgcacagcagcagcagcagcagcagcagcagcagcagcagccacagcatggagagcttcagaaagaactgcgtggcccacagcggccccccctaccccagcaccgtgaccagcagccacagcatcggcctgaactgcgtgaccaacaaggccaacgccgtgaacgtgagacacgaccagagcggcagaggcccccccaccggcagccccgccgagagcatcaagagaatgagcgtgatggtgaacagcagcgacagcaccctgagcctgggccccttcatccaccagagcaacgagctgcccgtgaacagccacggcagcttcagccacagccacacccccctggacaagctgatcggcaagaagagaaagtgcagccccagcagcagcagcatcaacaacagcagcagcaagcccaccaaggtggccaaggtgcccgccgtgaacaacgtgcacatgaagcacaccggcaccatccccggcgcccagggcctgatgaacagcagcctgctgcaccagcccaaggccagaccctag

SEQ ID NO: 73462 - DNA, 663 bp, synthetic construct
  misc_feature 1..663: note = Description of Artificial Sequence: Synthetic coding sequence
  source 1..663: mol_type = other DNA
atggaggaggacgagttcatcggcgagaagaccttccagagatactgcgccgagttcatcaagcacagccagcagatcggcgacagctgggagtggagacccagcaaggactgcagcgacggctacatgtgcaagatccacttccagatcaagaacggcagcgtgatgagccacctgggcgccagcacccacggccagacctgcctgcccatggaggaggccttcgagctgcccctggacgactgcgaggtgatcgagaccgccgccgccagcgaggtgatcaagtacgagtaccacgtgctgtacagctgcagctaccaggtgcccgtgctgtacttcagagccagcttcctggacggcagacccctgaccctgaaggacatctgggagggcgtgcacgagtgctacaagatgagactgctgcagggcccctgggacaccatcacccagcaggagcaccccatcctgggccagcccttcttcgtgctgcacccctgcaagaccaacgagttcatgacccccgtgctgaagaacagccagaagatcaacaagaacgtgaactacatcaccagctggctgagcatcgtgggccccgtggtgggcctgaacctgcccctgagctacgccaaggccaccagccaggacgagagaaacgtgccctag

SEQ ID NO: 73463 - DNA, 378 bp, synthetic construct
  misc_feature 1..378: note = Description of Artificial Sequence: Synthetic coding sequence
  source 1..378: mol_type = other DNA
atggaggaggacgagttcatcggcgagaagaccttccagagatactgcgccgagttcatcaagcacagccagcagatcggcgacagctgggagtggagacccagcaaggactgcagcgacggctacatgtgcaagatccacttccagatcaagaacggcagcgtgatgagccacctgggcgccagcacccacggccagacctgcctgcccatggaggtgaagagctgcagcgtgacccaggccggcgtgcagctgagagacctgagcagcctgcagcccccccccagcggcttcaagcagttcagctgcctgagcctgcccagcaactgggactacagaggcagccccctgcacctggccaacttcctgtacttctag

SEQ ID NO: 73464 - DNA, 663 bp, synthetic construct; identical to SEQ ID NO: 73462
  misc_feature 1..663: note = Description of Artificial Sequence: Synthetic coding sequence
  source 1..663: mol_type = other DNA

SEQ ID NO: 73465 - DNA, 882 bp, synthetic construct
  misc_feature 1..882: note = Description of Artificial Sequence: Synthetic coding sequence
  source 1..882: mol_type = other DNA
atggacagaagagtgaagctgtgggaggtgttcggcgagaagtgcgagttcaagggcagcctgagcggcagcaacgccggcatcaccagcatcgagttcgacagcgccggcagctacctgctggccgccagcaacgacttcgccagcagaatctggaccgtggacgactacagactgagacacaccctgaccggccacagcggcaaggtgctgagcgccaagttcctgctggacaacgccagaatcgtgagcggcagccacgacagaaccctgaagctgtgggacctgagaagcaaggtgtgcatcaagaccgtgttcgccggcagcagctgcaacgacatcgtgtgcaccgagcagtgcgtgatgagcggccacttcgacaagaagatcagattctgggacatcagaagcgagagcatcgtgagagagatggagctgctgggcaagatcaccgccctggacctgaaccccgagagaaccgagctgctgagctgcagcagagacgacctgctgaaggtgatcgacctgagaaccaacgccatcaagcagaccttcagcgcccccggcttcaagtgcggcagcgactggaccagagtggtgttcagccccgacggcagctacgtggccgccggcagcgccgagggcagcctgtacatctggagcgtgctgaccggcaaggtggagaaggtgctgagcagcagcaccgcccaccccagcatgagatggagaggcagacccctggccagaaccctgagcgtgtggaccaaggacgccaagctgtgctgcggccacagcaccgacggcgccctgagagccggcagaacccccgtgcccagcagcgaggaggcccacggcctgctgcagccctgccccggcagatag

SEQ ID NO: 73466 - DNA, 1335 bp, synthetic construct
  misc_feature 1..1335: note = Description of Artificial Sequence: Synthetic coding sequence
  source 1..1335: mol_type = other DNA
atgagcagcggcctgagagccgccgacttccccagatggaagagacacatcagcgagcagctgagaagaagagacagactgcagagacaggccttcgaggagatcatcctgcagtacaacaagctgctggagaagagcgacctgcacagcgtgctggcccagaagctgcaggccgagaagcacgacgtgcccaacagacacgagatcagaagaagacaggccagactgcagaaggagctggccgaggccgccaaggagcccctgcccgtggagcaggacgacgacatcgaggtgatcgtggacgagaccagcgaccacaccgaggagaccagccccgtgagagccatcagcagagccgccaccagaagaagcgtgagcagcttccccgtgccccaggacaacgtggacacccaccccggcagcggcaaggaggtgagagtgcccgccaccgccctgtgcgtgttcgacgcccacgacggcgaggtgaacgccgtgcagttcagccccggcagcagactgctggccaccggcggcatggacagaagagtgaagctgtgggaggtgttcggcgagaagtgcgagttcaagggcagcctgagcggcagcaacgccggcatcaccagcatcgagttcgacagcgccggcagctacctgctggccgccagcaacgacttcgccagcagaatctggaccgtggacgactacagactgagacacaccctgaccggccacagcggcaaggtgctgagcgccaagttcctgctggacaacgccagaatcgtgagcggcagccacgacagaaccctgaagctgtgggacctgagaagcaaggtgtgcatcaagaccgtgttcgccggcagcagctgcaacgacatcgtgtgcaccgagcagtgcgtgatgagcggccacttcgacaagaagatcagattctgggacatcagaagcgagagcatcgtgagagagatggagctgctgggcaagatcaccgccctggacctgaaccccgagagaaccgagctgctgagctgcagcagagacgacctgctgaaggtgatcgacctgagaaccaacgccatcaagcagaccttcagcgcccccggcttcaagtgcggcagcgactggaccagagtggtgttcagccccgacggcagctacgtggccgccggcagcgccgagggcagcctgtacatctggagcgtgctgaccggcaaggtggagaaggtgctgagcaagcagcacagcagcagcatcaacgccgtggcctggagccccagcggcagccacgtggtgagcgtggacaagggctgcaaggccgtgctgtgggcccagtactag

SEQ ID NO: 73467 - DNA, 1287 bp, synthetic construct
  misc_feature 1..1287: note = Description of Artificial Sequence: Synthetic coding sequence
  source 1..1287: mol_type = other DNA
atgagcagcggcctgagagccgccgacttccccagatggaagagacacatcagcgagcagctgagaagaagagacagactgcagagacaggccttcgaggagatcatcctgcagtacaacaagctgctggagaagagcgacctgcacagcgtgctggcccagaagctgcaggccgagaagcacgacgtgcccaacagacacgagatcagaagaagacaggccagactgcagaaggagctggccgaggccgccaaggagcccctgcccgtggagcaggacgacgacatcgaggtgatcgtggacgagaccagcgaccacaccgaggagaccagccccgtgagagccatcagcagagccgccaccaagagactgagccagcccgccggcggcctgctggacagcatcaccaacatcttcggcagaagaagcgtgagcagcttccccgtgccccaggacaacgtggacacccaccccggcagcggcaaggaggtgagagtgcccgccaccgccctgtgcgtgttcgacgcccacgacggcgaggtgaacgccgtgcagttcagccccggcatcaccagcatcgagttcgacagcgccggcagctacctgctggccgccagcaacgacttcgccagcagaatctggaccgtggacgactacagactgagacacaccctgaccggccacagcggcaaggtgctgagcgccaagttcctgctggacaacgccagaatcgtgagcggcagccacgacagaaccctgaagctgtgggacctgagaagcaaggtgtgcatcaagaccgtgttcgccggcagcagctgcaacgacatcgtgtgcaccgagcagtgcgtgatgagcggccacttcgacaagaagatcagattctgggacatcagaagcgagagcatcgtgagagagatggagctgctgggcaagatcaccgccctggacctgaaccccgagagaaccgagctgctgagctgcagcagagacgacctgctgaaggtgatcgacctgagaaccaacgccatcaagcagaccttcagcgcccccggcttcaagtgcggcagcgactggaccagagtggtgttcagccccgacggcagctacgtggccgccggcagcgccgagggcagcctgtacatctggagcgtgctgaccggcaaggtggagaaggtgctgagcaagcagcacagcagcagcatcaacgccgtggcctggagccccagcggcagccacgtggtgagcgtggacaagggctgcaaggccgtgctgtgggcccagtactag

SEQ ID NO: 73468 - DNA, 1824 bp, synthetic construct
  misc_feature 1..1824: note = Description of Artificial Sequence: Synthetic coding sequence
  source 1..1824: mol_type = other DNA
atgagcagcggcctgagagccgccgacttccccagatggaagagacacatcagcgagcagctgagaagaagagacagactgcagagacaggccttcgaggagatcatcctgcagtacaacaagctgctggagaagagcgacctgcacagcgtgctggcccagaagctgcaggccgagaagcacgacgtgcccaacagacacgagatcagccccggccacgacggcacctggaacgacaaccagctgcaggagatggcccagctgagaatcaagcaccaggaggagctgaccgagctgcacaagaagagaggcgagctggcccagctggtgatcgacctgaacaaccagatgcagagaaaggacagagagatgcagatgaacgaggccaagatcgccgagtgcctgcagaccatcagcgacctggagaccgagtgcctggacctgagaaccaagctgtgcgacctggagagagccaaccagaccctgaaggacgagtacgacgccctgcagatcaccttcaccgccctggagggcaagctgagaaagaccaccgaggagaaccaggagctggtgaccagatggatggccgagaaggcccaggaggccaacagactgaacgccgagaacgagaaggacagcagaagaagacaggccagactgcagaaggagctggccgaggccgccaaggagcccctgcccgtggagcaggacgacgacatcgaggtgatcgtggacgagaccagcgaccacaccgaggagaccagccccgtgagagccatcagcagagccgccaccaagagactgagccagcccgccggcggcctgctggacagcatcaccaacatcttcggcagaagaagcgtgagcagcttccccgtgccccaggacaacgtggacacccaccccggcagcggcaaggaggtgagagtgcccgccaccgccctgtgcgtgttcgacgcccacgacggcgaggtgaacgccgtgcagttcagccccggcagcagactgctggccaccggcggcatggacagaagagtgaagctgtgggaggtgttcggcgagaagtgcgagttcaagggcagcctgagcggcagcaacgccggcatcaccagcatcgagttcgacagcgccggcagctacctgctggccgccagcaacgacttcgccagcagaatctggaccgtggacgactacagactgagacacaccctgaccggccacagcggcaaggtgctgagcgccaagttcctgctggacaacgccagaatcgtgagcggcagccacgacagaaccctgaagctgtgggacctgagaagcaaggtgtgcatcaagaccgtgttcgccggcagcagctgcaacgacatcgtgtgcaccgagcagtgcgtgatgagcggccacttcgacaagaagatcagattctgggacatcagaagcgagagcatcgtgagagagatggagctgctgggcaagatcaccgccctggacctgaaccccgagagaaccgagctgctgagctgcagcagagacgacctgctgaaggtgatcgacctgagaaccaacgccatcaagcagaccttcagcgcccccggcttcaagtgcggcagcgactggaccagagtggtgttcagccccgacggcagctacgtggccgccggcagcgccgagggcagcctgtacatctggagcgtgctgaccggcaaggtggagaaggtgctgagcaagcagcacagcagcagcatcaacgccgtggcctggagccccagcggcagccacgtggtgagcgtggacaagggctgcaaggccgtgctgtgggcccagtactag

SEQ ID NO: 73469 - DNA, 1875 bp, synthetic construct
  misc_feature 1..1875: note = Description of Artificial Sequence: Synthetic coding sequence
  source 1..1875: mol_type = other DNA
atgagcagcggcctgagagccgccgacttccccagatggaagagacacatcagcgagcagctgagaagaagagacagactgcagagacaggccttcgaggagatcatcctgcagtacaacaagctgctggagaagagcgacctgcacagcgtgctggcccagaagctgcaggccgagaagcacgacgtgcccaacagacacgagatcagccccggccacgacggcacctggaacgacaaccagctgcaggagatggcccagctgagaatcaagcaccaggaggagctgaccgagctgcacaagaagagaggcgagctggcccagctggtgatcgacctgaacaaccagatgcagagaaaggacagagagatgcagatgaacgaggccaagatcgccgagtgcctgcagaccatcagcgacctggagaccgagtgcctggacctgagaaccaagctgtgcgacctggagagagccaaccagaccctgaaggacgagtacgacgccctgcagatcaccttcaccgccctggagggcaagctgagaaagaccaccgaggagaaccaggagctggtgaccagatggatggccgagaaggcccaggaggccaacagactgaacgccgagaacgagaaggacagcagaagaagacaggccagactgcagaaggagctggccgaggccgccaaggagcccctgcccgtggagcaggacgacgacatcgaggtgatcgtggacgagaccagcgaccacaccgaggagaccagccccgtgagagccatcagcagagccgccaccaagagactgagccagcccgccggcggcctgctggacagcatcaccaacatcttcggcctgagcgagagccccctgctgggccaccacagcagcagcgacgccgccagaagaagaagcgtgagcagcttccccgtgccccaggacaacgtggacacccaccccggcagcggcaaggaggtgagagtgcccgccaccgccctgtgcgtgttcgacgcccacgacggcgaggtgaacgccgtgcagttcagccccggcagcagactgctggccaccggcggcatggacagaagagtgaagctgtgggaggtgttcggcgagaagtgcgagttcaagggcagcctgagcggcagcaacgccggcatcaccagcatcgagttcgacagcgccggcagctacctgctggccgccagcaacgacttcgccagcagaatctggaccgtggacgactacagactgagacacaccctgaccggccacagcggcaaggtgctgagcgccaagttcctgctggacaacgccagaatcgtgagcggcagccacgacagaaccctgaagctgtgggacctgagaagcaaggtgtgcatcaagaccgtgttcgccggcagcagctgcaacgacatcgtgtgcaccgagcagtgcgtgatgagcggccacttcgacaagaagatcagattctgggacatcagaagcgagagcatcgtgagagagatggagctgctgggcaagatcaccgccctggacctgaaccccgagagaaccgagctgctgagctgcagcagagacgacctgctgaaggtgatcgacctgagaaccaacgccatcaagcagaccttcagcgcccccggcttcaagtgcggcagcgactggaccagagtggtgttcagccccgacggcagctacgtggccgccggcagcgccgagggcagcctgtacatctggagcgtgctgaccggcaaggtggagaaggtgctgagcaagcagcacagcagcagcatcaacgccgtggcctggagccccagcggcagccacgtggtgagcgtggacaagggctgcaaggccgtgctgtgggcccagtactag

SEQ ID NO: 73470 - DNA, 1767 bp, synthetic construct
  misc_feature 1..1767: note = Description of Artificial Sequence: Synthetic coding sequence
  source 1..1767: mol_type = other DNA
atgagcagcggcctgagagccgccgacttccccagatggaagagacacatcagcgagcagctgagaagaagagacagactgcagagacaggccttcgaggagatcatcctgcagtacaacaagctgctggagaagagcgacctgcacagcgtgctggcccagaagctgcaggccgagaagcacgacgtgcccaacagacacgagatcagccccggccacgacggcacctggaacgacaaccagctgcaggagatggcccagctgagaatcaagcaccaggaggagctgaccgagctgcacaagaagagaggcgagctggcccagctggtgatcgacctgaacaaccagatgcagagaaaggacagagagatgcagatgaacgaggccaagatcgccgagtgcctgcagaccatcagcgacctggagaccgagtgcctggacctgagaaccaagctgtgcgacctggagagagccaaccagaccctgaaggacgagtacgacgccctgcagatcaccttcaccgccctggagggcaagctgagaaagaccaccgaggagaaccaggagctggtgaccagatggatggccgagaaggcccaggaggccaacagactgaacgccgagaacgagaaggacagcagaagaagacaggccagactgcagaaggagctggccgaggccgccaaggagcccctgcccgtggagcaggacgacgacatcgaggtgatcgtggacgagaccagcgaccacaccgaggagaccagccccgtgagagccatcagcagagccgccaccagaagaagcgtgagcagcttccccgtgccccaggacaacgtggacacccaccccggcagcggcaaggaggtgagagtgcccgccaccgccctgtgcgtgttcgacgcccacgacggcgaggtgaacgccgtgcagttcagccccggcagcagactgctggccaccggcggcatggacagaagagtgaagctgtgggaggtgttcggcgagaagtgcgagttcaagggcagcctgagcggcagcaacgccggcatcaccagcatcgagttcgacagcgccggcagctacctgctggccgccagcaacgacttcgccagcagaatctggaccgtggacgactacagactgagacacaccctgaccggccacagcggcaaggtgctgagcgccaagttcctgctggacaacgccagaatcgtgagcggcagccacgacagaaccctgaagctgtgggacctgagaagcaaggtgtgcatcaagaccgtgttcgccggcagcagctgcaacgacatcgtgtgcaccgagcagtgcgtgatgagcggccacttcgacaagaagatcagattctgggacatcagaagcgagagcatcgtgagagagatggagctgctgggcaagatcaccgccctggacctgaaccccgagagaaccgagctgctgagctgcagcagagacgacctgctgaaggtgatcgacctgagaaccaacgccatcaagcagaccttcagcgcccccggcttcaagtgcggcagcgactggaccagagtggtgttcagccccgacggcagctacgtggccgccggcagcgccgagggcagcctgtacatctggagcgtgctgaccggcaaggtggagaaggtgctgagcaagcagcacagcagcagcatcaacgccgtggcctggagccccagcggcagccacgtggtgagcgtggacaagggctgcaaggccgtgctgtgggcccagtactag

SEQ ID NO: 73471 - DNA, 2520 bp, synthetic construct
  misc_feature 1..2520: note = Description of Artificial Sequence: Synthetic coding sequence
  source 1..2520: mol_type = other DNA
atggcccagttcgacaccgagtaccagagactggaggccagctacagcgacagcccccccggcgaggaggacctgctggtgcacgtggccgagggcagcaagagcccctggcaccacatcgagaacctggacctgttcttcagcagagtgtacaacctgcaccagaagaacggcttcacctgcatgctgatcggcgagatcttcgagctgatgcagttcctgttcgtggtggccttcaccaccttcctggtgagctgcgtggactacgacatcctgttcgccaacaagatggtgaaccacagcctgcaccccaccgagcccgtgaaggtgaccctgcccgacgccttcctgcccgcccaggtgtgcagcgccagaatccaggagaacggcagcctgatcaccatcctggtgatcgccggcgtgttctggatccacagactgatcaagttcatctacaacatctgctgctactgggagatccacagcttctacctgcacgccctgagaatccccatgagcgccctgccctactgcacctggcaggaggtgcaggccagaatcgtgcagacccagaaggagcaccagatctgcatccacaagagagagctgaccgagctggacatctaccacagaatcctgagattccagaactacatggtggccctggtgaacaagagcctgctgcccctgagattcagactgcccggcctgggcgaggccgtgttcttcaccagaggcctgaagtacaacttcgagctgatcctgttctggggccccggcagcctgttcctgaacgagtggagcctgaaggccgagtacaagagaggcggccagagactggagctggcccagagactgagcaacagaatcctgtggatcggcatcgccaacttcctgctgtgccccctgatcctgatctggcagatcctgtacgccttcttcagctacgccgaggtgctgaagagagagcccggcgccctgggcgccagatgctggagcctgtacggcagatgctacctgagacacttcaacgagctggagcacgagctgcagagcagactgaacagaggctacaagcccgccagcaagtacatgaactgcttcctgagccccctgctgaccctgctggccaagaacggcgccttcttcgccggcagcatcctggccgtgctgatcgccctgaccatctacgacgaggacgtgctggccgtggagcacgtgctgaccaccgtgaccctgctgggcgtgaccgtgaccgtgtgcagaagcttcatccccgaccagcacatggtgttctgccccgagcagctgctgagagtgatcctggcccacatccactacatgcccgaccactggcagggcaacgcccacagaagccagaccagagacgagttcgcccagctgttccagtacaaggccgtgttcatcctggaggagctgctgagccccatcgtgacccccctgatcctgatcttctgcctgagacccagagccctggagatcatcgacttcttcagaaacttcaccgtggaggtggtgggcgtgggcgacacctgcagcttcgcccagatggacgtgagacagcacggccacccccagtggctgagcgccggccagaccgaggccagcgtgtaccagcaggccgaggacggcaagaccgagctgagcctgatgcacttcgccatcaccaaccccggctggcagccccccagagagagcaccgccttcctgggcttcctgaaggagcaggtgcagagagacggcgccgccgccagcctggcccagggcggcctgctgcccgagaacgccctgttcaccagcatccagagcctgcagagcgagagcgagcccctgagcctgatcgccaacgtggtggccggcagcagctgcagaggcccccccctgcccagagacctgcagggcagcagacacagagccgaggtggccagcgccctgagaagcttcagccccctgcagcccggccaggcccccaccggcagagcccacagcaccatgaccggcagcggcgtggacgccagaaccgccagcagcggcagcagcgtgtgggagggccagctgcagagcctggtgctgagcgagtacgccagcaccgagatgagcctgcacgccctgtacatgcaccagctgcacaagcagcaggcccaggccgagcccgagagacacgtgtggcacagaagagagagcgacgagagcggcgagagcgcccccgacgagggcggcgagggcgccagagccccccagagcatccccagaagcgccagctacccctgcgccgcccccagacccggcgcccccgagaccaccgccctgcacggcggcttccagagaagatacggcggcatcaccgaccccggcaccgtgcccagagtgcccagccacttcagcagactgcccctgggcggctgggccgaggacggccagagcgccagcagacaccccgagcccgtgcccgaggagggcagcgaggacgagctgcccccccaggtgcacaaggtgtag

SEQ ID NO: 73472 - DNA, 2520 bp, synthetic construct; identical to SEQ ID NO: 73471
  misc_feature 1..2520: note = Description of Artificial Sequence: Synthetic coding sequence
  source 1..2520: mol_type = other DNA

SEQ ID NO: 73473 - DNA, 2337 bp, synthetic construct
  misc_feature 1..2337: note = Description of Artificial Sequence: Synthetic coding sequence
  source 1..2337: mol_type = other DNA
atgctgatcggcgagatcttcgagctgatgcagttcctgttcgtggtggccttcaccaccttcctggtgagctgcgtggactacgacatcctgttcgccaacaagatggtgaaccacagcctgcaccccaccgagcccgtgaaggtgaccctgcccgacgccttcctgcccgcccaggtgtgcagcgccagaatccaggagaacggcagcctgatcaccatcctggtgatcgccggcgtgttctggatccacagactgatcaagttcatctacaacatctgctgctactgggagatccacagcttctacctgcacgccctgagaatccccatgagcgccctgccctactgcacctggcaggaggtgcaggccagaatcgtgcagacccagaaggagcaccagatctgcatccacaagagagagctgaccgagctggacatctaccacagaatcctgagattccagaactacatggtggccctggtgaacaagagcctgctgcccctgagattcagactgcccggcctgggcgaggccgtgttcttcaccagaggcctgaagtacaacttcgagctgatcctgttctggggccccggcagcctgttcctgaacgagtggagcctgaaggccgagtacaagagaggcggccagagactggagctggcccagagactgagcaacagaatcctgtggatcggcatcgccaacttcctgctgtgccccctgatcctgatctggcagatcctgtacgccttcttcagctacgccgaggtgctgaagagagagcccggcgccctgggcgccagatgctggagcctgtacggcagatgctacctgagacacttcaacgagctggagcacgagctgcagagcagactgaacagaggctacaagcccgccagcaagtacatgaactgcttcctgagccccctgctgaccctgctggccaagaacggcgccttcttcgccggcagcatcctggccgtgctgatcgccctgaccatctacgacgaggacgtgctggccgtggagcacgtgctgaccaccgtgaccctgctgggcgtgaccgtgaccgtgtgcagaagcttcatccccgaccagcacatggtgttctgccccgagcagctgctgagagtgatcctggcccacatccactacatgcccgaccactggcagggcaacgcccacagaagccagaccagagacgagttcgcccagctgttccagtacaaggccgtgttcatcctggaggagctgctgagccccatcgtgacccccctgatcctgatcttctgcctgagacccagagccctggagatcatcgacttcttcagaaacttcaccgtggaggtggtgggcgtgggcgacacctgcagcttcgcccagatggacgtgagacagcacggccacccccagtggctgagcgccggccagaccgaggccagcgtgtaccagcaggccgaggacggcaagaccgagctgagcctgatgcacttcgccatcaccaaccccggctggcagccccccagagagagcaccgccttcctgggcttcctgaaggagcaggtgcagagagacggcgccgccgccagcctggcccagggcggcctgctgcccgagaacgccctgttcaccagcatccagagcctgcagagcgagagcgagcccctgagcctgatcgccaacgtggtggccggcagcagctgcagaggcccccccctgcccagagacctgcagggcagcagacacagagccgaggtggccagcgccctgagaagcttcagccccctgcagcccggccaggcccccaccggcagagcccacagcaccatgaccggcagcggcgtggacgccagaaccgccagcagcggcagcagcgtgtgggagggccagctgcagagcctggtgctgagcgagtacgccagcaccgagatgagcctgcacgccctgtacatgcaccagctgcacaagcagcaggcccaggccgagcccgagagacacgtgtggcacagaagagagagcgacgagagcggcgagagcgcccccgacgagggcggcgagggcgccagagccccccagagcatccccagaagcgccagctacccctgcgccgcccccagacccggcgcccccgagaccaccgccctgcacggcggcttccagagaagatacggcggcatcaccgaccccggcaccgtgcccagagtgcccagccacttcagcagactgcccctgggcggctgggccgaggacggccagagcgccagcagacaccccgagcccgtgcccgaggagggcagcgaggacgagctgcccccccaggtgcacaaggtgtag

SEQ ID NO: 73474 - DNA, 2520 bp, synthetic construct; identical to SEQ ID NO: 73471
  misc_feature 1..2520: note = Description of Artificial Sequence: Synthetic coding sequence
  source 1..2520: mol_type = other DNA

SEQ ID NO: 73475 - DNA, 510 bp, synthetic construct
  misc_feature 1..510: note = Description of Artificial Sequence: Synthetic coding sequence
  source 1..510: mol_type = other DNA
atggcccagttcgacaccgagtaccagagactggaggccagctacagcgacagcccccccggcgaggaggacctgctggtgcacgtggccgagggcagcaagagcccctggcaccacatcgagaacctggacctgttcttcagcagagtgtacaacctgcaccagaagaacggcttcacctgcatgctgatcggcgagatcttcgagctgatgcagttcctgttcgtggtggccttcaccaccttcctggtgagctgcgtggactacgacatcctgttcgccaacaagatggtgaaccacagcctgcaccccaccgagcccgtgaaggtgaccctgcccgacgccttcctgcccgcccaggtgtgcagcgccagaatccaggagaacggcagcctgatcaccatcctggtgatcgccggcgtgttctggatccacagactgatcaagttcatctacaacatctgctgctactgggagatccacagcttctacctgcacgccctgagatag

SEQ ID NO: 73476 - DNA, 435 bp, synthetic construct
  misc_feature 1..435: note = Description of Artificial Sequence: Synthetic coding sequence
  source 1..435: mol_type = other DNA
atggcccagttcgacaccgagtaccagagactggaggccagctacagcgacagcccccccggcgaggaggacctgctggtgcacgtggccgagggcagcaagagcccctggcaccacatcgagaacctggacctgttcttcagcagagtgtacaacctgcaccagaagaacggcttcacctgcatgctgatcggcgagatcttcgagctgatgcagttcctgttcgtggtggccttcaccaccttcctggtgagctgcgtggactacgacatcctgttcgccaacaagatggtgaaccacagcctgcaccccaccgagcccgtgaaggtgaccctgcccgacgccttcctgcccgcccaggtgtgcagcgccagaatccaggagaacggcagcctgatcaccatcctggtgatcgccggcgtgttctggatctag

SEQ ID NO: 73477 - DNA, 282 bp, synthetic construct
  misc_feature 1..282: note = Description of Artificial Sequence: Synthetic coding sequence
  source 1..282: mol_type = other DNA
atggcccagttcgacaccgagtaccagagactggaggccagctacagcgacagcccccccggcgaggaggacctgctggtgcacgtggccgagggcagcaagagcccctggcaccacatcgagaacctggacctgttcttcagcagagtgtacaacctgcaccagaagaacggcttcacctgcatgctgatcggcgagatcttcgagctgatgcagttcctgttcgtggtggccttcaccaccttcctggtgagctgcgtggactacgacatcctgttctag

SEQ ID NO: 73478 - DNA, 567 bp, synthetic construct
  misc_feature 1..567: note = Description of Artificial Sequence: Synthetic coding sequence
  source 1..567: mol_type = other DNA
atggcccagttcgacaccgagtaccagagactggaggccagctacagcgacagcccccccggcgaggaggacctgctggtgcacgtggccgagggcagcaagagcccctggcaccacatcgagaacctggacctgttcttcagcagagtgtacaacctgcaccagaagaacggcttcacctgcatgctgatcggcgagatcttcgagctgatgcagttcctgttcgtggtggccttcaccaccttcctggtgagctgcgtggactacgacatcctgttcgccaacaagatggtgaaccacagcctgcaccccaccgagcccgtgaaggtgaccctgcccgacgccttcctgcccgcccaggtgtgcagcgccagaatccaggagaacggcagcctgatcaccatcctggtgatcgccggcgtgttctggatccacagactgatcaagttcatctacaacatctgctgctactgggagatccacagcttctacctgcacgccctgagaatccccatgagcgccctgccctactgcacctggcaggaggtgcaggccagaatcgtgtag

SEQ ID NO: 73479 - DNA, 396 bp, synthetic construct
  misc_feature 1..396: note = Description of Artificial Sequence: Synthetic coding sequence
  source 1..396: mol_type = other DNA
atggcccagttcgacaccgagtaccagagactggaggccagctacagcgacagcccccccggcgaggaggacctgctggtgcacgtggccgagggcagcaagagcccctggcaccacatcgagaacctggacctgttcttcagcagagtgtacaacctgcaccagaagaacggcttcacctgcatgctgatcggcgagatcttcgagctgatgcagttcctgttcgtggtggccttcaccaccttcctggtgagctgcgtggactacgacatcctgttcgccaacaagatggtgaaccacagcctgcaccccaccgagcccgtgaaggtgaccctgcccgacgccttcctgcccgcccaggtgtgcagcgccagaatccaggagaacggcagctag

SEQ ID NO: 73480 - DNA, 294 bp, synthetic construct
  misc_feature 1..294: note = Description of Artificial Sequence: Synthetic coding sequence
  source 1..294: mol_type = other DNA
atggcccagttcgacaccgagtaccagagactggaggccagctacagcgacagcccccccggcgaggaggacctgctggtgcacgtggccgagggcagcaagagcccctggcaccacatcgagaacctggacctgttcttcagcagagtgtacaacctgcaccagaagaacggcttcacctgcatgctgatcggcgagatcttcgagctgatgcagttcctgttcgtggtggccttcaccaccttcctggtgagctgcgtggactacgacatcctgttcgccaacaagatgtag

SEQ ID NO: 73481 - DNA, 519 bp, synthetic construct
  misc_feature 1..519: note = Description of Artificial Sequence: Synthetic coding sequence
  source 1..519: mol_type = other DNA
atggcccagttcgacaccgagtaccagagactggaggccagctacagcgacagcccccccggcgaggaggacctgctggtgcacgtggccgagggcagcaagagcccctggcaccacatcgagaacctggacctgttcttcagcagagtgtacaacctgcaccagaagaacggcttcacctgcatgctgatcggcgagatcttcgagctgatgcagttcctgttcgtggtggccttcaccaccttcctggtgagctgcgtggactacgacatcctgttcgccaacaagatggtgaaccacagcctgcaccccaccgagcccgtgaaggtgaccctgcccgacgccttcctgcccgcccaggtgtgcagcgccagaatccaggagaacggcagcctgatcaccatcctggtgatcgccggcgtgttctggatccacagactgatcaagttcatctacaacatctgctgctactgggagatccacagcttctacctgcacgccctgagaatccccatgtag

SEQ ID NO: 73482 - DNA, 1662 bp, synthetic construct
  misc_feature 1..1662: note = Description of Artificial Sequence: Synthetic coding sequence
  source 1..1662: mol_type = other DNA
atggccaagaacagaagagacagaaacagctggggcggcttcagcgagaagacctacgagtggagcagcgaggaggaggagcccgtgaagaaggccggccccgtgcaggtgctgatcgtgaaggacgaccacagcttcgagctggacgagaccgccctgaacagaatcctgctgagcgaggccgtgagagacaaggaggtggtggccgtgagcgtggccggcgccttcagaaagggcaagagcttcctgatggacttcatgctgagatacatgtacaaccaggagagcgtggactgggtgggcgactacaacgagcccctgaccggcttcagctggagaggcggcagcgagagagagaccaccggcatccagatctggagcgagatcttcctgatcaacaagcccgacggcaagaaggtggccgtgctgctgatggacacccagggcaccttcgacagccagagcaccctgagagacagcgccaccgtgttcgccctgagcaccatgatcagcagcatccaggtgtacaacctgagccagaacgtgcaggaggacgacctgcagcacctgcagctgttcaccgagtacggcagactggccatggaggagaccttcctgaagcccttccagagcctgatcttcctggtgagagactggagcttcccctacgagttcagctacggcgccgacggcggcgccaagttcctggagaagagactgaaggtgagcggcaaccagcacgaggagctgcagaacgtgagaaagcacatccacagctgcttcaccaacatcagctgcttcctgctgccccaccccggcctgaaggtggccaccaaccccaacttcgacggcaagctgaaggagatcgacgacgagttcatcaagaacctgaagatcctgatcccctggctgctgagccccgagagcctggacatcaaggagatcaacggcaacaagatcacctgcagaggcctggtggagtacttcaaggcctacatcaagatctaccagggcgaggagctgccccaccccaagagcatgctgcaggccaccgccgaggccaacaacctggccgccgtggccaccgccaaggacacctacaacaagaagatggaggagatctgcggcggcgacaagcccttcctggcccccaacgacctgcagaccaagcacctgcagctgaaggaggagagcgtgaagctgttcagaggcgtgaagaagatgggcggcgaggagttcagcagaagatacctgcagcagctggagagcgagatcgacgagctgtacatccagtacatcaagcacaacgacagcaagaacatcttccacgccgccagaacccccgccaccctgttcgtggtgatcttcatcacctacgtgatcgccggcgtgaccggcttcatcggcctggacatcatcgccagcctgtgcaacatgatcatgggcctgaccctgatcaccctgtgcacctgggcctacatcagatacagcggcgagtacagagagctgggcgccgtgatcgaccaggtggccgccgccctgtgggaccaggccctgtacaagctgtacagcgccgccgccacccacagacacctgtaccaccaggccttccccacccccaagagcgagagcaccgagcagagcgagaagaagaagatgtag

SEQ ID NO: 73483 - DNA, 1677 bp, synthetic construct
  misc_feature 1..1677: note = Description of Artificial Sequence: Synthetic coding sequence
  source 1..1677: mol_type = other DNA
atggccaagaacagaagagacagaaacagctggggcggcttcagcgagaagacctacgagtggagcagcgaggaggaggagcccgtgaagaaggccggccccgtgcaggtgctgatcgtgaaggacgaccacagcttcgagctggacgagaccgccctgaacagaatcctgctgagcgaggccgtgagagacaaggaggtggtggccgtgagcgtggccggcgccttcagaaagggcaagagcttcctgatggacttcatgctgagatacatgtacaaccaggagagcgtggactgggtgggcgactacaacgagcccctgaccggcttcagctggagaggcggcagcgagagagagaccaccggcatccagatctggagcgagatcttcctgatcaacaagcccgacggcaagaaggtggccgtgctgctgatggacacccagggcaccttcgacagccagagcaccctgagagacagcgccaccgtgttcgccctgagcaccatgatcagcagcatccaggtgtacaacctgagccagaacgtgcaggaggacgacctgcagcacctgcagctgttcaccgagtacggcagactggccatggaggagaccttcctgaagcccttccagagcctgatcttcctggtgagagactggagcttcccctacgagttcagctacggcgccgacggcggcgccaagttcctggagaagagactgaaggtgagcggcaaccagcacgaggagctgcagaacgtgagaaagcacatccacagctgcttcaccaacatcagctgcttcctgctgccccaccccggcctgaaggtggccaccaaccccaacttcgacggcaagctgaaggagatcgacgacgagttcatcaagaacctgaagatcctgatcccctggctgctgagccccgagagcctggacatcaaggagatcaacggcaacaagatcacctgcagaggcctggtggagtacttcaaggcctacatcaagatctaccagggcgaggagctgccccaccccaagagcatgctgcaggccaccgccgaggccaacaacctggccgccgtggccaccgccaaggacacctacaacaagaagatggaggagatctgcggcggcgacaagcccttcctggcccccaacgacctgcagaccaagcacctgcagctgaaggaggagagcgtgaagctgttcagaggcgtgaagaagatgggcggcgaggagttcagcagaagatacctgcagcagctggagagcgagatcgacgagctgtacatccagtacatcaagcacaacgacagcaagaacatcttccacgccgccagaacccccgccaccctgttcgtggtgatcttcatcacctacgtgatcgccggcgtgaccggcttcatcggcctggacatcatcgccagcctgtgcaacatgatcatgggcctgaccctgatcaccctgtgcacctgggcctacatcagatacagcggcgagtacagagagctgggcgccgtgatcgaccaggtggccgccgccctgtgggaccagggccccagccaccaggccctgtacaagctgtacagcgccgccgccacccacagacacctgtaccaccaggccttccccacccccaagagcgagagcaccgagcagagcgagaagaagaagatgtag

SEQ ID NO: 73484 - DNA, 1677 bp, synthetic construct
  misc_feature 1..1677: note = Description of Artificial Sequence: Synthetic coding sequence
  source 1..1677: mol_type = other DNA
atggccaagaacagaagagacagaaacagctggggcggcttcagcgagaagacctacgagtggagcagcgaggaggaggagcccgtgaagaaggccggccccgtgcaggtgctgatcgtgaaggacgaccacagcttcgagctggacgagaccgccctgaacagaatcctgctgagcgaggccgtgagagacaaggaggtggtggccgtgagcgtggccggcgccttcagaaagggcaagagcttcctgatggacttcatgctgagatacatgtacaaccaggagagcgtggactgggtgggcgactacaacgagcccctgaccggcttcagctggagaggcggcagcgagagagagaccaccggcatccagatctggagcgagatcttcctgatcaacaagcccgacggcaagaaggtggccgtgctgctgatggacacccagggcaccttcgacagccagagcaccctgagagacagcgccaccgtgttcgccctgagcaccatgatcagcagcatccaggtgtacaacctgagccagaacgtgcaggaggacgacctgcagcacctgcagctgttcaccgagtacggcagactggccatggaggagaccttcctgaagcccttccagagcctgatcttcctggtgagagactggagcttcccctacgagttcagctacggcgccgacggcggcgccaagttcctggagaagagactgaaggtgagcggcaaccagcacgaggagctgcagaacgtgagaaagcacatccacagctgcttcaccaacatcagctgcttcctgctgccccaccccggcctgaaggtggccaccaaccccaacttcgacggcaagctgaaggagatcgacgacgagttcatcaagaacctgaagatcctgatcccctggctgctgagccccgagagcctggacatcaaggagatcaacggcaacaagatcacctgcagaggcctggtggagtacttcaaggcctacatcaagatctaccagggcgaggagctgccccaccccaagagcatgctgcaggccaccgccgaggccaacaacctggccgccgtggccaccgccaaggacacctacaacaagaagatggaggagatctgcggcggcgacaagcccttcctggcccccaacgacctgcagaccaagcacctgcagctgaaggaggagagcgtgaagctgttcagaggcgtgaagaagatgggcggcgaggagttcagcagaagatacctgcagcagctggagagcgagatcgacgagctgtacatccagtacatcaagcacaacgacagcaagaacatcttccacgccgccagaacccccgccaccctgttcgtggtgatcttcatcacctacgtgatcgccggcgtgaccggcttcatcggcctggacatcatcgccagcctgtgcaacatgatcatgggcctgaccctgatcaccctgtgcacctgggcctacatcagatacagcggcgagtacagagagctgggcgccgtgatcgaccaggtggccgccgccctgtgggaccagggcagcaccaacgaggccctgtacaagctgtacagcgccgccgccacccacagacacctgtaccaccaggccttccccacccccaagagcgagagcaccgagcagagcgagaagaagaagatgtag

SEQ ID NO: 73485 - DNA, 1662 bp, synthetic construct; identical to SEQ ID NO: 73482
  misc_feature 1..1662: note = Description of Artificial Sequence: Synthetic coding sequence
  source 1..1662: mol_type = other DNA

SEQ ID NO: 73486 - DNA, 90 bp, synthetic construct
  misc_feature 1..90: note = Description of Artificial Sequence: Synthetic coding sequence
  source 1..90: mol_type = other DNA
atggccaagaacagaagagacagaaacagctggggcggcttcagcgagaagacctacgagtggagcagcgaggaggaggagcccgtgtag

SEQ ID NO: 73487 - DNA, 303 bp, synthetic construct
  misc_feature 1..303: note = Description of Artificial Sequence: Synthetic coding sequence
  source 1..303: mol_type = other DNA
atggccaagaacagaagagacagaaacagctggggcggcttcagcgagaagacctacgagtggagcagcgaggaggaggagcccgtgaagaaggccggccccgtgcaggtgctgatcgtgaaggacgaccacagcttcgagctggacgagaccgccctgaacagaatcctgctgagcgaggccgtgagagacaaggaggtggtggccgtgagcgtggccggcgccttcagaaagggcaagagcttcctgatggacttcatgctgagatacatgtacaaccaggagagcgtggactgggtgtag

SEQ ID NO: 73488 - DNA, 1701 bp, synthetic construct
  misc_feature 1..1701: note = Description of Artificial Sequence: Synthetic coding sequence
  source 1..1701: mol_type = other DNA
atggtgctgaagaagggcatcaagttcttccagagactgatcaacagcaagagcctgagattcggcgagaactacgaggacgacgacctggtgaacagcgacgaggtgatgaagaagccctgccccgtgcagatcgtgctggcccacgaggacgaccacaacttcgagctggacgaggaggccctggagcagatcctgctgcaggagcacatcagagacctgaacatcgtggtggtgagcgtggccggcgccttcagaaagggcaagagcttcctgctggacttcatgctgagatacatgtacaacaaggacagccagagctggatcggcggcaacaacgagcccctgaccggcttcacctggagaggcggctgcgagagagagaccaccggcatccaggtgtggaacgaggtgttcgtgatcgacagacccaacggcaccaaggtggccgtgctgctgatggacacccagggcgccttcgacagccagagcaccatcaaggactgcgccaccgtgttcgccctgagcaccatgaccagcagcgtgcaggtgtacaacctgagccagaacatccaggaggacgacctgcagcacctgcagctgttcaccgagtacggcagactggccatggaggagatctaccagaagcccttccagaccctgatgttcctgatcagagactggagctacccctacgagcacagctacggcctggagggcggcaagcagttcctggagaagagactgcaggtgaagcagaaccagcacgaggagctgcagaacgtgagaaagcacatccacaactgcttcagcaacctgggctgcttcctgctgccccaccccggcctgaaggtggccaccaaccccagcttcgacggcagactgaaggacatcgacgaggacttcaagagagagctgagaaacctggtgcccctgctgctggcccccgagaacctggtggagaaggagatcagcggcagcaaggtgacctgcagagacctggtggagtacttcaaggcctacatcaagatctaccagggcgaggagctgccccaccccaagagcatgctgcaggccaccgccgaggccaacaacctggccgccgtggccggcgccagagacacctactgcaagagcatggagcaggtgtgcggcggcgacaagccctacatcgcccccagcgacctggagagaaagcacctggacctgaaggaggtggccatcaagcagttcagaagcgtgaagaagatgggcggcgacgagttctgcagaagataccaggaccagctggaggccgagatcgaggagacctacgccaacttcatcaagcacaacgacggcaagaacatcttctacgccgccagaacccccgccaccctgttcgccgtgatgttcgccatgtacatcatcagcggcctgaccggcttcatcggcctgaacagcatcgccgtgctgtgcaacctggtgatgggcctggccctgatcttcctgtgcacctgggcctacgtgaagtacagcggcgagttcagagagatcggcaccgtgatcgaccagatcgccgagaccctgtgggagcagagaagccccagaaaggtgttcagcaagctgttcgaggtgaccagaagaagaatggtgcacagagccctgagcagcgcccagagacagagactgagcagcaacaacaacaagaagaagaactag

SEQ ID NO: 73489 - DNA, 1752 bp, synthetic construct
  misc_feature 1..1752: note = Description of Artificial Sequence: Synthetic coding sequence
  source 1..1752: mol_type = other DNA
atggccgagggcgacgaggccgccagaggccagcagccccaccagggcctgtggagaagaagaagaaccagcgaccccagcgccgccgtgaaccacgtgagcagcaccaccagcctgggcgagaactacgaggacgacgacctggtgaacagcgacgaggtgatgaagaagccctgccccgtgcagatcgtgctggcccacgaggacgaccacaacttcgagctggacgaggaggccctggagcagatcctgctgcaggagcacatcagagacctgaacatcgtggtggtgagcgtggccggcgccttcagaaagggcaagagcttcctgctggacttcatgctgagatacatgtacaacaaggacagccagagctggatcggcggcaacaacgagcccctgaccggcttcacctggagaggcggctgcgagagagagaccaccggcatccaggtgtggaacgaggtgttcgtgatcgacagacccaacggcaccaaggtggccgtgctgctgatggacacccagggcgccttcgacagccagagcaccatcaaggactgcgccaccgtgttcgccctgagcaccatgaccagcagcgtgcaggtgtacaacctgagccagaacatccaggaggacgacctgcagcacctgcagctgttcaccgagtacggcagactggccatggaggagatctaccagaagcccttccagaccctgatgttcctgatcagagactggagctacccctacgagcacagctacggcctggagggcggcaagcagttcctggagaagagactgcaggtgaagcagaaccagcacgaggagctgcagaacgtgagaaagcacatccacaactgcttcagcaacctgggctgcttcctgctgccccaccccggcctgaaggtggccaccaaccccagcttcgacggcagactgaaggacatcgacgaggacttcaagagagagctgagaaacctggtgcccctgctgctggcccccgagaacctggtggagaaggagatcagcggcagcaaggtgacctgcagagacctggtggagtacttcaaggcctacatcaagatctaccagggcgaggagctgccccaccccaagagcatgctgcaggccaccgccgaggccaacaacctggccgccgtggccggcgccagagacacctactgcaagagcatggagcaggtgtgcggcggcgacaagccctacatcgcccccagcgacctggagagaaagcacctggacctgaaggaggtggccatcaagcagttcagaagcgtgaagaagatgggcggcgacgagttctgcagaagataccaggaccagctggaggccgagatcgaggagacctacgccaacttcatcaagcacaacgacggcaagaacatcttctacgccgccagaacccccgccaccctgttcgccgtgatgttcgccatgtacatcatcagcggcctgaccggcttcatcggcctgaacagcatcgccgtgctgtgcaacctggtgatgggcctggccctgatcttcctgtgcacctgggcctacgtgaagtacagcggcgagttcagagagatcggcaccgtgatcgaccagatcgccgagaccctgtgggagcaggtgctgaagcccctgggcgacaacctgatggaggagaacatcagacagagcgtgaccaacagcatcaaggccggcctgaccgaccaggtgagccaccacgccagactgaagaccgactag

SEQ ID NO: 73490 - DNA, 1239 bp, synthetic construct
  misc_feature 1..1239: note = Description of Artificial Sequence: Synthetic coding sequence
  source 1..1239: mol_type = other DNA
atggacacccagggcgccttcgacagccagagcaccatcaaggactgcgccaccgtgttcgccctgagcaccatgaccagcagcgtgcaggtgtacaacctgagccagaacatccaggaggacgacctgcagcacctgcagctgttcaccgagtacggcagactggccatggaggagatctaccagaagcccttccagaccctgatgttcctgatcagagactggagctacccctacgagcacagctacggcctggagggcggcaagcagttcctggagaagagactgcaggtgaagcagaaccagcacgaggagctgcagaacgtgagaaagcacatccacaactgcttcagcaacctgggctgcttcctgctgccccaccccggcctgaaggtggccaccaaccccagcttcgacggcagactgaaggacatcgacgaggacttcaagagagagctgagaaacctggtgcccctgctgctggcccccgagaacctggtggagaaggagatcagcggcagcaaggtgacctgcagagacctggtggagtacttcaaggcctacatcaagatctaccagggcgaggagctgccccaccccaagagcatgctgcaggccaccgccgaggccaacaacctggccgccgtggccggcgccagagacacctactgcaagagcatggagcaggtgtgcggcggcgacaagccctacatcgcccccagcgacctggagagaaagcacctggacctgaaggaggtggccatcaagcagttcagaagcgtgaagaagatgggcggcgacgagttctgcagaagataccaggaccagctggaggccgagatcgaggagacctacgccaacttcatcaagcacaacgacggcaagaacatcttctacgccgccagaacccccgccaccctgttcgccgtgatgttcgccatgtacatcatcagcggcctgaccggcttcatcggcctgaacagcatcgccgtgctgtgcaacctggtgatgggcctggccctgatcttcctgtgcacctgggcctacgtgaagtacagcggcgagttcagagagatcggcaccgtgatcgaccagatcgccgagaccctgtgggagcaggtgctgaagcccctgggcgacaacctgatggaggagaacatcagacagagcgtgaccaacagcatcaaggccggcctgaccgaccaggtgagccaccacgccagactgaagaccgactag

SEQ ID NO: 73491 - DNA, 1740 bp, synthetic construct
  misc_feature 1..1740: note = Description of Artificial Sequence: Synthetic coding sequence
  source 1..1740: mol_type = other DNA
atggccgagggcgacgaggccgccagaggccagcagccccaccagggcctgtggagaagaagaagaaccagcgaccccagcgccgccgtgaaccacgtgagcagcaccaccagcctgggcgagaactacgaggacgacgacctggtgaacagcgacgaggtgatgaagaagccctgccccgtgcagatcgtgctggcccacgaggacgaccacaacttcgagctggacgaggaggccctggagcagatcctgctgcaggagcacatcagagacctgaacatcgtggtggtgagcgtggccggcgccttcagaaagggcaagagcttcctgctggacttcatgctgagatacatgtacaacaaggacagccagagctggatcggcggcaacaacgagcccctgaccggcttcacctggagaggcggctgcgagagagagaccaccggcatccaggtgtggaacgaggtgttcgtgatcgacagacccaacggcaccaaggtggccgtgctgctgatggacacccagggcgccttcgacagccagagcaccatcaaggactgcgccaccgtgttcgccctgagcaccatgaccagcagcgtgcaggtgtacaacctgagccagaacatccaggaggacgacctgcagcacctgcagctgttcaccgagtacggcagactggccatggaggagatctaccagaagcccttccagaccctgatgttcctgatcagagactggagctacccctacgagcacagctacggcctggagggcggcaagcagttcctggagaagagactgcaggtgaagcagaaccagcacgaggagctgcagaacgtgagaaagcacatccacaactgcttcagcaacctgggctgcttcctgctgccccaccccggcctgaaggtggccaccaaccccagcttcgacggcagactgaaggacatcgacgaggacttcaagagagagctgagaaacctggtgcccctgctgctggcccccgagaacctggtggagaaggagatcagcggcagcaaggtgacctgcagagacctggtggagtacttcaaggcctacatcaagatctaccagggcgaggagctgccccaccccaagagcatgctgcaggccaccgccgaggccaacaacctggccgccgtggccggcgccagagacacctactgcaagagcatggagcaggtgtgcggcggcgacaagccctacatcgcccccagcgacctggagagaaagcacctggacctgaaggaggtggccatcaagcagttcagaagcgtgaagaagatgggcggcgacgagttctgcagaagataccaggaccagctggaggccgagatcgaggagacctacgccaacttcatcaagcacaacgacggcaagaacatcttctacgccgccagaacccccgccaccctgttcgccgtgatgttcgccatgtacatcatcagcggcctgaccggcttcatcggcctgaacagcatcgccgtgctgtgcaacctggtgatgggcctggccctgatcttcctgtgcacctgggcctacgtgaagtacagcggcgagttcagagagatcggcaccgtgatcgaccagatcgccgagaccctgtgggagcaggtgttcagcaagctgttcgaggtgaccagaagaagaatggtgcacagagccctgagcagcgcccagagacagagactgagcagcaacaacaacaagaagaagaactag

SEQ ID NO: 73492 - DNA, 1239 bp, synthetic construct; identical to SEQ ID NO: 73490
  misc_feature 1..1239: note = Description of Artificial Sequence: Synthetic coding sequence
  source 1..1239: mol_type = other DNA

SEQ ID NO: 73493 - DNA, 1242 bp, synthetic construct
  misc_feature 1..1242: note = Description of Artificial Sequence: Synthetic coding sequence
  source 1..1242: mol_type = other DNA
atggacacccagggcgccttcgacagccagagcaccatcaaggactgcgccaccgtgttcgccctgagcaccatgaccagcagcgtgcaggtgtacaacctgagccagaacatccaggaggacgacctgcagcacctgcagctgttcaccgagtacggcagactggccatggaggagatctaccagaagcccttccagaccctgatgttcctgatcagagactggagctacccctacgagcacagctacggcctggagggcggcaagcagttcctggagaagagactgcaggtgaagcagaaccagcacgaggagctgcagaacgtgagaaagcacatccacaactgcttcagcaacctgggctgcttcctgctgccccaccccggcctgaaggtggccaccaaccccagcttcgacggcagactgaaggacatcgacgaggacttcaagagagagctgagaaacctggtgcccctgctgctggcccccgagaacctggtggagaaggagatcagcggcagcaaggtgacctgcagagacctggtggagtacttcaaggcctacatcaagatctaccagggcgaggagctgccccaccccaagagcatgctgcaggccaccgccgaggccaacaacctggccgccgtggccggcgccagagacacctactgcaagagcatggagcaggtgtgcggcggcgacaagccctacatcgcccccagcgacctggagagaaagcacctggacctgaaggaggtggccatcaagcagttcagaagcgtgaagaagatgggcggcgacgagttctgcagaagataccaggaccagctggaggccgagatcgaggagacctacgccaacttcatcaagcacaacgacggcaagaacatcttctacgccgccagaacccccgccaccctgttcgccgtgatgttcgccatgtacatcatcagcggcctgaccggcttcatcggcctgaacagcatcgccgtgctgtgcaacctggtgatgggcctggccctgatcttcctgtgcacctgggcctacgtgaagtacagcggcgagttcagagagatcggcaccgtgatcgaccagatcgccgagaccctgtgggagcagagaagccccagaaaggtgttcagcaagctgttcgaggtgaccagaagaagaatggtgcacagagccctgagcagcgcccagagacagagactgagcagcaacaacaacaagaagaagaactag

SEQ ID NO: 73494 - DNA, 1707 bp, synthetic construct
  misc_feature 1..1707: note = Description of Artificial Sequence: Synthetic coding sequence
  source 1..1707: mol_type = other DNA
atgagaaccgccggcagagaccccgtgagcgccggcctgcagttccccaaggacggcagcacccagagacccgccaacagagccagattcgtgcccgccagaaccagacccagccccctgcacccctgctgcttctgcttcgagggcggcggcagcatgctgagcccccagagagtggccgccgccgccagcagaggcgccgacgacgccatggagagcagcaacatcctgctgcaggaccacatcagagacctggacgtggtggtggtgagcgtggccggcgccttcagaaagggcaagagcttcatcctggacttcatgctgagatacctgtacagccagaaggagagcggccacagcaactggctgggcgaccccgaggagcccctgaccggcttcagctggagaggcggcagcgaccccgagaccaccggcatccagatctggagcgaggtgttcaccgtggagaagcccggcggcaagaaggtggccgtggtgctgatggacacccagggcgccttcgacagccagagcaccgtgaaggactgcgccaccatcttcgccctgagcaccatgaccagcagcgtgcagatctacaacctgagccagaacatccaggaggacgacctgcagcagctgcagctgttcaccgagtacggcagactggccatggacgagatcttccagaagcccttccagaccctgatgttcctggtgagagactggagcttcccctacgagtacagctacggcctgcagggcggcatggccttcctggacaagagactgcaggtgaaggagcaccagcacgaggagatccagaacgtgagaaaccacatccacagctgcttcagcgacgtgacctgcttcctgctgccccaccccggcctgcaggtggccaccagccccgacttcgacggcaagctgaaggacatcgccggcgagttcaaggagcagctgcaggccctgatcccctacgtgctgaaccccagcaagctgatggagaaggagatcaacggcagcaaggtgacctgcagaggcctgctggagtacttcaaggcctacatcaagatctaccagggcgaggacctgccccaccccaagagcatgctgcaggccaccgccgaggccaacaacctggccgccgccgccagcgccaaggacatctactacaacaacatggaggaggtgtgcggcggcgagaagccctacctgagccccgacatcctggaggagaagcactgcgagttcaagcagctggccctggaccacttcaagaagaccaagaagatgggcggcaaggacttcagcttcagataccagcaggagctggaggaggagatcaaggagctgtacgagaacttctgcaagcacaacggcagcaagaacgtgttcagcaccttcagaacccccgccgtgctgttcaccggcatcgtggccctgtacatcgccagcggcctgaccggcttcatcggcctggaggtggtggcccagctgttcaactgcatggtgggcctgctgctgatcgccctgctgacctggggctacatcagatacagcggccagtacagagagctgggcggcgccatcgacttcggcgccgcctacgtgctggagcaggccagcagccacatcggcaacagcacccaggccaccgtgagagacgccgtggtgggcagacccagcatggacaagaaggcccagtag

SEQ ID NO: 73495 - DNA, 1626 bp, synthetic construct
  misc_feature 1..1626: note = Description of Artificial Sequence: Synthetic coding sequence
  source 1..1626: mol_type = other DNA
atgctgagcccccagagagtggccgccgccgccagcagaggcgccgacgacgccatggagagcagcaagcccggccccgtgcaggtggtgctggtgcagaaggaccagcacagcttcgagctggacgagaaggccctggccagcatcctgctgcaggaccacatcagagacctggacgtggtggtggtgagcgtggccggcgccttcagaaagggcaagagcttcatcctggacttcatgctgagatacctgtacagccagaaggagagcggccacagcaactggctgggcgaccccgaggagcccctgaccggcttcagctggagaggcggcagcgaccccgagaccaccggcatccagatctggagcgaggtgttcaccgtggagaagcccggcggcaagaaggtggccgtggtgctgatggacacccagggcgccttcgacagccagagcaccgtgaaggactgcgccaccatcttcgccctgagcaccatgaccagcagcgtgcagatctacaacctgagccagaacatccaggaggacgacctgcagcagctgcagctgttcaccgagtacggcagactggccatggacgagatcttccagaagcccttccagaccctgatgttcctggtgagagactggagcttcccctacgagtacagctacggcctgcagggcggcatggccttcctggacaagagactgcaggtgaaggagcaccagcacgaggagatccagaacgtgagaaaccacatccacagctgcttcagcgacgtgacctgcttcctgctgccccaccccggcctgcaggtggccaccagccccgacttcgacggcaagctgaaggacatcgccggcgagttcaaggagcagctgcaggccctgatcccctacgtgctgaaccccagcaagctgatggagaaggagatcaacggcagcaaggtgacctgcagaggcctgctggagtacttcaaggcctacatcaagatctaccagggcgaggacctgccccaccccaagagcatgctgcaggccaccgccgaggccaacaacctggccgccgccgccagcgccaaggacatctactacaacaacatggaggaggtgtgcggcggcgagaagccctacctgagccccgacatcctggaggagaagcactgcgagttcaagcagctggccctggaccacttcaagaagaccaagaagatgggcggcaaggacttcagcttcagataccagcaggagctggaggaggagatcaaggagctgtacgagaacttctgcaagcacaacggcagcaagaacgtgttcagcaccttcagaacccccgccgtgctgttcaccggcatcgtggccctgtacatcgccagcggcctgaccggcttcatcggcctggaggtggtggcccagctgttcaactgcatggtgggcctgctgctgatcgccctgctgacctggggctacatcagatacagcggccagtacagagagctgggcggcgccatcgacttcggcgccgcctacgtgctggagcaggccagcagccacatcggcaacagcacccaggccaccgtgagagacgccgtggtgggcagacccagcatggacaagaaggcccagtag

SEQ ID NO: 73496 - DNA, 1065 bp, synthetic construct
  misc_feature 1..1065: note = Description of Artificial Sequence: Synthetic coding sequence
  source 1..1065: mol_type = other DNA
atgagcagactgctgcacgccgaggagtgggccgaggtgaaggagctgggcgaccaccacagacagccccagccccaccacctgccccagccccccccccccccccagccccccgccaccctgcaggccagagagcaccccgtgtacccccccgagctgagcctgctggacagcaccgaccccagagcctggctggcccccaccctgcagggcatctgcaccgccagagccgcccagtacctgctgcacagccccgagctgggcgccagcgaggccgccgcccccagagacgaggtggacggcagaggcgagctggtgagaagaagcagcggcggcgccagcagcagcaagagccccggccccgtgaaggtgagagagcagctgtgcaagctgaagggcggcgtggtggtggacgagctgggctgcagcagacagagagcccccagcagcaagcaggtgaacggcgtgcagaagcagagaagactggccgccaacgccagagagagaagaagaatgcacggcctgaaccacgccttcgaccagctgagaaacgtgatccccagcttcaacaacgacaagaagctgagcaagtacgagaccctgcagatggcccagatctacatcaacgccctgagcgagctgctgcagacccccagcggcggcgagcagcccccccccccccccgccagctgcaagagcgaccaccaccacctgagaaccgccgccagctacgagggcggcgccggcaacgccaccgccgccggcgcccagcaggccagcggcggcagccagagacccaccccccccggcagctgcagaaccagattcagcgcccccgccagcgccggcggctacagcgtgcagctggacgccctgcacttcagcaccttcgaggacagcgccctgaccgccatgatggcccagaagaacctgagccccagcctgcccggcagcatcctgcagcccgtgcaggaggagaacagcaagaccagccccagaagccacagaagcgacggcgagttcagcccccacagccactacagcgacagcgacgaggccagctag

SEQ ID NO: 73497 - DNA, 459 bp, synthetic construct
  misc_feature 1..459: note = Description of Artificial Sequence: Synthetic coding sequence
  source 1..459: mol_type = other DNA
atgaagagctgcaagcccagcggcccccccgccggcgccagagtggcccccccctgcgccggcggcaccgagtgcgccggcacctgcgccggcgccggcagactggagagcgccgccagaagaagactggccgccaacgccagagagagaagaagaatgcagggcctgaacaccgccttcgacagactgagaagagtggtgccccagtggggccaggacaagaagctgagcaagtacgagaccctgcagatggccctgagctacatcatggccctgaccagaatcctggccgaggccgagagattcggcagcgagagagactgggtgggcctgcactgcgagcacttcggcagagaccactacctgcccttccccggcgccaagctgcccggcgagagcgagctgtacagccagagactgttcggcttccagcccgagcccttccagatggccacctag

SEQ ID NO: 73498 - DNA, 627 bp, synthetic construct
  misc_feature 1..627: note = Description of Artificial Sequence: Synthetic coding sequence
  source 1..627: mol_type = other DNA
atgtggagaagctgcctgagactgagagacggcggcagaagactgctgaacagacccgccggcggccccagcgccagcatgagccccggccccaccatccccagccccgccagagcctacgccccccccaccgagagaaagagattctaccagaacgtgagcatcacccagggcgagggcggcttcgagatcaacctggaccacagaaagctgaagaccccccaggccaagctgttcaccgtgcccagcgaggccctggccatcgccgtggccaccgagtgggacagccagcaggacaccatcaagtactacaccatgcacctgaccaccctgtgcaacaccagcctggacaaccccacccagagaaacaaggaccagctgatcagagccgccgtgaagttcctggacaccgacaccatctgctacagagtggaggagcccgagaccctggtggagctgcagagaaacgagtgggaccccatcatcgagtgggccgagaagagatacggcgtggagatcagcagcagcaccagcatcatgggccccagcatccccgccaagaccagagaggtgctggtgagccacctggccagctacaacacctgggccctgcagggcatggactag

SEQ ID NO: 73499 - DNA, 618 bp, synthetic construct
  misc_feature 1..618: note = Description of Artificial Sequence: Synthetic coding sequence
  source 1..618: mol_type = other DNA
atgtggagaagctgcctgagactgagagacggcggcagaagactgctgaacagacccgccggcggccccagcgccagcatgagccccggccccaccatccccagccccgccagagcctacgccccccccaccgagagaaagagattctaccagaacgtgagcatcacccagggcgagggcggcttcgagatcaacctggaccacagaaagctgaagaccccccaggccaagctgttcaccgtgcccagcgaggccctggccatcgccgtggccaccgagtgggacagccagcaggacaccatcaagtactacaccatgcacctgaccaccctgtgcaacaccagcctggacaaccccacccagagaaacaaggaccagctgatcagagccgccgtgaagttcctggacaccgacaccatctgctacagagtggaggagcccgagaccctggtggagctgcagagaaacgagtgggaccccatcatcgagtgggccgagaagagatacggcgtggagatcagcagcagcaccagcatcatgggccccagcatccccgccaagaccagagaggtgctggtgagccacctggccagctacaacacctgggccctgcagtag

SEQ ID NO: 73500 - DNA, 870 bp, synthetic construct
  misc_feature 1..870: note = Description of Artificial Sequence: Synthetic coding sequence
  source 1..870: mol_type = other DNA
atgtggagaagctgcctgagactgagagacggcggcagaagactgctgaacagacccgccggcggccccagcgccagcatgagccccggccccaccatccccagccccgccagagcctacgccccccccaccgagagaaagagattctaccagaacgtgagcatcacccagggcgagggcggcttcgagatcaacctggaccacagaaagctgaagaccccccaggccaagctgttcaccgtgcccagcgaggccctggccatcgccgtggccaccgagtgggacagccagcaggacaccatcaagtactacaccatgcacctgaccaccctgtgcaacaccagcctggacaaccccacccagagaaacaaggaccagctgatcagagccgccgtgaagttcctggacaccgacaccatctgctacagagtggaggagcccgagaccctggtggagctgcagagaaacgagtgggaccccatcatcgagtgggccgagaagagatacggcgtggagatcagcagcagcaccagcatcatgggccccagcatccccgccaagaccagagaggtgctggtgagccacctggccagctacaacacctgggccctgcagggcatcgagttcgtggccgcccagctgaagagcatggtgctgaccctgggcctgatcgacctgagactgaccgtggagcaggccgtgctgctgagcagactggaggaggagtaccagatccagaagtggggcaacatcgagtgggcccacgactacgagctgcaggagctgagagccagaaccgccgccggcaccctgttcatccacctgtgcagcgagagcaccaccgtgaagcacaagctgctgaaggagtag

SEQ ID NO: 73501 - DNA, 1590 bp, synthetic construct
  misc_feature 1..1590: note = Description of Artificial Sequence: Synthetic coding sequence
  source 1..1590: mol_type = other DNA
atgctgggcttcgtgggcagagtggccgccgcccccgccagcggcgccctgagaagactgacccccagcgccagcctgccccccgcccagctgctgctgagagccgcccccaccgccgtgcaccccgtgagagactacgccgcccagaccagccccagccccaaggccggcgccgccaccggcagaatcgtggccgtgatcggcgccgtggtggacgtgcagttcgacgagggcctgccccccatcctgaacgccctggaggtgcagggcagagagaccagactggtgctggaggtggcccagcacctgggcgagagcaccgtgagaaccatcgccatggacggcaccgagggcctggtgagaggccagaaggtgctggacagcggcgcccccatcaagatccccgtgggccccgagaccctgggcagaatcatgaacgtgatcggcgagcccatcgacgagagaggccccatcaagaccaagcagttcgcccccatccacgccgaggcccccgagttcatggagatgagcgtggagcaggagatcctggtgaccggcatcaaggtggtggacctgctggccccctacgccaagggcggcaagatcggcctgttcggcggcgccggcgtgggcaagaccgtgctgatcatggagctgatcaacaacgtggccaaggcccacggcggctacagcgtgttcgccggcgtgggcgagagaaccagagagggcaacgacctgtaccacgagatgatcgagagcggcgtgatcaacctgaaggacgccaccagcaaggtggccctggtgtacggccagatgaacgagccccccggcgccagagccagagtggccctgaccggcctgaccgtggccgagtacttcagagaccaggagggccaggacgtgctgctgttcatcgacaacatcttcagattcacccaggccggcagcgaggtgagcgccctgctgggcagaatccccagcgccgtgggctaccagcccaccctggccaccgacatgggcaccatgcaggagagaatcaccaccaccaagaagggcagcatcaccagcgtgcaggccatctacgtgcccgccgacgacctgaccgaccccgcccccgccaccaccttcgcccacctggacgccaccaccgtgctgagcagagccatcgccgagctgggcatctaccccgccgtggaccccctggacagcaccagcagaatcatggaccccaacatcgtgggcagcgagcactacgacgtggccagaggcgtgcagaagatcctgcaggactacaagagcctgcaggacatcatcgccatcctgggcatggacgagctgagcgaggaggacaagctgaccgtgagcagagccagaaagatccagagattcctgagccagcccttccaggtggccgaggtgttcaccggccacatgggcaagctggtgcccctgaaggagaccatcaagggcttccagcagatcctggccggcgagtacgaccacctgcccgagcaggccttctacatggtgggccccatcgaggaggccgtggccaaggccgacaagctggccgaggagcacagcagctag

SEQ ID NO: 73502 - DNA, 156 bp, synthetic construct
  misc_feature 1..156: note = Description of Artificial Sequence: Synthetic coding sequence
  source 1..156: mol_type = other DNA
atggtggcctactggagacaggccggcctgagctacatcagatacagccagatctgcgccaaggccgtgagagacgccctgaagaccgagttcaaggccaacgccgagaagaccagcggcagcaacgtgaagatcgtgaaggtgaagaaggagtag

SEQ ID NO: 73503 - DNA, 156 bp, synthetic construct; identical to SEQ ID NO: 73502
  misc_feature 1..156: note = Description of Artificial Sequence: Synthetic coding sequence
  source 1..156: mol_type = other DNA

SEQ ID NO: 73504 - DNA, 156 bp, synthetic construct; identical to SEQ ID NO: 73502
  misc_feature 1..156: note = Description of Artificial Sequence: Synthetic coding sequence
  source 1..156: mol_type = other DNA

SEQ ID NO: 73505 - DNA, 894 bp, synthetic construct
  misc_feature 1..894: note = Description of Artificial Sequence: Synthetic coding sequence
  source 1..894: mol_type = other DNA
atgttcagcagagccggcgtggccggcctgagcgcctggaccctgcagccccagtggatccaggtgagaaacatggccaccctgaaggacatcaccagaagactgaagagcatcaagaacatccagaagatcaccaagagcatgaagatggtggccgccgccaagtacgccagagccgagagagagctgaagcccgccagaatctacggcctgggcagcctggccctgtacgagaaggccgacatcaagggccccgaggacaagaagaagcacctgctgatcggcgtgagcagcgacagaggcctgtgcggcgccatccacagcagcatcgccaagcagatgaagagcgaggtggccaccctgaccgccgccggcaaggaggtgatgctggtgggcatcggcgacaagatcagaggcatcctgtacagaacccacagcgaccagttcctggtggccttcaaggaggtgggcagaaagccccccaccttcggcgacgccagcgtgatcgccctggagctgctgaacagcggctacgagttcgacgagggcagcatcatcttcaacaagttcagaagcgtgatcagctacaagaccgaggagaagcccatcttcagcctgaacaccgtggccagcgccgacagcatgagcatctacgacgacatcgacgccgacgtgctgcagaactaccaggagtacaacctggccaacatcatctactacagcctgaaggagagcaccaccagcgagcagagcgccagaatgaccgccatggacaacgccagcaagaacgccagcgagatgatcgacaagctgaccctgaccttcaacagaaccagacaggccgtgatcaccaaggagctgatcgagatcatcagcggcgccgccgccctgtag

SEQ ID NO: 73506 - DNA, 897 bp, synthetic construct
  misc_feature 1..897: note = Description of Artificial Sequence: Synthetic coding sequence
  source 1..897: mol_type = other DNA
atgttcagcagagccggcgtggccggcctgagcgcctggaccctgcagccccagtggatccaggtgagaaacatggccaccctgaaggacatcaccagaagactgaagagcatcaagaacatccagaagatcaccaagagcatgaagatggtggccgccgccaagtacgccagagccgagagagagctgaagcccgccagaatctacggcctgggcagcctggccctgtacgagaaggccgacatcaagggccccgaggacaagaagaagcacctgctgatcggcgtgagcagcgacagaggcctgtgcggcgccatccacagcagcatcgccaagcagatgaagagcgaggtggccaccctgaccgccgccggcaaggaggtgatgctggtgggcatcggcgacaagatcagaggcatcctgtacagaacccacagcgaccagttcctggtggccttcaaggaggtgggcagaaagccccccaccttcggcgacgccagcgtgatcgccctggagctgctgaacagcggctacgagttcgacgagggcagcatcatcttcaacaagttcagaagcgtgatcagctacaagaccgaggagaagcccatcttcagcctgaacaccgtggccagcgccgacagcatgagcatctacgacgacatcgacgccgacgtgctgcagaactaccaggagtacaacctggccaacatcatctactacagcctgaaggagagcaccaccagcgagcagagcgccagaatgaccgccatggacaacgccagcaagaacgccagcgagatgatcgacaagctgaccctgaccttcaacagaaccagacaggccgtgatcaccaaggagctgatcgagatcatcagcggcgccgccgccctggactag

SEQ ID NO: 73507 - DNA, 753 bp, synthetic construct
  misc_feature 1..753: note = Description of Artificial Sequence: Synthetic coding sequence
  source 1..753: mol_type = other DNA
atgaagatggtggccgccgccaagtacgccagagccgagagagagctgaagcccgccagaatctacggcctgggcagcctggccctgtacgagaaggccgacatcaagggccccgaggacaagaagaagcacctgctgatcggcgtgagcagcgacagaggcctgtgcggcgccatccacagcagcatcgccaagcagatgaagagcgaggtggccaccctgaccgccgccggcaaggaggtgatgctggtgggcatcggcgacaagatcagaggcatcctgtacagaacccacagcgaccagttcctggtggccttcaaggaggtgggcagaaagccccccaccttcggcgacgccagcgtgatcgccctggagctgctgaacagcggctacgagttcgacgagggcagcatcatcttcaacaagttcagaagcgtgatcagctacaagaccgaggagaagcccatcttcagcctgaacaccgtggccagcgccgacagcatgagcatctacgacgacatcgacgccgacgtgctgcagaactaccaggagtacaacctggccaacatcatctactacagcctgaaggagagcaccaccagcgagcagagcgccagaatgaccgccatggacaacgccagcaagaacgccagcgagatgatcgacaagctgaccctgaccttcaacagaaccagacaggccgtgatcaccaaggagctgatcgagatcatcagcggcgccgccgccctgtag

SEQ ID NO: 73508 - DNA, 642 bp, synthetic construct
  misc_feature 1..642: note = Description of Artificial Sequence: Synthetic coding sequence
  source 1..642: mol_type = other DNA
atggccgcccccgccgtgagcggcctgagcagacaggtgagatgcttcagcaccagcgtggtgagacccttcgccaagctggtgagaccccccgtgcaggtgtacggcatcgagggcagatacgccaccgccctgtacagcgccgccagcaagcagaacaagctggagcaggtggagaaggagctgctgagagtggcccagatcctgaaggagcccaaggtggccgccagcgtgctgaacccctacgtgaagagaagcatcaaggtgaagagcctgaacgacatcaccgccaaggagagattcagccccctgaccaccaacctgatcaacctgctggccgagaacggcagactgagcaacacccagggcgtggtgagcgccttcagcaccatgatgagcgtgcacagaggcgaggtgccctgcaccgtgaccagcgccagccccctggaggaggccaccctgagcgagctgaagaccgtgctgaagagcttcctgagccagggccaggtgctgaagctggaggccaagaccgaccccagcatcctgggcggcatgatcgtgagaatcggcgagaagtacgtggacatgagcgtgaagaccaagatccagaagctgggcagagccatgagagagatcgtgtag

SEQ ID NO: 73509 - DNA, 411 bp, synthetic construct
  misc_feature 1..411: note = Description of Artificial Sequence: Synthetic coding sequence
  source 1..411: mol_type = other DNA
atgcagaccgccggcgccctgttcatcagccccgccctgatcagatgctgcaccagaggcctgatcagacccgtgagcgccagcttcctgaacagccccgtgaacagcagcaagcagcccagctacagcaacttccccctgcaggtggccagaagagagttccagaccagcgtggtgagcagagacatcgacaccgccgccaagttcatcggcgccggcgccgccaccgtgggcgtggccggcagcggcgccggcatcggcaccgtgttcggcagcctgatcatcggctacgccagaaaccccagcctgaagcagcagctgttcagctacgccatcctgggcttcgccctgagcgaggccatgggcctgttctgcctgatggtggccttcctgatcctgttcgccatgtag

SEQ ID NO: 73510 - DNA, 411 bp, synthetic construct; identical to SEQ ID NO: 73509
  misc_feature 1..411: note = Description of Artificial Sequence: Synthetic coding sequence
  source 1..411: mol_type = other DNA

SEQ ID NO: 73511 - DNA, 474 bp, synthetic construct
  misc_feature 1..474: note = Description of Artificial Sequence: Synthetic coding sequence
  source 1..474: mol_type = other DNA
atgcccgagctgatcctgagccccgccaccgccccccaccccctgaagatgttcgcctgcagcaagttcgtgagcacccccagcctggtgaagagcaccagccagctgctgagcagacccctgagcgccgtggtgctgaagagacccgagatcctgaccgacgagagcctgagcagcctggccgtgagctgccccctgaccagcctggtgagcagcagaagcttccagaccagcgccatcagcagagacatcgacaccgccgccaagttcatcggcgccggcgccgccaccgtgggcgtggccggcagcggcgccggcatcggcaccgtgttcggcagcctgatcatcggctacgccagaaaccccagcctgaagcagcagctgttcagctacgccatcctgggcttcgccctgagcgaggccatgggcctgttctgcctgatggtggccttcctgatcctgttcgccatgtag

SEQ ID NO: 73512 - DNA, 597 bp, synthetic construct
  misc_feature 1..597: note = Description of Artificial Sequence: Synthetic coding sequence
  source 1..597: mol_type = other DNA
atgcccgagctgatcctgtacgtggccatcaccctgagcgtggccgagagactggtgggccccggccacgcctgcgccgagcccagcttcagaagcagcagatgcagcgcccccctgtgcctgctgtgcagcggcagcagcagccccgccaccgccccccaccccctgaagatgttcgcctgcagcaagttcgtgagcacccccagcctggtgaagagcaccagccagctgctgagcagacccctgagcgccgtggtgctgaagagacccgagatcctgaccgacgagagcctgagcagcctggccgtgagctgccccctgaccagcctggtgagcagcagaagcttccagaccagcgccatcagcagagacatcgacaccgccgccaagttcatcggcgccggcgccgccaccgtgggcgtggccggcagcggcgccggcatcggcaccgtgttcggcagcctgatcatcggctacgccagaaaccccagcctgaagcagcagctgttcagctacgccatcctgggcttcgccctgagcgaggccatgggcctgttctgcctgatggtggccttcctgatcctgttcgccatgtag

SEQ ID NO: 73513 - DNA, 426 bp, synthetic construct
  misc_feature 1..426: note = Description of Artificial Sequence: Synthetic coding sequence
  source 1..426: mol_type = other DNA
atgttcgcctgcagcaagttcgtgagcacccccagcctggtgaagagcaccagccagctgctgagcagacccctgagcgccgtggtgctgaagagacccgagatcctgaccgacgagagcctgagcagcctggccgtgagctgccccctgaccagcctggtgagcagcagaagcttccagaccagcgccatcagcagagacatcgacaccgccgccaagttcatcggcgccggcgccgccaccgtgggcgtggccggcagcggcgccggcatcggcaccgtgttcggcagcctgatcatcggctacgccagaaaccccagcctgaagcagcagctgttcagctacgccatcctgggcttcgccctgagcgaggccatgggcctgttctgcctgatggtggccttcctgatcctgttcgccatgtag

SEQ ID NO: 73514 - DNA, 429 bp, synthetic construct
  misc_feature 1..429: note = Description of Artificial Sequence: Synthetic coding sequence
  source 1..429: mol_type = other DNA
atgttcgcctgcgccaagctggcctgcacccccagcctgatcagagccggcagcagagtggcctacagacccatcagcgccagcgtgctgagcagacccgaggccagcagaaccggcgagggcagcaccgtgttcaacggcgcccagaacggcgtgagccagctgatccagagagagttccagaccagcgccatcagcagagacatcgacaccgccgccaagttcatcggcgccggcgccgccaccgtgggcgtggccggcagcggcgccggcatcggcaccgtgttcggcagcctgatcatcggctacgccagaaaccccagcctgaagcagcagctgttcagctacgccatcctgggcttcgccctgagcgaggccatgggcctgttctgcctgatggtggccttcctgatcctgttcgccatgtag

SEQ ID NO: 73515 - DNA, 429 bp, synthetic construct; identical to SEQ ID NO: 73514
  misc_feature 1..429: note = Description of Artificial Sequence: Synthetic coding sequence
  source 1..429: mol_type = other DNA

SEQ ID NO: 73516 - DNA, 429 bp, synthetic construct; identical to SEQ ID NO: 73514
  misc_feature 1..429: note = Description of Artificial Sequence: Synthetic coding sequence
  source 1..429: mol_type = other DNA

SEQ ID NO: 73517 - DNA, 210 bp, synthetic construct
  misc_feature 1..210: note = Description of Artificial Sequence: Synthetic coding sequence
  source 1..210: mol_type = other DNA
atggtgccccccgtgcaggtgagccccctgatcaagctgggcagatacagcgccctgttcctgggcgtggcctacggcgccaccagatacaactacctgaagcccagagccgaggaggagagaagaatcgccgccgaggagaagaagaagcaggacgagctgaagagaatcgccagagagctggccgaggacgacagcatcctgaagtag

SEQ ID NO: 73518 - DNA, 327 bp, synthetic construct
  misc_feature 1..327: note = Description of Artificial Sequence: Synthetic coding sequence
  source 1..327: mol_type = other DNA
atgatcctgcagagactgttcagattcagcagcgtgatcagaagcgccgtgagcgtgcacctgagaagaaacatcggcgtgaccgccgtggccttcaacaaggagctggaccccatccagaagctgttcgtggacaagatcagagagtacaagagcaagagacagaccagcggcggccccgtggacgccagcagcgagtaccagcaggagctggagagagagctgttcaagctgaagcagatgttcggcaacgccgacatgaacaccttccccaccttcaagttcgaggaccccaagttcgaggtgatcgagaagccccaggcctag

SEQ ID NO: 73519 - DNA, 327 bp, synthetic construct; identical to SEQ ID NO: 73518
  misc_feature 1..327: note = Description of Artificial Sequence: Synthetic coding sequence
  source 1..327: mol_type = other DNA

SEQ ID NO: 73520 - DNA, 327 bp, synthetic construct; identical to SEQ ID NO: 73518
  misc_feature 1..327: note = Description of Artificial Sequence: Synthetic coding sequence
  source 1..327: mol_type = other DNA

SEQ ID NO: 73521 - DNA, 327 bp, synthetic construct; identical to SEQ ID NO: 73518
  misc_feature 1..327: note = Description of Artificial Sequence: Synthetic coding sequence
  source 1..327: mol_type = other DNA

SEQ ID NO: 73522 - DNA, 327 bp, synthetic construct; identical to SEQ ID NO: 73518
  misc_feature 1..327: note = Description of Artificial Sequence: Synthetic coding sequence
  source 1..327: mol_type = other DNA

SEQ ID NO: 73523 - DNA, 351 bp, synthetic construct
  misc_feature 1..351: note = Description of Artificial Sequence: Synthetic coding sequence
  source 1..351: mol_type = other DNA
atgcactgcgacggcggcatcagcatgatcctgcagagactgttcagattcagcagcgtgatcagaagcgccgtgagcgtgcacctgagaagaaacatcggcgtgaccgccgtggccttcaacaaggagctggaccccatccagaagctgttcgtggacaagatcagagagtacaagagcaagagacagaccagcggcggccccgtggacgccagcagcgagtaccagcaggagctggagagagagctgttcaagctgaagcagatgttcggcaacgccgacatgaacaccttccccaccttcaagttcgaggaccccaagttcgaggtgatcgagaagccccaggcctag

SEQ ID NO: 73524 - DNA, 567 bp, synthetic construct
  misc_feature 1..567: note = Description of Artificial Sequence: Synthetic coding sequence
  source 1..567: mol_type = other DNA
atgaccgccaagggcagcaccggcatggagatcctgctgagcaccctggagaacaccaaggacctgcagaccaccctgaacatcctgagcatcctggtggagctggtgagcgccggcggcggcagaagagtgagcttcctggtgaccaagggcggcagccagatcctgctgcagctgctgatgaacgccagcaaggagagccccccccacgaggacctgatggtgcagatccacagcatcctggccaagatcggccccaaggacaagaagttcggcgtgaaggccagaatcaacggcgccctgaacatcaccctgaacctggtgaagcagaacctgcagaaccacagactggtgctgccctgcctgcagctgctgagagtgtacagcgccaacagcgtgaacagcgtgagcctgggcaagaacggcgtggtggagctgatgttcaagatcatcggccccttcagcaagaagaacagcagcctgatcaagaacaagtgccaggagagctgcagacagagaatctgccccagcgccttcaacaacctgtgcagactggcccccccctag

SEQ ID NO: 73525 - DNA, 3681 bp, synthetic construct
  misc_feature 1..3681: note = Description of Artificial Sequence: Synthetic coding sequence
  source 1..3681: mol_type = other DNA
atgagcaagctgaaggtgatccccgagaagagcctgaccaacaacagcagaatcgtgggcctgctggcccagctggagaagatcaacgccgagcccagcgagagcgacaccgccagatacgtgaccagcaagatcctgcacctggcccagagccaggagaagaccagaagagagatgaccgccaagggcagcaccggcatggagatcctgctgagcaccctggagaacaccaaggacctgcagaccaccctgaacatcctgagcatcctggtggagctggtgagcgccggcggcggcagaagagtgagcttcctggtgaccaagggcggcagccagatcctgctgcagctgctgatgaacgccagcaaggagagccccccccacgaggacctgatggtgcagatccacagcatcctggccaagatcggccccaaggacaagaagttcggcgtgaaggccagaatcaacggcgccctgaacatcaccctgaacctggtgaagcagaacctgcagaaccacagactggtgctgccctgcctgcagctgctgagagtgtacagcgccaacagcgtgaacagcgtgagcctgggcaagaacggcgtggtggagctgatgttcaagatcatcggccccttcagcaagaagaacagcagcctgatcaaggtggccctggacaccctggccgccctgctgaagagcaagaccaacgccagaagagccgtggacagaggctacgtgcaggtgctgctgaccatctacgtggactggcacagacacgacaacagacacagaaacatgctgatcagaaagggcatcctgcagagcctgaagagcgtgaccaacatcaagctgggcagaaaggccttcatcgacgccaacggcatgaagatcctgtacaacaccagccaggagtgcctggccgtgagaaccctggaccccctggtgaacaccagcagcctgatcatgagaaagtgcttccccaagaacagactgcccctgcccaccatcaagagcagcttccacttccagctgcccgtgatccccgtgaccggccccgtggcccagctgtacagcctgccccccgaggtggacgacgtggtggacgagagcgacgacaacgacgacatcgacgtggaggccgagaacgagaccgagaacgaggacgacctggaccagaacttcaagaacgacgacatcgagaccgacatcaacaagctgaagccccagcaggagcccggcagaaccatcgaggacctgaagatgtacgagcacctgttccccgagctggtggacgacttccaggactacgacctgatcagcaaggagcccaagcccttcgtgttcgagggcaaggtgagaggccccatcgtggtgcccaccgccggcgaggagaccagcggcaacagcggcaacctgagaaaggtggtgatgaaggagaacatcagcagcaagggcgacgagggcgagaagaagagcaccttcatggacctggccaaggaggacatcaaggacaacgacagaaccctgcagcagcagcccggcgaccagaacagaaccatcagcagcgtgcacggcctgaacaacgacatcgtgaaggccctggacagaatcaccctgcagaacatccccagccagaccgcccccggcttcaccgccgagatgaagaaggactgcagcctgcccctgaccgtgctgacctgcgccaaggcctgcccccacatggccacctgcggcaacgtgctgttcgagggcagaaccgtgcagctgggcaagctgtgctgcaccggcgtggagaccgaggacgacgaggacaccgagagcaacagcagcgtggagcaggccagcgtggaggtgcccgacggccccaccctgcacgaccccgacctgtacatcgagatcgtgaagaacaccaagagcgtgcccgagtacagcgaggtggcctaccccgactacttcggccacatccccccccccttcaaggagcccatcctggagagaccctacggcgtgcagagaaccaagatcgcccaggacatcgagagactgatccaccagagcgacatcatcgacagagtggtgtacgacctggacaaccccaactacaccatccccgaggagggcgacatcctgaagttcaacagcaagttcgagagcggcaacctgagaaaggtgatccagatcagaaagaacgagtacgacctgatcctgaacagcgacatcaacagcaaccactaccaccagtggttctacttcgaggtgagcggcatgagacccggcgtggcctacagattcaacatcatcaactgcgagaagagcaacagccagttcaactacggcatgcagcccctgatgtacagcgtgcaggaggccctgaacgccagaccctggtggatcagaatgggcaccgacatctgctactacaagaaccacttcagcagaagcagcgtggccgccggcggccagaagggcaagagctactacaccatcaccttcaccgtgaacttcccccacaaggacgacgtgtgctacttcgcctaccactacccctacacctacagcaccctgcagatgcacctgcagaagctggagagcgcccacaacccccagcagatctacttcagaaaggacgtgctgtgcgagaccctgagcggcaacagctgccccctggtgaccatcaccgccatgcccgagagcaactactacgagcacatctgccacttcagaaacagaccctacgtgttcctgagcgccagagtgcaccccggcgagaccaacgccagctgggtgatgaagggcaccctggagtacctgatgagcaacaaccccaccgcccagagcctgagagagagctacatcttcaagatcgtgcccatgctgaaccccgacggcgtgatcaacggcaaccacagatgcagcctgagcggcgaggacctgaacagacagtggcagagccccagccccgacctgcaccccaccatctaccacgccaagggcctgctgcagtacctggccgccgtgaagagactgcccctggtgtactgcgactaccacggccacagcagaaagaagaacgtgttcatgtacggctgcagcatcaaggagaccgtgtggcacaccaacgacaacgccaccagctgcgacgtggtggaggacaccggctacagaaccctgcccaagatcctgagccacatcgcccccgccttctgcatgagcagctgcagcttcgtggtggagaagagcaaggagagcaccgccagagtggtggtgtggagagagatcggcgtgcagagaagctacaccatggagagcaccctgtgcggctgcgaccagggcaagtacaagggcctgcagatcggcaccagagagctggaggagatgggcgccaagttctgcgtgggcctgctgagactgaagagactgaccagccccctggagtacaacctgcccagcagcctgctggacttcgagaacgacctgatcgagagcagctgcaaggtgaccagccccaccacctacgtgctggacgaggacgagcccagattcctggaggaggtggactacagcgccgagagcaacgacgagctggacatcgagctggccgagaacgtgggcgactacgagcccagcgcccaggaggaggtgctgagcgacagcgagctgagcagaacctacctgccctag

SEQ ID NO: 73526 - DNA, 567 bp, synthetic construct; identical to SEQ ID NO: 73524
  misc_feature 1..567: note = Description of Artificial Sequence: Synthetic coding sequence
  source 1..567: mol_type = other DNA

SEQ ID NO: 73527 - DNA, 714 bp, synthetic construct
  misc_feature 1..714: note = Description of Artificial Sequence: Synthetic coding sequence
  source 1..714: mol_type = other DNA
atgagcaagctgaaggtgatccccgagaagagcctgaccaacaacagcagaatcgtgggcctgctggcccagctggagaagatcaacgccgagcccagcgagagcgacaccgccagatacgtgaccagcaagatcctgcacctggcccagagccaggagaagaccagaagagagatgaccgccaagggcagcaccggcatggagatcctgctgagcaccctggagaacaccaaggacctgcagaccaccctgaacatcctgagcatcctggtggagctggtgagcgccggcggcggcagaagagtgagcttcctggtgaccaagggcggcagccagatcctgctgcagctgctgatgaacgccagcaaggagagccccccccacgaggacctgatggtgcagatccacagcatcctggccaagatcggccccaaggacaagaagttcggcgtgaaggccagaatcaacggcgccctgaacatcaccctgaacctggtgaagcagaacctgcagaaccacagactggtgctgccctgcctgcagctgctgagagtgtacagcgccaacagcgtgaacagcgtgagcctgggcaagaacggcgtggtggagctgatgttcaagatcatcggccccttcagcaagaagaacagcagcctgatcaagaacgtgtggcagagcggcctgtggatcctgctgagcatcccccccgtgtag

SEQ ID NO: 73528 - DNA, 3561 bp, synthetic construct
  misc_feature 1..3561: note = Description of Artificial Sequence: Synthetic coding sequence
  source 1..3561: mol_type = other DNA
atgagcaagctgaaggtgatccccgagaagagcctgaccaacaacagcagaatcgtgggcctgctggcccagctggagaagatcaacgccgagcccagcgagagcgacaccgccagatacgtgaccagcaagatcctgcacctggcccagagccaggagaagaccagaagagagatgaccgccaagggcagcaccggcatggagatcctgctgagcaccctggagaacaccaaggacctgcagaccaccctgaacatcctgagcatcctggtggagctggtgagcgccggcggcggcagaagagtgagcttcctggtgaccaagggcggcagccagatcctgctgcagctgctgatgaacgccagcaaggagagccccccccacgaggacctgatggtgcagatccacagcatcctggccaagatcggccccaaggacaagaagttcggcgtgaaggccagaatcaacggcgccctgaacatcaccctgaacctggtgaagcagaacctgcagaaccacagactggtgctgccctgcctgcagctgctgagagtgtacagcgccaacagcgtgaacagcgtgagcctgggcaagaacggcgtggtggagctgatgttcaagatcatcggccccttcagcaagaagaacagcagcctgatcaaggtggccctggacaccctggccgccctgctgaagagcaagaccaacgccagaagagccgtggacagaggctacgtgcaggtgctgctgaccatctacgtggactggcacagacacgacaacagacacagaaacatgctgatcagaaagggcatcctgcagagcctgaagagcgtgaccaacatcaagctgggcagaaaggccttcatcgacgccaacggcatgaagatcctgtacaacaccagccagctgcccgtgatccccgtgaccggccccgtggcccagctgtacagcctgccccccgaggtggacgacgtggtggacgagagcgacgacaacgacgacatcgacgtggaggccgagaacgagaccgagaacgaggacgacctggaccagaacttcaagaacgacgacatcgagaccgacatcaacaagctgaagccccagcaggagcccggcagaaccatcgaggacctgaagatgtacgagcacctgttccccgagctggtggacgacttccaggactacgacctgatcagcaaggagcccaagcccttcgtgttcgagggcaaggtgagaggccccatcgtggtgcccaccgccggcgaggagaccagcggcaacagcggcaacctgagaaaggtggtgatgaaggagaacatcagcagcaagggcgacgagggcgagaagaagagcaccttcatggacctggccaaggaggacatcaaggacaacgacagaaccctgcagcagcagcccggcgaccagaacagaaccatcagcagcgtgcacggcctgaacaacgacatcgtgaaggccctggacagaatcaccctgcagaacatccccagccagaccgcccccggcttcaccgccgagatgaagaaggactgcagcctgcccctgaccgtgctgacctgcgccaaggcctgcccccacatggccacctgcggcaacgtgctgttcgagggcagaaccgtgcagctgggcaagctgtgctgcaccggcgtggagaccgaggacgacgaggacaccgagagcaacagcagcgtggagcaggccagcgtggaggtgcccgacggccccaccctgcacgaccccgacctgtacatcgagatcgtgaagaacaccaagagcgtgcccgagtacagcgaggtggcctaccccgactacttcggccacatccccccccccttcaaggagcccatcctggagagaccctacggcgtgcagagaaccaagatcgcccaggacatcgagagactgatccaccagagcgacatcatcgacagagtggtgtacgacctggacaaccccaactacaccatccccgaggagggcgacatcctgaagttcaacagcaagttcgagagcggcaacctgagaaaggtgatccagatcagaaagaacgagtacgacctgatcctgaacagcgacatcaacagcaaccactaccaccagtggttctacttcgaggtgagcggcatgagacccggcgtggcctacagattcaacatcatcaactgcgagaagagcaacagccagttcaactacggcatgcagcccctgatgtacagcgtgcaggaggccctgaacgccagaccctggtggatcagaatgggcaccgacatctgctactacaagaaccacttcagcagaagcagcgtggccgccggcggccagaagggcaagagctactacaccatcaccttcaccgtgaacttcccccacaaggacgacgtgtgctacttcgcctaccactacccctacacctacagcaccctgcagatgcacctgcagaagctggagagcgcccacaacccccagcagatctacttcagaaaggacgtgctgtgcgagaccctgagcggcaacagctgccccctggtgaccatcaccgccatgcccgagagcaactactacgagcacatctgccacttcagaaacagaccctacgtgttcctgagcgccagagtgcaccccggcgagaccaacgccagctgggtgatgaagggcaccctggagtacctgatgagcaacaaccccaccgcccagagcctgagagagagctacatcttcaagatcgtgcccatgctgaaccccgacggcgtgatcaacggcaaccacagatgcagcctgagcggcgaggacctgaacagacagtggcagagccccagccccgacctgcaccccaccatctaccacgccaagggcctgctgcagtacctggccgccgtgaagagactgcccctggtgtactgcgactaccacggccacagcagaaagaagaacgtgttcatgtacggctgcagcatcaaggagaccgtgtggcacaccaacgacaacgccaccagctgcgacgtggtggaggacaccggctacagaaccctgcccaagatcctgagccacatcgcccccgccttctgcatgagcagctgcagcttcgtggtggagaagagcaaggagagcaccgccagagtggtggtgtggagagagatcggcgtgcagagaagctacaccatggagagcaccctgtgcggctgcgaccagggcaagtacaagggcctgcagatcggcaccagagagctggaggagatgggcgccaagttctgcgtgggcctgctgagactgaagagactgaccagccccctggagtacaacctgcccagcagcctgctggacttcgagaacgacctgatcgagagcagctgcaaggtgaccagccccaccacctacgtgctggacgaggacgagcccagattcctggaggaggtggactacagcgccgagagcaacgacgagctggacatcgagctggccgagaacgtgggcgactacgagcccagcgcccaggaggaggtgctgagcgacagcgagctgagcagaacctacctgccctag

SEQ ID NO: 73529 - DNA, 3717 bp, synthetic construct
  misc_feature 1..3717: note = Description of Artificial Sequence: Synthetic coding sequence
  source 1..3717: mol_type = other DNA
atgagaaccggcagcgccgccagcagcgccgccgccgccgccgccgccgccgccgccagcgccagccccgccaccggcgtgtgcatgaagacccccggcggcggcagaagaggcatcagaagagaccccggcgccgagcccggcgccgccgccctgagaggccccagacagagacccatcctgagcagactgaccaacaacagcagaatcgtgggcctgctggcccagctggagaagatcaacgccgagcccagcgagagcgacaccgccagatacgtgaccagcaagatcctgcacctggcccagagccaggagaagaccagaagagagatgaccgccaagggcagcaccggcatggagatcctgctgagcaccctggagaacaccaaggacctgcagaccaccctgaacatcctgagcatcctggtggagctggtgagcgccggcggcggcagaagagtgagcttcctggtgaccaagggcggcagccagatcctgctgcagctgctgatgaacgccagcaaggagagccccccccacgaggacctgatggtgcagatccacagcatcctggccaagatcggccccaaggacaagaagttcggcgtgaaggccagaatcaacggcgccctgaacatcaccctgaacctggtgaagcagaacctgcagaaccacagactggtgctgccctgcctgcagctgctgagagtgtacagcgccaacagcgtgaacagcgtgagcctgggcaagaacggcgtggtggagctgatgttcaagatcatcggccccttcagcaagaagaacagcagcctgatcaaggtggccctggacaccctggccgccctgctgaagagcaagaccaacgccagaagagccgtggacagaggctacgtgcaggtgctgctgaccatctacgtggactggcacagacacgacaacagacacagaaacatgctgatcagaaagggcatcctgcagagcctgaagagcgtgaccaacatcaagctgggcagaaaggccttcatcgacgccaacggcatgaagatcctgtacaacaccagccagctgcccgtgatccccgtgaccggccccgtggcccagctgtacagcctgccccccgaggtggacgacgtggtggacgagagcgacgacaacgacgacatcgacgtggaggccgagaacgagaccgagaacgaggacgacctggaccagaacttcaagaacgacgacatcgagaccgacatcaacaagctgaagccccagcaggagcccggcagaaccatcgaggacctgaagatgtacgagcacctgttccccgagctggtggacgacttccaggactacgacctgatcagcaaggagcccaagcccttcgtgttcgagggcaaggtgagaggccccatcgtggtgcccaccgccggcgaggagaccagcggcaacagcggcaacctgagaaaggtggtgatgaaggagaacatcagcagcaagggcgacgagggcgagaagaagagcaccttcatggacctggccaaggaggacatcaaggacaacgacagaaccctgcagcagcagcccggcgaccagaacagaaccatcagcagcgtgcacggcctgaacaacgacatcgtgaaggccctggacagaatcaccctgcagaacatccccagccagaccgcccccggcttcaccgccgagatgaagaaggactgcagcctgcccctgaccgtgctgacctgcgccaaggcctgcccccacatggccacctgcggcaacgtgctgttcgagggcagaaccgtgcagctgggcaagctgtgctgcaccggcgtggagaccgaggacgacgaggacaccgagagcaacagcagcgtggagcaggccagcgtggaggtgcccgacggccccaccctgcacgaccccgacctgtacatcgagatcgtgaagaacaccaagagcgtgcccgagtacagcgaggtggcctaccccgactacttcggccacatccccccccccttcaaggagcccatcctggagagaccctacggcgtgcagagaaccaagatcgcccaggacatcgagagactgatccaccagagcgacatcatcgacagagtggtgtacgacctggacaaccccaactacaccatccccgaggagggcgacatcctgaagttcaacagcaagttcgagagcggcaacctgagaaaggtgatccagatcagaaagaacgagtacgacctgatcctgaacagcgacatcaacagcaaccactaccaccagtggttctacttcgaggtgagcggcatgagacccggcgtggcctacagattcaacatcatcaactgcgagaagagcaacagccagttcaactacggcatgcagcccctgatgtacagcgtgcaggaggccctgaacgccagaccctggtggatcagaatgggcaccgacatctgctactacaagaaccacttcagcagaagcagcgtggccgccggcggccagaagggcaagagctactacaccatcaccttcaccgtgaacttcccccacaaggacgacgtgtgctacttcgcctaccactacccctacacctacagcaccctgcagatgcacctgcagaagctggagagcgcccacaacccccagcagatctacttcagaaaggacgtgctgtgcgagaccctgagcggcaacagctgccccctggtgaccatcaccgccatgcccgagagcaactactacgagcacatctgccacttcagaaacagaccctacgtgttcctgagcgccagagtgcaccccggcgagaccaacgccagctgggtgatgaagggcaccctggagtacctgatgagcaacaaccccaccgcccagagcctgagagagagctacatcttcaagatcgtgcccatgctgaaccccgacggcgtgatcaacggcaaccacagatgcagcctgagcggcgaggacctgaacagacagtggcagagccccagccccgacctgcaccccaccatctaccacgccaagggcctgctgcagtacctggccgccgtgaagagactgcccctggtgtactgcgactaccacggccacagcagaaagaagaacgtgttcatgtacggctgcagcatcaaggagaccgtgtggcacaccaacgacaacgccaccagctgcgacgtggtggaggacaccggctacagaaccctgcccaagatcctgagccacatcgcccccgccttctgcatgagcagctgcagcttcgtggtggagaagagcaaggagagcaccgccagagtggtggtgtggagagagatcggcgtgcagagaagctacaccatggagagcaccctgtgcggctgcgaccagggcaagtacaagggcctgcagatcggcaccagagagctggaggagatgggcgccaagttctgcgtgggcctgctgagactgaagagactgaccagccccctggagtacaacctgcccagcagcctgctggacttcgagaacgacctgatcgagagcagctgcaaggtgaccagccccaccacctacgtgctggacgaggacgagcccagattcctggaggaggtggactacagcgccgagagcaacgacgagctggacatcgagctggccgagaacgtgggcgactacgagcccagcgcccaggaggaggtgctgagcgacagcgagctgagcagaacctacctgccctag

SEQ ID NO: 73530 - DNA, 1932 bp, synthetic construct
  misc_feature 1..1932: note = Description of Artificial Sequence: Synthetic coding sequence
  source 1..1932: mol_type = other DNA
atgaacgccagcaaggagagccccccccacgaggacctgatggtgcagatccacagcatcctggccaagatcggccccaaggccgtgaacagcgtgagcctgggcaagaacggcgtggtggagctgatgttcaagatcatcggccccttcagcaagaagaacagcagcctgatcaaggtggccctggacaccctggccgccctgctgaagagcaagaccaacgccagaagagccgtggacagaggctacgtgcaggtgctgctgaccatctacgtggactggcacagacacgacaacagacacagaaacatgctgatcagaaagggcatcctgcagagcctgaagagcgtgaccaacatcaagctgggcagaaaggccttcatcgacgccaacggcatgaagatcctgtacaacaccagccaggagtgcctggccgtgagaaccctggaccccctggtgaacaccagcagcctgatcatgagaaagtgcttccccaagaacagactgcccctgcccaccatcaagagcagcttccacttccagctgcccgtgatccccgtgaccggccccgtggcccagctgtacagcctgccccccgaggtggacgacgtggtggacgagagcgacgacaacgacgacatcgacgtggaggccgagaacgagaccgagaacgaggacgacctggaccagaacttcaagaacgacgacatcgagaccgacatcaacaagctgaagccccagcaggagcccggcagaaccatcgaggacctgaagatgtacgagcacctgttccccgagctggtggacgacttccaggactacgacctgatcagcaaggagcccaagcccttcgtgttcgagggcaaggtgagaggccccatcgtggtgcccaccgccggcgaggagaccagcggcaacagcggcaacctgagaaaggtggtgatgaaggagaacatcagcagcaagggcgacgagggcgagaagaagagcaccttcatggacctggccaaggaggacatcaaggacaacgacagaaccctgcagcagcagcccggcgaccagaacagaaccatcagcagcgtgcacggcctgaacaacgacatcgtgaaggccctggacagaatcaccctgcagaacatccccagccagaccgcccccggcttcaccgccgagatgaagaaggactgcagcctgcccctgaccgtgctgacctgcgccaaggcctgcccccacatggccacctgcggcaacgtgctgttcgagggcagaaccgtgcagctgggcaagctgtgctgcaccggcgtggagaccgaggacgacgaggacaccgagagcaacagcagcgtggagcaggccagcgtggaggtgcccgacggccccaccctgcacgaccccgacctgtacatcgagatcgtgaagaacaccaagagcgtgcccgagtacagcgaggtggcctaccccgactacttcggccacatccccccccccttcaaggagcccatcctggagagaccctacggcgtgcagagaaccaagatcgcccaggacatcgagagactgatccaccagagcgacatcatcgacagagtggtgtacgacctggacaaccccaactacaccatccccgaggagggcgacatcctgaagttcaacagcaagttcgagagcggcaacctgagaaaggtgatccagatcagaaagaacgagtacgacctgatcctgaacagcgacatcaacagcaaccactaccaccagtggttctacttcgaggtgagcggcatgagacccggcgtggcctacagattcaacatcatcaactgcgagaagagcaacagccagttcaactacgccctgcccctgatgagctggatgaagatgaacctggacagcctgaagaagctgatcaccgtgcagaaggtgatgatgagctag

SEQ ID NO: 73531 - DNA, 1086 bp, synthetic construct
  misc_feature 1..1086: note = Description of Artificial Sequence: Synthetic coding sequence
  source 1..1086: mol_type = other DNA
atggtgcacgccgaggccttcagcagacccctgagcagaaacgaggtggtgggcctgatcttcagactgaccatcttcggcgccgtgacctacttcaccatcaagtggatggtggacgccatcgaccccaccagaaagcagaaggtggaggcccagaagcaggccgagaagctgatgaagcagatcggcgtgaagaacgtgaagctgagcgagtacgagatgagcatcgccgcccacctggtggaccccctgaacatgcacgtgacctggagcgacatcgccggcctggacgacgtgatcaccgacctgaaggacaccgtgatcctgcccatcaagaagaagcacctgttcgagaacagcagactgctgcagccccccaagggcgtgctgctgtacggcccccccggctgcggcaagaccctgatcgccaaggccaccgccaaggaggccggctgcagattcatcaacctgcagcccagcaccctgaccgacaagtggtacggcgagagccagaagctggccgccgccgtgttcagcctggccatcaagctgcagcccagcatcatcttcatcgacgagatcgacagcttcctgagaaacagaagcagcagcgaccacgaggccaccgccatgatgaaggcccagttcatgagcctgtgggacggcctggacaccgaccacagctgccaggtgatcgtgatgggcgccaccaacagaccccaggacctggacagcgccatcatgagaagaatgcccaccagattccacatcaaccagcccgccctgaagcagagagaggccatcctgaagctgatcctgaagaacgagaacgtggacagacacgtggacctgctggaggtggcccaggagaccgacggcttcagcggcagcgacctgaaggagatgtgcagagacgccgccctgctgtgcgtgagagagtacgtgaacagcaccagcgaggagagccacgacgaggacgagatcagacccgtgcagcagcaggacctgcacagagccatcgagaagatgaagaagagcaaggacgccgccttccagaacgtgctgacccacgtgtgcctggactag

SEQ ID NO: 73532 - DNA, 1086 bp, synthetic construct; identical to SEQ ID NO: 73531
  misc_feature 1..1086: note = Description of Artificial Sequence: Synthetic coding sequence
  source 1..1086: mol_type = other DNA

SEQ ID NO: 73533 - DNA, 822 bp, synthetic construct
  misc_feature 1..822: note = Description of Artificial Sequence: Synthetic coding sequence
  source 1..822: mol_type = other DNA
atgaagcagatcggcgtgaagaacgtgaagctgagcgagtacgagatgagcatcgccgcccacctggtggaccccctgaacatgcacgtgacctggagcgacatcgccggcctggacgacgtgatcaccgacctgaaggacaccgtgatcctgcccatcaagaagaagcacctgttcgagaacagcagactgctgcagccccccaagggcgtgctgctgtacggcccccccggctgcggcaagaccctgatcgccaaggccaccgccaaggaggccggctgcagattcatcaacctgcagcccagcaccctgaccgacaagtggtacggcgagagccagaagctggccgccgccgtgttcagcctggccatcaagctgcagcccagcatcatcttcatcgacgagatcgacagcttcctgagaaacagaagcagcagcgaccacgaggccaccgccatgatgaaggcccagttcatgagcctgtgggacggcctggacaccgaccacagctgccaggccctgaagcagagagaggccatcctgaagctgatcctgaagaacgagaacgtggacagacacgtggacctgctggaggtggcccaggagaccgacggcttcagcggcagcgacctgaaggagatgtgcagagacgccgccctgctgtgcgtgagagagtacgtgaacagcaccagcgaggagagccacgacgaggacgagatcagacccgtgcagcagcaggacctgcacagagccatcgagaagatgaagaagagcaaggacgccgccttccagaacgtgctgacccacgtgtgcctggactag

SEQ ID NO: 73534 - DNA, 864 bp, synthetic construct
  misc_feature 1..864: note = Description of Artificial Sequence: Synthetic coding sequence
  source 1..864: mol_type = other DNA
atggtgcacgccgaggccttcagcagacccctgagcagaaacgaggtggtgggcctgatcttcagactgaccatcttcggcgccgtgacctacttcaccatcaagtggatggtggacgccatcgaccccaccagaaagcagaaggtggaggcccagaagcaggccgagaagctgatgaagcagatcggcgtgaagaacgtgaagctgagcgagtacgagatgagcatcgccgcccacctggtggaccccctgaacatgcacgtgacctggagcgacatcgccggcctggacgacgtgatcaccgacctgaaggacaccgtgatcctgcccatcaagaagaagcacctgttcgagaacagcagactgctgcagccccccaagggcgtgctgctgtacggcccccccggctgcggcaagaccctgatcgccaaggccaccgccaaggaggccggctgcagattcatcaacctgcagcccagcaccctgaccgacaagtggtacggcgagagccagaagctggccgccgccgtgttcagcctggccatcaagctgcagcccagcatcatcttcatcgacgagatcgacagcttcctgagaaacagaagcagcagcgaccacgaggccaccgccatgatgaaggcccagttcatgagcctgtgggacggcctggacaccgaccacagctgccaggtgatcgtgatgggcgccaccaacagaccccaggacctggacagcgccatcatgagaagaatgcccaccagattccacatcaaccagcccgccctgaagcagagagaggccatcctgaagctgatcctgaagaacgagaacctgagaaagctgaagcccagagaggtgctgtag

SEQ ID NO: 73535 - DNA, 4173 bp, synthetic construct
  misc_feature 1..4173: note = Description of Artificial Sequence: Synthetic coding sequence
  source 1..4173: mol_type = other DNA
atggtggtgctgagaagcagcctggagctgcacaaccacagcgccgccagcgccaccggcagcctggacctgagcagcgacttcctgagcctggagcacatcggcagaagaagactgagaagcgccggcgccgcccagaagaagcccgccgccaccaccgccaaggccggcgacggcagcagcgtgaaggaggtggagacctaccacagaaccagagccctgagaagcctgagaaaggacgcccagaacagcagcgacagcagcttcgagaagaacgtggagatcaccgagcagctggccaacggcagacacttcaccagacagctggccagacagcaggccgacaagaagaaggaggagcacagagaggacaaggtgatccccgtgaccagaagcctgagagccagaaacatcgtgcagagcaccgagcacctgcacgaggacaacggcgacgtggaggtgagaagaagctgcagaatcagaagcagatacagcggcgtgaaccagagcatgctgttcgacaagctgatcaccaacaccgccgaggccgtgctgcagaagatggacgacatgaagaagatgagaagacagagaatgagagagctggaggacctgggcgtgttcaacgagaccgaggagagcaacctgaacatgtacaccagaggcaagcagaaggacatccagagaaccgacgaggagaccaccgacaaccaggagggcagcgtggagagcagcgaggagggcgaggaccaggagcacgaggacgacggcgaggacgaggacgacgaggacgacgacgacgacgacgacgacgacgacgacgacgacgacgaggacgacgaggacgaggaggacggcgaggaggagaaccagaagagatactacctgagacagagaaaggccaccgtgtactaccaggcccccctggagaagcccagacaccagagaaagcccaacatcttctacagcggccccgccagccccgccagacccagatacagactgagcagcgccggccccagaagcccctactgcaagagaatgaacagaagaagacacgccatccacagcagcgacagcaccagcagcagcagcagcgaggacgagcagcacttcgagagaagaagaaagagaagcagaaacagagccatcaacagatgcctgcccctgaacttcagaaaggacgagctgaagggcatctacaaggacagaatgaagatcggcgccagcctggccgacgtggaccccatgcagctggacagcagcgtgagattcgacagcgtgggcggcctgagcaaccacatcgccgccctgaaggagatggtggtgttccccctgctgtaccccgaggtgttcgagaagttcaagatccagccccccagaggctgcctgttctacggcccccccggcaccggcaagaccctggtggccagagccctggccaacgagtgcagccagggcgacaagagagtggccttcttcatgagaaagggcgccgactgcctgagcaagtgggtgggcgagagcgagagacagctgagactgctgttcgaccaggcctaccagatgagacccagcatcatcttcttcgacgagatcgacggcctggcccccgtgagaagcagcagacaggaccagatccacagcagcatcgtgagcaccctgctggccctgatggacggcctggacagcagaggcgagatcgtggtgatcggcgccaccaacagactggacagcatcgaccccgccctgagaagacccggcagattcgacagagagttcctgttcagcctgcccgacaaggaggccagaaaggagatcctgaagatccacaccagagactggaaccccaagcccctggacaccttcctggaggagctggccgagaactgcgtgggctactgcggcgccgacatcaagagcatctgcgccgaggccgccctgtgcgccctgagaagaagatacccccagatctacaccaccagcgagaagctgcagctggacctgagcagcatcaacatcagcgccaaggacttcgaggtggccatgcagaagatgatccccgccagccagagagccgtgaccagccccggccaggccctgagcaccgtggtgaagcccctgctgcagaacaccgtggacaagatcctggaggccctgcagagagtgttcccccacgccgagttcagaaccaacaagaccctggacagcgacatcagctgccccctgctggagagcgacctggcctacagcgacgacgacgtgcccagcgtgtacgagaacggcctgagccagaagagcagccacaaggccaaggacaacttcaacttcctgcacctgaacagaaacgcctgctaccagcccatgagcttcagacccagaatcctgatcgtgggcgagcccggcttcggccagggcagccacctggcccccgccgtgatccacgccctggagaagttcaccgtgtacaccctggacatccccgtgctgttcggcgtgagcaccaccagccccgaggagacctgcgcccaggtgatcagagaggccaagagaaccgcccccagcatcgtgtacgtgccccacatccacgtgtggtgggagatcgtgggccccaccctgaaggccaccttcaccaccctgctgcagaacatccccagcttcgcccccgtgctgctgctggccaccagcgacaagccccacagcgccctgcccgaggaggtgcaggagctgttcatcagagactacggcgagatcttcaacgtgcagctgcccgacaaggaggagagaaccaagttcttcgaggacctgatcctgaagcaggccgccaagccccccatcagcaagaagaaggccgtgctgcaggccctggaggtgctgcccgtggcccccccccccgagcccagaagcctgaccgccgaggaggtgaagagactggaggagcaggaggaggacaccttcagagagctgagaatcttcctgagaaacgtgacccacagactggccatcgacaagagattcagagtgttcaccaagcccgtggaccccgacgaggtgcccgactacgtgaccgtgatcaagcagcccatggacctgagcagcgtgatcagcaagatcgacctgcacaagtacctgaccgtgaaggactacctgagagacatcgacctgatctgcagcaacgccctggagtacaaccccgacagagaccccggcgacagactgatcagacacagagcctgcgccctgagagacaccgcctacgccatcatcaaggaggagctggacgaggacttcgagcagctgtgcgaggagatccaggagagcagaaagaagagaggctgcagcagcagcaagtacgcccccagctactaccacgtgatgcccaagcagaacagcaccctggtgggcgacaagagaagcgaccccgagcagaacgagaagctgaagacccccagcacccccgtggcctgcagcacccccgcccagctgaagagaaagatcagaaagaagagcaactggtacctgggcaccatcaagaagagaagaaagatcagccaggccaaggacgacagccagaacgccatcgaccacaagatcgagagcgacaccgaggagacccaggacaccagcgtggaccacaacgagaccggcaacaccggcgagagcagcgtggaggagaacgagaagcagcagaacgccagcgagagcaagctggagctgagaaacaacagcaacacctgcaacatcgagaacgagctggaggacagcagaaagaccaccgcctgcaccgagctgagagacaagatcgcctgcaacggcgacgccagcagcagccagatcatccacatcagcgacgagaacgagggcaaggagatgtgcgtgctgagaatgaccagagccagaagaagccaggtggagcagcagcagctgatcaccgtggagaaggccctggccatcctgagccagcccacccccagcctggtggtggaccacgagagactgaagaacctgctgaagaccgtggtgaagaagagccagaactacaacatcttccagctggagaacctgtacgccgtgatcagccagtgcatctacagacacagaaaggaccacgacaagaccagcctgatccagaagatggagcaggaggtggagaacttcagctgcagcagatag

SEQ ID NO: 73536 - DNA, 1719 bp, synthetic construct
  misc_feature 1..1719: note = Description of Artificial Sequence: Synthetic coding sequence
  source 1..1719: mol_type = other DNA
tgaggcgccctggccctggccgcccccagaagatgcagacagcccctgcccggcagagactgcgcccccggcgccccccccgccggcgccgtgagcagagccggcagaatcggcctgttccccagccccgtgtgcaccagcgccgccgtgagaagcggcagcggctacgccaaggacgccctgaacctggcccagatgcaggagcagaccctgcagctggagcagcagagcaagctgaaggagtacgaggccgccgtggagcagctgaagagcgagcagatcagagcccaggccgaggagagaagaaagaccctgagcgaggagaccagacagcaccaggccagagcccagtaccaggacaagctggccagacagagatacgaggaccagctgaagcagcagcagctgctgaacgaggagaacctgagaaagcaggaggagagcgtgcagaagcaggaggccatgagaagagccaccgtggagagagagatggagctgagacacaagaacgagatgctgagagtggaggccgaggccagagccagagccaaggccgagagagagaacgccgacatcatcagagagcagatcagactgaaggccgccgagcacagacagaccgtgctggagagcatcagaaccgccggcaccctgttcggcgagggcttcagagccttcgtgaccgactgggacaaggtgaccgccaccgtggccggcctgaccctgctggccgtgggcgtgtacagcgccaagaacgccaccctggtggccggcagattcatcgaggccagactgggcaagcccagcctggtgagagagaccagcagaatcaccgtgctggaggccctgagacaccccatccaggtgagcagaagactgctgagcagaccccaggacgccctggagggcgtggtgctgagccccagcctggaggccagagtgagagacatcgccatcgccaccagaaacaccaagaagaacagaagcctgtacagaaacatcctgatgtacggcccccccggcaccggcaagaccctgttcgccaagaagctggccctgcacagcggcatggactacgccatcatgaccggcggcgacgtggcccccatgggcagagagggcgtgaccgccatgcacaagctgttcgactgggccaacaccagcagaagaggcctgctgctgttcgtggacgaggccgacgccttcctgagaaagagagccaccgagaagatcagcgaggacctgagagccaccctgaacgccttcctgtacagaaccggccagcacagcaacaagttcatgctggtgctggccagcaaccagcccgagcagttcgactgggccatcaacgacagaatcaacgagatggtgcacttcgacctgcccggccaggaggagagagagagactggtgagaatgtacttcgacaagtacgtgctgaagcccgccaccgagggcaagcagagactgaagctggcccagttcgactacggcagaaagtgcagcgaggtggccagactgaccgagggcatgagcggcagagagatcgcccagctggccgtgagctggcaggccaccgcctacgccagcgaggacggcgtgctgaccgaggccatgatggacaccagagtgcaggacgccgtgcagcagcaccagcagaagatgtgctggctgaaggccgagggccccggcagaggcgacgagcccagccccagctag

SEQ ID NO: 73537 - DNA, 1905 bp, synthetic construct
  misc_feature 1..1905: note = Description of Artificial Sequence: Synthetic coding sequence
  source 1..1905: mol_type = other DNA
atgagctggctgttcggcatcaacaagggccccaagggcgagggcgccggcccccccccccccctgccccccgcccagcccggcgccgagggcggcggcgacagaggcctgggcgacagacccgcccccaaggacaagtggagcaacttcgaccccaccggcctggagagagccgccaaggccgccagagagctggagcacagcagatacgccaaggacgccctgaacctggcccagatgcaggagcagaccctgcagctggagcagcagagcaagctgaagatgagactggaggccctgagcctgctgcacaccctggtgtgggcctggagcctgtgcagagccggcgccgtgcagacccaggagagactgagcggcagcgccagccccgagcaggtgcccgccggcgagtgctgcgccctgcaggagtacgaggccgccgtggagcagctgaagagcgagcagatcagagcccaggccgaggagagaagaaagaccctgagcgaggagaccagacagcaccaggccagagcccagtaccaggacaagctggccagacagagatacgaggaccagctgaagcagcagcagctgctgaacgaggagaacctgagaaagcaggaggagagcgtgcagaagcaggaggccatgagaagagccaccgtggagagagagatggagctgagacacaagaacgagatgctgagagtggaggccgaggccagagccagagccaaggccgagagagagaacgccgacatcatcagagagcagatcagactgaaggccgccgagcacagacagaccgtgctggagagcatcagaaccgccggcaccctgttcggcgagggcttcagagccttcgtgaccgactgggacaaggtgaccgccaccgtggccggcctgaccctgctggccgtgggcgtgtacagcgccaagaacgccaccctggtggccggcagattcatcgaggccagactgggcaagcccagcctggtgagagagaccagcagaatcaccgtgctggaggccctgagacaccccatccaggtgagcagaagactgctgagcagaccccaggacgccctggagggcgtggtgctgagccccagcctggaggccagagtgagagacatcgccatcgccaccagaaacaccaagaagaacagaagcctgtacagaaacatcctgatgtacggcccccccggcaccggcaagaccctgttcgccaagaagctggccctgcacagcggcatggactacgccatcatgaccggcggcgacgtggcccccatgggcagagagggcgtgaccgccatgcacaagctgttcgactgggccaacaccagcagaagaggcctgctgctgttcgtggacgaggccgacgccttcctgagaaagagagccaccgagaagatcagcgaggacctgagagccaccctgaacgccttcctgtacagaaccggccagcacagcaacaagttcatgctggtgctggccagcaaccagcccgagcagttcgactgggccatcaacgacagaatcaacgagatggtgcacttcgacctgcccggccaggaggagagagagagactggtgagaatgtacttcgacaagtacgtgctgaagcccgccaccgagggcaagcagagactgaagctggcccagttcgactacggcagaaagtgcagcgaggtggccagactgaccgagggcatgagcggcagagagatcgcccagctggccgtgagctggcaggccaccgcctacgccagcgaggacggcgtgctgaccgaggccatgatggacaccagagtgcaggacgccgtgcagcagcaccagcagaagatgtgctggctgaaggccgagggccccggcagaggcgacgagcccagccccagctag

SEQ ID NO: 73538 - DNA, 1761 bp, synthetic construct
  misc_feature 1..1761: note = Description of Artificial Sequence: Synthetic coding sequence
  source 1..1761: mol_type = other DNA
atgagctggctgttcggcatcaacaagggccccaagggcgagggcgccggcccccccccccccctgccccccgcccagcccggcgccgagggcggcggcgacagaggcctgggcgacagacccgcccccaaggacaagtggagcaacttcgaccccaccggcctggagagagccgccaaggccgccagagagctggagcacagcagatacgccaaggacgccctgaacctggcccagatgcaggagcagaccctgcagctggagcagcagagcaagctgaaggagtacgaggccgccgtggagcagctgaagagcgagcagatcagagcccaggccgaggagagaagaaagaccctgagcgaggagaccagacagcaccaggccagagcccagtaccaggacaagctggccagacagagatacgaggaccagctgaagcagcagcagctgctgaacgaggagaacctgagaaagcaggaggagagcgtgcagaagcaggaggccatgagaagagccaccgtggagagagagatggagctgagacacaagaacgagatgctgagagtggaggccgaggccagagccagagccaaggccgagagagagaacgccgacatcatcagagagcagatcagactgaaggccgccgagcacagacagaccgtgctggagagcatcagaaccgccggcaccctgttcggcgagggcttcagagccttcgtgaccgactgggacaaggtgaccgccaccgtggccggcctgaccctgctggccgtgggcgtgtacagcgccaagaacgccaccctggtggccggcagattcatcgaggccagactgggcaagcccagcctggtgagagagaccagcagaatcaccgtgctggaggccctgagacaccccatccaggtgagcagaagactgctgagcagaccccaggacgccctggagggcgtggtgctgagccccagcctggaggccagagtgagagacatcgccatcgccaccagaaacaccaagaagaacagaagcctgtacagaaacatcctgatgtacggcccccccggcaccggcaagaccctgttcgccaagaagctggccctgcacagcggcatggactacgccatcatgaccggcggcgacgtggcccccatgggcagagagggcgtgaccgccatgcacaagctgttcgactgggccaacaccagcagaagaggcctgctgctgttcgtggacgaggccgacgccttcctgagaaagagagccaccgagaagatcagcgaggacctgagagccaccctgaacgccttcctgtacagaaccggccagcacagcaacaagttcatgctggtgctggccagcaaccagcccgagcagttcgactgggccatcaacgacagaatcaacgagatggtgcacttcgacctgcccggccaggaggagagagagagactggtgagaatgtacttcgacaagtacgtgctgaagcccgccaccgagggcaagcagagactgaagctggcccagttcgactacggcagaaagtgcagcgaggtggccagactgaccgagggcatgagcggcagagagatcgcccagctggccgtgagctggcaggccaccgcctacgccagcgaggacggcgtgctgaccgaggccatgatggacaccagagtgcaggacgccgtgcagcagcaccagcagaagatgtgctggctgaaggccgagggccccggcagaggcgacgagcccagccccagctag

SEQ ID NO: 73539 - DNA, 792 bp, synthetic construct
  misc_feature 1..792: note = Description of Artificial Sequence: Synthetic coding sequence
  source 1..792: mol_type = other DNA
atgtacggcccccccggcaccggcaagaccctgttcgccaagaagctggccctgcacagcggcatggactacgccatcatgaccggcggcgacgtggcccccatgggcagagagggcgtgaccgccatgcacaagctgttcgactgggccaacaccagcagaagaggcctgctgctgttcgtggacgaggccgacgccttcctgagaaagagagccaccgagaagatcagcgaggacctgagagccaccctgaacgccttcctgtacagaaccggccagcacagcaacaaccccagccacgtgagccacggcggcagcagccccgccggcagaccctggctgaccccccaggccagatgggcccccagattcatgctggtgctggccagcaaccagcccgagcagttcgactgggccatcaacgacagaatcaacgagatggtgcacttcgacctgcccggccaggaggagagagagagactggtgagaatgtacttcgacaagtacgtgctgaagcccgccaccgagggcaagcagagactgaagctggcccagttcgactacggcagaaagtgcagcgaggtggccagactgaccgagggcatgagcggcagagagatcgcccagctggccgtgagctggcaggccaccgcctacgccagcgaggacggcgtgctgaccgaggccatgatggacaccagagtgcaggacgccgtgcagcagcaccagcagaagatgtgctggctgaaggccgagggccccggcagaggcgacgagcccagccccagctag

SEQ ID NO: 73540 - DNA, 606 bp, synthetic construct
  misc_feature 1..606: note = Description of Artificial Sequence: Synthetic coding sequence
  source 1..606: mol_type = other DNA
aagctggccctgcacagcggcatggactacgccatcatgaccggcggcgacgtggcccccatgggcagagagggcgtgaccgccatgcacaagctgttcgactgggccaacaccagcagaagaggcctgctgctgttcgtggacgaggccgacgccttcctgagaaagagagccaccgagaagatcagcgaggacctgagagccaccctgaacgccttcctgtacagaaccggccagcacagcaacaaccccagccacgtgagccacggcggcagcagccccgccggcagaccctggctgaccccccaggccagatgggcccccagattcatgctggtgctggccagcaaccagcccgagcagttcgactgggccatcaacgacagaatcaacgagatggtgcacttcgacctgcccggccaggaggagagagagagactggtgagaatgtacttcgacaagtacgtgctgaagcccgccaccgagggcaagcagagactgaagctggcccagttcgactacggcagaaagtgcagcgaggtggccagactgaccgagggcatgagcggcagagagatcgcccagctggccgtgagctggcagtag

SEQ ID NO: 73541 - DNA, 435 bp, synthetic construct
  misc_feature 1..435: note = Description of Artificial Sequence: Synthetic coding sequence
  source 1..435: mol_type = other DNA
atgtgcctgtgcagacccctgctgccccagagagcccagtaccaggacaagctggccagacagagatacgaggaccagctgaagcagcagcagctgctgaacgaggagaacctgagaaagcaggaggagagcgtgcagaagcaggaggccatgagaagagccaccgtggagagagagatggagctgagacacaagaacgagatgctgagagtggaggccgaggccagagccagagccaaggccgagagagagaacgccgacatcatcagagagcagatcagactgaaggccgccgagcacagacagaccgtgctggagagcatcagaaccgccggcaccctgttcggcgagggcttcagagccttcgtgaccgactgggacaaggtgaccgccaccgtggccggcctgaccctgctggccgtgggcgtgtactag

SEQ ID NO: 73542 - DNA, 309 bp, synthetic construct
  misc_feature 1..309: note = Description of Artificial Sequence: Synthetic coding sequence
  source 1..309: mol_type = other DNA
atgagactggaggccctgagcctgctgcacaccctggtgtgggcctggagcctgtgcagagccggcgccgtgcagacccaggagagactgagcggcagcgccagccccgagcaggtgcccgccggcgagtgctgcgccctgcaggagtacgaggccgccgtggagcagctgaagagcgagcagatcagagcccaggccgaggagagaagaaagaccctgagcgaggagaccagacagcaccaggccagagcccagtaccaggacaagctggccagacagagatacgaggaccagctgaagcagcagtag

SEQ ID NO: 73543 - DNA, 1524 bp, synthetic construct
  misc_feature 1..1524: note = Description of Artificial Sequence: Synthetic coding sequence
  source 1..1524: mol_type = other DNA
atgcaggagcagaccctgcagctggagcagcagagcaagctgaaggagtacgaggccgccgtggagcagctgaagagcgagcagatcagagcccaggccgaggagagaagaaagaccctgagcgaggagaccagacagcaccaggccagagcccagtaccaggacaagctggccagacagagatacgaggaccagctgaagcagcagcagctgctgaacgaggagaacctgagaaagcaggaggagagcgtgcagaagcaggaggccatgagaagagccaccgtggagagagagatggagctgagacacaagaacgagatgctgagagtggaggccgaggccagagccagagccaaggccgagagagagaacgccgacatcatcagagagcagatcagactgaaggccgccgagcacagacagaccgtgctggagagcatcagaaccgccggcaccctgttcggcgagggcttcagagccttcgtgaccgactgggacaaggtgaccgccaccgtggccggcctgaccctgctggccgtgggcgtgtacagcgccaagaacgccaccctggtggccggcagattcatcgaggccagactgggcaagcccagcctggtgagagagaccagcagaatcaccgtgctggaggccctgagacaccccatccaggtgagcagaagactgctgagcagaccccaggacgccctggagggcgtggtgctgagccccagcctggaggccagagtgagagacatcgccatcgccaccagaaacaccaagaagaacagaagcctgtacagaaacatcctgatgtacggcccccccggcaccggcaagaccctgttcgccaagaagctggccctgcacagcggcatggactacgccatcatgaccggcggcgacgtggcccccatgggcagagagggcgtgaccgccatgcacaagctgttcgactgggccaacaccagcagaagaggcctgctgctgttcgtggacgaggccgacgccttcctgagaaagagagccaccgagaagatcagcgaggacctgagagccaccctgaacgccttcctgtacagaaccggccagcacagcaacaagttcatgctggtgctggccagcaaccagcccgagcagttcgactgggccatcaacgacagaatcaacgagatggtgcacttcgacctgcccggccaggaggagagagagagactggtgagaatgtacttcgacaagtacgtgctgaagcccgccaccgagggcaagcagagactgaagctggcccagttcgactacggcagaaagtgcagcgaggtggccagactgaccgagggcatgagcggcagagagatcgcccagctggccgtgagctggcaggccaccgcctacgccagcgaggacggcgtgctgaccgaggccatgatggacaccagagtgcaggacgccgtgcagcagcaccagcagaagatgtgctggctgaaggccgagggccccggcagaggcgacgagcccagccccagctag

SEQ ID NO: 73544 - DNA, 1947 bp, synthetic construct
  misc_feature 1..1947: note = Description of Artificial Sequence: Synthetic coding sequence
  source 1..1947: mol_type = other DNA
atgagctggctgttcggcgtgaacaagggccccaagggcgagggcgccggcccccccccccccctgccccccgcccagcccggcgccgagggcggcggcgacagaggcctgggcgacagacccgcccccaaggacaagtggagcaacttcgaccccaccggcctggagagagccgccaaggccgccagagagctggagcacagcagatacgccaaggaggccctgaacctggcccagatgcaggagcagaccctgcagctggagcagcagagcaagctgaaggagtacgaggccgccgtggagcagctgaagagcgagcagatcagagcccaggccgaggagagaagaaagaccctgagcgaggagaccagacagcaccaggccagagcccagtaccaggacaagctggccagacagagatacgaggaccagctgaagcagcagcagctgctgaacgaggagaacctgagaaagcaggaggagagcgtgcagaagcaggaggccatgagaagagccaccgtggagagagagatggagctgagacacaagaacgagatgctgagagtggagaccgaggccagagccagagccaaggccgagagagagaacgccgacatcatcagagagcagatcagactgaaggccagcgagcacagacagaccgtgctggagagcatcagaaccgccggcaccctgttcggcgagggcttcagagccttcgtgaccgacagagacaaggtgaccgccaccgtggccggcctgaccctgctggccgtgggcgtgtacagcgccaagaacgccaccgccgtgaccggcagattcatcgaggccagactgggcaagcccagcctggtgagagagaccagcagaatcaccgtgctggaggccctgagacaccccatccaggtgagcagaagactgctgagcagaccccaggacgtgctggagggcgtggtgctgagccccagcctggaggccagagtgagagacatcgccatcgccaccagaaacaccaagaagaacagaggcctgtacagacacatcctgctgtacggcccccccggcaccggcaagaccctgttcgccaagaagctggccctgcacagcggcatggactacgccatcatgaccggcggcgacgtggcccccatgggcagagagggcgtgaccgccatgcacaagctgttcgactgggccaacaccagcagaagaggcctgctgctgttcatggacgaggccgacgccttcctgagaaagagagccaccgaggagatcagcaaggacctgagagccaccctgaacgccttcctgtaccacatgggccagcacagcaacaagttcatgctggtgctggccagcaacctgcccgagcagttcgactgcgccatcaacagcagaatcgacgtgatggtgcacttcgacctgccccagcaggaggagagagagagactggtgagactgcacttcgacaactgcgtgctgaagcccgccaccgagggcaagagaagactgaagctggcccagttcgactacggcagaaagtgcagcgaggtggccagactgaccgagggcatgagcggcagagagatcgcccagctggccgtgagctggcaggccaccgcctacgccagcaaggacggcgtgctgaccgaggccatgatggacgcctgcgtgcaggacgccgtgcagcagtacagacagaagatgagatggctgaaggccgagggccccggcagaggcgtggagcaccccctgagcggcgtgcagggcgagaccctgaccagctggagcctggccaccgaccccagctacccctgcctggccggcccctgcaccttcagaatctgcagctggatgggcaccggcctgtgccccggccccctgagccccagaatgagctgcggcggcggcagacccttctgcccccccggccaccccctgctgtag

SEQ ID NO: 73545 - DNA, 900 bp, synthetic construct
  misc_feature 1..900: note = Description of Artificial Sequence: Synthetic coding sequence
  source 1..900: mol_type = other DNA
atgagctggctgttcggcgtgaacaagggccccaagggcgagggcgccggcccccccccccccctgccccccgcccagcccggcgccgagggcggcggcgacagaggcctgggcgacagacccgcccccaaggacaagtggagcaacttcgaccccaccggcctggagagagccgccaaggccgccagagagctggagcacagcagatacgccaaggaggccctgaacctggcccagatgcaggagcagaccctgcagctggagcagcagagcaagctgaagcagctgctgaacgaggagaacctgagaaagcaggaggagagcgtgcagaagcacagacagaccgtgctggagagcatcagaaccgccggcaccctgttcggcgagggcttcagagccttcgtgaccgacagagacaaggtgaccgccaccgtggccggcctgaccctgctggccgtgggcgtgtacagcgccaagaacgccaccgccgtgaccggcagattcatcgaggccagactgggcaagcccagcctggtgagagagaccagcagaatcaccgtgctggaggccctgagacaccccatccagcaggtgagcagaagactgctgagcagaccccaggacgtgctggagggcgtggtgctgagccccagcctggaggccagagtgagagacatcgccatcgccaccagaaacaccaagaagaacagaggcctgtacagacacatcctgctgtacggcccccccggcaccggcaagaccctgttcgccaagaagctggccctgcacagcggcatggactacgccatcatgaccggcggcgacgtggcccccatgggcagagagggcgtgaccgccatgcacaagctgttcgactgggccaacaccagcagaagatag

SEQ ID NO: 73546 - DNA, 351 bp, synthetic construct
  misc_feature 1..351: note = Description of Artificial Sequence: Synthetic coding sequence
  source 1..351: mol_type = other DNA
atgagaagagccaccgtggagagagagatggagctgagacacaagaacgagatgctgagagtggagaccgaggccagagccagagccaaggccgagagagagaacgccgacatcatcagagagcagatcagactgaaggccagcgagcacagacagaccgtgctggagagcatcagaaccgccggcaccctgttcggcgagggcttcagagccttcgtgaccgacagagacaaggtgaccgccaccgtgaacatcttcatcaagcagggctggcaggtggccgagagacagcacttcagaagaagaagatgggccgaccacgaggtgagaagaagcagaagcagctggtag

SEQ ID NO: 73547 - DNA, 1449 bp, synthetic construct
  misc_feature 1..1449: note = Description of Artificial Sequence: Synthetic coding sequence
  source 1..1449: mol_type = other DNA
atgctgagagtggagaccgaggccagagccagagccaaggccgagagagagaacgccgacatcatcagagagcagatcagactgaaggccagcgagcacagacagaccgtgctggagagcatcagaaccgccggcaccctgttcggcgagggcttcagagccttcgtgaccgacagagacaaggtgaccgccaccgtggccggcctgaccctgctggccgtgggcgtgtacagcgccaagaacgccaccgccgtgaccggcagattcatcgaggccagactgggcaagcccagcctggtgagagagaccagcagaatcaccgtgctggaggccctgagacaccccatccaggtgagcagaagactgctgagcagaccccaggacgtgctggagggcgtggtgctgagcgtgagccccagcctggaggccagagtgagagacatcgccatcgccaccagaaacaccaagaagaacagaggcctgtacagacacatcctgctgtacggcccccccggcaccggcaagaccctgttcgccaagaagctggccctgcacagcggcatggactacgccatcatgaccggcggcgacgtggcccccatgggcagagagggcgtgaccgccatgcacaagctgttcgactgggccaacaccagcagaagaggcctgcaggaggagatcagcaaggacctgagagccaccctgaacgccttcctgtaccacatgggccagcacagcaacaacagattcatgctggtgctggccagcaacctgcccgagcagttcgactgcgccatcaacagcagaatcgacgtgatggtgcacttcgacctgccccagcaggaggagagagagagactggtgagactgcacttcgacaactgcgtgctgaagcccgccaccgagggcaagagaatgggcgtgggccagctgcccgtgttcagaccccccccccacggcgtgggcagcgccgccctggccgccagcctgggcaacagcttccccagaagactgaagctggcccagttcgactacggcagaaagtgcagcgaggtggccagactgaccgagggcatgagcggcagagagatcgcccagctggccgtgagctggcaggccaccgcctacgccagcaaggacggcgtgctgaccgaggccatgatggacgcctgcgtgcaggacgccgtgcagcagtacagacagaagatgagatggctgaaggccgagggccccggcagaggcgtggagcaccccctgagcggcgtgcagggcgagaccctgaccagctggagcctggccaccgaccccagctacccctgcctggccggcccctgcaccttcagaatctgcagctggatgggcaccggcctgtgccccggccccctgagccccagaatgagctgcggcggcggcagacccttctgcccccccggccaccccctgctgtag

SEQ ID NO: 73548 - DNA, 354 bp, synthetic construct
  misc_feature 1..354: note = Description of Artificial Sequence: Synthetic coding sequence
  source 1..354: mol_type = other DNA
atgagaagagccaccgtggagagagagatggagctgagacacaagaacgagatgctgagagtggagaccgaggccagagccagagccaaggccgagagagagaacgccgacatcatcagagagcagatcagactgaaggccagcgagcacagacagaccgtgctggagagcatcagaaccgccggcaccctgttcggcgagggcttcagagccttcgtgaccgacagagacaaggtgaccgccaccgtgaacatcttcatcaagcagggctggcaggtggccgagagacagcaccacttcagaagaagaagatgggccgaccacgaggtgagaagaagcagaagcagctggtag

SEQ ID NO: 73549 - DNA, 5535 bp, synthetic construct
  misc_feature 1..5535: note = Description of Artificial Sequence: Synthetic coding sequence
  source 1..5535: mol_type = other DNA
atggtgggcgtgctggccatggccgccgccgccgcccccccccccgtgaaggactgcgagatcgagccctgcaagaagagaaagaaggacgacgacaccagcacctgcaagaccatcaccaagtacctgagccccctgggcaagaccagagacagagtgttcgccccccccaagcccagcaacatcctggactacttcagaaagaccagccccaccaacgagaagacccagctgggcaaggagtgcaagatcaagagccccgagagcgtgcccgtggacagcaacaaggactgcaccacccccctggagatgttcagcaacgtggagttcaagaagaagagaaagagagtgaacctgagccaccagctgaacaacatcaagaccgagaacgaggcccccatcgagatcagcagcgacgacagcaaggaggactacagcctgaacaacgacttcgtggagagcagcaccagcgtgctgagatacaagaagcaggtggaggtgctggccgagaacatccaggacaccaagagccagcccaacaccatgaccagcctgcagaacagcaagaaggtgaaccccaagcagggcaccaccaagaacgacttcaagaagctgagaaagagaaagtgcagagacgtggtggacctgagcgagagcctgcccctggccgaggagctgaacctgctgaagaaggacggcaaggacaccaagcagatggagaacaccaccagccacgccaacagcagagacaacgtgaccgaggccgcccagctgaacgacagcatcatcaccgtgagctacgaggagttcctgaagagccacaaggagaacaaggtggaggagatccccgacagcaccatgagcatctgcgtgcccagcgagaccgtggacgagatcgtgaagagcggctacatcagcgagagcgagaacagcgagatcagccagcaggtgagattcaagaccgtgaccgtgctggcccaggtgcaccccatcccccccaagaagaccggcaagatccccagaatcttcctgaagcagaagcagttcgagatggagaacagcctgagcgaccccgagaacgagcagaccgtgcagaagagaaagagcaacgtggtgatccaggaggaggagctggagctggccgtgctggaggccggcagcagcgaggccgtgaagcccaagtgcaccctggaggagagacagcagttcatgaaggccttcagacagcccgccagcgacgccctgaagaacggcgtgaagaagagcagcgacaagcagaaggacctgaacgagaagtgcctgtacgaggtgggcagagacgacaacagcaagaagatcatggagaacagcggcatccagatggtgagcaagaacggcaacctgcagctgcacaccgacaagggcagcttcctgaaggagaagaacaagaagctgaagaagaagaacaagaagaccctggacaccggcgccatccccggcaagaacagagagggcaacacccagaagaaggagaccaccttcttcctgaaggagaagcagtaccagaacagaatgagcctgagacagagaaagaccgagttcttcaagagcagcaccctgttcaacaacgagagcctggtgtacgaggacatcgccaacgacgacctgctgaaggtgagcagcctgtgcaacaacaacaagctgagcagaaagaccagcatccccgtgaaggacatcaagctgacccagagcaaggccgagagcgaggccagcctgctgaacgtgagcacccccaagagcaccagaagaagcggcagaatcagcagcacccccaccaccgagaccatcagaggcatcgacagcgacgacgtgcaggacaacagccagctgaaggccagcacccagaaggccgccaacctgagcgagaagcacagcctgtacaccgccgagctgatcaccgtgcccttcgacagcgagagccccatcagaatgaagttcaccagaatcagcacccccaagaagagcaagaagaagagcaacaagagaagcgagaagagcgaggccaccgacggcggcttcaccagccagatcagaaaggccagcaacaccagcaagaacatcagcaaggccaagcagctgatcgagaaggccaaggccctgcacatcagcagaagcaaggtgaccgaggagatcgccatccccctgagaagaagcagcagacaccagaccctgcccgagagaaagaagctgagcgagaccgaggacagcgtgatcatcatcgacagcagccccaccgccctgaagcaccccgagaagaaccagaagaagctgcagtgcctgaacgacgtgctgggcaagaagctgaacaccagcaccaagaacgtgcccggcaagatgaaggtggcccccctgttcctggtgagaaaggcccagaaggccgccgaccccgtgcccagcttcgacgagagcagccaggacaccagcgagaagagccaggactgcgacgtgcagtgcaaggccaagagagacttcctgatgagcggcctgcccgacctgctgaagagacagatcgccaagaaggccgccgccctggacgtgtacaacgccgtgagcaccagcttccagagagtggtgcacgtgcagcagaaggacgacggctgctgcctgtggcacctgaagccccccagctgccccctgctgaccaagttcaaggagctgaacaccaaggtgatcgacctgagcaagtgcggcatcgccctgggcgagttcagcaccctgaacagcaagctgaagagcggcaacagcgccgccgtgttcatgagaaccagaaaggagttcaccgaggaggtgagaaacctgctgctggaggagatcagatggagcaaccccgagttcagcctgaagaagtacttccccctgctgctgaagaagcagatcgagcaccaggtgctgagcagcgagtgccacagcaagcaggagctggaggccgacgtgagccacaaggagaccaagagaaagctggtggaggccgagaacagcaagagcaagagaaagaagcccaacgagtacagcaagaacctggagaagaccaacagaaagagcgaggagctgagcaagagaaacaacagcagcggcatcaagctggacagcagcaaggacagcggcaccgaggacatgctgtggaccgagaagtaccagccccagaccgccagcgagctgatcggcaacgagctggccatcaagaagctgcacagctggctgaaggactggaagagaagagccgagctggaggagagacagaacctgaagggcaagagagacgagaagcacgaggacttcagcggcggcatcgacttcaagggcagcagcgacgacgaggaggagagcagactgtgcaacaccgtgctgatcaccggccccaccggcgtgggcaagaccgccgccgtgtacgcctgcgcccaggagctgggcttcaagatcttcgaggtgaacgccagcagccagagaagcggcagacagatcctgagccagctgaaggaggccacccagagccaccaggtggacaagcagggcgtgaacagccagaagccctgcttcttcaacagctactacatcggcaagagccccaagaagatcagcagccccaagaaggtggtgaccagccccagaaaggtgcccccccccagccccaagagcagcggccccaagagagccctgccccccaagaccctggccaactacttcaaggtgagccccaagcccaagaacaacgaggagatcggcatgctgctggagaacaacaagggcatcaagaacagcttcgagcagaagcagatcacccagaccaagagcaccaacgccaccaacagcaacgtgaaggacgtgggcgccgaggagcccagcagaaagaacgccaccagcctgatcctgttcgaggaggtggacgtgatcttcgacgaggacgccggcttcctgaacgccatcaagaccttcatggccaccaccaagagacccgtgatcctgaccaccagcgaccccaccttcagcctgatgttcgacggctgcttcgaggagatcaagttcagcacccccagcctgctgaacgtggccagctacctgcagatgatctgcctgaccgagaacttcagaaccgacgtgaaggacttcgtgaccctgctgaccgccaacacctgcgacatcagaaagagcatcctgtacctgcagttctggatcagaagcggcggcggcgtgctggaggagagacccctgaccctgtacagaggcaacagcagaaacgtgcagctggtgtgcagcgagcacggcctggacaacaagatctaccccaagaacaccaagaagaagagagtggacctgcccaagtgcgacagcggctgcgccgagaccctgttcggcctgaagaacatcttcagccccagcgaggacctgttcagcttcctgaagcacaagatcaccatgaaggaggagtggcacaagttcatccagctgctgaccgagttccagatgagaaacgtggacttcctgtacagcaacctggagttcatcctgcccctgcccgtggacaccatccccgagaccaagaacttctgcggccccagcgtgaccgtggacgccagcgccgccaccaagagcatgaactgcctggccagaaagcacagcgagagagagcagcccctgaagaagagccagaagaagaagcagaagaagaccctggtgatcctggacgacagcgacctgttcgacaccgacctggacttccccgaccagagcatcagcctgagcagcgtgagcagcagcagcaacgccgaggagagcaagaccggcgacgaggagagcaaggccagagacaagggcaacaaccccgagaccaagaagagcatcccctgcccccccaagaccaccgccggcaagaagtgcagcgccctggtgagccactgcctgaacagcctgagcgagttcatggacaacatgagcttcctggacgccctgctgaccgacgtgagagagcagaacaagtacggcagaaacgacttcagctggaccaacggcaaggtgaccagcggcctgtgcgacgagttcagcctggagagcaacgacggctggaccagccagagcagcggcgagctgaaggccgccgccgaggccctgagcttcaccaagtgcagcagcgccatcagcaaggccctggagaccctgaacagctgcaagaagctgggcagagaccccaccaacgacctgaccttctacgtgagccagaagagaaacaacgtgtacttcagccagagcgccgccaacctggacaacgcctggaagagaatcagcgtgatcaagagcgtgttcagcagcagaagcctgctgtacgtgggcaacagacaggccagcatcatcgagtacctgcccaccctgagaaacatctgcaagaccgagaagctgaaggagcagggcaagagcaagagaagattcctgcactacttcgagggcatccacctggacatccccaaggagaccgtgaacaccctggccgccgacttcccctag

SEQ ID NO: 73550 - DNA, 3543 bp, synthetic construct
  misc_feature 1..3543: note = Description of Artificial Sequence: Synthetic coding sequence
  source 1..3543: mol_type = other DNA
atgagcgccgacagcagccccctggtgggcagcacccccaccggctacggcaccctgaccatcggcaccagcatcgaccccctgagcagcagcgtgagcagcgtgagactgagcggctactgcggcagcccctggagagtgatcggctaccacgtggtggtgtggatgatggccggcatccccctgctgctgttcagatggaagcccctgtggggcgtgagactgagactgagaccctgcaacctggcccacgccgagaccctggtgatcgagatcagagacaaggaggacagcagctggcagctgttcaccgtgcaggtgcagaccgaggccatcggcgagggcagcctggagcccagcccccagagccaggccgaggacggcagaagccaggccgccgtgggcgccgtgcccgagggcgcctggaaggacaccgcccagctgcacaagagcgaggaggccgtgagcgtgggccagaagagagtgctgagatactacctgttccagggccagagatacatctggatcgagacccagcaggccttctaccaggtgagcctgctggaccacggcagaagctgcgacgacgtgcacagaagcagacacggcctgagcctgcaggaccagatggtgagaaaggccatctacggccccaacgtgatcagcatccccgtgaagagctacccccagctgctggtggacgaggccctgaacccctactacggcttccaggccttcagcatcgccctgtggctggccgaccactactactggtacgccctgtgcatcttcctgatcagcagcatcagcatctgcctgagcctgtacaagaccagaaagcagagccagaccctgagagacatggtgaagctgagcatgagagtgtgcgtgtgcagacccggcggcgaggaggagtgggtggacagcagcgagctggtgcccggcgactgcctggtgctgccccaggagggcggcctgatgccctgcgacgccgccctggtggccggcgagtgcatggtgaacgagagcagcctgaccggcgagagcatccccgtgctgaagaccgccctgcccgagggcctgggcccctactgcgccgagacccacagaagacacaccctgttctgcggcaccctgatcctgcaggccagagcctacgtgggcccccacgtgctggccgtggtgaccagaaccggcttctgcaccgccaagggcggcctggtgagcagcatcctgcaccccagacccatcaacttcaagttctacaagcacagcatgaagttcgtggccgccctgagcgtgctggccctgctgggcaccatctacagcatcttcatcctgtacagaaacagagtgcccctgaacgagatcgtgatcagagccctggacctggtgaccgtggtggtgccccccgccctgcccgccgccatgaccgtgtgcaccctgtacgcccagagcagactgagaagacagggcatcttctgcatccaccccctgagaatcaacctgggcggcaagctgcagctggtgtgcttcgacaagaccggcaccctgaccgaggacggcctggacgtgatgggcgtggtgcccctgaagggccaggccttcctgcccctggtgcccgagcccagaagactgcccgtgggccccctgctgagagccctggccacctgccacgccctgagcagactgcaggacacccccgtgggcgaccccatggacctgaagatggtggagagcaccggctgggtgctggaggaggagcccgccgccgacagcgccttcggcacccaggtgctggccgtgatgagaccccccctgtgggagccccagctgcaggccatggaggagccccccgtgcccgtgagcgtgctgcacagattccccttcagcagcgccctgcagagaatgagcgtggtggtggcctggcccggcgccacccagcccgaggcctacgtgaagggcagccccgagctggtggccggcctgtgcaaccccgagaccgtgcccaccgacttcgcccagatgctgcagagctacaccgccgccggctacagagtggtggccctggccagcaagcccctgcccaccgtgcccagcctggaggccgcccagcagctgaccagagacaccgtggagggcgacctgagcctgctgggcctgctggtgatgagaaacctgctgaagccccagaccacccccgtgatccaggccctgagaagaaccagaatcagagccgtgatggtgaccggcgacaacctgcagaccgccgtgaccgtggccagaggctgcggcatggtggccccccaggagcacctgatcatcgtgcacgccacccaccccgagagaggccagcccgccagcctggagttcctgcccatggagagccccaccgccgtgaacggcgtgaaggaccccgaccaggccgccagctacaccgtggagcccgaccccagaagcagacacctggccctgagcggccccaccttcggcatcatcgtgaagcacttccccaagctgctgcccaaggtgctggtgcagggcaccgtgttcgccagaatggcccccgagcagaagaccgagctggtgtgcgagctgcagaagctgcagtactgcgtgggcatgtgcggcgacggcgccaacgactgcggcgccctgaaggccgccgacgtgggcatcagcctgagccaggccgaggccagcgtggtgagccccttcaccagcagcatggccagcatcgagtgcgtgcccatggtgatcagagagggcagatgcagcctggacaccagcttcagcgtgttcaagtacatggccctgtacagcctgacccagttcatcagcgtgctgatcctgtacaccatcaacaccaacctgggcgacctgcagttcctggccatcgacctggtgatcaccaccaccgtggccgtgctgatgagcagaaccggccccgccctggtgctgggcagagtgagaccccccggcgccctgctgagcgtgcccgtgctgagcagcctgctgctgcagatggtgctggtgaccggcgtgcagctgggcggctacttcctgaccctggcccagccctggttcgtgcccctgaacagaaccgtggccgcccccgacaacctgcccaactacgagaacaccgtggtgttcagcctgagcagcttccagtacctgatcctggccgccgccgtgagcaagggcgcccccttcagaagacccctgtacaccaacgtgcccttcctggtggccctggccctgctgagcagcgtgctggtgggcctggtgctggtgcccggcctgctgcagggccccctggccctgagaaacatcaccgacaccggcttcaagctgctgctgctgggcctggtgaccctgaacttcgtgggcgccttcatgctggagagcgtgctggaccagtgcctgcccgcctgcctgagaagactgagacccaagagagccagcaagaagagattcaagcagctggagagagagctggccgagcagccctggccccccctgcccgccggccccctgagatag

SEQ ID NO: 73551 - DNA, 3477 bp, synthetic construct
  misc_feature 1..3477: note = Description of Artificial Sequence: Synthetic coding sequence
  source 1..3477: mol_type = other DNA
atgagcgccgacagcagccccctggtgggcagcacccccaccggctacggcaccctgaccatcggcaccagcatcgaccccctgagcagcagcgtgagcagcgtgagactgagcggctactgcggcagcccctggagagtgatcggctaccacgtggtggtgtggatgatggccggcatccccctgctgctgttcagatggaagcccctgtggggcgtgagactgagactgagaccctgcaacctggcccacgccgagaccctggtgatcgagatcagagacaaggaggacagcagctggcagctgttcaccgtgcaggtgcagaccgaggccatcggcgagggcagcctggagcccagcccccagagccaggccgaggacggcagaagccaggccgccgtgggcgccgtgcccgagggcgcctggaaggacaccgcccagctgcacaagagcgaggaggccaagagagtgctgagatactacctgttccagggccagagatacatctggatcgagacccagcaggccttctaccaggtgagcctgctggaccacggcagaagctgcgacgacgtgcacagaagcagacacggcctgagcctgcaggaccagatggtgagaaaggccatctacggccccaacgtgatcagcatccccgtgaagagctacccccagctgctggtggacgaggccctgaacccctactacggcttccaggccttcagcatcgccctgtggctggccgaccactactactggtacgccctgtgcatcttcctgatcagcagcatcagcatctgcctgagcctgtacaagaccagaaagcagagccagaccctgagagacatggtgaagctgagcatgagagtgtgcgtgtgcagacccggcggcgaggaggagtgggtggacagcagcgagctggtgcccggcgactgcctggtgctgccccaggagggcggcctgatgccctgcgacgccgccctggtggccggcgagtgcatggtgaacgagagcagcctgaccggcgagagcatccccgtgctgaagaccgccctgcccgagggcctgggcccctactgcgccgagacccacagaagacacaccctgttctgcggcaccctgatcctgcaggccagagcctacgtgggcccccacgtgctggccgtggtgaccagaaccggcttctgcaccgccaagggcggcctggtgagcagcatcctgcaccccagacccatcaacttcaagttctacaagcacagcatgaagttcgtggccgccctgagcgtgctggccctgctgggcaccatctacagcatcttcatcctgtacagaaacagagtgcccctgaacgagatcgtgatcagagccctggacctggtgaccgtggtggtgccccccgccctgcccgccgccatgaccgtgtgcaccctgtacgcccagagcagactgagaagacagggcatcttctgcatccaccccctgagaatcaacctgggcggcaagctgcagctggtgtgcttcgacaagaccggcaccctgaccgaggacggcctggacgtgatgggcgtggtgcccctgaagggccaggccttcctgcccctggtgcccgagcccagaagactgcccgtgggccccctgctgagagccctggccacctgccacgccctgagcagactgcaggacacccccgtgggcgaccccatggacctgaagatggtggagagcaccggctgggtgctggaggaggagcccgccgccgacagcgccttcggcacccaggtgctggccgtgatgagaccccccctgtgggagccccagctgcaggccatggaggagccccccgtgcccgtgagcgtgctgcacagattccccttcagcagcgccctgcagagaatgagcgtggtggtggcctggcccggcgccacccagcccgaggcctacgtgaagggcagccccgagctggtggccggcctgtgcaaccccgagaccgtgcccaccgacttcgcccagatgctgcagagctacaccgccgccggctacagagtggtggccctggccagcaagcccctgcccaccgtgcccagcctggaggccgcccagcagctgaccagagacaccgtggagggcgacctgagcctgctgggcctgctggtgatgagaaacctgctgaagccccagaccacccccgtgatccaggccctgagaagaaccagaatcagagccgtgatggtgaccggcgacaacctgcagaccgccgtgaccgtggccagaggctgcggcatggtggccccccaggagcacctgatcatcgtgcacgccacccaccccgagagaggccagcccgccagcctggagttcctgcccatggagagccccaccgccgtgaacggcgtgaaggtgctggtgcagggcaccgtgttcgccagaatggcccccgagcagaagaccgagctggtgtgcgagctgcagaagctgcagtactgcgtgggcatgtgcggcgacggcgccaacgactgcggcgccctgaaggccgccgacgtgggcatcagcctgagccaggccgaggccagcgtggtgagccccttcaccagcagcatggccagcatcgagtgcgtgcccatggtgatcagagagggcagatgcagcctggacaccagcttcagcgtgttcaagtacatggccctgtacagcctgacccagttcatcagcgtgctgatcctgtacaccatcaacaccaacctgggcgacctgcagttcctggccatcgacctggtgatcaccaccaccgtggccgtgctgatgagcagaaccggccccgccctggtgctgggcagagtgagaccccccggcgccctgctgagcgtgcccgtgctgagcagcctgctgctgcagatggtgctggtgaccggcgtgcagctgggcggctacttcctgaccctggcccagccctggttcgtgcccctgaacagaaccgtggccgcccccgacaacctgcccaactacgagaacaccgtggtgttcagcctgagcagcttccagtacctgatcctggccgccgccgtgagcaagggcgcccccttcagaagacccctgtacaccaacgagagagccagacccgtgccccccagactgcccgcccccccccccgcccaggccggcctgcaggaggccctgcaggccgccggcaccagagccggcagagccgccctggccgccgccgccagaagaccccccgaggtggtgcaggcccacggccaccccagacactggaacagcctgcccctgagccaccagctggaccccagccccgccaccccccccccccccccccccaccagcctgagactggccaccgtgtacacccccccccccagacccccccccccctggggcagcgtggactactgccccctgccctggaccatccccagaagaggcggcagcccccagctgcccagcgtgctgctgagcgtgtag

SEQ ID NO: 73552 - DNA, 3528 bp, synthetic construct
  misc_feature 1..3528: note = Description of Artificial Sequence: Synthetic coding sequence
  source 1..3528: mol_type = other DNA
atgagcgccgacagcagccccctggtgggcagcacccccaccggctacggcaccctgaccatcggcaccagcatcgaccccctgagcagcagcgtgagcagcgtgagactgagcggctactgcggcagcccctggagagtgatcggctaccacgtggtggtgtggatgatggccggcatccccctgctgctgttcagatggaagcccctgtggggcgtgagactgagactgagaccctgcaacctggcccacgccgagaccctggtgatcgagatcagagacaaggaggacagcagctggcagctgttcaccgtgcaggtgcagaccgaggccatcggcgagggcagcctggagcccagcccccagagccaggccgaggacggcagaagccaggccgccgtgggcgccgtgcccgagggcgcctggaaggacaccgcccagctgcacaagagcgaggaggccaagagagtgctgagatactacctgttccagggccagagatacatctggatcgagacccagcaggccttctaccaggtgagcctgctggaccacggcagaagctgcgacgacgtgcacagaagcagacacggcctgagcctgcaggaccagatggtgagaaaggccatctacggccccaacgtgatcagcatccccgtgaagagctacccccagctgctggtggacgaggccctgaacccctactacggcttccaggccttcagcatcgccctgtggctggccgaccactactactggtacgccctgtgcatcttcctgatcagcagcatcagcatctgcctgagcctgtacaagaccagaaagcagagccagaccctgagagacatggtgaagctgagcatgagagtgtgcgtgtgcagacccggcggcgaggaggagtgggtggacagcagcgagctggtgcccggcgactgcctggtgctgccccaggagggcggcctgatgccctgcgacgccgccctggtggccggcgagtgcatggtgaacgagagcagcctgaccggcgagagcatccccgtgctgaagaccgccctgcccgagggcctgggcccctactgcgccgagacccacagaagacacaccctgttctgcggcaccctgatcctgcaggccagagcctacgtgggcccccacgtgctggccgtggtgaccagaaccggcttctgcaccgccaagggcggcctggtgagcagcatcctgcaccccagacccatcaacttcaagttctacaagcacagcatgaagttcgtggccgccctgagcgtgctggccctgctgggcaccatctacagcatcttcatcctgtacagaaacagagtgcccctgaacgagatcgtgatcagagccctggacctggtgaccgtggtggtgccccccgccctgcccgccgccatgaccgtgtgcaccctgtacgcccagagcagactgagaagacagggcatcttctgcatccaccccctgagaatcaacctgggcggcaagctgcagctggtgtgcttcgacaagaccggcaccctgaccgaggacggcctggacgtgatgggcgtggtgcccctgaagggccaggccttcctgcccctggtgcccgagcccagaagactgcccgtgggccccctgctgagagccctggccacctgccacgccctgagcagactgcaggacacccccgtgggcgaccccatggacctgaagatggtggagagcaccggctgggtgctggaggaggagcccgccgccgacagcgccttcggcacccaggtgctggccgtgatgagaccccccctgtgggagccccagctgcaggccatggaggagccccccgtgcccgtgagcgtgctgcacagattccccttcagcagcgccctgcagagaatgagcgtggtggtggcctggcccggcgccacccagcccgaggcctacgtgaagggcagccccgagctggtggccggcctgtgcaaccccgagaccgtgcccaccgacttcgcccagatgctgcagagctacaccgccgccggctacagagtggtggccctggccagcaagcccctgcccaccgtgcccagcctggaggccgcccagcagctgaccagagacaccgtggagggcgacctgagcctgctgggcctgctggtgatgagaaacctgctgaagccccagaccacccccgtgatccaggccctgagaagaaccagaatcagagccgtgatggtgaccggcgacaacctgcagaccgccgtgaccgtggccagaggctgcggcatggtggccccccaggagcacctgatcatcgtgcacgccacccaccccgagagaggccagcccgccagcctggagttcctgcccatggagagccccaccgccgtgaacggcgtgaaggaccccgaccaggccgccagctacaccgtggagcccgaccccagaagcagacacctggccctgagcggccccaccttcggcatcatcgtgaagcacttccccaagctgctgcccaaggtgctggtgcagggcaccgtgttcgccagaatggcccccgagcagaagaccgagctggtgtgcgagctgcagaagctgcagtactgcgtgggcatgtgcggcgacggcgccaacgactgcggcgccctgaaggccgccgacgtgggcatcagcctgagccaggccgaggccagcgtggtgagccccttcaccagcagcatggccagcatcgagtgcgtgcccatggtgatcagagagggcagatgcagcctggacaccagcttcagcgtgttcaagtacatggccctgtacagcctgacccagttcatcagcgtgctgatcctgtacaccatcaacaccaacctgggcgacctgcagttcctggccatcgacctggtgatcaccaccaccgtggccgtgctgatgagcagaaccggccccgccctggtgctgggcagagtgagaccccccggcgccctgctgagcgtgcccgtgctgagcagcctgctgctgcagatggtgctggtgaccggcgtgcagctgggcggctacttcctgaccctggcccagccctggttcgtgcccctgaacagaaccgtggccgcccccgacaacctgcccaactacgagaacaccgtggtgttcagcctgagcagcttccagtacctgatcctggccgccgccgtgagcaagggcgcccccttcagaagacccctgtacaccaacgtgcccttcctggtggccctggccctgctgagcagcgtgctggtgggcctggtgctggtgcccggcctgctgcagggccccctggccctgagaaacatcaccgacaccggcttcaagctgctgctgctgggcctggtgaccctgaacttcgtgggcgccttcatgctggagagcgtgctggaccagtgcctgcccgcctgcctgagaagactgagacccaagagagccagcaagaagagattcaagcagctggagagagagctggccgagcagccctggccccccctgcccgccggccccctgagatag

SEQ ID NO: 73553 - DNA, 3372 bp, synthetic construct
  misc_feature 1..3372: note = Description of Artificial Sequence: Synthetic coding sequence
  source 1..3372: mol_type = other DNA
atgagcagagccaccagcgtgggcgaccagctggaggcccccgccagaaccatctacctgaaccagccccacctgaacaagttcagagacaaccagatcagcaccgccaagtacagcgtgctgaccttcctgcccagattcctgtacgagcagatcagaagagccgccaacgccttcttcctgttcatcgccctgctgcagcagatccccgacgtgagccccaccggcagatacaccaccctggtgcccctgatcatcatcctgaccatcgccggcatcaaggagatcgtggaggacttcaagagacacaaggccgacaacgccgtgaacaagaagaagaccatcgtgctgagaaacggcatgtggcacaccatcatgtggaaggaggtggccgtgggcgacatcgtgaaggtggtgaacggccagtacctgcccgccgacgtggtgctgctgagcagcagcgagccccaggccatgtgctacgtggagaccgccaacctggacggcgagaccaacctgaagatcagacagggcctgagccacaccgccgacatgcagaccagagaggtgctgatgaagctgagcggcaccatcgagtgcgagggccccaacagacacctgtacgacttcaccggcaacctgaacctggacggcaagagcctggtggccctgggccccgaccagatcctgctgagaggcacccagctgagaaacacccagtgggtgttcggcatcgtggtgtacaccggccacgacaccaagctgatgcagaacagcaccaaggcccccctgaagagaagcaacgtggagaaggtgaccaacgtgcagatcctggtgctgttcggcatcctgctggtgatggccctggtgagcagcgccggcgccctgtactggaacagaagccacggcgagaagaactggtacatcaagaagatggacaccaccagcgacaacttcggctacaacctgctgaccttcatcatcctgtacaacaacctgatccccatcagcctgctggtgaccctggaggtggtgaagtacacccaggccctgttcatcaactgggacaccgacatgtactacatcggcaacgacacccccgccatggccagaaccagcaacctgaacgaggagctgggccaggtgaagtacctgttcagcgacaagaccggcaccctgacctgcaacatcatgaacttcaagaagtgcagcatcgccggcgtgacctacggccacttccccgagctggccagagagcccagcagcgacgacttctgcagaatgccccccccctgcagcgacagctgcgacttcgacgaccccagactgctgaagaacatcgaggacagacaccccaccgccccctgcatccaggagttcctgaccctgctggccgtgtgccacaccgtggtgcccgagaaggacggcgacaacatcatctaccaggccagcagccccgacgaggccgccctggtgaagggcgccaagaagctgggcttcgtgttcaccgccagaacccccttcagcgtgatcatcgaggccatgggccaggagcagaccttcggcatcctgaacgtgctggagttcagcagcgacagaaagagaatgagcgtgatcgtgagaacccccagcggcagactgagactgtactgcaagggcgccgacaacgtgatcttcgagagactgagcaaggacagcaagtacatggaggagaccctgtgccacctggagtacttcgccaccgagggcctgagaaccctgtgcgtggcctacgccgacctgagcgagaacgagtacgaggagtggctgaaggtgtaccaggaggccagcaccatcctgaaggacagagcccagagactggaggagtgctacgagatcatcgagaagaacctgctgctgctgggcgccaccgccatcgaggacagactgcaggccggcgtgcccgagaccatcgccaccctgctgaaggccgagatcaagatctgggtgctgaccggcgacaagcaggagaccgccatcaacatcggctacagctgcagactggtgagccagaacatggccctgatcctgctgaaggaggacagcctggacgccaccagagccgccatcacccagcactgcaccgacctgggcaacctgctgggcaaggagaacgacgtggccctgatcatcgacggccacaccctgaagtacgccctgagcttcgaggtgagaagaagcttcctggacctggccctgagctgcaaggccgtgatctgctgcagagtgagccccctgcagaagagcgagatcgtggacgtggtgaagaagagagtgaaggccatcaccctggccatcggcgacggcgccaacgacgtgggcatgatccagaccgcccacgtgggcgtgggcatcagcggcaacgagggcatgcaggccaccaacaacagcgactacgccatcgcccagttcagctacctggagaagctgctgctggtgcacggcgcctggagctacaacagagtgaccaagtgcatcctgtactgcttctacaagaacgtggtgctgtacatcatcgagatcttcaccgccctgccccccttcaccctgggcatcttcgagagaagctgcacccaggagagcatgctgagattcccccagctgtacaagatcacccagaacggcgagggcttcaacaccaaggtgttctggggccactgcatcaacgccctggtgcacagcctgatcctgttctggttccccatgaaggccctggagcacgacaccgtgctgaccagcggccacgccaccgactacctgttcgtgggcaacatcgtgtacacctacgtggtggtgaccgtgtgcctgaaggccggcctggagaccaccgcctggaccaagttcagccacctggccgtgtggggcagcatgctgacctggctggtgttcttcggcatctacagcaccatctggcccaccatccccatcgcccccgacatgagaggccaggccaccatggtgctgagcagcgcccacttctggctgggcctgttcctggtgcccaccgcctgcctgatcgaggacgtggcctggagagccgccaagcacacctgcaagaagaccctgctggaggaggtgcaggagctggagaccaagagcagagtgctgggcaaggccgtgctgagagacagcaacggcaagagactgaacgagagagacagactgatcaagagactgggcagaaagaccccccccaccctgttcagaggcagcagcctgcagcagggcgtgccccacggctacgccttcagccaggaggagcacggcgccgtgagccaggaggaggtgatcagagcctacgacaccaccaagaagaagagcagaaagaagtag

SEQ ID NO: 73554 - DNA, 426 bp, synthetic construct
  misc_feature 1..426: note = Description of Artificial Sequence: Synthetic coding sequence
  source 1..426: mol_type = other DNA
atgagcagagccaccagcgtgggcgaccagctggaggcccccgccagaaccatctacctgaaccagccccacctgaacaagttcagagacaaccagatcagcaccgccaagtacagcgtgctgaccttcctgcccagattcctgtacgagcagatcagaagagccgccaacgccttcttcctgttcatcgccctgctgcagcagatccccgacgtgagccccaccggcagatacaccaccctggtgcccctgatcatcatcctgaccatcgccggcatcaaggagatcgtggaggacttcaagagacacaaggccgacaacgccgtgaacaagaagaagaccatcgtgctgagaaacggcatgtggcacaccatcatgtggaaggaggagaacagcccccccttcaaggagatcagccccctgtag

SEQ ID NO: 73555 - DNA, 3567 bp, synthetic construct
  misc_feature 1..3567: note = Description of Artificial Sequence: Synthetic coding sequence
  source 1..3567: mol_type = other DNA
atgctgaacggcgccggcctggacaaggccctgaagatgagcctgcccagaagaagcagaatcagaagcagcgtgggccccgtgagaagcagcctgggctacaagaaggccgaggacgagatgagcagagccaccagcgtgggcgaccagctggaggcccccgccagaaccatctacctgaaccagccccacctgaacaagttcagagacaaccagatcagcaccgccaagtacagcgtgctgaccttcctgcccagattcctgtacgagcagatcagaagagccgccaacgccttcttcctgttcatcgccctgctgcagcagatccccgacgtgagccccaccggcagatacaccaccctggtgcccctgatcatcatcctgaccatcgccggcatcaaggagatcgtggaggacttcaagagacacaaggccgacaacgccgtgaacaagaagaagaccatcgtgctgagaaacggcatgtggcacaccatcatgtggaaggaggtggccgtgggcgacatcgtgaaggtggtgaacggccagtacctgcccgccgacgtggtgctgctgagcagcagcgagccccaggccatgtgctacgtggagaccgccaacctggacggcgagaccaacctgaagatcagacagggcctgagccacaccgccgacatgcagaccagagaggtgctgatgaagctgagcggcaccatcgagtgcgagggccccaacagacacctgtacgacttcaccggcaacctgaacctggacggcaagagcctggtggccctgggccccgaccagatcctgctgagaggcacccagctgagaaacacccagtgggtgttcggcatcgtggtgtacaccggccacgacaccaagctgatgcagaacagcaccaaggcccccctgaagagaagcaacgtggagaaggtgaccaacgtgcagatcctggtgctgttcggcatcctgctggtgatggccctggtgagcagcgccggcgccctgtactggaacagaagccacggcgagaagaactggtacatcaagaagatggacaccaccagcgacaacttcggctacaacctgctgaccttcatcatcctgtacaacaacctgatccccatcagcctgctggtgaccctggaggtggtgaagtacacccaggccctgttcatcaactgggacaccgacatgtactacatcggcaacgacacccccgccatggccagaaccagcaacctgaacgaggagctgggccaggtgaagtacctgttcagcgacaagaccggcaccctgacctgcaacatcatgaacttcaagaagtgcagcatcgccggcgtgacctacggccacttccccgagctggccagagagcccagcagcgacgacttctgcagaatgccccccccctgcagcgacagctgcgacttcgacgaccccagactgctgaagaacatcgaggacagacaccccaccgccccctgcatccaggagttcctgaccctgctggccgtgtgccacaccgtggtgcccgagaaggacggcgacaacatcatctaccaggccagcagccccgacgaggccgccctggtgaagggcgccaagaagctgggcttcgtgttcaccgccagaacccccttcagcgtgatcatcgaggccatgggccaggagcagaccttcggcatcctgaacgtgctggagttcagcagcgacagaaagagaatgagcgtgatcgtgagaacccccagcggcagactgagactgtactgcaagggcgccgacaacgtgatcttcgagagactgagcaaggacagcaagtacatggaggagaccctgtgccacctggagtacttcgccaccgagggcctgagaaccctgtgcgtggcctacgccgacctgagcgagaacgagtacgaggagtggctgaaggtgtaccaggaggccagcaccatcctgaaggacagagcccagagactggaggagtgctacgagatcatcgagaagaacctgctgctgctgggcgccaccgccatcgaggacagactgcaggccggcgtgcccgagaccatcgccaccctgctgaaggccgagatcaagatctgggtgctgaccggcgacaagcaggagaccgccatcaacatcggctacagctgcagactggtgagccagaacatggccctgatcctgctgaaggaggacagcctggacgccaccagagccgccatcacccagcactgcaccgacctgggcaacctgctgggcaaggagaacgacgtggccctgatcatcgacggccacaccctgaagtacgccctgagcttcgaggtgagaagaagcttcctggacctggccctgagctgcaaggccgtgatctgctgcagagtgagccccctgcagaagagcgagatcgtggacgtggtgaagaagagagtgaaggccatcaccctggccatcggcgacggcgccaacgacgtgggcatgatccagaccgcccacgtgggcgtgggcatcagcggcaacgagggcatgcaggccaccaacaacagcgactacgccatcgcccagttcagctacctggagaagctgctgctggtgcacggcgcctggagctacaacagagtgaccaagtgcatcctgtactgcttctacaagaacgtggtgctgtacatcatcgagctgtggttcgccttcgtgaacggcttcagcggccagatcctgttcgagagatggtgcatcggcctgtacaacgtgatcttcaccgccctgccccccttcaccctgggcatcttcgagagaagctgcacccaggagagcatgctgagattcccccagctgtacaagatcacccagaacggcgagggcttcaacaccaaggtgttctggggccactgcatcaacgccctggtgcacagcctgatcctgttctggttccccatgaaggccctggagcacgacaccgtgctgaccagcggccacgccaccgactacctgttcgtgggcaacatcgtgtacacctacgtggtggtgaccgtgtgcctgaaggccggcctggagaccaccgcctggaccaagttcagccacctggccgtgtggggcagcatgctgacctggctggtgttcttcggcatctacagcaccatctggcccaccatccccatcgcccccgacatgagaggccaggccaccatggtgctgagcagcgcccacttctggctgggcctgttcctggtgcccaccgcctgcctgatcgaggacgtggcctggagagccgccaagcacacctgcaagaagaccctgctggaggaggtgcaggagctggagaccaagagcagagtgctgggcaaggccgtgctgagagacagcaacggcaagagactgaacgagagagacagactgatcaagagactgggcagaaagaccccccccaccctgttcagaggcagcagcctgcagcagggcgtgccccacggctacgccttcagccaggaggagcacggcgccgtgagccaggaggaggtgatcagagcctacgacaccaccaagaagaagagcagaaagaagtag

SEQ ID NO: 73556 - DNA, 2907 bp, synthetic construct
  misc_feature 1..2907: note = Description of Artificial Sequence: Synthetic coding sequence
  source 1..2907: mol_type = other DNA
atgagatgccccggccccagactgctggagaccagctggagacacccccccgcccccttcaccagcaccaacagacacctgtacgacttcaccggcaacctgaacctggacggcaagagcctggtggccctgggccccgaccagatcctgctgagaggcacccagctgagaaacacccagtgggtgttcggcatcgtggtgtacaccggccacgacaccaagctgatgcagaacagcaccaaggcccccctgaagagaagcaacgtggagaaggtgaccaacgtgcagatcctggtgctgttcggcatcctgctggtgatggccctggtgagcagcgccggcgccctgtactggaacagaagccacggcgagaagaactggtacatcaagaagatggacaccaccagcgacaacttcggctacaacctgctgaccttcatcatcctgtacaacaacctgatccccatcagcctgctggtgaccctggaggtggtgaagtacacccaggccctgttcatcaactgggacaccgacatgtactacatcggcaacgacacccccgccatggccagaaccagcaacctgaacgaggagctgggccaggtgaagtacctgttcagcgacaagaccggcaccctgacctgcaacatcatgaacttcaagaagtgcagcatcgccggcgtgacctacggccacttccccgagctggccagagagcccagcagcgacgacttctgcagaatgccccccccctgcagcgacagctgcgacttcgacgaccccagactgctgaagaacatcgaggacagacaccccaccgccccctgcatccaggagttcctgaccctgctggccgtgtgccacaccgtggtgcccgagaaggacggcgacaacatcatctaccaggccagcagccccgacgaggccgccctggtgaagggcgccaagaagctgggcttcgtgttcaccgccagaacccccttcagcgtgatcatcgaggccatgggccaggagcagaccttcggcatcctgaacgtgctggagttcagcagcgacagaaagagaatgagcgtgatcgtgagaacccccagcggcagactgagactgtactgcaagggcgccgacaacgtgatcttcgagagactgagcaaggacagcaagtacatggaggagaccctgtgccacctggagtacttcgccaccgagggcctgagaaccctgtgcgtggcctacgccgacctgagcgagaacgagtacgaggagtggctgaaggtgtaccaggaggccagcaccatcctgaaggacagagcccagagactggaggagtgctacgagatcatcgagaagaacctgctgctgctgggcgccaccgccatcgaggacagactgcaggccggcgtgcccgagaccatcgccaccctgctgaaggccgagatcaagatctgggtgctgaccggcgacaagcaggagaccgccatcaacatcggctacagctgcagactggtgagccagaacatggccctgatcctgctgaaggaggacagcctggacgccaccagagccgccatcacccagcactgcaccgacctgggcaacctgctgggcaaggagaacgacgtggccctgatcatcgacggccacaccctgaagtacgccctgagcttcgaggtgagaagaagcttcctggacctggccctgagctgcaaggccgtgatctgctgcagagtgagccccctgcagaagagcgagatcgtggacgtggtgaagaagagagtgaaggccatcaccctggccatcggcgacggcgccaacgacgtgggcatgatccagaccgcccacgtgggcgtgggcatcagcggcaacgagggcatgcaggccaccaacaacagcgactacgccatcgcccagttcagctacctggagaagctgctgctggtgcacggcgcctggagctacaacagagtgaccaagtgcatcctgtactgcttctacaagaacgtggtgctgtacatcatcgagctgtggttcgccttcgtgaacggcttcagcggccagatcctgttcgagagatggtgcatcggcctgtacaacgtgatcttcaccgccctgccccccttcaccctgggcatcttcgagagaagctgcacccaggagagcatgctgagattcccccagctgtacaagatcacccagaacggcgagggcttcaacaccaaggtgttctggggccactgcatcaacgccctggtgcacagcctgatcctgttctggttccccatgaaggccctggagcacgacaccgtgctgaccagcggccacgccaccgactacctgttcgtgggcaacatcgtgtacacctacgtggtggtgaccgtgtgcctgaaggccggcctggagaccaccgcctggaccaagttcagccacctggccgtgtggggcagcatgctgacctggctggtgttcttcggcatctacagcaccatctggcccaccatccccatcgcccccgacatgagaggccaggccaccatggtgctgagcagcgcccacttctggctgggcctgttcctggtgcccaccgcctgcctgatcgaggacgtggcctggagagccgccaagcacacctgcaagaagaccctgctggaggaggtgcaggagctggagaccaagagcagagtgctgggcaaggccgtgctgagagacagcaacggcaagagactgaacgagagagacagactgatcaagagactgggcagaaagaccccccccaccctgttcagaggcagcagcctgcagcagggcgtgccccacggctacgccttcagccaggaggagcacggcgccgtgagccaggaggaggtgatcagagcctacgacaccaccaagaagaagagcagaaagaagtag

SEQ ID NO: 73557 - DNA, 3903 bp, synthetic construct
  misc_feature 1..3903: note = Description of Artificial Sequence: Synthetic coding sequence
  source 1..3903: mol_type = other DNA
atgggcaccggccccgcccagacccccagaagcaccagagccggccccgagcccagccccgccccccccggccccggcgacaccggcgacagcgacgtgacccaggagggcagcggccccgccggcatcagaggcggcgagaccgtgatcagagccggcatgggcgacagccccggcagaggcgcccccgagagaagacacaaggcccagcccggcagagccagaaagtacgagtggagacccgagggccccaccagcatgggcagcctgggccagagagaggacctgcaggacgaggacagaaacagcgccttcacctggaaggtgcaggccaacaacagagcctacaacggccagttcaaggagaaggtgatcctgtgctggcagagaaagaagtacaagaccaacgtgatcagaaccgccaagtacaacttctacagcttcctgcccctgaacctgtacgagcagttccacagagtgagcaacctgttcttcctgatcatcatcatcctgcagagcatccccgacatcagcaccctgccctggttcagcctgagcacccccatggtgtgcctgctgttcatcagagccaccagagacctggtggacgacatgggcagacacaagagcgacagagccatcaacaacagaccctgccagatcctgatgggcaagagcttcaagcagaagaagtggcaggacctgtgcgtgggcgacgtggtgtgcctgagaaaggacaacatcgtgcccgccgacatgctgctgctggccagcaccgagcccagcagcctgtgctacgtggagaccgtggacatcgacggcgagaccaacctgaagttcagacaggccctgatggtgacccacaaggagctggccaccatcaagaagatggccagcttccagggcaccgtgacctgcgaggcccccaacagcagaatgcaccacttcgtgggctgcctggagtggaacgacaagaagtacagcctggacatcggcaacctgctgctgagaggctgcagaatcagaaacaccgacacctgctacggcctggtgatctacgccggcttcgacaccaagatcatgaagaactgcggcaagatccacctgaagagaaccaagctggacctgctgatgaacaagctggtggtggtgatcttcatcagcgtggtgctggtgtgcctggtgctggccttcggcttcggcttcagcgtgaaggagttcaaggaccaccactactacctgagcggcgtgcacggcagcagcgtggccgccgagagcttcttcgtgttctggagcttcctgatcctgctgagcgtgaccatccccatgagcatgttcatcctgagcgagttcatctacctgggcaacagcgtgttcatcgactgggacgtgcagatgtactacaagccccaggacgtgcccgccaaggccagaagcaccagcctgaacgaccacctgggccaggtggagtacatcttcagcgacaagaccggcaccctgacccagaacatcctgaccttcaacaagtgctgcatcagcggcagagtgtacggccccgacagcgaggccaccaccagacccaaggagaacccctacctgtggaacaagttcgccgacggcaagctgctgttccacaacgccgccctgctgcacctggtgagaaccaacggcgacgaggccgtgagagagttctggagactgctggccatctgccacaccgtgatggtgagagagagccccagagagagacccgaccagctgctgtaccaggccgccagccccgacgagggcgccctggtgaccgccgccagaaacttcggctacgtgttcctgagcagaacccaggacaccgtgaccatcatggagctgggcgaggagagagtgtaccaggtgctggccatcatggacttcaacagcaccagaaagagaatgagcgtgctggtgagaaagcccgagggcgccatctgcctgtacaccaagggcgccgacaccgtgatcttcgagagactgcacagaagaggcgccatggagttcgccaccgaggaggccctggccgccttcgcccaggagaccctgagaaccctgtgcctggcctacagagaggtggccgaggacatctacgaggactggcagcagagacaccaggaggccagcctgctgctgcagaacagagcccaggccctgcagcagctgctgggcgccaccgccatcgaggacagactgcaggacggcgtgcccgagaccatcaagtgcctgaagaagagcaacatcaagatctgggtgctgaccggcgacaagcaggagaccgccgtgaacatcggcttcgcctgcgagctgctgagcgagaacatgctgatcctggaggagaaggagatcagcagaatcctggagacctactgggagaacagcaacaacctgctgaccagagagagcctgagccaggtgaagctggccctggtgatcaacggcgacttcctggacaagctgctggtgagcctgagaaaggagcccagagccctggcccagaacgtgaacatggacgaggcctggcaggagctgggccagagcagaagagacttcctgtacgccagaagactgagcctgctgtgcagaagattcggcctgcccctggccgccccccccgcccaggacagcagagccagaagaagcagcgaggtgctgcaggagagagccttcgtggacctggccagcaagtgccaggccgtgatctgctgcagagtgacccccaagcagaaggccctgatcgtggccctggtgaagaagtaccaccaggtggtgaccctggccatcggcgacggcgccaacgacatcaacatgatcaagaccgccgacgtgggcgtgggcctggccggccaggagggcatgcaggccgtgcagaacagcgacttcgtgctgggccagttctgcttcctgcagagactgctgctggtgcacggcagatggagctacgtgagaatctgcaagttcctgagatacttcttctacaagagcatggccagcatgatggtgcaggtgtggttcgcctgctacaacggcttcaccggccagcccctgtacgagggctggttcctggccctgttcaacctgctgtacagcaccctgcccgtgctgtacatcggcctgttcgagcaggacgtgagcgccgagcagagcctggagaagcccgagctgtacgtggtgggccagaaggacgagctgttcaactactgggtgttcgtgcaggccatcgcccacggcgtgaccaccagcctggtgaacttcttcatgaccctgtggatcagcagagacaccgccggccccgccagcttcagcgaccaccagagcttcgccgtggtggtggccctgagctgcctgctgagcatcaccatggaggtgatcctgatcatcaagtactggaccgccctgtgcgtggccaccatcctgctgagcctgggcttctacgccatcatgaccaccaccacccagagcttctggctgttcagagtgagccccaccaccttccccttcctgtacgccgacctgagcgtgatgagcagccccagcatcctgctggtggtgctgctgagcgtgagcatcaacaccttccccgtgctggccctgagagtgatcttccccgccctgaaggagctgagagccaaggaggagaaggtggaggagggccccagcgaggagatcttcaccatggagcccctgccccacgtgcacagagagagcagagccagaagaagcagctacgccttcagccacagagagggctacgccaacctgatcacccagggcaccatcctgagaagaggccccggcgtgagcagcgacatcgccagcgagagcctggaccccagcgacgaggaggccgccagcagccccaaggagagccagtag

SEQ ID NO: 73558 - DNA, 1737 bp, synthetic construct
  misc_feature 1..1737: note = Description of Artificial Sequence: Synthetic coding sequence
  source 1..1737: mol_type = other DNA
atgggcgacagccccggcagaggcgcccccgagagaagacacaaggcccagcccggcagagccagaaagtacgagtggagacccgagggccccaccagcatgggcagcctgggccagagagaggacctgcaggacgaggacagaaacagcgccttcacctggaaggtgcaggccaacaacagagcctacaacggccagttcaaggagaaggtgatcctgtgctggcagagaaagaagtacaagaccaacgtgatcagaaccgccaagtacaacttctacagcttcctgcccctgaacctgtacgagcagttccacagagtgagcaacctgttcttcctgatcatcatcatcctgcagagcatccccgacatcagcaccctgccctggttcagcctgagcacccccatggtgtgcctgctgttcatcagagccaccagagacctggtggacgacatgggcagacacaagagcgacagagccatcaacaacagaccctgccagatcctgatgggcaagagcttcaagcagaagaagtggcaggacctgtgcgtgggcgacgtggtgtgcctgagaaaggacaacatcgtgcccgccgacatgctgctgctggccagcaccgagcccagcagcctgtgctacgtggagaccgtggacatcgacggcgagaccaacctgaagttcagacaggccctgatggtgacccacaaggagctggccaccatcaagaagatggccagcttccagggcaccgtgacctgcgaggcccccaacagcagaatgcaccacttcgtgggctgcctggagtggaacgacaagaagtacagcctggacatcggcaacctgctgctgagaggctgcagaatcagaaacaccgacacctgctacggcctggtgatctacgccggcttcgacaccaagatcatgaagaactgcggcaagatccacctgaagagaaccaagctggacctgctgatgaacaagctggtggtggtgatcttcatcagcgtggtgctggtgtgcctggtgctggccttcggcttcggcttcagcgtgaaggagttcaaggaccaccactactacctgagcggcgtgcacggcagcagcgtggccgccgagagcttcttcgtgttctggagcttcctgatcctgctgagcgtgaccatccccatgagcatgttcatcctgagcgagttcatctacctgggcaacagcgtgttcatcgactgggacgtgcagatgtactacaagccccaggacgtgcccgccaaggccagaagcaccagcctgaacgaccacctgggccaggtggagtacatcttcagcgacaagaccggcaccctgacccagaacatcctgaccttcaacaagtgctgcatcagcggcagagtgtacggcgccgcccccacccccgagctgcccgccggcagcagcatcttcaagggcctgagagtgcccgagaaccagagccacgtgtggccccacgcccagcacctgagacccaacctgaaccagggcaccgtggccagatggcccggcttcctgtggagaggccccggcaagttcttcttcttcctgagacagagcctgaccctgagcacccaggccggcatgcagtggtgcaacctgggcagcctgcagagccccccccccagattcaagagattcagctggctgagcctgcccagcagctgggactacagacacctgcccccccacctgatcttcctgtacttctag

SEQ ID NO: 73559 - DNA, 3792 bp, synthetic construct
  misc_feature 1..3792: note = Description of Artificial Sequence: Synthetic coding sequence
  source 1..3792: mol_type = other DNA
atgggcgacagccccggcagaggcgcccccgagagaagacacaaggcccagcccggcagagccagaaagtacgagtggagacccgagggccccaccagcatgggcagcctgggccagagagaggacctgcaggacgaggacagaaacagcgccttcacctggaaggtgcaggccaacaacagagcctacaacggccagttcaaggagaaggtgatcctgtgctggcagagaaagaagtacaagaccaacgtgatcagaaccgccaagtacaacttctacagcttcctgcccctgaacctgtacgagcagttccacagagtgagcaacctgttcttcctgatcatcatcatcctgcagagcatccccgacatcagcaccctgccctggttcagcctgagcacccccatggtgtgcctgctgttcatcagagccaccagagacctggtggacgacatgggcagacacaagagcgacagagccatcaacaacagaccctgccagatcctgatgggcaagagcttcaagcagaagaagtggcaggacctgtgcgtgggcgacgtggtgtgcctgagaaaggacaacatcgtgcccgccgacatgctgctgctggccagcaccgagcccagcagcctgtgctacgtggagaccgtggacatcgacggcgagaccaacctgaagttcagacaggccctgatggtgacccacaaggagctggccaccatcaagaagatggccagcttccagggcaccgtgacctgcgaggcccccaacagcagaatgcaccacttcgtgggctgcctggagtggaacgacaagaagtacagcctggacatcggcaacctgctgctgagaggctgcagaatcagaaacaccgacacctgctacggcctggtgatctacgccgacggctacatgttcgtgggcttcgacaccaagatcatgaagaactgcggcaagatccacctgaagagaaccaagctggacctgctgatgaacaagctggtggtggtgatcttcatcagcgtggtgctggtgtgcctggtgctggccttcggcttcggcttcagcgtgaaggagttcaaggaccaccactactacctgagcggcgtgcacggcagcagcgtggccgccgagagcttcttcgtgttctggagcttcctgatcctgctgagcgtgaccatccccatgagcatgttcatcctgagcgagttcatctacctgggcaacagcgtgttcatcgactgggacgtgcagatgtactacaagccccaggacgtgcccgccaaggccagaagcaccagcctgaacgaccacctgggccaggtggagtacatcttcagcgacaagaccggcaccctgacccagaacatcctgaccttcaacaagtgctgcatcagcggcagagtgtacggccccgacagcgaggccaccaccagacccaaggagaacccctacctgtggaacaagttcgccgacggcaagctgctgttccacaacgccgccctgctgcacctggtgagaaccaacggcgacgaggccgtgagagagttctggagactgctggccatctgccacaccgtgatggtgagagagagccccagagagagacccgaccagctgctgtaccaggccgccagccccgacgagggcgccctggtgaccgccgccagaaacttcggctacgtgttcctgagcagaacccaggacaccgtgaccatcatggagctgggcgaggagagagtgtaccaggtgctggccatcatggacttcaacagcaccagaaagagaatgagcgtgctggtgagaaagcccgagggcgccatctgcctgtacaccaagggcgccgacaccgtgatcttcgagagactgcacagaagaggcgccatggagttcgccaccgaggaggccctggccgccttcgcccaggagaccctgagaaccctgtgcctggcctacagagaggtggccgaggacatctacgaggactggcagcagagacaccaggaggccagcctgctgctgcagaacagagcccaggccctgcagcaggtgtacaacgagatggagcaggacctgagactgctgggcgccaccgccatcgaggacagactgcaggacggcgtgcccgagaccatcaagtgcctgaagaagagcaacatcaagatctgggtgctgaccggcgacaagcaggagaccgccgtgaacatcggcttcgcctgcgagctgctgagcgagaacatgctgatcctggaggagaaggagatcagcagaatcctggagacctactgggagaacagcaacaacctgctgaccagagagagcctgagccaggtgaagctggccctggtgatcaacggcgacttcctggacaagctgctggtgagcctgagaaaggagcccagagccctggcccagaacgtgaacatggacgaggcctggcaggagctgggccagagcagaagagacttcctgtacgccagaagactgagcctgctgtgcagaagattcggcctgcccctggccgccccccccgcccaggacagcagagccagaagaagcagcgaggtgctgcaggagagagccttcgtggacctggccagcaagtgccaggccgtgatctgctgcagagtgacccccaagcagaaggccctgatcgtggccctggtgaagaagtaccaccaggtggtgaccctggccatcggcgacggcgccaacgacatcaacatgatcaagaccgccgacgtgggcgtgggcctggccggccaggagggcatgcaggccgtgcagaacagcgacttcgtgctgggccagttctgcttcctgcagagactgctgctggtgcacggcagatggagctacgtgagaatctgcaagttcctgagatacttcttctacaagagcatggccagcatgatggtgcaggtgtggttcgcctgctacaacggcttcaccggccagcccctgtacgagggctggttcctggccctgttcaacctgctgtacagcaccctgcccgtgctgtacatcggcctgttcgagcaggacgtgagcgccgagcagagcctggagaagcccgagctgtacgtggtgggccagaaggacgagctgttcaactactgggtgttcgtgcaggccatcgcccacggcgtgaccaccagcctggtgaacttcttcatgaccctgtggatcagcagagacaccgccggccccgccagcttcagcgaccaccagagcttcgccgtggtggtggccctgagctgcctgctgagcatcaccatggaggtgatcctgatcatcaagtactggaccgccctgtgcgtggccaccatcctgctgagcctgggcttctacgccatcatgaccaccaccacccagagcttctggctgttcagagtgagccccaccaccttccccttcctgtacgccgacctgagcgtgatgagcagccccagcatcctgctggtggtgctgctgagcgtgagcatcaacaccttccccgtgctggccctgagagtgatcttccccgccctgaaggagctgagagccaaggaggagaaggtggaggagggccccagcgaggagatcttcaccatggagcccctgccccacgtgcacagagagagcagagccagaagaagcagctacgccttcagccacagagagggctacgccaacctgatcacccagggcaccatcctgagaagaggccccggcgtgagcagcgacatcgccagcgagagcctggaccccagcgacgaggaggccgccagcagccccaaggagagccagtag

SEQ ID NO: 73560 - DNA, 3933 bp, synthetic construct
  misc_feature 1..3933: note = Description of Artificial Sequence: Synthetic coding sequence
  source 1..3933: mol_type = other DNA
atgggcaccggccccgcccagacccccagaagcaccagagccggccccgagcccagccccgccccccccggccccggcgacaccggcgacagcgacgtgacccaggagggcagcggccccgccggcatcagaggcggcgagaccgtgatcagagccggcatgggcgacagccccggcagaggcgcccccgagagaagacacaaggcccagcccggcagagccagaaagtacgagtggagacccgagggccccaccagcatgggcagcctgggccagagagaggacctgcaggacgaggacagaaacagcgccttcacctggaaggtgcaggccaacaacagagcctacaacggccagttcaaggagaaggtgatcctgtgctggcagagaaagaagtacaagaccaacgtgatcagaaccgccaagtacaacttctacagcttcctgcccctgaacctgtacgagcagttccacagagtgagcaacctgttcttcctgatcatcatcatcctgcagagcatccccgacatcagcaccctgccctggttcagcctgagcacccccatggtgtgcctgctgttcatcagagccaccagagacctggtggacgacatgggcagacacaagagcgacagagccatcaacaacagaccctgccagatcctgatgggcaagagcttcaagcagaagaagtggcaggacctgtgcgtgggcgacgtggtgtgcctgagaaaggacaacatcgtgcccgccgacatgctgctgctggccagcaccgagcccagcagcctgtgctacgtggagaccgtggacatcgacggcgagaccaacctgaagttcagacaggccctgatggtgacccacaaggagctggccaccatcaagaagatggccagcttccagggcaccgtgacctgcgaggcccccaacagcagaatgcaccacttcgtgggctgcctggagtggaacgacaagaagtacagcctggacatcggcaacctgctgctgagaggctgcagaatcagaaacaccgacacctgctacggcctggtgatctacgccggcttcgacaccaagatcatgaagaactgcggcaagatccacctgaagagaaccaagctggacctgctgatgaacaagctggtggtggtgatcttcatcagcgtggtgctggtgtgcctggtgctggccttcggcttcggcttcagcgtgaaggagttcaaggaccaccactactacctgagcggcgtgcacggcagcagcgtggccgccgagagcttcttcgtgttctggagcttcctgatcctgctgagcgtgaccatccccatgagcatgttcatcctgagcgagttcatctacctgggcaacagcgtgttcatcgactgggacgtgcagatgtactacaagccccaggacgtgcccgccaaggccagaagcaccagcctgaacgaccacctgggccaggtggagtacatcttcagcgacaagaccggcaccctgacccagaacatcctgaccttcaacaagtgctgcatcagcggcagagtgtacggccccgacagcgaggccaccaccagacccaaggagaacccctacctgtggaacaagttcgccgacggcaagctgctgttccacaacgccgccctgctgcacctggtgagaaccaacggcgacgaggccgtgagagagttctggagactgctggccatctgccacaccgtgatggtgagagagagccccagagagagacccgaccagctgctgtaccaggccgccagccccgacgagggcgccctggtgaccgccgccagaaacttcggctacgtgttcctgagcagaacccaggacaccgtgaccatcatggagctgggcgaggagagagtgtaccaggtgctggccatcatggacttcaacagcaccagaaagagaatgagcgtgctggtgagaaagcccgagggcgccatctgcctgtacaccaagggcgccgacaccgtgatcttcgagagactgcacagaagaggcgccatggagttcgccaccgaggaggccctggccgccttcgcccaggagaccctgagaaccctgtgcctggcctacagagaggtggccgaggacatctacgaggactggcagcagagacaccaggaggccagcctgctgctgcagaacagagcccaggccctgcagcaggtgtacaacgagatggagcaggacctgagactgctgggcgccaccgccatcgaggacagactgcaggacggcgtgcccgagaccatcaagtgcctgaagaagagcaacatcaagatctgggtgctgaccggcgacaagcaggagaccgccgtgaacatcggcttcgcctgcgagctgctgagcgagaacatgctgatcctggaggagaaggagatcagcagaatcctggagacctactgggagaacagcaacaacctgctgaccagagagagcctgagccaggtgaagctggccctggtgatcaacggcgacttcctggacaagctgctggtgagcctgagaaaggagcccagagccctggcccagaacgtgaacatggacgaggcctggcaggagctgggccagagcagaagagacttcctgtacgccagaagactgagcctgctgtgcagaagattcggcctgcccctggccgccccccccgcccaggacagcagagccagaagaagcagcgaggtgctgcaggagagagccttcgtggacctggccagcaagtgccaggccgtgatctgctgcagagtgacccccaagcagaaggccctgatcgtggccctggtgaagaagtaccaccaggtggtgaccctggccatcggcgacggcgccaacgacatcaacatgatcaagaccgccgacgtgggcgtgggcctggccggccaggagggcatgcaggccgtgcagaacagcgacttcgtgctgggccagttctgcttcctgcagagactgctgctggtgcacggcagatggagctacgtgagaatctgcaagttcctgagatacttcttctacaagagcatggccagcatgatggtgcaggtgtggttcgcctgctacaacggcttcaccggccagcccctgtacgagggctggttcctggccctgttcaacctgctgtacagcaccctgcccgtgctgtacatcggcctgttcgagcaggacgtgagcgccgagcagagcctggagaagcccgagctgtacgtggtgggccagaaggacgagctgttcaactactgggtgttcgtgcaggccatcgcccacggcgtgaccaccagcctggtgaacttcttcatgaccctgtggatcagcagagacaccgccggccccgccagcttcagcgaccaccagagcttcgccgtggtggtggccctgagctgcctgctgagcatcaccatggaggtgatcctgatcatcaagtactggaccgccctgtgcgtggccaccatcctgctgagcctgggcttctacgccatcatgaccaccaccacccagagcttctggctgttcagagtgagccccaccaccttccccttcctgtacgccgacctgagcgtgatgagcagccccagcatcctgctggtggtgctgctgagcgtgagcatcaacaccttccccgtgctggccctgagagtgatcttccccgccctgaaggagctgagagccaaggaggagaaggtggaggagggccccagcgaggagatcttcaccatggagcccctgccccacgtgcacagagagagcagagccagaagaagcagctacgccttcagccacagagagggctacgccaacctgatcacccagggcaccatcctgagaagaggccccggcgtgagcagcgacatcgccagcgagagcctggaccccagcgacgaggaggccgccagcagccccaaggagagccagtag

SEQ ID NO: 73561 - DNA, 3006 bp, synthetic construct
  misc_feature 1..3006: note = Description of Artificial Sequence: Synthetic coding sequence
  source 1..3006: mol_type = other DNA
atggaggccgcccacgccaagaccaccgaggagtgcctggcctacttcggcgtgagcgagaccaccggcctgacccccgaccaggtgaagagaaacctggagaagtacggcctgaacgagctgcccgccgaggagggcaagaccctgtgggagctggtgatcgagcagttcgaggacctgctggtgagaatcctgctgctggccgcctgcatcagcttcgtgctggcctggttcgaggagggcgaggagaccatcaccgccttcgtggagcccttcgtgatcctgctgatcctgatcgccaacgccatcgtgggcgtgtggcaggagagaaacgccgagaacgccatcgaggccctgaaggagtacgagcccgagatgggcaaggtgtacagagccgacagaaagagcgtgcagagaatcaaggccagagacatcgtgcccggcgacatcgtggaggtggccgtgggcgacaaggtgcccgccgacatcagaatcctggccatcaagagcaccaccctgagagtggaccagagcatcctgaccggcgagagcgtgagcgtgatcaagcacaccgagcccgtgcccgaccccagagccgtgaaccaggacaagaagaacatgctgttcagcggcaccaacatcgccgccggcaaggccctgggcatcgtggccaccaccggcgtgggcaccgagatcggcaagatcagagaccagatggccgccaccgagcaggacaagacccccctgcagcagaagctggacgagttcggcgagcagctgagcaaggtgatcagcctgatctgcgtggccgtgtggctgatcaacatcggccacttcaacgaccccgtgcacggcggcagctggttcagaggcgccatctactacttcaagatcgccgtggccctggccgtggccgccatccccgagggcctgcccgccgtgatcaccacctgcctggccctgggcaccagaagaatggccaagaagaacgccatcgtgagaagcctgcccagcgtggagaccctgggctgcaccagcgtgatctgcagcgacaagaccggcaccctgaccaccaaccagatgagcgtgtgcaagatgttcatcatcgacaaggtggacggcgacatctgcctgctgaacgagttcagcatcaccggcagcacctacgcccccgagggcgaggtgctgaagaacgacaagcccgtgagacccggccagtacgacggcctggtggagctggccaccatctgcgccctgtgcaacgacagcagcctggacttcaacgaggccaagggcgtgtacgagaaggtgggcgaggccaccgagaccgccctgaccaccctggtggagaagatgaacgtgttcaacaccgacgtgagaagcctgagcaaggtggagagagccaacgcctgcaacagcgtgatcagacagctgatgaagaaggagttcaccctggagttcagcagagacagaaagagcatgagcgtgtactgcagccccgccaagagcagcagagccgccgtgggcaacaagatgttcgtgaagggcgcccccgagggcgtgatcgacagatgcaactacgtgagagtgggcaccaccagagtgcccctgaccggccccgtgaaggagaagatcatggccgtgatcaaggagtggggcaccggcagagacaccctgagatgcctggccctggccaccagagacaccccccccaagagagaggagatggtgctggacgacagcgccagattcctggagtacgagaccgacctgaccttcgtgggcgtggtgggcatgctggacccccccagaaaggaggtgaccggcagcatccagctgtgcagagacgccggcatcagagtgatcatgatcaccggcgacaacaagggcaccgccatcgccatctgcagaagaatcggcatcttcggcgagaacgaggaggtggccgacagagcctacaccggcagagagttcgacgacctgcccctggccgagcagagagaggcctgcagaagagcctgctgcttcgccagagtggagcccagccacaagagcaagatcgtggagtacctgcagagctacgacgagatcaccgccatgaccggcgacggcgtgaacgacgcccccgccctgaagaaggccgagatcggcatcgccatgggcagcggcaccgccgtggccaagaccgccagcgagatggtgctggccgacgacaacttcagcaccatcgtggccgccgtggaggagggcagagccatctacaacaacatgaagcagttcatcagatacctgatcagcagcaacgtgggcgaggtggtgtgcatcttcctgaccgccgccctgggcctgcccgaggccctgatccccgtgcagctgctgtgggtgaacctggtgaccgacggcctgcccgccaccgccctgggcttcaacccccccgacctggacatcatggacagaccccccagaagccccaaggagcccctgatcagcggctggctgttcttcagatacatggccatcggcggctacgtgggcgccgccaccgtgggcgccgccgcctggtggttcctgtacgccgaggacggcccccacgtgaactacagccagctgacccacttcatgcagtgcaccgaggacaacacccacttcgagggcatcgactgcgaggtgttcgaggcccccgagcccatgaccatggccctgagcgtgctggtgaccatcgagatgtgcaacgccctgaacagcctgagcgagaaccagagcctgctgagaatgcccccctgggtgaacatctggctgctgggcagcatctgcctgagcatgagcctgcacttcctgatcctgtacgtggaccccctgcccatgatcttcaagctgagagccctggacctgacccagtggctgatggtgctgaagatcagcctgcccgtgatcggcctggacgagatcctgaagttcgtggccagaaactacctggaggaccccgaggacgagagaagaaagtag

SEQ ID NO: 73562 - DNA, 2535 bp, synthetic construct
  misc_feature 1..2535: note = Description of Artificial Sequence: Synthetic coding sequence
  source 1..2535: mol_type = other DNA
aagagaagaaaccccggcagacaggccgtgggccacaccgaggaggacccccccagagtgggcaccccctggaaggagcacaccggccccggcccccaggagggcagcaccatggaggccgcccacgccaagaccaccgaggagtgcctggcctacttcggcgtgagcgagaccaccggcctgacccccgaccaggtgaagagaaacctggagaagtacggcctgaacgagctgcccgccgaggagggcaagaccctgtgggagctggtgatcgagcagttcgaggacctgctggtgagaatcctgctgctggccgcctgcatcagcttcgtgctggcctggttcgaggagggcgaggagaccatcaccgccttcgtggagcccttcgtgatcctgctgatcctgatcgccaacgccatcgtgggcgtgtggcaggagagaaacgccgagaacgccatcgaggccctgaaggagtacgagcccgagatgggcaaggtgtacagagccgacagaaagagcgtgcagagaatcaaggccagagacatcgtgcccggcgacatcgtggaggtggccgtgggcgacaaggtgcccgccgacatcagaatcctggccatcaagagcaccaccctgagagtggaccagagcatcctgaccggcgagagcgtgagcgtgatcaagcacaccgagcccgtgcccgaccccagagccgtgaaccaggacaagaagaacatgctgttcagcggcaccaacatcgccgccggcaaggccctgggcatcgtggccaccaccggcgtgggcaccgagatcggcaagatcagagaccagatggccgccaccgagcaggacaagacccccctgcagcagaagctggacgagttcggcgagcagctgagcaaggtgatcagcctgatctgcgtggccgtgtggctgatcaacatcggccacttcaacgaccccgtgcacggcggcagctggttcagaggcgccatctactacttcaagatcgccgtggccctggccgtggccgccatccccgagggcctgcccgccgtgatcaccacctgcctggccctgggcaccagaagaatggccaagaagaacgccatcgtgagaagcctgcccagcgtggagaccctgggctgcaccagcgtgatctgcagcgacaagaccggcaccctgaccaccaaccagatgagcgtgtgcaagatgttcatcatcgacaaggtggacggcgacatctgcctgctgaacgagttcagcatcaccggcagcacctacgcccccgagggcgaggtgctgaagaacgacaagcccgtgagacccggccagtacgacggcctggtggagctggccaccatctgcgccctgtgcaacgacagcagcctggacttcaacgaggccaagggcgtgtacgagaaggtgggcgaggccaccgagaccgccctgaccaccctggtggagaagatgaacgtgttcaacaccgacgtgagaagcctgagcaaggtggagagagccaacgcctgcaacagcgtgatcagacagctgatgaagaaggagttcaccctggagttcagcagagacagaaagagcatgagcgtgtactgcagccccgccaagagcagcagagccgccgtgggcaacaagatgttcgtgaagggcgcccccgagggcgtgatcgacagatgcaactacgtgagagtgggcaccaccagagtgcccctgaccggccccgtgaaggagaagatcatggccgtgatcaaggagtggggcaccggcagagacaccctgagatgcctggccctggccaccagagacaccccccccaagagagaggagatggtgctggacgacagcgccagattcctggagtacgagaccgacctgaccttcgtgggcgtggtgggcatgctggacccccccagaaaggaggtgaccggcagcatccagctgtgcagagacgccggcatcagagtgatcatgatcaccggcgacaacaagggcaccgccatcgccatctgcagaagaatcggcatcttcggcgagaacgaggaggtggccgacagagcctacaccggcagagagttcgacgacctgcccctggccgagcagagagaggcctgcagaagagcctgctgcttcgccagagtggagcccagccacaagagcaagatcgtggagtacctgcagagctacgacgagatcaccgccatgaccggcgacggcgtgaacgacgcccccgccctgaagaaggccgagatcggcatcgccatgggcagcggcaccgccgtggccaagaccgccagcgagatggtgctggccgacgacaacttcagcaccatcgtggccgccgtggaggagggcagagccatctacaacaacatgaagcagttcatcagatacctgatcagcagcaacgtgggcgaggtggtgtgcatcttcctgaccgccgccctgggcctgcccgaggccctgatccccgtgcagctgctgtgggtgaacctggtgaccgactgcgccgagctgctgatctactag

SEQ ID NO: 73563 - DNA, 2985 bp, synthetic construct
  misc_feature 1..2985: note = Description of Artificial Sequence: Synthetic coding sequence
  source 1..2985: mol_type = other DNA
atggaggccgcccacgccaagaccaccgaggagtgcctggcctacttcggcgtgagcgagaccaccggcctgacccccgaccaggtgaagagaaacctggagaagtacggcctgaacgagctgcccgccgaggagggcaagaccctgtgggagctggtgatcgagcagttcgaggacctgctggtgagaatcctgctgctggccgcctgcatcagcttcgtgctggcctggttcgaggagggcgaggagaccatcaccgccttcgtggagcccttcgtgatcctgctgatcctgatcgccaacgccatcgtgggcgtgtggcaggagagaaacgccgagaacgccatcgaggccctgaaggagtacgagcccgagatgggcaaggtgtacagagccgacagaaagagcgtgcagagaatcaaggccagagacatcgtgcccggcgacatcgtggaggtggccgtgggcgacaaggtgcccgccgacatcagaatcctggccatcaagagcaccaccctgagagtggaccagagcatcctgaccggcgagagcgtgagcgtgatcaagcacaccgagcccgtgcccgaccccagagccgtgaaccaggacaagaagaacatgctgttcagcggcaccaacatcgccgccggcaaggccctgggcatcgtggccaccaccggcgtgggcaccgagatcggcaagatcagagaccagatggccgccaccgagcaggacaagacccccctgcagcagaagctggacgagttcggcgagcagctgagcaaggtgatcagcctgatctgcgtggccgtgtggctgatcaacatcggccacttcaacgaccccgtgcacggcggcagctggttcagaggcgccatctactacttcaagatcgccgtggccctggccgtggccgccatccccgagggcctgcccgccgtgatcaccacctgcctggccctgggcaccagaagaatggccaagaagaacgccatcgtgagaagcctgcccagcgtggagaccctgggctgcaccagcgtgatctgcagcgacaagaccggcaccctgaccaccaaccagatgagcgtgtgcaagatgttcatcatcgacaaggtggacggcgacatctgcctgctgaacgagttcagcatcaccggcagcacctacgcccccgagggcgaggtgctgaagaacgacaagcccgtgagacccggccagtacgacggcctggtggagctggccaccatctgcgccctgtgcaacgacagcagcctggacttcaacgaggccaagggcgtgtacgagaaggtgggcgaggccaccgagaccgccctgaccaccctggtggagaagatgaacgtgttcaacaccgacgtgagaagcctgagcaaggtggagagagccaacgcctgcaacagcgtgatcagacagctgatgaagaaggagttcaccctggagttcagcagagacagaaagagcatgagcgtgtactgcagccccgccaagagcagcagagccgccgtgggcaacaagatgttcgtgaagggcgcccccgagggcgtgatcgacagatgcaactacgtgagagtgggcaccaccagagtgcccctgaccggccccgtgaaggagaagatcatggccgtgatcaaggagtggggcaccggcagagacaccctgagatgcctggccctggccaccagagacaccccccccaagagagaggagatggtgctggacgacagcgccagattcctggagtacgagaccgacctgaccttcgtgggcgtggtgggcatgctggacccccccagaaaggaggtgaccggcagcatccagctgtgcagagacgccggcatcagagtgatcatgatcaccggcgacaacaagggcaccgccatcgccatctgcagaagaatcggcatcttcggcgagaacgaggaggtggccgacagagcctacaccggcagagagttcgacgacctgcccctggccgagcagagagaggcctgcagaagagcctgctgcttcgccagagtggagcccagccacaagagcaagatcgtggagtacctgcagagctacgacgagatcaccgccatgaccggcgacggcgtgaacgacgcccccgccctgaagaaggccgagatcggcatcgccatgggcagcggcaccgccgtggccaagaccgccagcgagatggtgctggccgacgacaacttcagcaccatcgtggccgccgtggaggagggcagagccatctacaacaacatgaagcagttcatcagatacctgatcagcagcaacgtgggcgaggtggtgtgcatcttcctgaccgccgccctgggcctgcccgaggccctgatccccgtgcagctgctgtgggtgaacctggtgaccgacggcctgcccgccaccgccctgggcttcaacccccccgacctggacatcatggacagaccccccagaagccccaaggagcccctgatcagcggctggctgttcttcagatacatggccatcggcggctacgtgggcgccgccaccgtgggcgccgccgcctggtggttcctgtacgccgaggacggcccccacgtgaactacagccagctgacccacttcatgcagtgcaccgaggacaacacccacttcgagggcatcgactgcgaggtgttcgaggcccccgagcccatgaccatggccctgagcgtgctggtgaccatcgagatgtgcaacgccctgaacagcctgagcgagaaccagagcctgctgagaatgcccccctgggtgaacatctggctgctgggcagcatctgcctgagcatgagcctgcacttcctgatcctgtacgtggaccccctgcccatgatcttcaagctgagagccctggacctgacccagtggctgatggtgctgaagatcagcctgcccgtgatcggcctggacgagatcctgaagttcgtggccagaaactacctggagggctag

SEQ ID NO: 73564 - DNA, 2610 bp, synthetic construct
  misc_feature 1..2610: note = Description of Artificial Sequence: Synthetic coding sequence
  source 1..2610: mol_type = other DNA
atgggcaaggtgtacagagccgacagaaagagcgtgcagagaatcaaggccagagacatcgtgcccggcgacatcgtggaggtggccgtgggcgacaaggtgcccgccgacatcagaatcctggccatcaagagcaccaccctgagagtggaccagagcatcctgaccggcgagagcgtgagcgtgatcaagcacaccgagcccgtgcccgaccccagagccgtgaaccaggacaagaagaacatgctgttcagcggcaccaacatcgccgccggcaaggccctgggcatcgtggccaccaccggcgtgggcaccgagatcggcaagatcagagaccagatggccgccaccgagcaggacaagacccccctgcagcagaagctggacgagttcggcgagcagctgagcaaggtgatcagcctgatctgcgtggccgtgtggctgatcaacatcggccacttcaacgaccccgtgcacggcggcagctggttcagaggcgccatctactacttcaagatcgccgtggccctggccgtggccgccatccccgagggcctgcccgccgtgatcaccacctgcctggccctgggcaccagaagaatggccaagaagaacgccatcgtgagaagcctgcccagcgtggagaccctgggctgcaccagcgtgatctgcagcgacaagaccggcaccctgaccaccaaccagatgagcgtgtgcaagatgttcatcatcgacaaggtggacggcgacatctgcctgctgaacgagttcagcatcaccggcagcacctacgcccccgagggcgaggtgctgaagaacgacaagcccgtgagacccggccagtacgacggcctggtggagctggccaccatctgcgccctgtgcaacgacagcagcctggacttcaacgaggccaagggcgtgtacgagaaggtgggcgaggccaccgagaccgccctgaccaccctggtggagaagatgaacgtgttcaacaccgacgtgagaagcctgagcaaggtggagagagccaacgcctgcaacagcgtgatcagacagctgatgaagaaggagttcaccctggagttcagcagagacagaaagagcatgagcgtgtactgcagccccgccaagagcagcagagccgccgtgggcaacaagatgttcgtgaagggcgcccccgagggcgtgatcgacagatgcaactacgtgagagtgggcaccaccagagtgcccctgaccggccccgtgaaggagaagatcatggccgtgatcaaggagtggggcaccggcagagacaccctgagatgcctggccctggccaccagagacaccccccccaagagagaggagatggtgctggacgacagcgccagattcctggagtacgagaccgacctgaccttcgtgggcgtggtgggcatgctggacccccccagaaaggaggtgaccggcagcatccagctgtgcagagacgccggcatcagagtgatcatgatcaccggcgacaacaagggcaccgccatcgccatctgcagaagaatcggcatcttcggcgagaacgaggaggtggccgacagagcctacaccggcagagagttcgacgacctgcccctggccgagcagagagaggcctgcagaagagcctgctgcttcgccagagtggagcccagccacaagagcaagatcgtggagtacctgcagagctacgacgagatcaccgccatgaccggcgacggcgtgaacgacgcccccgccctgaagaaggccgagatcggcatcgccatgggcagcggcaccgccgtggccaagaccgccagcgagatggtgctggccgacgacaacttcagcaccatcgtggccgccgtggaggagggcagagccatctacaacaacatgaagcagttcatcagatacctgatcagcagcaacgtgggcgaggtggtgtgcatcttcctgaccgccgccctgggcctgcccgaggccctgatccccgtgcagctgctgtgggtgaacctggtgaccgacggcctgcccgccaccgccctgggcttcaacccccccgacctggacatcatggacagaccccccagaagccccaaggagcccctgatcagcggctggctgttcttcagatacatggccatcggcggctacgtgggcgccgccaccgtgggcgccgccgcctggtggttcctgtacgccgaggacggcccccacgtgaactacagccagctgacccacttcatgcagtgcaccgaggacaacacccacttcgagggcatcgactgcgaggtgttcgaggcccccgagcccatgaccatggccctgagcgtgctggtgaccatcgagatgtgcaacgccctgaacagcctgagcgagaaccagagcctgctgagaatgcccccctgggtgaacatctggctgctgggcagcatctgcctgagcatgagcctgcacttcctgatcctgtacgtggaccccctgcccatgatcttcaagctgagagccctggacctgacccagtggctgatggtgctgaagatcagcctgcccgtgatcggcctggacgagatcctgaagttcgtggccagaaactacctggagggctag

SEQ ID NO: 73565 - DNA, 2994 bp, synthetic construct
  misc_feature 1..2994: note = Description of Artificial Sequence: Synthetic coding sequence
  source 1..2994: mol_type = other DNA
atggagaacgcccacaccaagaccgtggaggaggtgctgggccacttcggcgtgaacgagagcaccggcctgagcctggagcaggtgaagaagctgaaggagagatggggcagcaacgagctgcccgccgaggagggcaagaccctgctggagctggtgatcgagcagttcgaggacctgctggtgagaatcctgctgctggccgcctgcatcagcttcgtgctggcctggttcgaggagggcgaggagaccatcaccgccttcgtggagcccttcgtgatcctgctgatcctggtggccaacgccatcgtgggcgtgtggcaggagagaaacgccgagaacgccatcgaggccctgaaggagtacgagcccgagatgggcaaggtgtacagacaggacagaaagagcgtgcagagaatcaaggccaaggacatcgtgcccggcgacatcgtggagatcgccgtgggcgacaaggtgcccgccgacatcagactgaccagcatcaagagcaccaccctgagagtggaccagagcatcctgaccggcgagagcgtgagcgtgatcaagcacaccgaccccgtgcccgaccccagagccgtgaaccaggacaagaagaacatgctgttcagcggcaccaacatcgccgccggcaaggccatgggcgtggtggtggccaccggcgtgaacaccgagatcggcaagatcagagacgagatggtggccaccgagcaggagagaacccccctgcagcagaagctggacgagttcggcgagcagctgagcaaggtgatcagcctgatctgcatcgccgtgtggatcatcaacatcggccacttcaacgaccccgtgcacggcggcagctggatcagaggcgccatctactacttcaagatcgccgtggccctggccgtggccgccatccccgagggcctgcccgccgtgatcaccacctgcctggccctgggcaccagaagaatggccaagaagaacgccatcgtgagaagcctgcccagcgtggagaccctgggctgcaccagcgtgatctgcagcgacaagaccggcaccctgaccaccaaccagatgagcgtgtgcagaatgttcatcctggacagagtggagggcgacacctgcagcctgaacgagttcaccatcaccggcagcacctacgcccccatcggcgaggtgcacaaggacgacaagcccgtgaactgccaccagtacgacggcctggtggagctggccaccatctgcgccctgtgcaacgacagcgccctggactacaacgaggccaagggcgtgtacgagaaggtgggcgaggccaccgagaccgccctgacctgcctggtggagaagatgaacgtgttcgacaccgagctgaagggcctgagcaagatcgagagagccaacgcctgcaacagcgtgatcaagcagctgatgaagaaggagttcaccctggagttcagcagagacagaaagagcatgagcgtgtactgcacccccaacaagcccagcagaaccagcatgagcaagatgttcgtgaagggcgcccccgagggcgtgatcgacagatgcacccacatcagagtgggcagcaccaaggtgcccatgaccagcggcgtgaagcagaagatcatgagcgtgatcagagagtggggcagcggcagcgacaccctgagatgcctggccctggccacccacgacaaccccctgagaagagaggagatgcacctggaggacagcgccaacttcatcaagtacgagaccaacctgaccttcgtgggctgcgtgggcatgctggacccccccagaatcgaggtggccagcagcgtgaagctgtgcagacaggccggcatcagagtgatcatgatcaccggcgacaacaagggcaccgccgtggccatctgcagaagaatcggcatcttcggccaggacgaggacgtgaccagcaaggccttcaccggcagagagttcgacgagctgaaccccagcgcccagagagacgcctgcctgaacgccagatgcttcgccagagtggagcccagccacaagagcaagatcgtggagttcctgcagagcttcgacgagatcaccgccatgaccggcgacggcgtgaacgacgcccccgccctgaagaaggccgagatcggcatcgccatgggcagcggcaccgccgtggccaagaccgccagcgagatggtgctggccgacgacaacttcagcaccatcgtggccgccgtggaggagggcagagccatctacaacaacatgaagcagttcatcagatacctgatcagcagcaacgtgggcgaggtggtgtgcatcttcctgaccgccgccctgggcttccccgaggccctgatccccgtgcagctgctgtgggtgaacctggtgaccgacggcctgcccgccaccgccctgggcttcaacccccccgacctggacatcatgaacaagccccccagaaaccccaaggagcccctgatcagcggctggctgttcttcagatacctggccatcggctgctacgtgggcgccgccaccgtgggcgccgccgcctggtggttcatcgccgccgacggcggccccagagtgagcttctaccagctgagccacttcctgcagtgcaaggaggacaaccccgacttcgagggcgtggactgcgccatcttcgagagcccctaccccatgaccatggccctgagcgtgctggtgaccatcgagatgtgcaacgccctgaacagcctgagcgagaaccagagcctgctgagaatgcccccctgggagaacatctggctggtgggcagcatctgcctgagcatgagcctgcacttcctgatcctgtacgtggagcccctgcccctgatcttccagatcacccccctgaacgtgacccagtggctgatggtgctgaagatcagcctgcccgtgatcctgatggacgagaccctgaagttcgtggccagaaactacctggagcccgccatcctggagtag

SEQ ID NO: 73566 - DNA, 3048 bp, synthetic construct
  misc_feature 1..3048: note = Description of Artificial Sequence: Synthetic coding sequence
  source 1..3048: mol_type = other DNA
atggagaacgcccacaccaagaccgtggaggaggtgctgggccacttcggcgtgaacgagagcaccggcctgagcctggagcaggtgaagaagctgaaggagagatggggcagcaacgagctgcccgccgaggagggcaagaccctgctggagctggtgatcgagcagttcgaggacctgctggtgagaatcctgctgctggccgcctgcatcagcttcgtgctggcctggttcgaggagggcgaggagaccatcaccgccttcgtggagcccttcgtgatcctgctgatcctggtggccaacgccatcgtgggcgtgtggcaggagagaaacgccgagaacgccatcgaggccctgaaggagtacgagcccgagatgggcaaggtgtacagacaggacagaaagagcgtgcagagaatcaaggccaaggacatcgtgcccggcgacatcgtggagatcgccggcgagagcgtgagcgtgatcaagcacaccgaccccgtgcccgaccccagagccgtgaaccaggacaagaagaacatgctgttcagcggcaccaacatcgccgccggcaaggccatgggcgtggtggtggccaccggcgtgaacaccgagatcggcaagatcagagacgagatggtggccaccgagcaggagagaacccccctgcagcagaagctggacgagttcggcgagcagctgagcaaggtgatcagcctgatctgcatcgccgtgtggatcatcaacatcggccacttcaacgaccccgtgcacggcggcagctggatcagaggcgccatctactacttcaagatcgccgtggccctggccgtggccgccatccccgagggcctgcccgccgtgatcaccacctgcctggccctgggcaccagaagaatggccaagaagaacgccatcgtgagaagcctgcccagcgtggagaccctgggctgcaccagcgtgatctgcagcgacaagaccggcaccctgaccaccaaccagatgagcgtgtgcagaatgttcatcctggacagagtggagggcgacacctgcagcctgaacgagttcaccatcaccggcagcacctacgcccccatcggcgaggtgcacaaggacgacaagcccgtgaactgccaccagtacgacggcctggtggagctggccaccatctgcgccctgtgcaacgacagcgccctggactacaacgaggccaagggcgtgtacgagaaggtgggcgaggccaccgagaccgccctgacctgcctggtggagaagatgaacgtgttcgacaccgagctgaagggcctgagcaagatcgagagagccaacgcctgcaacagcgtgatcaagcagctgatgaagaaggagttcaccctggagttcagcagagacagaaagagcatgagcgtgtactgcacccccaacaagcccagcagaaccagcatgagcaagatgttcgtgaagggcgcccccgagggcgtgatcgacagatgcacccacatcagagtgggcagcaccaaggtgcccatgaccagcggcgtgaagcagaagatcatgagcgtgatcagagagtggggcagcggcagcgacaccctgagatgcctggccctggccacccacgacaaccccctgagaagagaggagatgcacctggaggacagcgccaacttcatcaagtacgagaccaacctgaccttcgtgggctgcgtgggcatgctggacccccccagaatcgaggtggccagcagcgtgaagctgtgcagacaggccggcatcagagtgatcatgatcaccggcgacaacaagggcaccgccgtggccatctgcagaagaatcggcatcttcggccaggacgaggacgtgaccagcaaggccttcaccggcagagagttcgacgagctgaaccccagcgcccagagagacgcctgcctgaacgccagatgcttcgccagagtggagcccagccacaagagcaagatcgtggagttcctgcagagcttcgacgagatcaccgccatgaccggcgacggcgtgaacgacgcccccgccctgaagaaggccgagatcggcatcgccatgggcagcggcaccgccgtggccaagaccgccagcgagatggtgctggccgacgacaacttcagcaccatcgtggccgccgtggaggagggcagagccatctacaacaacatgaagcagttcatcagatacctgatcagcagcaacgtgggcgaggtggtgtgcatcttcctgaccgccgccctgggcttccccgaggccctgatccccgtgcagctgctgtgggtgaacctggtgaccgacggcctgcccgccaccgccctgggcttcaacccccccgacctggacatcatgaacaagccccccagaaaccccaaggagcccctgatcagcggctggctgttcttcagatacctggccatcggctgctacgtgggcgccgccaccgtgggcgccgccgcctggtggttcatcgccgccgacggcggccccagagtgagcttctaccagctgagccacttcctgcagtgcaaggaggacaaccccgacttcgagggcgtggactgcgccatcttcgagagcccctaccccatgaccatggccctgagcgtgctggtgaccatcgagatgtgcaacgccctgaacagcctgagcgagaaccagagcctgctgagaatgcccccctgggagaacatctggctggtgggcagcatctgcctgagcatgagcctgcacttcctgatcctgtacgtggagcccctgcccctgatcttccagatcacccccctgaacgtgacccagtggctgatggtgctgaagatcagcctgcccgtgatcctgatggacgagaccctgaagttcgtggccagaaactacctggagcccggcaaggagtgcgtgcagcccgccaccaagagctgcagcttcagcgcctgcaccgacggcatcagctggcccttcgtgctgctgatcatgcccctggtgatctgggtgtacagcaccgacaccaacttcagcgacatgttctggagctag

SEQ ID NO: 73567 - DNA, 3129 bp, synthetic construct
  misc_feature 1..3129: note = Description of Artificial Sequence: Synthetic coding sequence
  source 1..3129: mol_type = other DNA
atggagaacgcccacaccaagaccgtggaggaggtgctgggccacttcggcgtgaacgagagcaccggcctgagcctggagcaggtgaagaagctgaaggagagatggggcagcaacgagctgcccgccgaggagggcaagaccctgctggagctggtgatcgagcagttcgaggacctgctggtgagaatcctgctgctggccgcctgcatcagcttcgtgctggcctggttcgaggagggcgaggagaccatcaccgccttcgtggagcccttcgtgatcctgctgatcctggtggccaacgccatcgtgggcgtgtggcaggagagaaacgccgagaacgccatcgaggccctgaaggagtacgagcccgagatgggcaaggtgtacagacaggacagaaagagcgtgcagagaatcaaggccaaggacatcgtgcccggcgacatcgtggagatcgccgtgggcgacaaggtgcccgccgacatcagactgaccagcatcaagagcaccaccctgagagtggaccagagcatcctgaccggcgagagcgtgagcgtgatcaagcacaccgaccccgtgcccgaccccagagccgtgaaccaggacaagaagaacatgctgttcagcggcaccaacatcgccgccggcaaggccatgggcgtggtggtggccaccggcgtgaacaccgagatcggcaagatcagagacgagatggtggccaccgagcaggagagaacccccctgcagcagaagctggacgagttcggcgagcagctgagcaaggtgatcagcctgatctgcatcgccgtgtggatcatcaacatcggccacttcaacgaccccgtgcacggcggcagctggatcagaggcgccatctactacttcaagatcgccgtggccctggccgtggccgccatccccgagggcctgcccgccgtgatcaccacctgcctggccctgggcaccagaagaatggccaagaagaacgccatcgtgagaagcctgcccagcgtggagaccctgggctgcaccagcgtgatctgcagcgacaagaccggcaccctgaccaccaaccagatgagcgtgtgcagaatgttcatcctggacagagtggagggcgacacctgcagcctgaacgagttcaccatcaccggcagcacctacgcccccatcggcgaggtgcacaaggacgacaagcccgtgaactgccaccagtacgacggcctggtggagctggccaccatctgcgccctgtgcaacgacagcgccctggactacaacgaggccaagggcgtgtacgagaaggtgggcgaggccaccgagaccgccctgacctgcctggtggagaagatgaacgtgttcgacaccgagctgaagggcctgagcaagatcgagagagccaacgcctgcaacagcgtgatcaagcagctgatgaagaaggagttcaccctggagttcagcagagacagaaagagcatgagcgtgtactgcacccccaacaagcccagcagaaccagcatgagcaagatgttcgtgaagggcgcccccgagggcgtgatcgacagatgcacccacatcagagtgggcagcaccaaggtgcccatgaccagcggcgtgaagcagaagatcatgagcgtgatcagagagtggggcagcggcagcgacaccctgagatgcctggccctggccacccacgacaaccccctgagaagagaggagatgcacctggaggacagcgccaacttcatcaagtacgagaccaacctgaccttcgtgggctgcgtgggcatgctggacccccccagaatcgaggtggccagcagcgtgaagctgtgcagacaggccggcatcagagtgatcatgatcaccggcgacaacaagggcaccgccgtggccatctgcagaagaatcggcatcttcggccaggacgaggacgtgaccagcaaggccttcaccggcagagagttcgacgagctgaaccccagcgcccagagagacgcctgcctgaacgccagatgcttcgccagagtggagcccagccacaagagcaagatcgtggagttcctgcagagcttcgacgagatcaccgccatgaccggcgacggcgtgaacgacgcccccgccctgaagaaggccgagatcggcatcgccatgggcagcggcaccgccgtggccaagaccgccagcgagatggtgctggccgacgacaacttcagcaccatcgtggccgccgtggaggagggcagagccatctacaacaacatgaagcagttcatcagatacctgatcagcagcaacgtgggcgaggtggtgtgcatcttcctgaccgccgccctgggcttccccgaggccctgatccccgtgcagctgctgtgggtgaacctggtgaccgacggcctgcccgccaccgccctgggcttcaacccccccgacctggacatcatgaacaagccccccagaaaccccaaggagcccctgatcagcggctggctgttcttcagatacctggccatcggctgctacgtgggcgccgccaccgtgggcgccgccgcctggtggttcatcgccgccgacggcggccccagagtgagcttctaccagctgagccacttcctgcagtgcaaggaggacaaccccgacttcgagggcgtggactgcgccatcttcgagagcccctaccccatgaccatggccctgagcgtgctggtgaccatcgagatgtgcaacgccctgaacagcctgagcgagaaccagagcctgctgagaatgcccccctgggagaacatctggctggtgggcagcatctgcctgagcatgagcctgcacttcctgatcctgtacgtggagcccctgcccctgatcttccagatcacccccctgaacgtgacccagtggctgatggtgctgaagatcagcctgcccgtgatcctgatggacgagaccctgaagttcgtggccagaaactacctggagcccggcaaggagtgcgtgcagcccgccaccaagagctgcagcttcagcgcctgcaccgacggcatcagctggcccttcgtgctgctgatcatgcccctggtgatctgggtgtacagcaccgacaccaacttcagcgacatgttctggagctag

SEQ ID NO: 73568 - DNA, 2802 bp, synthetic construct
  misc_feature 1..2802: note = Description of Artificial Sequence: Synthetic coding sequence
  source 1..2802: mol_type = other DNA
tgaaccatcaccgccttcgtggagcccttcgtgatcctgctgatcctggtggccaacgccatcgtgggcgtgtggcaggagagaaacgccgagaacgccatcgaggccctgaaggagtacgagcccgagatgggcaaggtgtacagacaggacagaaagagcgtgcagagaatcaaggccaaggacatcgtgcccggcgacatcgtggagatcgccggcgagagcgtgagcgtgatcaagcacaccgaccccgtgcccgaccccagagccgtgaaccaggacaagaagaacatgctgttcagcggcaccaacatcgccgccggcaaggccatgggcgtggtggtggccaccggcgtgaacaccgagatcggcaagatcagagacgagatggtggccaccgagcaggagagaacccccctgcagcagaagctggacgagttcggcgagcagctgagcaaggtgatcagcctgatctgcatcgccgtgtggatcatcaacatcggccacttcaacgaccccgtgcacggcggcagctggatcagaggcgccatctactacttcaagatcgccgtggccctggccgtggccgccatccccgagggcctgcccgccgtgatcaccacctgcctggccctgggcaccagaagaatggccaagaagaacgccatcgtgagaagcctgcccagcgtggagaccctgggctgcaccagcgtgatctgcagcgacaagaccggcaccctgaccaccaaccagatgagcgtgtgcagaatgttcatcctggacagagtggagggcgacacctgcagcctgaacgagttcaccatcaccggcagcacctacgcccccatcggcgaggtgcacaaggacgacaagcccgtgaactgccaccagtacgacggcctggtggagctggccaccatctgcgccctgtgcaacgacagcgccctggactacaacgaggccaagggcgtgtacgagaaggtgggcgaggccaccgagaccgccctgacctgcctggtggagaagatgaacgtgttcgacaccgagctgaagggcctgagcaagatcgagagagccaacgcctgcaacagcgtgatcaagcagctgatgaagaaggagttcaccctggagttcagcagagacagaaagagcatgagcgtgtactgcacccccaacaagcccagcagaaccagcatgagcaagatgttcgtgaagggcgcccccgagggcgtgatcgacagatgcacccacatcagagtgggcagcaccaaggtgcccatgaccagcggcgtgaagcagaagatcatgagcgtgatcagagagtggggcagcggcagcgacaccctgagatgcctggccctggccacccacgacaaccccctgagaagagaggagatgcacctggaggacagcgccaacttcatcaagtacgagaccaacctgaccttcgtgggctgcgtgggcatgctggacccccccagaatcgaggtggccagcagcgtgaagctgtgcagacaggccggcatcagagtgatcatgatcaccggcgacaacaagggcaccgccgtggccatctgcagaagaatcggcatcttcggccaggacgaggacgtgaccagcaaggccttcaccggcagagagttcgacgagctgaaccccagcgcccagagagacgcctgcctgaacgccagatgcttcgccagagtggagcccagccacaagagcaagatcgtggagttcctgcagagcttcgacgagatcaccgccatgaccggcgacggcgtgaacgacgcccccgccctgaagaaggccgagatcggcatcgccatgggcagcggcaccgccgtggccaagaccgccagcgagatggtgctggccgacgacaacttcagcaccatcgtggccgccgtggaggagggcagagccatctacaacaacatgaagcagttcatcagatacctgatcagcagcaacgtgggcgaggtggtgtgcatcttcctgaccgccgccctgggcttccccgaggccctgatccccgtgcagctgctgtgggtgaacctggtgaccgacggcctgcccgccaccgccctgggcttcaacccccccgacctggacatcatgaacaagccccccagaaaccccaaggagcccctgatcagcggctggctgttcttcagatacctggccatcggctgctacgtgggcgccgccaccgtgggcgccgccgcctggtggttcatcgccgccgacggcggccccagagtgagcttctaccagctgagccacttcctgcagtgcaaggaggacaaccccgacttcgagggcgtggactgcgccatcttcgagagcccctaccccatgaccatggccctgagcgtgctggtgaccatcgagatgtgcaacgccctgaacagcctgagcgagaaccagagcctgctgagaatgcccccctgggagaacatctggctggtgggcagcatctgcctgagcatgagcctgcacttcctgatcctgtacgtggagcccctgcccctgatcttccagatcacccccctgaacgtgacccagtggctgatggtgctgaagatcagcctgcccgtgatcctgatggacgagaccctgaagttcgtggccagaaactacctggagcccggcaaggagtgcgtgcagcccgccaccaagagctgcagcttcagcgcctgcaccgacggcatcagctggcccttcgtgctgctgatcatgcccctggtgatctgggtgtacagcaccgacaccaacttcagcgacatgttctggagctag

SEQ ID NO: 73569 - DNA, 3663 bp, synthetic construct
  misc_feature 1..3663: note = Description of Artificial Sequence: Synthetic coding sequence
  source 1..3663: mol_type = other DNA
atgggcgacatggccaacaacagcgtggcctacagcggcgtgaagaacagcctgaaggaggccaaccacgacggcgacttcggcatcaccctggccgagctgagagccctgatggagctgagaagcaccgacgccctgagaaagatccaggagagctacggcgacgtgtacggcatctgcaccaagctgaagaccagccccaacgagggcctgagcggcaaccccgccgacctggagagaagagaggccgtgttcggcaagaacttcatcccccccaagaagcccaagaccttcctgcagctggtgtgggaggccctgcaggacgtgaccctgatcatcctggagatcgccgccatcgtgagcctgggcctgagcttctaccagccccccgagggcgacaacgccctgtgcggcgaggtgagcgtgggcgaggaggagggcgagggcgagaccggctggatcgagggcgccgccatcctgctgagcgtggtgtgcgtggtgctggtgaccgccttcaacgactggagcaaggagaagcagttcagaggcctgcagagcagaatcgagcaggagcagaagttcaccgtgatcagaggcggccaggtgatccagatccccgtggccgacatcaccgtgggcgacatcgcccaggtgaagtacggcgacctgctgcccgccgacggcatcctgatccagggcaacgacctgaagatcgacgagagcagcctgaccggcgagagcgaccacgtgaagaagagcctggacaaggaccccctgctgctgagcggcacccacgtgatggagggcagcggcagaatggtggtgaccgccgtgggcgtgaacagccagaccggcatcatcttcaccctgctgggcgccggcggcgaggaggaggagaagaaggacgagaagaagaaggagaagaagaacaagaagcaggacggcgccatcgagaacagaaacaaggccaaggcccaggacggcgccgccatggagatgcagcccctgaagagcgaggagggcggcgacggcgacgagaaggacaagaagaaggccaacctgcccaagaaggagaagagcgtgctgcagggcaagctgaccaagctggccgtgcagatcggcaaggccggcctgctgatgagcgccatcaccgtgatcatcctggtgctgtacttcgtgatcgacaccttctgggtgcagaagagaccctggctggccgagtgcacccccatctacatccagtacttcgtgaagttcttcatcatcggcgtgaccgtgctggtggtggccgtgcccgagggcctgcccctggccgtgaccatcagcctggcctacagcgtgaagaagatgatgaaggacaacaacctggtgagacacctggacgcctgcgagaccatgggcaacgccaccgccatctgcagcgacaagaccggcaccctgaccatgaacagaatgaccgtggtgcaggcctacatcaacgagaagcactacaagaaggtgcccgagcccgaggccatcccccccaacatcctgagctacctggtgaccggcatcagcgtgaactgcgcctacaccagcaagatcctgccccccgagaaggagggcggcctgcccagacacgtgggcaacaagaccgagtgcgccctgctgggcctgctgctggacctgaagagagactaccaggacgtgagaaacgagatccccgaggaggccctgtacaaggtgtacaccttcaacagcgtgagaaagagcatgagcaccgtgctgaagaacagcgacggcagctacagaatcttcagcaagggcgccagcgagatcatcctgaagaagtgcttcaagatcctgagcgccaacggcgaggccaaggtgttcagacccagagacagagacgacatcgtgaagaccgtgatcgagcccatggccagcgagggcctgagaaccatctgcctggccttcagagacttccccgccggcgagcccgagcccgagtgggacaacgagaacgacatcgtgaccggcctgacctgcatcgccgtggtgggcatcgaggaccccgtgagacccgaggtgcccgacgccatcaagaagtgccagagagccggcatcaccgtgagaatggtgaccggcgacaacatcaacaccgccagagccatcgccaccaagtgcggcatcctgcaccccggcgaggacttcctgtgcctggagggcaaggacttcaacagaagaatcagaaacgagaagggcgagatcgagcaggagagaatcgacaagatctggcccaagctgagagtgctggccagaagcagccccaccgacaagcacaccctggtgaagggcatcatcgacagcaccgtgagcgaccagagacaggtggtggccgtgaccggcgacggcaccaacgacggccccgccctgaagaaggccgacgtgggcttcgccatgggcatcgccggcaccgacgtggccaaggaggccagcgacatcatcctgaccgacgacaacttcaccagcatcgtgaaggccgtgatgtggggcagaaacgtgtacgacagcatcagcaagttcctgcagttccagctgaccgtgaacgtggtggccgtgatcgtggccttcaccggcgcctgcatcacccaggacagccccctgaaggccgtgcagatgctgtgggtgaacctgatcatggacaccctggccagcctggccctggccaccgagccccccaccgagagcctgctgctgagaaagccctacggcagaaacaagcccctgatcagcagaaccatgatgaagaacatcctgggccacgccttctaccagctggtggtggtgttcaccctgctgttcgccggcgagaagttcttcgacatcgacagcggcagaaacgcccccctgcacgccccccccagcgagcactacaccatcgtgttcaacaccttcgtgctgatgcagctgttcaacgagatcaacgccagaaagatccacggcgagagaaacgtgttcgagggcatcttcaacaacgccatcttctgcaccatcgtgctgggcaccttcgtggtgcagatcatcatcgtgcagttcggcggcaagcccttcagctgcagcgagctgagcatcgagcagtggctgtggagcatcttcctgggcatgggcaccctgctgtggggccagctgatcagcaccatccccaccagcagactgaagttcctgaaggaggccggccacggcacccagaaggaggagatccccgaggaggagctggccgaggacgtggaggagatcgaccacgccgagagagagctgagaagaggccagatcctgtggttcagaggcctgaacagaatccagacccagatcagagtggtgaacgccttcagaagcagcctgtacgagggcctggagaagcccgagagcagaagcagcatccacaacttcatgacccaccccgagttcagaatcgaggacagcgagccccacatccccctgatcgacgacaccgacgccgaggacgacgcccccaccaagagaaacagcagccccccccccagccccaacaagaacaacaacgccgtggacagcggcatccacctgaccatcgagatgaacaagagcgccaccagcagcagccccggcagccccctgcacagcctggagaccagcctgtag

SEQ ID NO: 73570 - DNA, 3555 bp, synthetic construct
  misc_feature 1..3555: note = Description of Artificial Sequence: Synthetic coding sequence
  source 1..3555: mol_type = other DNA
atgggcgacatggccaacaacagcgtggcctacagcggcgtgaagaacagcctgaaggaggccaaccacgacggcgacttcggcatcaccctggccgagctgagagccctgatggagctgagaagcaccgacgccctgagaaagatccaggagagctacggcgacgtgtacggcatctgcaccaagctgaagaccagccccaacgagggcctgagcggcaaccccgccgacctggagagaagagaggccgtgttcggcaagaacttcatcccccccaagaagcccaagaccttcctgcagctggtgtgggaggccctgcaggacgtgaccctgatcatcctggagatcgccgccatcgtgagcctgggcctgagcttctaccagccccccgagggcgacaacgccctgtgcggcgaggtgagcgtgggcgaggaggagggcgagggcgagaccggctggatcgagggcgccgccatcctgctgagcgtggtgtgcgtggtgctggtgaccgccttcaacgactggagcaaggagaagcagttcagaggcctgcagagcagaatcgagcaggagcagaagttcaccgtgatcagaggcggccaggtgatccagatccccgtggccgacatcaccgtgggcgacatcgcccaggtgaagtacggcgacctgctgcccgccgacggcatcctgatccagggcaacgacctgaagatcgacgagagcagcctgaccggcgagagcgaccacgtgaagaagagcctggacaaggaccccctgctgctgagcggcacccacgtgatggagggcagcggcagaatggtggtgaccgccgtgggcgtgaacagccagaccggcatcatcttcaccctgctgggcgccggcggcgaggaggaggagaagaaggacgagaagaagaaggagaagaagaacaagaagcaggacggcgccatcgagaacagaaacaaggccaaggcccaggacggcgccgccatggagatgcagcccctgaagagcgaggagggcggcgacggcgacgagaaggacaagaagaaggccaacctgcccaagaaggagaagagcgtgctgcagggcaagctgaccaagctggccgtgcagatcggcaaggccggcctgctgatgagcgccatcaccgtgatcatcctggtgctgtacttcgtgatcgacaccttctgggtgcagaagagaccctggctggccgagtgcacccccatctacatccagtacttcgtgaagttcttcatcatcggcgtgaccgtgctggtggtggccgtgcccgagggcctgcccctggccgtgaccatcagcctggcctacagcgtgaagaagatgatgaaggacaacaacctggtgagacacctggacgcctgcgagaccatgggcaacgccaccgccatctgcagcgacaagaccggcaccctgaccatgaacagaatgaccgtggtgcaggcctacatcaacgagaagcactacaagaaggtgcccgagcccgaggccatcccccccaacatcctgagctacctggtgaccggcatcagcgtgaactgcgcctacaccagcaagatcctgccccccgagaaggagggcggcctgcccagacacgtgggcaacaagaccgagtgcgccctgctgggcctgctgctggacctgaagagagactaccaggacgtgagaaacgagatccccgaggaggccctgtacaaggtgtacaccttcaacagcgtgagaaagagcatgagcaccgtgctgaagaacagcgacggcagctacagaatcttcagcaagggcgccagcgagatcatcctgaagaagtgcttcaagatcctgagcgccaacggcgaggccaaggtgttcagacccagagacagagacgacatcgtgaagaccgtgatcgagcccatggccagcgagggcctgagaaccatctgcctggccttcagagacttccccgccggcgagcccgagcccgagtgggacaacgagaacgacatcgtgaccggcctgacctgcatcgccgtggtgggcatcgaggaccccgtgagacccgaggtgcccgacgccatcaagaagtgccagagagccggcatcaccgtgagaatggtgaccggcgacaacatcaacaccgccagagccatcgccaccaagtgcggcatcctgcaccccggcgaggacttcctgtgcctggagggcaaggacttcaacagaagaatcagaaacgagaagggcgagatcgagcaggagagaatcgacaagatctggcccaagctgagagtgctggccagaagcagccccaccgacaagcacaccctggtgaagggcatcatcgacagcaccgtgagcgaccagagacaggtggtggccgtgaccggcgacggcaccaacgacggccccgccctgaagaaggccgacgtgggcttcgccatgggcatcgccggcaccgacgtggccaaggaggccagcgacatcatcctgaccgacgacaacttcaccagcatcgtgaaggccgtgatgtggggcagaaacgtgtacgacagcatcagcaagttcctgcagttccagctgaccgtgaacgtggtggccgtgatcgtggccttcaccggcgcctgcatcacccaggacagccccctgaaggccgtgcagatgctgtgggtgaacctgatcatggacaccctggccagcctggccctggccaccgagccccccaccgagagcctgctgctgagaaagccctacggcagaaacaagcccctgatcagcagaaccatgatgaagaacatcctgggccacgccttctaccagctggtggtggtgttcaccctgctgttcgccggcgagaagttcttcgacatcgacagcggcagaaacgcccccctgcacgccccccccagcgagcactacaccatcgtgttcaacaccttcgtgctgatgcagctgttcaacgagatcaacgccagaaagatccacggcgagagaaacgtgttcgagggcatcttcaacaacgccatcttctgcaccatcgtgctgggcaccttcgtggtgcagctgatcagcaccatccccaccagcagactgaagttcctgaaggaggccggccacggcacccagaaggaggagatccccgaggaggagctggccgaggacgtggaggagatcgaccacgccgagagagagctgagaagaggccagatcctgtggttcagaggcctgaacagaatccagacccagatcagagtggtgaacgccttcagaagcagcctgtacgagggcctggagaagcccgagagcagaagcagcatccacaacttcatgacccaccccgagttcagaatcgaggacagcgagccccacatccccctgatcgacgacaccgacgccgaggacgacgcccccaccaagagaaacagcagccccccccccagccccaacaagaacaacaacgccgtggacagcggcatccacctgaccatcgagatgaacaagagcgccaccagcagcagccccggcagccccctgcacagcctggagaccagcctgtag

SEQ ID NO: 73571 - DNA, 3531 bp, synthetic construct
  misc_feature 1..3531: note = Description of Artificial Sequence: Synthetic coding sequence
  source 1..3531: mol_type = other DNA
atgggcgacatggccaacaacagcgtggcctacagcggcgtgaagaacagcctgaaggaggccaaccacgacggcgacttcggcatcaccctggccgagctgagagccctgatggagctgagaagcaccgacgccctgagaaagatccaggagagctacggcgacgtgtacggcatctgcaccaagctgaagaccagccccaacgagggcctgagcggcaaccccgccgacctggagagaagagaggccgtgttcggcaagaacttcatcccccccaagaagcccaagaccttcctgcagctggtgtgggaggccctgcaggacgtgaccctgatcatcctggagatcgccgccatcgtgagcctgggcctgagcttctaccagccccccgagggcgacaacgccctgtgcggcgaggtgagcgtgggcgaggaggagggcgagggcgagaccggctggatcgagggcgccgccatcctgctgagcgtggtgtgcgtggtgctggtgaccgccttcaacgactggagcaaggagaagcagttcagaggcctgcagagcagaatcgagcaggagcagaagttcaccgtgatcagaggcggccaggtgatccagatccccgtggccgacatcaccgtgggcgacatcgcccaggtgaagtacggcgacctgctgcccgccgacggcatcctgatccagggcaacgacctgaagatcgacgagagcagcctgaccggcgagagcgaccacgtgaagaagagcctggacaaggaccccctgctgctgagcggcacccacgtgatggagggcagcggcagaatggtggtgaccgccgtgggcgtgaacagccagaccggcatcatcttcaccctgctgggcgccggcggcgaggaggaggagaagaaggacgagaagaagaaggagaagaagaacaagaagcaggacggcgccatcgagaacagaaacaaggccaaggcccaggacggcgccgccatggagatgcagcccctgaagagcgaggagggcggcgacggcgacgagaaggacaagaagaaggccaacctgcccaagaaggagaagagcgtgctgcagggcaagctgaccaagctggccgtgcagatcggcaaggccggcctgctgatgagcgccatcaccgtgatcatcctggtgctgtacttcgtgatcgacaccttctgggtgcagaagagaccctggctggccgagtgcacccccatctacatccagtacttcgtgaagttcttcatcatcggcgtgaccgtgctggtggtggccgtgcccgagggcctgcccctggccgtgaccatcagcctggcctacagcgtgaagaagatgatgaaggacaacaacctggtgagacacctggacgcctgcgagaccatgggcaacgccaccgccatctgcagcgacaagaccggcaccctgaccatgaacagaatgaccgtggtgcaggcctacatcaacgagaagcactacaagaaggtgcccgagcccgaggccatcccccccaacatcctgagctacctggtgaccggcatcagcgtgaactgcgcctacaccagcaagatcctgccccccgagaaggagggcggcctgcccagacacgtgggcaacaagaccgagtgcgccctgctgggcctgctgctggacctgaagagagactaccaggacgtgagaaacgagatccccgaggaggccctgtacaaggtgtacaccttcaacagcgtgagaaagagcatgagcaccgtgctgaagaacagcgacggcagctacagaatcttcagcaagggcgccagcgagatcatcctgaagaagtgcttcaagatcctgagcgccaacggcgaggccaaggtgttcagacccagagacagagacgacatcgtgaagaccgtgatcgagcccatggccagcgagggcctgagaaccatctgcctggccttcagagacttccccgccggcgagcccgagcccgagtgggacaacgagaacgacatcgtgaccggcctgacctgcatcgccgtggtgggcatcgaggaccccgtgagacccgaggtgcccgacgccatcaagaagtgccagagagccggcatcaccgtgagaatggtgaccggcgacaacatcaacaccgccagagccatcgccaccaagtgcggcatcctgcaccccggcgaggacttcctgtgcctggagggcaaggacttcaacagaagaatcagaaacgagaagggcgagatcgagcaggagagaatcgacaagatctggcccaagctgagagtgctggccagaagcagccccaccgacaagcacaccctggtgaagggcatcatcgacagcaccgtgagcgaccagagacaggtggtggccgtgaccggcgacggcaccaacgacggccccgccctgaagaaggccgacgtgggcttcgccatgggcatcgccggcaccgacgtggccaaggaggccagcgacatcatcctgaccgacgacaacttcaccagcatcgtgaaggccgtgatgtggggcagaaacgtgtacgacagcatcagcaagttcctgcagttccagctgaccgtgaacgtggtggccgtgatcgtggccttcaccggcgcctgcatcacccaggacagccccctgaaggccgtgcagatgctgtgggtgaacctgatcatggacaccctggccagcctggccctggccaccgagccccccaccgagagcctgctgctgagaaagccctacggcagaaacaagcccctgatcagcagaaccatgatgaagaacatcctgggccacgccttctaccagctggtggtggtgttcaccctgctgttcgccggcgagaagttcttcgacatcgacagcggcagaaacgcccccctgcacgccccccccagcgagcactacaccatcgtgttcaacaccttcgtgctgatgcagctgttcaacgagatcaacgccagaaagatccacggcgagagaaacgtgttcgagggcatcttcaacaacgccatcttctgcaccatcgtgctgggcaccttcgtggtgcagatcatcatcgtgcagttcggcggcaagcccttcagctgcagcgagctgagcatcgagcagtggctgtggagcatcttcctgggcatgggcaccctgctgtggggccagctgatcagcaccatccccaccagcagactgaagttcctgaaggaggccggccacggcacccagaaggaggagatccccgaggaggagctggccgaggacgtggaggagatcgaccacgccgagagagagctgagaagaggccagatcctgtggttcagaggcctgaacagaatccagacccagatggacgtggtgaacgccttccagagcggcagcagcatccagggcgccctgagaagacagcccagcatcgccagccagcaccacgacgtgaccaacatcagcacccccacccacgtggtgttcagcagcagcaccgccagcaccaccgtgggctacagcagcggcgagtgcatcagctag

SEQ ID NO: 73572 - DNA, 2892 bp, synthetic construct
  misc_feature 1..2892: note = Description of Artificial Sequence: Synthetic coding sequence
  source 1..2892: mol_type = other DNA
atgttcctggtgatcggcacccacgtgatggagggcagcggcagaatggtggtgaccgccgtgggcgtgaacagccagaccggcatcatcttcaccctgctgggcgccggcggcgaggaggaggagaagaaggacgagaagaagaaggagaagaagaacaagaagcaggacggcgccatcgagaacagaaacaaggccaaggcccaggacggcgccgccatggagatgcagcccctgaagagcgaggagggcggcgacggcgacgagaaggacaagaagaaggccaacctgcccaagaaggagaagagcgtgctgcagggcaagctgaccaagctggccgtgcagatcggcaaggccggcctgctgatgagcgccatcaccgtgatcatcctggtgctgtacttcgtgatcgacaccttctgggtgcagaagagaccctggctggccgagtgcacccccatctacatccagtacttcgtgaagttcttcatcatcggcgtgaccgtgctggtggtggccgtgcccgagggcctgcccctggccgtgaccatcagcctggcctacagcgtgaagaagatgatgaaggacaacaacctggtgagacacctggacgcctgcgagaccatgggcaacgccaccgccatctgcagcgacaagaccggcaccctgaccatgaacagaatgaccgtggtgcaggcctacatcaacgagaagcactacaagaaggtgcccgagcccgaggccatcccccccaacatcctgagctacctggtgaccggcatcagcgtgaactgcgcctacaccagcaagatcctgccccccgagaaggagggcggcctgcccagacacgtgggcaacaagaccgagtgcgccctgctgggcctgctgctggacctgaagagagactaccaggacgtgagaaacgagatccccgaggaggccctgtacaaggtgtacaccttcaacagcgtgagaaagagcatgagcaccgtgctgaagaacagcgacggcagctacagaatcttcagcaagggcgccagcgagatcatcctgaagaagtgcttcaagatcctgagcgccaacggcgaggccaaggtgttcagacccagagacagagacgacatcgtgaagaccgtgatcgagcccatggccagcgagggcctgagaaccatctgcctggccttcagagacttccccgccggcgagcccgagcccgagtgggacaacgagaacgacatcgtgaccggcctgacctgcatcgccgtggtgggcatcgaggaccccgtgagacccgaggtgcccgacgccatcaagaagtgccagagagccggcatcaccgtgagaatggtgaccggcgacaacatcaacaccgccagagccatcgccaccaagtgcggcatcctgcaccccggcgaggacttcctgtgcctggagggcaaggacttcaacagaagaatcagaaacgagaagggcgagatcgagcaggagagaatcgacaagatctggcccaagctgagagtgctggccagaagcagccccaccgacaagcacaccctggtgaagggcatcatcgacagcaccgtgagcgaccagagacaggtggtggccgtgaccggcgacggcaccaacgacggccccgccctgaagaaggccgacgtgggcttcgccatgggcatcgccggcaccgacgtggccaaggaggccagcgacatcatcctgaccgacgacaacttcaccagcatcgtgaaggccgtgatgtggggcagaaacgtgtacgacagcatcagcaagttcctgcagttccagctgaccgtgaacgtggtggccgtgatcgtggccttcaccggcgcctgcatcacccaggacagccccctgaaggccgtgcagatgctgtgggtgaacctgatcatggacaccctggccagcctggccctggccaccgagccccccaccgagagcctgctgctgagaaagccctacggcagaaacaagcccctgatcagcagaaccatgatgaagaacatcctgggccacgccttctaccagctggtggtggtgttcaccctgctgttcgccggcgagaagttcttcgacatcgacagcggcagaaacgcccccctgcacgccccccccagcgagcactacaccatcgtgttcaacaccttcgtgctgatgcagctgttcaacgagatcaacgccagaaagatccacggcgagagaaacgtgttcgagggcatcttcaacaacgccatcttctgcaccatcgtgctgggcaccttcgtggtgcagatcatcatcgtgcagttcggcggcaagcccttcagctgcagcgagctgagcatcgagcagtggctgtggagcatcttcctgggcatgggcaccctgctgtggggccagctgatcagcaccatccccaccagcagactgaagttcctgaaggaggccggccacggcacccagaaggaggagatccccgaggaggagctggccgaggacgtggaggagatcgaccacgccgagagagagctgagaagaggccagatcctgtggttcagaggcctgaacagaatccagacccagatcagagtggtgaacgccttcagaagcagcctgtacgagggcctggagaagcccgagagcagaagcagcatccacaacttcatgacccaccccgagttcagaatcgaggacagcgagccccacatccccctgatcgacgacaccgacgccgaggacgacgcccccaccaagagaaacagcagccccccccccagccccaacaagaacaacaacgccgtggacagcggcatccacctgaccatcgagatgaacaagagcgccaccagcagcagccccggcagccccctgcacagcctggagaccagcctgtag

SEQ ID NO: 73573 - DNA, 3663 bp, synthetic construct; identical to SEQ ID NO: 73569
  misc_feature 1..3663: note = Description of Artificial Sequence: Synthetic coding sequence
  source 1..3663: mol_type = other DNA

SEQ ID NO: 73574 - DNA, 306 bp, synthetic construct
  misc_feature 1..306: note = Description of Artificial Sequence: Synthetic coding sequence
  source 1..306: mol_type = other DNA
atgggcgacatggccaacaacagcgtggcctacagcggcgtgaagaacagcctgaaggaggccaaccacgacggcgacttcggcatcaccctggccgagctgagagccctgatggagctgagaagcaccgacgccctgagaaagatccaggagagctacggcgacgtgtacggcatctgcaccaagctgaagaccagccccaacgagggcgagttctactacgcctgcttctggttcttcgtgcagagagtgctgtacatctggctgatcaacgagcacgcctacatcatcctggccatcgtgtag

SEQ ID NO: 73575 - DNA, 3600 bp, synthetic construct
  misc_feature 1..3600: note = Description of Artificial Sequence: Synthetic coding sequence
  source 1..3600: mol_type = other DNA
atgggcgacatgaccaacagcgacttctacagcaagaaccagagaaacgagagcagccacggcggcgagttcggctgcaccatggaggagctgagaagcctgatggagctgagaggcaccgaggccgtggtgaagatcaaggagacctacggcgacaccgaggccatctgcagaagactgaagaccagccccgtggagggcctgcccggcaccgcccccgacctggagaagagaaagcagatcttcggccagaacttcatcccccccaagaagcccaagaccttcctgcagctggtgtgggaggccctgcaggacgtgaccctgatcatcctggagatcgccgccatcatcagcctgggcctgagcttctaccacccccccggcgagggcaacgagggctgcgccaccgcccagggcggcgccgaggacgagggcgaggccgaggccggctggatcgagggcgccgccatcctgctgagcgtgatctgcgtggtgctggtgaccgccttcaacgactggagcaaggagaagcagttcagaggcctgcagagcagaatcgagcaggagcagaagttcaccgtggtgagagccggccaggtggtgcagatccccgtggccgagatcgtggtgggcgacatcgcccaggtgaagtacggcgacctgctgcccgccgacggcctgttcatccagggcaacgacctgaagatcgacgagagcagcctgaccggcgagagcgaccaggtgagaaagagcgtggacaaggaccccatgctgctgagcggcacccacgtgatggagggcagcggcagaatgctggtgaccgccgtgggcgtgaacagccagaccggcatcatcttcaccctgctgggcgccggcggcgaggaggaggagaagaaggacaagaagggcgtgaagaagggcgacggcctgcagctgcccgccgccgacggcgccgccgccagcaacgccgccgacagcgccaacgccagcctggtgaacggcaagatgcaggacggcaacgtggacgccagccagagcaaggccaagcagcaggacggcgccgccgccatggagatgcagcccctgaagagcgccgagggcggcgacgccgacgacagaaagaaggccagcatgcacaagaaggagaagagcgtgctgcagggcaagctgaccaagctggccgtgcagatcggcaaggccggcctggtgatgagcgccatcaccgtgatcatcctggtgctgtacttcaccgtggacaccttcgtggtgaacaagaagccctggctgcccgagtgcacccccgtgtacgtgcagtacttcgtgaagttcttcatcatcggcgtgaccgtgctggtggtggccgtgcccgagggcctgcccctggccgtgaccatcagcctggcctacagcgtgaagaagatgatgaaggacaacaacctggtgagacacctggacgcctgcgagaccatgggcaacgccaccgccatctgcagcgacaagaccggcaccctgaccaccaacagaatgaccgtggtgcaggcctacgtgggcgacgtgcactacaaggagatccccgaccccagcagcatcaacaccaagaccatggagctgctgatcaacgccatcgccatcaacagcgcctacaccaccaagatcctgccccccgagaaggagggcgccctgcccagacaggtgggcaacaagaccgagtgcggcctgctgggcttcgtgctggacctgaagcaggactacgagcccgtgagaagccagatgcccgaggagaagctgtacaaggtgtacaccttcaacagcgtgagaaagagcatgagcaccgtgatcaagctgcccgacgagagcttcagaatgtacagcaagggcgccagcgagatcgtgctgaagaagtgctgcaagatcctgaacggcgccggcgagcccagagtgttcagacccagagacagagacgagatggtgaagaaggtgatcgagcccatggcctgcgacggcctgagaaccatctgcgtggcctacagagacttccccagcagccccgagcccgactgggacaacgagaacgacatcctgaacgagctgacctgcatctgcgtggtgggcatcgaggaccccgtgagacccgaggtgcccgaggccatcagaaagtgccagagagccggcatcaccgtgagaatggtgaccggcgacaacatcaacaccgccagagccatcgccatcaagtgcggcatcatccaccccggcgaggacttcctgtgcctggagggcaaggagttcaacagaagaatcagaaacgagaagggcgagatcgagcaggagagaatcgacaagatctggcccaagctgagagtgctggccagaagcagccccaccgacaagcacaccctggtgaagggcatcatcgacagcacccacaccgagcagagacaggtggtggccgtgaccggcgacggcaccaacgacggccccgccctgaagaaggccgacgtgggcttcgccatgggcatcgccggcaccgacgtggccaaggaggccagcgacatcatcctgaccgacgacaacttcagcagcatcgtgaaggccgtgatgtggggcagaaacgtgtacgacagcatcagcaagttcctgcagttccagctgaccgtgaacgtggtggccgtgatcgtggccttcaccggcgcctgcatcacccaggacagccccctgaaggccgtgcagatgctgtgggtgaacctgatcatggacaccttcgccagcctggccctggccaccgagccccccaccgagaccctgctgctgagaaagccctacggcagaaacaagcccctgatcagcagaaccatgatgaagaacatcctgggccacgccgtgtaccagctggccctgatcttcaccctgctgttcgtgggcgagaagatgttccagatcgacagcggcagaaacgcccccctgcacagcccccccagcgagcactacaccatcatcttcaacaccttcgtgatgatgcagctgttcaacgagatcaacgccagaaagatccacggcgagagaaacgtgttcgacggcatcttcagaaaccccatcttctgcaccatcgtgctgggcaccttcgccatccagatcgtgatcgtgcagttcggcggcaagcccttcagctgcagccccctgcagctggaccagtggatgtggtgcatcttcatcggcctgggcgagctggtgtggggccaggtgatcgccaccatccccaccagcagactgaagttcctgaaggaggccggcagactgacccagaaggaggagatccccgaggaggagctgaacgaggacgtggaggagatcgaccacgccgagagagagctgagaagaggccagatcctgtggttcagaggcctgaacagaatccagacccagatcgaggtggtgaacaccttcaagagcggcgccagcttccagggcgccctgagaagacagagcagcgtgaccagccagagccaggacgtggccaacctgagcagccccagcagagtgagcctgagcaacgccctgagcagccccaccagcctgccccccgccgccgccggcagagagtag

SEQ ID NO: 73576 - DNA, 3690 bp, synthetic construct
  misc_feature 1..3690: note = Description of Artificial Sequence: Synthetic coding sequence
  source 1..3690: mol_type = other DNA
atgggcgacatgaccaacagcgacttctacagcaagaaccagagaaacgagagcagccacggcggcgagttcggctgcaccatggaggagctgagaagcctgatggagctgagaggcaccgaggccgtggtgaagatcaaggagacctacggcgacaccgaggccatctgcagaagactgaagaccagccccgtggagggcctgcccggcaccgcccccgacctggagaagagaaagcagatcttcggccagaacttcatcccccccaagaagcccaagaccttcctgcagctggtgtgggaggccctgcaggacgtgaccctgatcatcctggagatcgccgccatcatcagcctgggcctgagcttctaccacccccccggcgagggcaacgagggctgcgccaccgcccagggcggcgccgaggacgagggcgaggccgaggccggctggatcgagggcgccgccatcctgctgagcgtgatctgcgtggtgctggtgaccgccttcaacgactggagcaaggagaagcagttcagaggcctgcagagcagaatcgagcaggagcagaagttcaccgtggtgagagccggccaggtggtgcagatccccgtggccgagatcgtggtgggcgacatcgcccaggtgaagtacggcgacctgctgcccgccgacggcctgttcatccagggcaacgacctgaagatcgacgagagcagcctgaccggcgagagcgaccaggtgagaaagagcgtggacaaggaccccatgctgctgagcggcacccacgtgatggagggcagcggcagaatgctggtgaccgccgtgggcgtgaacagccagaccggcatcatcttcaccctgctgggcgccggcggcgaggaggaggagaagaaggacaagaagggcgtgaagaagggcgacggcctgcagctgcccgccgccgacggcgccgccgccagcaacgccgccgacagcgccaacgccagcctggtgaacgccaagcagcaggacggcgccgccgccatggagatgcagcccctgaagagcgccgagggcggcgacgccgacgacagaaagaaggccagcatgcacaagaaggagaagagcgtgctgcagggcaagctgaccaagctggccgtgcagatcggcaaggccggcctggtgatgagcgccatcaccgtgatcatcctggtgctgtacttcaccgtggacaccttcgtggtgaacaagaagccctggctgcccgagtgcacccccgtgtacgtgcagtacttcgtgaagttcttcatcatcggcgtgaccgtgctggtggtggccgtgcccgagggcctgcccctggccgtgaccatcagcctggcctacagcgtgaagaagatgatgaaggacaacaacctggtgagacacctggacgcctgcgagaccatgggcaacgccaccgccatctgcagcgacaagaccggcaccctgaccaccaacagaatgaccgtggtgcaggcctacgtgggcgacgtgcactacaaggagatccccgaccccagcagcatcaacaccaagaccatggagctgctgatcaacgccatcgccatcaacagcgcctacaccaccaagatcctgccccccgagaaggagggcgccctgcccagacaggtgggcaacaagaccgagtgcggcctgctgggcttcgtgctggacctgaagcaggactacgagcccgtgagaagccagatgcccgaggagaagctgtacaaggtgtacaccttcaacagcgtgagaaagagcatgagcaccgtgatcaagctgcccgacgagagcttcagaatgtacagcaagggcgccagcgagatcgtgctgaagaagtgctgcaagatcctgaacggcgccggcgagcccagagtgttcagacccagagacagagacgagatggtgaagaaggtgatcgagcccatggcctgcgacggcctgagaaccatctgcgtggcctacagagacttccccagcagccccgagcccgactgggacaacgagaacgacatcctgaacgagctgacctgcatctgcgtggtgggcatcgaggaccccgtgagacccgaggtgcccgaggccatcagaaagtgccagagagccggcatcaccgtgagaatggtgaccggcgacaacatcaacaccgccagagccatcgccatcaagtgcggcatcatccaccccggcgaggacttcctgtgcctggagggcaaggagttcaacagaagaatcagaaacgagaagggcgagatcgagcaggagagaatcgacaagatctggcccaagctgagagtgctggccagaagcagccccaccgacaagcacaccctggtgaagggcatcatcgacagcacccacaccgagcagagacaggtggtggccgtgaccggcgacggcaccaacgacggccccgccctgaagaaggccgacgtgggcttcgccatgggcatcgccggcaccgacgtggccaaggaggccagcgacatcatcctgaccgacgacaacttcagcagcatcgtgaaggccgtgatgtggggcagaaacgtgtacgacagcatcagcaagttcctgcagttccagctgaccgtgaacgtggtggccgtgatcgtggccttcaccggcgcctgcatcacccaggacagccccctgaaggccgtgcagatgctgtgggtgaacctgatcatggacaccttcgccagcctggccctggccaccgagccccccaccgagaccctgctgctgagaaagccctacggcagaaacaagcccctgatcagcagaaccatgatgaagaacatcctgggccacgccgtgtaccagctggccctgatcttcaccctgctgttcgtgggcgagaagatgttccagatcgacagcggcagaaacgcccccctgcacagcccccccagcgagcactacaccatcatcttcaacaccttcgtgatgatgcagctgttcaacgagatcaacgccagaaagatccacggcgagagaaacgtgttcgacggcatcttcagaaaccccatcttctgcaccatcgtgctgggcaccttcgccatccagatcgtgatcgtgcagttcggcggcaagcccttcagctgcagccccctgcagctggaccagtggatgtggtgcatcttcatcggcctgggcgagctggtgtggggccaggtgatcgccaccatccccaccagcagactgaagttcctgaaggaggccggcagactgacccagaaggaggagatccccgaggaggagctgaacgaggacgtggaggagatcgaccacgccgagagagagctgagaagaggccagatcctgtggttcagaggcctgaacagaatccagacccagatcagagtggtgaaggccttcagaagcagcctgtacgagggcctggagaagcccgagagcagaaccagcatccacaacttcatggcccaccccgagttcagaatcgaggacagccagccccacatccccctgatcgacgacaccgacctggaggaggacgccgccctgaagcagaacagcagcccccccagcagcctgaacaagaacaacagcgccatcgacagcggcatcaacctgaccaccgacaccagcaagagcgccaccagcagcagccccggcagccccatccacagcctggagaccagcctgtag

SEQ ID NO: 73577 - DNA, 3732 bp, synthetic construct
  misc_feature 1..3732: note = Description of Artificial Sequence: Synthetic coding sequence
  source 1..3732: mol_type = other DNA
atgggcgacatgaccaacagcgacttctacagcaagaaccagagaaacgagagcagccacggcggcgagttcggctgcaccatggaggagctgagaagcctgatggagctgagaggcaccgaggccgtggtgaagatcaaggagacctacggcgacaccgaggccatctgcagaagactgaagaccagccccgtggagggcctgcccggcaccgcccccgacctggagaagagaaagcagatcttcggccagaacttcatcccccccaagaagcccaagaccttcctgcagctggtgtgggaggccctgcaggacgtgaccctgatcatcctggagatcgccgccatcatcagcctgggcctgagcttctaccacccccccggcgagggcaacgagggctgcgccaccgcccagggcggcgccgaggacgagggcgaggccgaggccggctggatcgagggcgccgccatcctgctgagcgtgatctgcgtggtgctggtgaccgccttcaacgactggagcaaggagaagcagttcagaggcctgcagagcagaatcgagcaggagcagaagttcaccgtggtgagagccggccaggtggtgcagatccccgtggccgagatcgtggtgggcgacatcgcccaggtgaagtacggcgacctgctgcccgccgacggcctgttcatccagggcaacgacctgaagatcgacgagagcagcctgaccggcgagagcgaccaggtgagaaagagcgtggacaaggaccccatgctgctgagcggcacccacgtgatggagggcagcggcagaatgctggtgaccgccgtgggcgtgaacagccagaccggcatcatcttcaccctgctgggcgccggcggcgaggaggaggagaagaaggacaagaagggcgtgaagaagggcgacggcctgcagctgcccgccgccgacggcgccgccgccagcaacgccgccgacagcgccaacgccagcctggtgaacggcaagatgcaggacggcaacgtggacgccagccagagcaaggccaagcagcaggacggcgccgccgccatggagatgcagcccctgaagagcgccgagggcggcgacgccgacgacagaaagaaggccagcatgcacaagaaggagaagagcgtgctgcagggcaagctgaccaagctggccgtgcagatcggcaaggccggcctggtgatgagcgccatcaccgtgatcatcctggtgctgtacttcaccgtggacaccttcgtggtgaacaagaagccctggctgcccgagtgcacccccgtgtacgtgcagtacttcgtgaagttcttcatcatcggcgtgaccgtgctggtggtggccgtgcccgagggcctgcccctggccgtgaccatcagcctggcctacagcgtgaagaagatgatgaaggacaacaacctggtgagacacctggacgcctgcgagaccatgggcaacgccaccgccatctgcagcgacaagaccggcaccctgaccaccaacagaatgaccgtggtgcaggcctacgtgggcgacgtgcactacaaggagatccccgaccccagcagcatcaacaccaagaccatggagctgctgatcaacgccatcgccatcaacagcgcctacaccaccaagatcctgccccccgagaaggagggcgccctgcccagacaggtgggcaacaagaccgagtgcggcctgctgggcttcgtgctggacctgaagcaggactacgagcccgtgagaagccagatgcccgaggagaagctgtacaaggtgtacaccttcaacagcgtgagaaagagcatgagcaccgtgatcaagctgcccgacgagagcttcagaatgtacagcaagggcgccagcgagatcgtgctgaagaagtgctgcaagatcctgaacggcgccggcgagcccagagtgttcagacccagagacagagacgagatggtgaagaaggtgatcgagcccatggcctgcgacggcctgagaaccatctgcgtggcctacagagacttccccagcagccccgagcccgactgggacaacgagaacgacatcctgaacgagctgacctgcatctgcgtggtgggcatcgaggaccccgtgagacccgaggtgcccgaggccatcagaaagtgccagagagccggcatcaccgtgagaatggtgaccggcgacaacatcaacaccgccagagccatcgccatcaagtgcggcatcatccaccccggcgaggacttcctgtgcctggagggcaaggagttcaacagaagaatcagaaacgagaagggcgagatcgagcaggagagaatcgacaagatctggcccaagctgagagtgctggccagaagcagccccaccgacaagcacaccctggtgaagggcatcatcgacagcacccacaccgagcagagacaggtggtggccgtgaccggcgacggcaccaacgacggccccgccctgaagaaggccgacgtgggcttcgccatgggcatcgccggcaccgacgtggccaaggaggccagcgacatcatcctgaccgacgacaacttcagcagcatcgtgaaggccgtgatgtggggcagaaacgtgtacgacagcatcagcaagttcctgcagttccagctgaccgtgaacgtggtggccgtgatcgtggccttcaccggcgcctgcatcacccaggacagccccctgaaggccgtgcagatgctgtgggtgaacctgatcatggacaccttcgccagcctggccctggccaccgagccccccaccgagaccctgctgctgagaaagccctacggcagaaacaagcccctgatcagcagaaccatgatgaagaacatcctgggccacgccgtgtaccagctggccctgatcttcaccctgctgttcgtgggcgagaagatgttccagatcgacagcggcagaaacgcccccctgcacagcccccccagcgagcactacaccatcatcttcaacaccttcgtgatgatgcagctgttcaacgagatcaacgccagaaagatccacggcgagagaaacgtgttcgacggcatcttcagaaaccccatcttctgcaccatcgtgctgggcaccttcgccatccagatcgtgatcgtgcagttcggcggcaagcccttcagctgcagccccctgcagctggaccagtggatgtggtgcatcttcatcggcctgggcgagctggtgtggggccaggtgatcgccaccatccccaccagcagactgaagttcctgaaggaggccggcagactgacccagaaggaggagatccccgaggaggagctgaacgaggacgtggaggagatcgaccacgccgagagagagctgagaagaggccagatcctgtggttcagaggcctgaacagaatccagacccagatcagagtggtgaaggccttcagaagcagcctgtacgagggcctggagaagcccgagagcagaaccagcatccacaacttcatggcccaccccgagttcagaatcgaggacagccagccccacatccccctgatcgacgacaccgacctggaggaggacgccgccctgaagcagaacagcagcccccccagcagcctgaacaagaacaacagcgccatcgacagcggcatcaacctgaccaccgacaccagcaagagcgccaccagcagcagccccggcagccccatccacagcctggagaccagcctgtag

SEQ ID NO: 73578 - DNA, 3732 bp, synthetic construct; identical to SEQ ID NO: 73577
  misc_feature 1..3732: note = Description of Artificial Sequence: Synthetic coding sequence
  source 1..3732: mol_type = other DNA

SEQ ID NO: 73579 - DNA, 3597 bp, synthetic construct
  misc_feature 1..3597: note = Description of Artificial Sequence: Synthetic coding sequence
  source 1..3597: mol_type = other DNA
atgggcgacatgaccaacagcgacttctacagcaagaaccagagaaacgagagcagccacggcggcgagttcggctgcaccatggaggagctgagaagcctgatggagctgagaggcaccgaggccgtggtgaagatcaaggagacctacggcgacaccgaggccatctgcagaagactgaagaccagccccgtggagggcctgcccggcaccgcccccgacctggagaagagaaagcagatcttcggccagaacttcatcccccccaagaagcccaagaccttcctgcagctggtgtgggaggccctgcaggacgtgaccctgatcatcctggagatcgccgccatcatcagcctgggcctgagcttctaccacccccccggcgagggcaacgagggctgcgccaccgcccagggcggcgccgaggacgagggcgaggccgaggccggctggatcgagggcgccgccatcctgctgagcgtgatctgcgtggtgctggtgaccgccttcaacgactggagcaaggagaagcagttcagaggcctgcagagcagaatcgagcaggagcagaagttcaccgtggtgagagccggccaggtggtgcagatccccgtggccgagatcgtggtgggcgacatcgcccaggtgaagtacggcgacctgctgcccgccgacggcctgttcatccagggcaacgacctgaagatcgacgagagcagcctgaccggcgagagcgaccaggtgagaaagagcgtggacaaggaccccatgctgctgagcggcacccacgtgatggagggcagcggcagaatgctggtgaccgccgtgggcgtgaacagccagaccggcatcatcttcaccctgctgggcgccggcggcgaggaggaggagaagaaggacaagaaggccaagcagcaggacggcgccgccgccatggagatgcagcccctgaagagcgccgagggcggcgacgccgacgacagaaagaaggccagcatgcacaagaaggagaagagcgtgctgcagggcaagctgaccaagctggccgtgcagatcggcaaggccggcctggtgatgagcgccatcaccgtgatcatcctggtgctgtacttcaccgtggacaccttcgtggtgaacaagaagccctggctgcccgagtgcacccccgtgtacgtgcagtacttcgtgaagttcttcatcatcggcgtgaccgtgctggtggtggccgtgcccgagggcctgcccctggccgtgaccatcagcctggcctacagcgtgaagaagatgatgaaggacaacaacctggtgagacacctggacgcctgcgagaccatgggcaacgccaccgccatctgcagcgacaagaccggcaccctgaccaccaacagaatgaccgtggtgcaggcctacgtgggcgacgtgcactacaaggagatccccgaccccagcagcatcaacaccaagaccatggagctgctgatcaacgccatcgccatcaacagcgcctacaccaccaagatcctgccccccgagaaggagggcgccctgcccagacaggtgggcaacaagaccgagtgcggcctgctgggcttcgtgctggacctgaagcaggactacgagcccgtgagaagccagatgcccgaggagaagctgtacaaggtgtacaccttcaacagcgtgagaaagagcatgagcaccgtgatcaagctgcccgacgagagcttcagaatgtacagcaagggcgccagcgagatcgtgctgaagaagtgctgcaagatcctgaacggcgccggcgagcccagagtgttcagacccagagacagagacgagatggtgaagaaggtgatcgagcccatggcctgcgacggcctgagaaccatctgcgtggcctacagagacttccccagcagccccgagcccgactgggacaacgagaacgacatcctgaacgagctgacctgcatctgcgtggtgggcatcgaggaccccgtgagacccgaggtgcccgaggccatcagaaagtgccagagagccggcatcaccgtgagaatggtgaccggcgacaacatcaacaccgccagagccatcgccatcaagtgcggcatcatccaccccggcgaggacttcctgtgcctggagggcaaggagttcaacagaagaatcagaaacgagaagggcgagatcgagcaggagagaatcgacaagatctggcccaagctgagagtgctggccagaagcagccccaccgacaagcacaccctggtgaagggcatcatcgacagcacccacaccgagcagagacaggtggtggccgtgaccggcgacggcaccaacgacggccccgccctgaagaaggccgacgtgggcttcgccatgggcatcgccggcaccgacgtggccaaggaggccagcgacatcatcctgaccgacgacaacttcagcagcatcgtgaaggccgtgatgtggggcagaaacgtgtacgacagcatcagcaagttcctgcagttccagctgaccgtgaacgtggtggccgtgatcgtggccttcaccggcgcctgcatcacccaggacagccccctgaaggccgtgcagatgctgtgggtgaacctgatcatggacaccttcgccagcctggccctggccaccgagccccccaccgagaccctgctgctgagaaagccctacggcagaaacaagcccctgatcagcagaaccatgatgaagaacatcctgggccacgccgtgtaccagctggccctgatcttcaccctgctgttcgtgggcgagaagatgttccagatcgacagcggcagaaacgcccccctgcacagcccccccagcgagcactacaccatcatcttcaacaccttcgtgatgatgcagctgttcaacgagatcaacgccagaaagatccacggcgagagaaacgtgttcgacggcatcttcagaaaccccatcttctgcaccatcgtgctgggcaccttcgccatccagatcgtgatcgtgcagttcggcggcaagcccttcagctgcagccccctgcagctggaccagtggatgtggtgcatcttcatcggcctgggcgagctggtgtggggccaggtgatcgccaccatccccaccagcagactgaagttcctgaaggaggccggcagactgacccagaaggaggagatccccgaggaggagctgaacgaggacgtggaggagatcgaccacgccgagagagagctgagaagaggccagatcctgtggttcagaggcctgaacagaatccagacccagatcagagtggtgaaggccttcagaagcagcctgtacgagggcctggagaagcccgagagcagaaccagcatccacaacttcatggcccaccccgagttcagaatcgaggacagccagccccacatccccctgatcgacgacaccgacctggaggaggacgccgccctgaagcagaacagcagcccccccagcagcctgaacaagaacaacagcgccatcgacagcggcatcaacctgaccaccgacaccagcaagagcgccaccagcagcagccccggcagccccatccacagcctggagaccagcctgtag

SEQ ID NO: 73580 - DNA, 3597 bp, synthetic construct; identical to SEQ ID NO: 73579
  misc_feature 1..3597: note = Description of Artificial Sequence: Synthetic coding sequence
  source 1..3597: mol_type = other DNA

SEQ ID NO: 73581 - DNA, 1299 bp, synthetic construct
  misc_feature 1..1299: note = Description of Artificial Sequence: Synthetic coding sequence
  source 1..1299: mol_type = other DNA
atgaccgtggtgcaggcctacgtgggcgacgtgcactacaaggagatccccgaccccagcagcatcaacaccaagaccatggagctgctgatcaacgccatcgccatcaacagcgcctacaccaccaagatcctgccccccgagaaggagggcgccctgcccagacaggtgggcaacgtgtacgacagcatcagcaagttcctgcagttccagctgaccgtgaacgtggtggccgtgatcgtggccttcaccggcgcctgcatcacccaggacagccccctgaaggccgtgcagatgctgtgggtgaacctgatcatggacaccttcgccagcctggccctggccaccgagccccccaccgagaccctgctgctgagaaagccctacggcagaaacaagcccctgatcagcagaaccatgatgaagaacatcctgggccacgccgtgtaccagctggccctgatcttcaccctgctgttcgtgggcgagaagatgttccagatcgacagcggcagaaacgcccccctgcacagcccccccagcgagcactacaccatcatcttcaacaccttcgtgatgatgcagctgttcaacgagatcaacgccagaaagatccacggcgagagaaacgtgttcgacggcatcttcagaaaccccatcttctgcaccatcgtgctgggcaccttcgccatccagatcgtgatcgtgcagttcggcggcaagcccttcagctgcagccccctgcagctggaccagtggatgtggtgcatcttcatcggcctgggcgagctggtgtggggccaggtgatcgccaccatccccaccagcagactgaagttcctgaaggaggccggcagactgacccagaaggaggagatccccgaggaggagctgaacgaggacgtggaggagatcgaccacgccgagagagagctgagaagaggccagatcctgtggttcagaggcctgaacagaatccagacccagatcagagtggtgaaggccttcagaagcagcctgtacgagggcctggagaagcccgagagcagaaccagcatccacaacttcatggcccaccccgagttcagaatcgaggacagccagccccacatccccctgatcgacgacaccgacctggaggaggacgccgccctgaagcagaacagcagcccccccagcagcctgaacaagaacaacagcgccatcgacagcggcatcaacctgaccaccgacaccagcaagagcgccaccagcagcagccccggcagccccatccacagcctggagaccagcctgtag

SEQ ID NO: 73582 - DNA, 3537 bp, synthetic construct
  misc_feature 1..3537: note = Description of Artificial Sequence: Synthetic coding sequence
  source 1..3537: mol_type = other DNA
atggagctgagaggcaccgaggccgtggtgaagatcaaggagacctacggcgacaccgaggccatctgcagaagactgaagaccagccccgtggagggcctgcccggcaccgcccccgacctggagaagagaaagcagatcttcggccagaacttcatcccccccaagaagcccaagaccttcctgcagctggtgtgggaggccctgcaggacgtgaccctgatcatcctggagatcgccgccatcatcagcctgggcctgagcttctaccacccccccggcgagggcaacgagggctgcgccaccgcccagggcggcgccgaggacgagggcgaggccgaggccggctggatcgagggcgccgccatcctgctgagcgtgatctgcgtggtgctggtgaccgccttcaacgactggagcaaggagaagcagttcagaggcctgcagagcagaatcgagcaggagcagaagttcaccgtggtgagagccggccaggtggtgcagatccccgtggccgagatcgtggtgggcgacatcgcccaggtgaagtacggcgacctgctgcccgccgacggcctgttcatccagggcaacgacctgaagatcgacgagagcagcctgaccggcgagagcgaccaggtgagaaagagcgtggacaaggaccccatgctgctgagcggcacccacgtgatggagggcagcggcagaatgctggtgaccgccgtgggcgtgaacagccagaccggcatcatcttcaccctgctgggcgccggcggcgaggaggaggagaagaaggacaagaagggcaagatgcaggacggcaacgtggacgccagccagagcaaggccaagcagcaggacggcgccgccgccatggagatgcagcccctgaagagcgccgagggcggcgacgccgacgacagaaagaaggccagcatgcacaagaaggagaagagcgtgctgcagggcaagctgaccaagctggccgtgcagatcggcaaggccggcctggtgatgagcgccatcaccgtgatcatcctggtgctgtacttcaccgtggacaccttcgtggtgaacaagaagccctggctgcccgagtgcacccccgtgtacgtgcagtacttcgtgaagttcttcatcatcggcgtgaccgtgctggtggtggccgtgcccgagggcctgcccctggccgtgaccatcagcctggcctacagcgtgaagaagatgatgaaggacaacaacctggtgagacacctggacgcctgcgagaccatgggcaacgccaccgccatctgcagcgacaagaccggcaccctgaccaccaacagaatgaccgtggtgcaggcctacgtgggcgacgtgcactacaaggagatccccgaccccagcagcatcaacaccaagaccatggagctgctgatcaacgccatcgccatcaacagcgcctacaccaccaagatcctgccccccgagaaggagggcgccctgcccagacaggtgggcaacaagaccgagtgcggcctgctgggcttcgtgctggacctgaagcaggactacgagcccgtgagaagccagatgcccgaggagaagctgtacaaggtgtacaccttcaacagcgtgagaaagagcatgagcaccgtgatcaagctgcccgacgagagcttcagaatgtacagcaagggcgccagcgagatcgtgctgaagaagtgctgcaagatcctgaacggcgccggcgagcccagagtgttcagacccagagacagagacgagatggtgaagaaggtgatcgagcccatggcctgcgacggcctgagaaccatctgcgtggcctacagagacttccccagcagccccgagcccgactgggacaacgagaacgacatcctgaacgagctgacctgcatctgcgtggtgggcatcgaggaccccgtgagacccgaggtgcccgaggccatcagaaagtgccagagagccggcatcaccgtgagaatggtgaccggcgacaacatcaacaccgccagagccatcgccatcaagtgcggcatcatccaccccggcgaggacttcctgtgcctggagggcaaggagttcaacagaagaatcagaaacgagaagggcgagatcgagcaggagagaatcgacaagatctggcccaagctgagagtgctggccagaagcagccccaccgacaagcacaccctggtgaagggcatcatcgacagcacccacaccgagcagagacaggtggtggccgtgaccggcgacggcaccaacgacggccccgccctgaagaaggccgacgtgggcttcgccatgggcatcgccggcaccgacgtggccaaggaggccagcgacatcatcctgaccgacgacaacttcagcagcatcgtgaaggccgtgatgtggggcagaaacgtgtacgacagcatcagcaagttcctgcagttccagctgaccgtgaacgtggtggccgtgatcgtggccttcaccggcgcctgcatcacccaggacagccccctgaaggccgtgcagatgctgtgggtgaacctgatcatggacaccttcgccagcctggccctggccaccgagccccccaccgagaccctgctgctgagaaagccctacggcagaaacaagcccctgatcagcagaaccatgatgaagaacatcctgggccacgccgtgtaccagctggccctgatcttcaccctgctgttcgtgggcgagaagatgttccagatcgacagcggcagaaacgcccccctgcacagcccccccagcgagcactacaccatcatcttcaacaccttcgtgatgatgcagctgttcaacgagatcaacgccagaaagatccacggcgagagaaacgtgttcgacggcatcttcagaaaccccatcttctgcaccatcgtgctgggcaccttcgccatccagatcgtgatcgtgcagttcggcggcaagcccttcagctgcagccccctgcagctggaccagtggatgtggtgcatcttcatcggcctgggcgagctggtgtggggccaggtgatcgccaccatccccaccagcagactgaagttcctgaaggaggccggcagactgacccagaaggaggagatccccgaggaggagctgaacgaggacgtggaggagatcgaccacgccgagagagagctgagaagaggccagatcctgtggttcagaggcctgaacagaatccagacccagatcagagtggtgaaggccttcagaagcagcctgtacgagggcctggagaagcccgagagcagaaccagcatccacaacttcatggcccaccccgagttcagaatcgaggacagccagccccacatccccctgatcgacgacaccgacctggaggaggacgccgccctgaagcagaacagcagcccccccagcagcctgaacaagaacaacagcgccatcgacagcggcatcaacctgaccaccgacaccagcaagagcgccaccagcagcagccccggcagccccatccacagcctggagaccagcctgtag

SEQ ID NO: 73583 - DNA, 3663 bp, synthetic construct
  misc_feature 1..3663: note = Description of Artificial Sequence: Synthetic coding sequence
  source 1..3663: mol_type = other DNA
atgggcgacatggccaacagcagcatcgagttccaccccaagccccagcagcagagagacgtgccccaggccggcggcttcggctgcaccctggccgagctgagaaccctgatggagctgagaggcgccgaggccctgcagaagatcgaggaggcctacggcgacgtgagcggcctgtgcagaagactgaagaccagccccaccgagggcctggccgacaacaccaacgacctggagaagagaagacagatctacggccagaacttcatcccccccaagcagcccaagaccttcctgcagctggtgtgggaggccctgcaggacgtgaccctgatcatcctggaggtggccgccatcgtgagcctgggcctgagcttctacgccccccccggcgaggagagcgaggcctgcggcaacgtgagcggcggcgccgaggacgagggcgaggccgaggccggctggatcgagggcgccgccatcctgctgagcgtgatctgcgtggtgctggtgaccgccttcaacgactggagcaaggagaagcagttcagaggcctgcagagcagaatcgagcaggagcagaagttcaccgtgatcagaaacggccagctgctgcaggtgcccgtggccgccctggtggtgggcgacatcgcccaggtgaagtacggcgacctgctgcccgccgacggcgtgctgatccaggccaacgacctgaagatcgacgagagcagcctgaccggcgagagcgaccacgtgagaaagagcgccgacaaggaccccatgctgctgagcggcacccacgtgatggagggcagcggcagaatggtggtgaccgccgtgggcgtgaacagccagaccggcatcatcttcaccctgctgggcgccggcggcgaggaggaggagaagaaggacaagaagggcaagcagcaggacggcgccatggagagcagccagaccaaggccaagaagcaggacggcgccgtggccatggagatgcagcccctgaagagcgccgagggcggcgagatggaggagagagagaagaagaaggccaacgcccccaagaaggagaagagcgtgctgcagggcaagctgaccaagctggccgtgcagatcggcaaggccggcctggtgatgagcgccatcaccgtgatcatcctggtgctgtacttcgtgatcgagaccttcgtggtggagggcagaacctggctggccgagtgcacccccgtgtacgtgcagtacttcgtgaagttcttcatcatcggcgtgaccgtgctggtggtggccgtgcccgagggcctgcccctggccgtgaccatcagcctggcctacagcgtgaagaagatgatgaaggacaacaacctggtgagacacctggacgcctgcgagaccatgggcaacgccaccgccatctgcagcgacaagaccggcaccctgaccaccaacagaatgaccgtggtgcagagctacctgggcgacacccactacaaggagatccccgcccccagcgccctgacccccaagatcctggacctgctggtgcacgccatcagcatcaacagcgcctacaccaccaagatcctgccccccgagaaggagggcgccctgcccagacaggtgggcaacaagaccgagtgcgccctgctgggcttcgtgctggacctgaagagagacttccagcccgtgagagagcagatccccgaggacaagctgtacaaggtgtacaccttcaacagcgtgagaaagagcatgagcaccgtgatcagaatgcccgacggcggcttcagactgttcagcaagggcgccagcgagatcctgctgaagaagtgcaccaacatcctgaacagcaacggcgagctgagaggcttcagacccagagacagagacgacatggtgagaaagatcatcgagcccatggcctgcgacggcctgagaaccatctgcatcgcctacagagacttcagcgccggccaggagcccgactgggacaacgagaacgaggtggtgggcgacctgacctgcatcgccgtggtgggcatcgaggaccccgtgagacccgaggtgcccgaggccatcagaaagtgccagagagccggcatcaccgtgagaatggtgaccggcgacaacatcaacaccgccagagccatcgccgccaagtgcggcatcatccagcccggcgaggacttcctgtgcctggagggcaaggagttcaacagaagaatcagaaacgagaagggcgagatcgagcaggagagactggacaaggtgtggcccaagctgagagtgctggccagaagcagccccaccgacaagcacaccctggtgaagggcatcatcgacagcaccaccggcgagcagagacaggtggtggccgtgaccggcgacggcaccaacgacggccccgccctgaagaaggccgacgtgggcttcgccatgggcatcgccggcaccgacgtggccaaggaggccagcgacatcatcctgaccgacgacaacttcaccagcatcgtgaaggccgtgatgtggggcagaaacgtgtacgacagcatcagcaagttcctgcagttccagctgaccgtgaacgtggtggccgtgatcgtggccttcaccggcgcctgcatcacccaggacagccccctgaaggccgtgcagatgctgtgggtgaacctgatcatggacaccttcgccagcctggccctggccaccgagccccccaccgagagcctgctgctgagaaagccctacggcagagacaagcccctgatcagcagaaccatgatgaagaacatcctgggccacgccgtgtaccagctggccatcatcttcaccctgctgttcgtgggcgagctgttcttcgacatcgacagcggcagaaacgcccccctgcacagcccccccagcgagcactacaccatcatcttcaacaccttcgtgatgatgcagctgttcaacgagatcaacgccagaaagatccacggcgagagaaacgtgttcgacggcatcttcagcaaccccatcttctgcaccatcgtgctgggcaccttcggcatccagatcgtgatcgtgcagttcggcggcaagcccttcagctgcagccccctgagcaccgagcagtggctgtggtgcctgttcgtgggcgtgggcgagctggtgtggggccaggtgatcgccaccatccccaccagccagctgaagtgcctgaaggaggccggccacggccccggcaaggacgagatgaccgacgaggagctggccgagggcgaggaggagatcgaccacgccgagagagagctgagaagaggccagatcctgtggttcagaggcctgaacagaatccagacccagatcagagtggtgaaggccttcagaagcagcctgtacgagggcctggagaagcccgagagcaagaccagcatccacaacttcatggccacccccgagttcctgatcaacgactacacccacaacatccccctgatcgacgacaccgacgtggacgagaacgaggagagactgagagccccccccccccccagccccaaccagaacaacaacgccatcgacagcggcatctacctgaccacccacgtgaccaagagcgccaccagcagcgtgttcagcagcagccccggcagccccctgcacagcgtggagaccagcctgtag

SEQ ID NO: 73584 - DNA, 3663 bp, synthetic construct; identical to SEQ ID NO: 73583
  misc_feature 1..3663: note = Description of Artificial Sequence: Synthetic coding sequence
  source 1..3663: mol_type = other DNA

SEQ ID NO: 73585 - DNA, 3522 bp, synthetic construct
  misc_feature 1..3522: note = Description of Artificial Sequence: Synthetic coding sequence
  source 1..3522: mol_type = other DNA
atgggcgacatggccaacagcagcatcgagttccaccccaagccccagcagcagagagacgtgccccaggccggcggcttcggctgcaccctggccgagctgagaaccctgatggagctgagaggcgccgaggccctgcagaagatcgaggaggcctacggcgacgtgagcggcctgtgcagaagactgaagaccagccccaccgagggcctggccgacaacaccaacgacctggagaagagaagacagatctacggccagaacttcatcccccccaagcagcccaagaccttcctgcagctggtgtgggaggccctgcaggacgtgaccctgatcatcctggaggtggccgccatcgtgagcctgggcctgagcttctacgccccccccggcgaggagagcgaggcctgcggcaacgtgagcggcggcgccgaggacgagggcgaggccgaggccggctggatcgagggcgccgccatcctgctgagcgtgatctgcgtggtgctggtgaccgccttcaacgactggagcaaggagaagcagttcagaggcctgcagagcagaatcgagcaggagcagaagttcaccgtgatcagaaacggccagctgctgcaggtgcccgtggccgccctggtggtgggcgacatcgcccaggtgaagtacggcgacctgctgcccgccgacggcgtgctgatccaggccaacgacctgaagatcgacgagagcagcctgaccggcgagagcgaccacgtgagaaagagcgccgacaaggaccccatgctgctgagcggcacccacgtgatggagggcagcggcagaatggtggtgaccgccgtgggcgtgaacagccagaccggcatcatcttcaccctgctgggcgccggcggcgaggaggaggagaagaaggacaagaagggcaagcagcaggacggcgccatggagagcagccagaccaaggccaagaagcaggacggcgccgtggccatggagatgcagcccctgaagagcgccgagggcggcgagatggaggagagagagaagaagaaggccaacgcccccaagaaggagaagagcgtgctgcagggcaagctgaccaagctggccgtgcagatcggcaaggccggcctggtgatgagcgccatcaccgtgatcatcctggtgctgtacttcgtgatcgagaccttcgtggtggagggcagaacctggctggccgagtgcacccccgtgtacgtgcagtacttcgtgaagttcttcatcatcggcgtgaccgtgctggtggtggccgtgcccgagggcctgcccctggccgtgaccatcagcctggcctacagcgtgaagaagatgatgaaggacaacaacctggtgagacacctggacgcctgcgagaccatgggcaacgccaccgccatctgcagcgacaagaccggcaccctgaccaccaacagaatgaccgtggtgcagagctacctgggcgacacccactacaaggagatccccgcccccagcgccctgacccccaagatcctggacctgctggtgcacgccatcagcatcaacagcgcctacaccaccaagatcctgccccccgagaaggagggcgccctgcccagacaggtgggcaacaagaccgagtgcgccctgctgggcttcgtgctggacctgaagagagacttccagcccgtgagagagcagatccccgaggacaagctgtacaaggtgtacaccttcaacagcgtgagaaagagcatgagcaccgtgatcagaatgcccgacggcggcttcagactgttcagcaagggcgccagcgagatcctgctgaagaagtgcaccaacatcctgaacagcaacggcgagctgagaggcttcagacccagagacagagacgacatggtgagaaagatcatcgagcccatggcctgcgacggcctgagaaccatctgcatcgcctacagagacttcagcgccggccaggagcccgactgggacaacgagaacgaggtggtgggcgacctgacctgcatcgccgtggtgggcatcgaggaccccgtgagacccgaggtgcccgaggccatcagaaagtgccagagagccggcatcaccgtgagaatggtgaccggcgacaacatcaacaccgccagagccatcgccgccaagtgcggcatcatccagcccggcgaggacttcctgtgcctggagggcaaggagttcaacagaagaatcagaaacgagaagggcgagatcgagcaggagagactggacaaggtgtggcccaagctgagagtgctggccagaagcagccccaccgacaagcacaccctggtgaagggcatcatcgacagcaccaccggcgagcagagacaggtggtggccgtgaccggcgacggcaccaacgacggccccgccctgaagaaggccgacgtgggcttcgccatgggcatcgccggcaccgacgtggccaaggaggccagcgacatcatcctgaccgacgacaacttcaccagcatcgtgaaggccgtgatgtggggcagaaacgtgtacgacagcatcagcaagttcctgcagttccagctgaccgtgaacgtggtggccgtgatcgtggccttcaccggcgcctgcatcacccaggacagccccctgaaggccgtgcagatgctgtgggtgaacctgatcatggacaccttcgccagcctggccctggccaccgagccccccaccgagagcctgctgctgagaaagccctacggcagagacaagcccctgatcagcagaaccatgatgaagaacatcctgggccacgccgtgtaccagctggccatcatcttcaccctgctgttcgtgggcgagctgttcttcgacatcgacagcggcagaaacgcccccctgcacagcccccccagcgagcactacaccatcatcttcaacaccttcgtgatgatgcagctgttcaacgagatcaacgccagaaagatccacggcgagagaaacgtgttcgacggcatcttcagcaaccccatcttctgcaccatcgtgctgggcaccttcggcatccagatcgtgatcgtgcagttcggcggcaagcccttcagctgcagccccctgagcaccgagcagtggctgtggtgcctgttcgtgggcgtgggcgagctggtgtggggccaggtgatcgccaccatccccaccagccagctgaagtgcctgaaggaggccggccacggccccggcaaggacgagatgaccgacgaggagctggccgagggcgaggaggagatcgaccacgccgagagagagctgagaagaggccagatcctgtggttcagaggcctgaacagaatccagacccagatggaggtggtgagcaccttcaagagaagcggcagcgtgcagggcgccgtgagaagaagaagcagcgtgctgagccagctgcacgacgtgaccaacctgagcacccccacccacgccatcctgagcgccgccaaccccaccagcgccgccggcaaccccggcggcgagagcgtgccctag

SEQ ID NO: 73586 - DNA, 3480 bp, synthetic construct
  misc_feature 1..3480: note = Description of Artificial Sequence: Synthetic coding sequence
  source 1..3480: mol_type = other DNA
atgggcgacatggccaacagcagcatcgagttccaccccaagccccagcagcagagagacgtgccccaggccggcggcttcggctgcaccctggccgagctgagaaccctgatggagctgagaggcgccgaggccctgcagaagatcgaggaggcctacggcgacgtgagcggcctgtgcagaagactgaagaccagccccaccgagggcctggccgacaacaccaacgacctggagaagagaagacagatctacggccagaacttcatcccccccaagcagcccaagaccttcctgcagctggtgtgggaggccctgcaggacgtgaccctgatcatcctggaggtggccgccatcgtgagcctgggcctgagcttctacgccccccccggcgaggagagcgaggcctgcggcaacgtgagcggcggcgccgaggacgagggcgaggccgaggccggctggatcgagggcgccgccatcctgctgagcgtgatctgcgtggtgctggtgaccgccttcaacgactggagcaaggagaagcagttcagaggcctgcagagcagaatcgagcaggagcagaagttcaccgtgatcagaaacggccagctgctgcaggtgcccgtggccgccctggtggtgggcgacatcgcccaggtgaagtacggcgacctgctgcccgccgacggcgtgctgatccaggccaacgacctgaagatcgacgagagcagcctgaccggcgagagcgaccacgtgagaaagagcgccgacaaggaccccatgctgctgagcggcacccacgtgatggagggcagcggcagaatggtggtgaccgccgtgggcgtgaacagccagaccggcatcatcttcaccctgctgggcgccggcggcgaggaggaggagaagaaggacaagaaggccaagaagcaggacggcgccgtggccatggagatgcagcccctgaagagcgccgagggcggcgagatggaggagagagagaagaagaaggccaacgcccccaagaaggagaagagcgtgctgcagggcaagctgaccaagctggccgtgcagatcggcaaggccggcctggtgatgagcgccatcaccgtgatcatcctggtgctgtacttcgtgatcgagaccttcgtggtggagggcagaacctggctggccgagtgcacccccgtgtacgtgcagtacttcgtgaagttcttcatcatcggcgtgaccgtgctggtggtggccgtgcccgagggcctgcccctggccgtgaccatcagcctggcctacagcgtgaagaagatgatgaaggacaacaacctggtgagacacctggacgcctgcgagaccatgggcaacgccaccgccatctgcagcgacaagaccggcaccctgaccaccaacagaatgaccgtggtgcagagctacctgggcgacacccactacaaggagatccccgcccccagcgccctgacccccaagatcctggacctgctggtgcacgccatcagcatcaacagcgcctacaccaccaagatcctgccccccgagaaggagggcgccctgcccagacaggtgggcaacaagaccgagtgcgccctgctgggcttcgtgctggacctgaagagagacttccagcccgtgagagagcagatccccgaggacaagctgtacaaggtgtacaccttcaacagcgtgagaaagagcatgagcaccgtgatcagaatgcccgacggcggcttcagactgttcagcaagggcgccagcgagatcctgctgaagaagtgcaccaacatcctgaacagcaacggcgagctgagaggcttcagacccagagacagagacgacatggtgagaaagatcatcgagcccatggcctgcgacggcctgagaaccatctgcatcgcctacagagacttcagcgccggccaggagcccgactgggacaacgagaacgaggtggtgggcgacctgacctgcatcgccgtggtgggcatcgaggaccccgtgagacccgaggtgcccgaggccatcagaaagtgccagagagccggcatcaccgtgagaatggtgaccggcgacaacatcaacaccgccagagccatcgccgccaagtgcggcatcatccagcccggcgaggacttcctgtgcctggagggcaaggagttcaacagaagaatcagaaacgagaagggcgagatcgagcaggagagactggacaaggtgtggcccaagctgagagtgctggccagaagcagccccaccgacaagcacaccctggtgaagggcatcatcgacagcaccaccggcgagcagagacaggtggtggccgtgaccggcgacggcaccaacgacggccccgccctgaagaaggccgacgtgggcttcgccatgggcatcgccggcaccgacgtggccaaggaggccagcgacatcatcctgaccgacgacaacttcaccagcatcgtgaaggccgtgatgtggggcagaaacgtgtacgacagcatcagcaagttcctgcagttccagctgaccgtgaacgtggtggccgtgatcgtggccttcaccggcgcctgcatcacccaggacagccccctgaaggccgtgcagatgctgtgggtgaacctgatcatggacaccttcgccagcctggccctggccaccgagccccccaccgagagcctgctgctgagaaagccctacggcagagacaagcccctgatcagcagaaccatgatgaagaacatcctgggccacgccgtgtaccagctggccatcatcttcaccctgctgttcgtgggcgagctgttcttcgacatcgacagcggcagaaacgcccccctgcacagcccccccagcgagcactacaccatcatcttcaacaccttcgtgatgatgcagctgttcaacgagatcaacgccagaaagatccacggcgagagaaacgtgttcgacggcatcttcagcaaccccatcttctgcaccatcgtgctgggcaccttcggcatccagatcgtgatcgtgcagttcggcggcaagcccttcagctgcagccccctgagcaccgagcagtggctgtggtgcctgttcgtgggcgtgggcgagctggtgtggggccaggtgatcgccaccatccccaccagccagctgaagtgcctgaaggaggccggccacggccccggcaaggacgagatgaccgacgaggagctggccgagggcgaggaggagatcgaccacgccgagagagagctgagaagaggccagatcctgtggttcagaggcctgaacagaatccagacccagatggaggtggtgagcaccttcaagagaagcggcagcgtgcagggcgccgtgagaagaagaagcagcgtgctgagccagctgcacgacgtgaccaacctgagcacccccacccacgccatcctgagcgccgccaaccccaccagcgccgccggcaaccccggcggcgagagcgtgccctag

SEQ ID NO: 73587 - DNA, 3480 bp, synthetic construct; identical to SEQ ID NO: 73586
  misc_feature 1..3480: note = Description of Artificial Sequence: Synthetic coding sequence
  source 1..3480: mol_type = other DNA

SEQ ID NO: 73588 - DNA, 3465 bp, synthetic construct
  misc_feature 1..3465: note = Description of Artificial Sequence: Synthetic coding sequence
  source 1..3465: mol_type = other DNA
atgggcgacatggccaacagcagcatcgagttccaccccaagccccagcagcagagagacgtgccccaggccggcggcttcggctgcaccctggccgagctgagaaccctgatggagctgagaggcgccgaggccctgcagaagatcgaggaggcctacggcgacgtgagcggcctgtgcagaagactgaagaccagccccaccgagggcctggccgacaacaccaacgacctggagaagagaagacagatctacggccagaacttcatcccccccaagcagcccaagaccttcctgcagctggtgtgggaggccctgcaggacgtgaccctgatcatcctggaggtggccgccatcgtgagcctgggcctgagcttctacgccccccccggcgaggagagcgaggcctgcggcaacgtgagcggcggcgccgaggacgagggcgaggccgaggccggctggatcgagggcgccgccatcctgctgagcgtgatctgcgtggtgctggtgaccgccttcaacgactggagcaaggagaagcagttcagaggcctgcagagcagaatcgagcaggagcagaagttcaccgtgatcagaaacggccagctgctgcaggtgcccgtggccgccctggtggtgggcgacatcgcccaggtgaagtacggcgacctgctgcccgccgacggcgtgctgatccaggccaacgacctgaagatcgacgagagcagcctgaccggcgagagcgaccacgtgagaaagagcgccgacaaggaccccatgctgctgagcggcacccacgtgatggagggcagcggcagaatggtggtgaccgccgtgggcgtgaacagccagaccggcatcatcttcaccctgctgggcgccggcggcgaggaggaggagaagaaggacaagaaggccaagaagcaggacggcgccgtggccatggagatgcagcccctgaagagcgccgagggcggcgagatggaggagagagagaagaagaaggccaacgcccccaagaaggagaagagcgtgctgcagggcaagctgaccaagctggccgtgcagatcggcaaggccggcctggtgatgagcgccatcaccgtgatcatcctggtgctgtacttcgtgatcgagaccttcgtggtggagggcagaacctggctggccgagtgcacccccgtgtacgtgcagtacttcgtgaagttcttcatcatcggcgtgaccgtgctggtggtggccgtgcccgagggcctgcccctggccgtgaccatcagcctggcctacagcgtgaagaagatgatgaaggacaacaacctggtgagacacctggacgcctgcgagaccatgggcaacgccaccgccatctgcagcgacaagaccggcaccctgaccaccaacagaatgaccgtggtgcagagctacctgggcgacacccactacaaggagatccccgcccccagcgccctgacccccaagatcctggacctgctggtgcacgccatcagcatcaacagcgcctacaccaccaagatcctgccccccgagaaggagggcgccctgcccagacaggtgggcaacaagaccgagtgcgccctgctgggcttcgtgctggacctgaagagagacttccagcccgtgagagagcagatccccgaggacaagctgtacaaggtgtacaccttcaacagcgtgagaaagagcatgagcaccgtgatcagaatgcccgacggcggcttcagactgttcagcaagggcgccagcgagatcctgctgaagaagtgcaccaacatcctgaacagcaacggcgagctgagaggcttcagacccagagacagagacgacatggtgagaaagatcatcgagcccatggcctgcgacggcctgagaaccatctgcatcgcctacagagacttcagcgccggccaggagcccgactgggacaacgagaacgaggtggtgggcgacctgacctgcatcgccgtggtgggcatcgaggaccccgtgagacccgaggtgcccgaggccatcagaaagtgccagagagccggcatcaccgtgagaatggtgaccggcgacaacatcaacaccgccagagccatcgccgccaagtgcggcatcatccagcccggcgaggacttcctgtgcctggagggcaaggagttcaacagaagaatcagaaacgagaagggcgagatcgagcaggagagactggacaaggtgtggcccaagctgagagtgctggccagaagcagccccaccgacaagcacaccctggtgaagggcatcatcgacagcaccaccggcgagcagagacaggtggtggccgtgaccggcgacggcaccaacgacggccccgccctgaagaaggccgacgtgggcttcgccatgggcatcgccggcaccgacgtggccaaggaggccagcgacatcatcctgaccgacgacaacttcaccagcatcgtgaaggccgtgatgtggggcagaaacgtgtacgacagcatcagcaagttcctgcagttccagctgaccgtgaacgtggtggccgtgatcgtggccttcaccggcgcctgcatcacccaggacagccccctgaaggccgtgcagatgctgtgggtgaacctgatcatggacaccttcgccagcctggccctggccaccgagccccccaccgagagcctgctgctgagaaagccctacggcagagacaagcccctgatcagcagaaccatgatgaagaacatcctgggccacgccgtgtaccagctggccatcatcttcaccctgctgttcgtgggcgagctgttcttcgacatcgacagcggcagaaacgcccccctgcacagcccccccagcgagcactacaccatcatcttcaacaccttcgtgatgatgcagctgttcaacgagatcaacgccagaaagatccacggcgagagaaacgtgttcgacggcatcttcagcaaccccatcttctgcaccatcgtgctgggcaccttcggcatccagatcgtgatcgtgcagttcggcggcaagcccttcagctgcagccccctgagcaccgagcagtggctgtggtgcctgttcgtgggcgtgggcgagctggtgtggggccaggtgatcgccaccatccccaccagccagctgaagtgcctgaaggaggccggccacggccccggcaaggacgagatgaccgacgaggagctggccgagggcgaggaggagatcgaccacgccgagagagagctgagaagaggccagatcctgtggttcagaggcctgaacagaatccagacccagatggaggtggtgagcaccttcaagagaagcggcagcgtgcagggcgccgtgagaagaagaagcagcgtgctgagccagctgcacgacgtgaccaacctgagcacccccacccacgccatcctgagcgccgccaaccccaccagcgccgccggcagcgagagctag

SEQ ID NO: 73589 - DNA, 3513 bp, synthetic construct
  misc_feature 1..3513: note = Description of Artificial Sequence: Synthetic coding sequence
  source 1..3513: mol_type = other DNA
atgaccaaccccagcgacagagtgctgcccgccaacagcatggccgagagcagagagggcgacttcggctgcaccgtgatggagctgagaaagctgatggagctgagaagcagagacgccctgacccagatcaacgtgcactacggcggcgtgcagaacctgtgcagcagactgaagaccagccccgtggagggcctgagcggcaaccccgccgacctggagaagagaagacaggtgttcggccacaacgtgatcccccccaagaagcccaagaccttcctggagctggtgtgggaggccctgcaggacgtgaccctgatcatcctggagatcgccgccatcatcagcctggtgctgagcttctacagacccgccggcgaggagaacgagctgtgcggccaggtggccaccacccccgaggacgagaacgaggcccaggccggctggatcgagggcgccgccatcctgttcagcgtgatcatcgtggtgctggtgaccgccttcaacgactggagcaaggagaagcagttcagaggcctgcagtgcagaatcgagcaggagcagaagttcagcatcatcagaaacggccagctgatccagctgcccgtggccgagatcgtggtgggcgacatcgcccaggtgaagtacggcgacctgctgcccgccgacggcatcctgatccagggcaacgacctgaagatcgacgagagcagcctgaccggcgagagcgaccacgtgaagaagagcctggacaaggaccccatgctgctgagcggcacccacgtgatggagggcagcggcagaatggtggtgaccgccgtgggcgtgaacagccagaccggcatcatcctgaccctgctgggcgtgaacgaggacgacgagggcgagaagaagaagaagggcaagaagcagggcgtgcccgagaacagaaacaaggccaagacccaggacggcgtggccctggagatccagcccctgaacagccaggagggcatcgacaacgaggagaaggacaagaaggccgtgaaggtgcccaagaaggagaagagcgtgctgcagggcaagctgaccagactggccgtgcagatcggcaaggccggcctgctgatgagcgccctgaccgtgttcatcctgatcctgtacttcgtgatcgacaacttcgtgatcaacagaagaccctggctgcccgagtgcacccccatctacatccagtacttcgtgaagttcttcatcatcggcatcaccgtgctggtggtggccgtgcccgagggcctgcccctggccgtgaccatcagcctggcctacagcgtgaagaagatgatgaaggacaacaacctggtgagacacctggacgcctgcgagaccatgggcaacgccaccgccatctgcagcgacaagaccggcaccctgaccatgaacagaatgaccgtggtgcaggcctacatcggcggcatccactacagacagatccccagccccgacgtgttcctgcccaaggtgctggacctgatcgtgaacggcatcagcatcaacagcgcctacaccagcaagatcctgccccccgagaaggagggcggcctgcccagacaggtgggcaacaagaccgagtgcgccctgctgggcttcgtgaccgacctgaagcaggactaccaggccgtgagaaacgaggtgcccgaggagaagctgtacaaggtgtacaccttcaacagcgtgagaaagagcatgagcaccgtgatcagaaaccccaacggcggcttcagaatgtacagcaagggcgccagcgagatcatcctgagaaagtgcaacagaatcctggacagaaagggcgaggccgtgcccttcaagaacaaggacagagacgacatggtgagaaccgtgatcgagcccatggcctgcgacggcctgagaaccatctgcatcgcctacagagacttcgacgacaccgagcccagctgggacaacgagaacgagatcctgaccgagctgacctgcatcgccgtggtgggcatcgaggaccccgtgagacccgaggtgcccgacgccatcgccaagtgcaagcaggccggcatcaccgtgagaatggtgaccggcgacaacatcaacaccgccagagccatcgccaccaagtgcggcatcctgacccccggcgacgacttcctgtgcctggagggcaaggagttcaacagactgatcagaaacgagaagggcgaggtggagcaggagaagctggacaagatctggcccaagctgagagtgctggccagaagcagccccaccgacaagcacaccctggtgaagggcatcatcgacagcaccgtgggcgagcacagacaggtggtggccgtgaccggcgacggcaccaacgacggccccgccctgaagaaggccgacgtgggcttcgccatgggcatcgccggcaccgacgtggccaaggaggccagcgacatcatcctgaccgacgacaacttcaccagcatcgtgaaggccgtgatgtggggcagaaacgtgtacgacagcatcagcaagttcctgcagttccagctgaccgtgaacgtggtggccgtgatcgtggccttcaccggcgcctgcatcacccaggacagccccctgaaggccgtgcagatgctgtgggtgaacctgatcatggacaccttcgccagcctggccctggccaccgagccccccaccgagagcctgctgaagagaagaccctacggcagaaacaagcccctgatcagcagaaccatgatgaagaacatcctgggccacgccttctaccagctgatcgtgatcttcatcctggtgttcgccggcgagaagttcttcgacatcgacagcggcagaaaggcccccctgcacagcccccccagccagcactacaccatcgtgttcaacaccttcgtgctgatgcagctgttcaacgagatcaacagcagaaagatccacggcgagaagaacgtgttcagcggcatctacagaaacatcatcttctgcagcgtggtgctgggcaccttcatctgccagatcttcatcgtggagttcggcggcaagcccttcagctgcaccagcctgagcctgagccagtggctgtggtgcctgttcatcggcatcggcgagctgctgtggggccagttcatcagcgccatccccaccagaagcctgaagttcctgaaggaggccggccacggcaccaccaaggaggagatcaccaaggacgccgagggcctggacgagatcgaccacgccgagatggagctgagaagaggccagatcctgtggttcagaggcctgaacagaatccagacccagatcgacgtgatcaacaccttccagaccggcgccagcttcaagggcgtgctgagaagacagaacatgggccagcacctggacgtgaagctggtgcccagcagcagctacgtggccgtggcccccgtgaagagcagccccaccaccagcgtgcccgccgtgagcagcccccccatgggcaaccagagcggccagagcgtgccctag

SEQ ID NO: 73590 - DNA, 390 bp, synthetic construct
  misc_feature 1..390: note = Description of Artificial Sequence: Synthetic coding sequence
  source 1..390: mol_type = other DNA
tgaatcggcgagctgctgtggggccagttcatcagcgccatccccaccagaagcctgaagttcctgaaggaggccggccacggcaccaccaaggaggagatcaccaaggacgccgagggcctggacgagatcgaccacgccgagatggagctgagaagaggccagatcctgtggttcagaggcctgaacagaatccagacccagatcgacgtgatcaacaccttccagaccggcgccagcttcaagggcgtgctgagaagacagaacatgggccagcacctggacgtgaagctggtgcccagcagcagctacgtggccgtggcccccgtgaagagcagccccaccaccagcgtgcccgccgtgagcagcccccccatgggcagcgagtag

SEQ ID NO: 73591 - DNA, 3618 bp, synthetic construct
  misc_feature 1..3618: note = Description of Artificial Sequence: Synthetic coding sequence
  source 1..3618: mol_type = other DNA
atgaccaaccccagcgacagagtgctgcccgccaacagcatggccgagagcagagagggcgacttcggctgcaccgtgatggagctgagaaagctgatggagctgagaagcagagacgccctgacccagatcaacgtgcactacggcggcgtgcagaacctgtgcagcagactgaagaccagccccgtggagggcctgagcggcaaccccgccgacctggagaagagaagacaggtgttcggccacaacgtgatcccccccaagaagcccaagaccttcctggagctggtgtgggaggccctgcaggacgtgaccctgatcatcctggagatcgccgccatcatcagcctggtgctgagcttctacagacccgccggcgaggagaacgagctgtgcggccaggtggccaccacccccgaggacgagaacgaggcccaggccggctggatcgagggcgccgccatcctgttcagcgtgatcatcgtggtgctggtgaccgccttcaacgactggagcaaggagaagcagttcagaggcctgcagtgcagaatcgagcaggagcagaagttcagcatcatcagaaacggccagctgatccagctgcccgtggccgagatcgtggtgggcgacatcgcccaggtgaagtacggcgacctgctgcccgccgacggcatcctgatccagggcaacgacctgaagatcgacgagagcagcctgaccggcgagagcgaccacgtgaagaagagcctggacaaggaccccatgctgctgagcggcacccacgtgatggagggcagcggcagaatggtggtgaccgccgtgggcgtgaacagccagaccggcatcatcctgaccctgctgggcgtgaacgaggacgacgagggcgagaagaagaagaagggcaagaagcagggcgtgcccgagaacagaaacaaggccaagacccaggacggcgtggccctggagatccagcccctgaacagccaggagggcatcgacaacgaggagaaggacaagaaggccgtgaaggtgcccaagaaggagaagagcgtgctgcagggcaagctgaccagactggccgtgcagatcggcaaggccggcctgctgatgagcgccctgaccgtgttcatcctgatcctgtacttcgtgatcgacaacttcgtgatcaacagaagaccctggctgcccgagtgcacccccatctacatccagtacttcgtgaagttcttcatcatcggcatcaccgtgctggtggtggccgtgcccgagggcctgcccctggccgtgaccatcagcctggcctacagcgtgaagaagatgatgaaggacaacaacctggtgagacacctggacgcctgcgagaccatgggcaacgccaccgccatctgcagcgacaagaccggcaccctgaccatgaacagaatgaccgtggtgcaggcctacatcggcggcatccactacagacagatccccagccccgacgtgttcctgcccaaggtgctggacctgatcgtgaacggcatcagcatcaacagcgcctacaccagcaagatcctgccccccgagaaggagggcggcctgcccagacaggtgggcaacaagaccgagtgcgccctgctgggcttcgtgaccgacctgaagcaggactaccaggccgtgagaaacgaggtgcccgaggagaagctgtacaaggtgtacaccttcaacagcgtgagaaagagcatgagcaccgtgatcagaaaccccaacggcggcttcagaatgtacagcaagggcgccagcgagatcatcctgagaaagtgcaacagaatcctggacagaaagggcgaggccgtgcccttcaagaacaaggacagagacgacatggtgagaaccgtgatcgagcccatggcctgcgacggcctgagaaccatctgcatcgcctacagagacttcgacgacaccgagcccagctgggacaacgagaacgagatcctgaccgagctgacctgcatcgccgtggtgggcatcgaggaccccgtgagacccgaggtgcccgacgccatcgccaagtgcaagcaggccggcatcaccgtgagaatggtgaccggcgacaacatcaacaccgccagagccatcgccaccaagtgcggcatcctgacccccggcgacgacttcctgtgcctggagggcaaggagttcaacagactgatcagaaacgagaagggcgaggtggagcaggagaagctggacaagatctggcccaagctgagagtgctggccagaagcagccccaccgacaagcacaccctggtgaagggcatcatcgacagcaccgtgggcgagcacagacaggtggtggccgtgaccggcgacggcaccaacgacggccccgccctgaagaaggccgacgtgggcttcgccatgggcatcgccggcaccgacgtggccaaggaggccagcgacatcatcctgaccgacgacaacttcaccagcatcgtgaaggccgtgatgtggggcagaaacgtgtacgacagcatcagcaagttcctgcagttccagctgaccgtgaacgtggtggccgtgatcgtggccttcaccggcgcctgcatcacccaggacagccccctgaaggccgtgcagatgctgtgggtgaacctgatcatggacaccttcgccagcctggccctggccaccgagccccccaccgagagcctgctgaagagaagaccctacggcagaaacaagcccctgatcagcagaaccatgatgaagaacatcctgggccacgccttctaccagctgatcgtgatcttcatcctggtgttcgccggcgagaagttcttcgacatcgacagcggcagaaaggcccccctgcacagcccccccagccagcactacaccatcgtgttcaacaccttcgtgctgatgcagctgttcaacgagatcaacagcagaaagatccacggcgagaagaacgtgttcagcggcatctacagaaacatcatcttctgcagcgtggtgctgggcaccttcatctgccagatcttcatcgtggagttcggcggcaagcccttcagctgcaccagcctgagcctgagccagtggctgtggtgcctgttcatcggcatcggcgagctgctgtggggccagttcatcagcgccatccccaccagaagcctgaagttcctgaaggaggccggccacggcaccaccaaggaggagatcaccaaggacgccgagggcctggacgagatcgaccacgccgagatggagctgagaagaggccagatcctgtggttcagaggcctgaacagaatccagacccagatcaaggtggtgaaggccttccacagcagcctgcacgagagcatccagaagccctacaaccagaagagcatccacagcttcatgacccaccccgagttcgccatcgaggaggagctgcccagaacccccctgctggacgaggaggaggaggagaaccccgacaaggccagcaagttcggcaccagagtgctgctgctggacggcgaggtgaccccctacgccaacaccaacaacaacgccgtggactgcaaccaggtgcagctgccccagagcgacagcagcctgcagagcctggagaccagcgtgtag

SEQ ID NO: 73592 - DNA, 3513 bp, synthetic construct; identical to SEQ ID NO: 73589
  misc_feature 1..3513: note = Description of Artificial Sequence: Synthetic coding sequence
  source 1..3513: mol_type = other DNA

SEQ ID NO: 73593 - DNA, 3477 bp, synthetic construct
  misc_feature 1..3477: note = Description of Artificial Sequence: Synthetic coding sequence
  source 1..3477: mol_type = other DNA
atgaccaaccccagcgacagagtgctgcccgccaacagcatggccgagagcagagagggcgacttcggctgcaccgtgatggagctgagaaagctgatggagctgagaagcagagacgccctgacccagatcaacgtgcactacggcggcgtgcagaacctgtgcagcagactgaagaccagccccgtggagggcctgagcggcaaccccgccgacctggagaagagaagacaggtgttcggccacaacgtgatcccccccaagaagcccaagaccttcctggagctggtgtgggaggccctgcaggacgtgaccctgatcatcctggagatcgccgccatcatcagcctggtgctgagcttctacagacccgccggcgaggagaacgagctgtgcggccaggtggccaccacccccgaggacgagaacgaggcccaggccggctggatcgagggcgccgccatcctgttcagcgtgatcatcgtggtgctggtgaccgccttcaacgactggagcaaggagaagcagttcagaggcctgcagtgcagaatcgagcaggagcagaagttcagcatcatcagaaacggccagctgatccagctgcccgtggccgagatcgtggtgggcgacatcgcccaggtgaagtacggcgacctgctgcccgccgacggcatcctgatccagggcaacgacctgaagatcgacgagagcagcctgaccggcgagagcgaccacgtgaagaagagcctggacaaggaccccatgctgctgagcggcacccacgtgatggagggcagcggcagaatggtggtgaccgccgtgggcgtgaacagccagaccggcatcatcctgaccctgctgggcgtgaacgaggacgacgagggcgagaagaagaagaaggccaagacccaggacggcgtggccctggagatccagcccctgaacagccaggagggcatcgacaacgaggagaaggacaagaaggccgtgaaggtgcccaagaaggagaagagcgtgctgcagggcaagctgaccagactggccgtgcagatcggcaaggccggcctgctgatgagcgccctgaccgtgttcatcctgatcctgtacttcgtgatcgacaacttcgtgatcaacagaagaccctggctgcccgagtgcacccccatctacatccagtacttcgtgaagttcttcatcatcggcatcaccgtgctggtggtggccgtgcccgagggcctgcccctggccgtgaccatcagcctggcctacagcgtgaagaagatgatgaaggacaacaacctggtgagacacctggacgcctgcgagaccatgggcaacgccaccgccatctgcagcgacaagaccggcaccctgaccatgaacagaatgaccgtggtgcaggcctacatcggcggcatccactacagacagatccccagccccgacgtgttcctgcccaaggtgctggacctgatcgtgaacggcatcagcatcaacagcgcctacaccagcaagatcctgccccccgagaaggagggcggcctgcccagacaggtgggcaacaagaccgagtgcgccctgctgggcttcgtgaccgacctgaagcaggactaccaggccgtgagaaacgaggtgcccgaggagaagctgtacaaggtgtacaccttcaacagcgtgagaaagagcatgagcaccgtgatcagaaaccccaacggcggcttcagaatgtacagcaagggcgccagcgagatcatcctgagaaagtgcaacagaatcctggacagaaagggcgaggccgtgcccttcaagaacaaggacagagacgacatggtgagaaccgtgatcgagcccatggcctgcgacggcctgagaaccatctgcatcgcctacagagacttcgacgacaccgagcccagctgggacaacgagaacgagatcctgaccgagctgacctgcatcgccgtggtgggcatcgaggaccccgtgagacccgaggtgcccgacgccatcgccaagtgcaagcaggccggcatcaccgtgagaatggtgaccggcgacaacatcaacaccgccagagccatcgccaccaagtgcggcatcctgacccccggcgacgacttcctgtgcctggagggcaaggagttcaacagactgatcagaaacgagaagggcgaggtggagcaggagaagctggacaagatctggcccaagctgagagtgctggccagaagcagccccaccgacaagcacaccctggtgaagggcatcatcgacagcaccgtgggcgagcacagacaggtggtggccgtgaccggcgacggcaccaacgacggccccgccctgaagaaggccgacgtgggcttcgccatgggcatcgccggcaccgacgtggccaaggaggccagcgacatcatcctgaccgacgacaacttcaccagcatcgtgaaggccgtgatgtggggcagaaacgtgtacgacagcatcagcaagttcctgcagttccagctgaccgtgaacgtggtggccgtgatcgtggccttcaccggcgcctgcatcacccaggacagccccctgaaggccgtgcagatgctgtgggtgaacctgatcatggacaccttcgccagcctggccctggccaccgagccccccaccgagagcctgctgaagagaagaccctacggcagaaacaagcccctgatcagcagaaccatgatgaagaacatcctgggccacgccttctaccagctgatcgtgatcttcatcctggtgttcgccggcgagaagttcttcgacatcgacagcggcagaaaggcccccctgcacagcccccccagccagcactacaccatcgtgttcaacaccttcgtgctgatgcagctgttcaacgagatcaacagcagaaagatccacggcgagaagaacgtgttcagcggcatctacagaaacatcatcttctgcagcgtggtgctgggcaccttcatctgccagatcttcatcgtggagttcggcggcaagcccttcagctgcaccagcctgagcctgagccagtggctgtggtgcctgttcatcggcatcggcgagctgctgtggggccagttcatcagcgccatccccaccagaagcctgaagttcctgaaggaggccggccacggcaccaccaaggaggagatcaccaaggacgccgagggcctggacgagatcgaccacgccgagatggagctgagaagaggccagatcctgtggttcagaggcctgaacagaatccagacccagatcgacgtgatcaacaccttccagaccggcgccagcttcaagggcgtgctgagaagacagaacatgggccagcacctggacgtgaagctggtgcccagcagcagctacgtggccgtggcccccgtgaagagcagccccaccaccagcgtgcccgccgtgagcagcccccccatgggcaaccagagcggccagagcgtgccctag

SEQ ID NO: 73594 - DNA, 3405 bp, synthetic construct
  misc_feature 1..3405: note = Description of Artificial Sequence: Synthetic coding sequence
  source 1..3405: mol_type = other DNA
atgaccaaccccagcgacagagtgctgcccgccaacagcatggccgagagcagagagggcgacttcggctgcaccgtgatggagctgagaaagctgatggagctgagaagcagagacgccctgacccagatcaacgtgcactacggcggcgtgcagaacctgtgcagcagactgaagaccagccccgtggagggcctgagcggcaaccccgccgacctggagaagagaagacaggtgttcggccacaacgtgatcccccccaagaagcccaagaccttcctggagctggtgtgggaggccctgcaggacgtgaccctgatcatcctggagatcgccgccatcatcagcctggtgctgagcttctacagacccgccggcgaggagaacgagctgtgcggccaggtggccaccacccccgaggacgagaacgaggcccaggccggctggatcgagggcgccgccatcctgttcagcgtgatcatcgtggtgctggtgaccgccttcaacgactggagcaaggagaagcagttcagaggcctgcagtgcagaatcgagcaggagcagaagttcagcatcatcagaaacggccagctgatccagctgcccgtggccgagatcgtggtgggcgacatcgcccaggtgaagtacggcgacctgctgcccgccgacggcatcctgatccagggcaacgacctgaagatcgacgagagcagcctgaccggcgagagcgaccacgtgaagaagagcctggacaaggaccccatgctgctgagcggcacccacgtgatggagggcagcggcagaatggtggtgaccgccgtgggcgtgaacagccagaccggcatcatcctgaccctgctgggcgtgaacgaggacgacgagggcgagaagaagaagaagggcaagaagcagggcgtgcccgagaacagaaacaaggccaagacccaggacggcgtggccctggagatccagcccctgaacagccaggagggcatcgacaacgaggagaaggacaagaaggccgtgaaggtgcccaagaaggagaagagcgtgctgcagggcaagctgaccagactggccgtgcagatcggcaaggccggcctgctgatgagcgccctgaccgtgttcatcctgatcctgtacttcgtgatcgacaacttcgtgatcaacagaagaccctggctgcccgagtgcacccccatctacatccagtacttcgtgaagttcttcatcatcggcatcaccgtgctggtggtggccgtgcccgagggcctgcccctggccgtgaccatcagcctggcctacagcgtgaagaagatgatgaaggacaacaacctggtgagacacctggacgcctgcgagaccatgggcaacgccaccgccatctgcagcgacaagaccggcaccctgaccatgaacagaatgaccgtggtgcaggcctacatcggcggcatccactacagacagatccccagccccgacgtgttcctgcccaaggtgctggacctgatcgtgaacggcatcagcatcaacagcgcctacaccagcaagatcctgccccccgagaaggagggcggcctgcccagacaggtgggcaacaagaccgagtgcgccctgctgggcttcgtgaccgacctgaagcaggactaccaggccgtgagaaacgaggtgcccgaggagaagctgtacaaggtgtacaccttcaacagcgtgagaaagagcatgagcaccgtgatcagaaaccccaacggcggcttcagaatgtacagcaagggcgccagcgagatcatcctgagaaagtgcaacagaatcctggacagaaagggcgaggccgtgcccttcaagaacaaggacagagacgacatggtgagaaccgtgatcgagcccatggcctgcgacggcctgagaaccatctgcatcgcctacagagacttcgacgacaccgagcccagctgggacaacgagaacgagatcctgaccgagctgacctgcatcgccgtggtgggcatcgaggaccccgtgagacccgaggtgcccgacgccatcgccaagtgcaagcaggccggcatcaccgtgagaatggtgaccggcgacaacatcaacaccgccagagccatcgccaccaagtgcggcatcctgacccccggcgacgacttcctgtgcctggagggcaaggagttcaacagactgatcagaaacgagaagggcgaggtggagcaggagaagctggacaagatctggcccaagctgagagtgctggccagaagcagccccaccgacaagcacaccctggtgaagggcatcatcgacagcaccgtgggcgagcacagacaggtggtggccgtgaccggcgacggcaccaacgacggccccgccctgaagaaggccgacgtgggcttcgccatgggcatcgccggcaccgacgtggccaaggaggccagcgacatcatcctgaccgacgacaacttcaccagcatcgtgaaggccgtgatgtggggcagaaacgtgtacgacagcatcagcaagttcctgcagttccagctgaccgtgaacgtggtggccgtgatcgtggccttcaccggcgcctgcatcacccaggacagccccctgaaggccgtgcagatgctgtgggtgaacctgatcatggacaccttcgccagcctggccctggccaccgagccccccaccgagagcctgctgaagagaagaccctacggcagaaacaagcccctgatcagcagaaccatgatgaagaacatcctgggccacgccttctaccagctgatcgtgatcttcatcctggtgttcgccggcgagaagttcttcgacatcgacagcggcagaaaggcccccctgcacagcccccccagccagcactacaccatcgtgttcaacaccttcgtgctgatgcagctgttcaacgagatcaacagcagaaagatccacggcgagaagaacgtgttcagcggcatctacagaaacatcatcttctgcagcgtggtgctgggcaccttcatctgccagttcatcagcgccatccccaccagaagcctgaagttcctgaaggaggccggccacggcaccaccaaggaggagatcaccaaggacgccgagggcctggacgagatcgaccacgccgagatggagctgagaagaggccagatcctgtggttcagaggcctgaacagaatccagacccagatcgacgtgatcaacaccttccagaccggcgccagcttcaagggcgtgctgagaagacagaacatgggccagcacctggacgtgaagctggtgcccagcagcagctacgtggccgtggcccccgtgaagagcagccccaccaccagcgtgcccgccgtgagcagcccccccatgggcaaccagagcggccagagcgtgccctag

SEQ ID NO: 73595 - DNA, 354 bp, synthetic construct
  misc_feature 1..354: note = Description of Artificial Sequence: Synthetic coding sequence
  source 1..354: mol_type = other DNA
tgaggcggcaagcccttcagctgcaccagcctgagcctgagccagtggctgtggtgcctgttcatcggcatcggcgagctgctgtggggccagttcatcagcgccatccccaccagaagcctgaagttcctgaaggaggccggccacggcaccaccaaggaggagatcaccaaggacgccgagggcctggacgagatcgaccacgccgagatggagctgagaagaggccagatcctgtggttcagaggcctgaacagaatccagacccagcacctgctgcaggacagcgacctgctgcccgacaaggaggaggccatcatcagcagcagcctgttccccagctgcaacttctag

SEQ ID NO: 73596 - DNA, 2667 bp, synthetic construct
  misc_feature 1..2667: note = Description of Artificial Sequence: Synthetic coding sequence
  source 1..2667: mol_type = other DNA
atgaaggtggccagattccagaagatccccaacggcgagaacgagaccatgatccccgtgctgaccagcaagaaggccagcgagctgcccgtgagcgaggtggccagcatcctgcaggccgacctgcagaacggcctgaacaagtgcgaggtgagccacagaagagccttccacggctggaacgagttcgacatcagcgaggacgagcccctgtggaagaagtacatcagccagttcaagaaccccctgatcatgctgctgctggccagcgccgtgatcagcgtgctgatgcaccagttcgacgacgccgtgagcatcaccgtggccatcctgatcgtggtgaccgtggccttcgtgcaggagtacagaagcgagaagagcctggaggagctgagcaagctggtgccccccgagtgccactgcgtgagagagggcaagctggagcacaccctggccagagacctggtgcccggcgacaccgtgtgcctgagcgtgggcgacagagtgcccgccgacctgagactgttcgaggccgtggacctgagcatcgacgagagcagcctgaccggcgagaccaccccctgcagcaaggtgaccgccccccagcccgccgccaccaacggcgacctggccagcagaagcaacatcgccttcatgggcaccctggtgagatgcggcaaggccaagggcgtggtgatcggcaccggcgagaacagcgagttcggcgaggtgttcaagatgatgcaggccgaggaggcccccaagacccccctgcagaagagcatggacctgctgggcaagcagctgagcttctacagcttcggcatcatcggcatcatcatgctggtgggctggctgctgggcaaggacatcctggagatgttcaccatcagcgtgagcctggccgtggccgccatccccgagggcctgcccatcgtggtgaccgtgaccctggccctgggcgtgatgagaatggtgaagaagagagccatcgtgaagaagctgcccatcgtggagaccctgggctgctgcaacgtgatctgcagcgacaagaccggcaccctgaccaagaacgagatgaccgtgacccacatcttcaccagcgacggcctgcacgccgaggtgaccggcgtgggctacaaccagttcggcgaggtgatcgtggacggcgacgtggtgcacggcttctacaaccccgccgtgagcagaatcgtggaggccggctgcgtgtgcaacgacgccgtgatcagaaacaacaccctgatgggcaagcccaccgagggcgccctgatcgccctggccatgaagatgggcctggacggcctgcagcaggactacatcagaaaggccgagtaccccttcagcagcgagcagaagtggatggccgtgaagtgcgtgcacagaacccagcaggacagacccgagatctgcttcatgaagggcgcctacgagcaggtgatcaagtactgcaccacctaccagagcaagggccagaccctgaccctgacccagcagcagagagacgtgtaccagcaggagaaggccagaatgggcagcgccggcctgagagtgctggccctggccagcggccccgagctgggccagctgaccttcctgggcctggtgggcatcatcgacccccccagaaccggcgtgaaggaggccgtgaccaccctgatcgccagcggcgtgagcatcaagatgatcaccggcgacagccaggagaccgccgtggccatcgccagcagactgggcctgtacagcaagaccagccagagcgtgagcggcgaggagatcgacgccatggacgtgcagcagctgagccagatcgtgcccaaggtggccgtgttctacagagccagccccagacacaagatgaagatcatcaagagcctgcagaagaacggcagcgtggtggccatgaccggcgacggcgtgaacgacgccgtggccctgaaggccgccgacatcggcgtggccatgggccagaccggcaccgacgtgtgcaaggaggccgccgacatgatcctggtggacgacgacttccagaccatcatgagcgccatcgaggagggcaagggcatctacaacaacatcaagaacttcgtgagattccagctgagcaccagcatcgccgccctgaccctgatcagcctggccaccctgatgaacttccccaaccccctgaacgccatgcagatcctgtggatcaacatcatcatggacggcccccccgcccagagcctgggcgtggagcccgtggacaaggacgtgatcagaaagccccccagaaactggaaggacagcatcctgaccaagaacctgatcctgaagatcctggtgagcagcatcatcatcgtgtgcggcaccctgttcgtgttctggagagagctgagagacaacgtgatcacccccagagacaccaccatgaccttcacctgcttcgtgttcttcgacatgttcaacgccctgagcagcagaagccagaccaagagcgtgttcgagatcggcctgtgcagcaacagaatgttctgctacgccgtgctgggcagcatcatgggccagctgctggtgatctacttcccccccctgcagaaggtgttccagaccgagagcctgagcatcctgggcctggccctgggcgaggagtggaccgccgccggctag

SEQ ID NO: 73597 - DNA, 2877 bp, synthetic construct
  misc_feature 1..2877: note = Description of Artificial Sequence: Synthetic coding sequence
  source 1..2877: mol_type = other DNA
aaggtggccagattccagaagatccccaacggcgagaacgagaccatgatccccgtgctgaccagcaagaaggccagcgagctgcccgtgagcgaggtggccagcatcctgcaggccgacctgcagaacggcctgaacaagtgcgaggtgagccacagaagagccttccacggctggaacgagttcgacatcagcgaggacgagcccctgtggaagaagtacatcagccagttcaagaaccccctgatcatgctgctgctggccagcgccgtgatcagcgtgctgatgcaccagttcgacgacgccgtgagcatcaccgtggccatcctgatcgtggtgaccgtggccttcgtgcaggagtacagaagcgagaagagcctggaggagctgagcaagctggtgccccccgagtgccactgcgtgagagagggcaagctggagcacaccctggccagagacctggtgcccggcgacaccgtgtgcctgagcgtgggcgacagagtgcccgccgacctgagactgttcgaggccgtggacctgagcatcgacgagagcagcctgaccggcgagaccaccccctgcagcaaggtgaccgccccccagcccgccgccaccaacggcgacctggccagcagaagcaacatcgccttcatgggcaccctggtgagatgcggcaaggccaagggcgtggtgatcggcaccggcgagaacagcgagttcggcgaggtgttcaagatgatgcaggccgaggaggcccccaagacccccctgcagaagagcatggacctgctgggcaagcagctgagcttctacagcttcggcatcatcggcatcatcatgctggtgggctggctgctgggcaaggacatcctggagatgttcaccatcagcgtgagcctggccgtggccgccatccccgagggcctgcccatcgtggtgaccgtgaccctggccctgggcgtgatgagaatggtgaagaagagagccatcgtgaagaagctgcccatcgtggagaccctgggctgctgcaacgtgatctgcagcgacaagaccggcaccctgaccaagaacgagatgaccgtgacccacatcttcaccagcgacggcctgcacgccgaggtgaccggcgtgggctacaaccagttcggcgaggtgatcgtggacggcgacgtggtgcacggcttctacaaccccgccgtgagcagaatcgtggaggccggctgcgtgtgcaacgacgccgtgatcagaaacaacaccctgatgggcaagcccaccgagggcgccctgatcgccctggccatgaagatgggcctggacggcctgcagcaggactacatcagaaaggccgagtaccccttcagcagcgagcagaagtggatggccgtgaagtgcgtgcacagaacccagcaggacagacccgagatctgcttcatgaagggcgcctacgagcaggtgatcaagtactgcaccacctaccagagcaagggccagaccctgaccctgacccagcagcagagagacgtgtaccagcaggagaaggccagaatgggcagcgccggcctgagagtgctggccctggccagcggccccgagctgggccagctgaccttcctgggcctggtgggcatcatcgacccccccagaaccggcgtgaaggaggccgtgaccaccctgatcgccagcggcgtgagcatcaagatgatcaccggcgacagccaggagaccgccgtggccatcgccagcagactgggcctgtacagcaagaccagccagagcgtgagcggcgaggagatcgacgccatggacgtgcagcagctgagccagatcgtgcccaaggtggccgtgttctacagagccagccccagacacaagatgaagatcatcaagagcctgcagaagaacggcagcgtggtggccatgaccggcgacggcgtgaacgacgccgtggccctgaaggccgccgacatcggcgtggccatgggccagaccggcaccgacgtgtgcaaggaggccgccgacatgatcctggtggacgacgacttccagaccatcatgagcgccatcgaggagggcaagggcatctacaacaacatcaagaacttcgtgagattccagctgagcaccagcatcgccgccctgaccctgatcagcctggccaccctgatgaacttccccaaccccctgaacgccatgcagatcctgtggatcaacatcatcatggacggcccccccgcccagagcctgggcgtggagcccgtggacaaggacgtgatcagaaagccccccagaaactggaaggacagcatcctgaccaagaacctgatcctgaagatcctggtgagcagcatcatcatcgtgtgcggcaccctgttcgtgttctggagagagctgagagacaacgtgatcacccccagagacaccaccatgaccttcacctgcttcgtgttcttcgacatgttcaacgccctgagcagcagaagccagaccaagagcgtgttcgagatcggcctgtgcagcaacagaatgttctgctacgccgtgctgggcagcatcatgggccagctgctggtgatctacttcccccccctgcagaaggtgttccagaccgagagcctgagcatcctggacctgctgttcctgctgggcctgaccagcagcgtgtgcatcgtggccgagatcatcaagaaggtggagagaagcagagagaagatccagaagcacgtgagcagcaccagcagcagcttcctggaggtgagcagcagcagcggcaacttcgtggccgtgtggctgtgggagagaagcggccagcagctggtggagatccacccccacctggagaccggcctgcccctgaccgaggacgtgagctgcgtgtag

SEQ ID NO: 73598 - DNA, 2850 bp, synthetic construct
  misc_feature 1..2850: note = Description of Artificial Sequence: Synthetic coding sequence
  source 1..2850: mol_type = other DNA
atgaaggtggccagattccagaagatccccaacggcgagaacgagaccatgatccccgtgctgaccagcaagaaggccagcgagctgcccgtgagcgaggtggccagcatcctgcaggccgacctgcagaacggcctgaacaagtgcgaggtgagccacagaagagccttccacggctggaacgagttcgacatcagcgaggacgagcccctgtggaagaagtacatcagccagttcaagaaccccctgatcatgctgctgctggccagcgccgtgatcagcgtgctgatgcaccagttcgacgacgccgtgagcatcaccgtggccatcctgatcgtggtgaccgtggccttcgtgcaggagtacagaagcgagaagagcctggaggagctgagcaagctggtgccccccgagtgccactgcgtgagagagggcaagctggagcacaccctggccagagacctggtgcccggcgacaccgtgtgcctgagcgtgggcgacagagtgcccgccgacctgagactgttcgaggccgtggacctgagcatcgacgagagcagcctgaccggcgagaccaccccctgcagcaaggtgaccgccccccagcccgccgccaccaacggcgacctggccagcagaagcaacatcgccttcatgggcaccctggtgagatgcggcaaggccaagggcgtggtgatcggcaccggcgagaacagcgagttcggcgaggtgttcaagatgatgcaggccgaggaggcccccaagacccccctgcagaagagcatggacctgctgggcaagcagctgagcttctacagcttcggcatcatcggcatcatcatgctggtgggctggctgctgggcaaggacatcctggagatgttcaccatcagcgtgagcctggccgtggccgccatccccgagggcctgcccatcgtggtgaccgtgaccctggccctgggcgtgatgagaatggtgaagaagagagccatcgtgaagaagctgcccatcgtggagaccctgggctgctgcaacgtgatctgcagcgacaagaccggcaccctgaccaagaacgagatgaccgtgacccacatcttcaccagcgacggcctgcacgccgaggtgaccggcgtgggctacaaccagttcggcgaggtgatcgtggacggcgacgtggtgcacggcttctacaaccccgccgtgagcagaatcgtggaggccggctgcgtgtgcaacgacgccgtgatcagaaacaacaccctgatgggcaagcccaccgagggcgccctgatcgccctggccatgaagatgggcctggacggcctgcagcaggactacatcagaaaggccgagtaccccttcagcagcgagcagaagtggatggccgtgaagtgcgtgcacagaacccagcaggacagacccgagatctgcttcatgaagggcgcctacgagcaggtgatcaagtactgcaccacctaccagagcaagggccagaccctgaccctgacccagcagcagagagacgtgtaccagcaggagaaggccagaatgggcagcgccggcctgagagtgctggccctggccagcggccccgagctgggccagctgaccttcctgggcctggtgggcatcatcgacccccccagaaccggcgtgaaggaggccgtgaccaccctgatcgccagcggcgtgagcatcaagatgatcaccggcgacagccaggagaccgccgtggccatcgccagcagactgggcctgtacagcaagaccagccagagcgtgagcggcgaggagatcgacgccatggacgtgcagcagctgagccagatcgtgcccaaggtggccgtgttctacagagccagccccagacacaagatgaagatcatcaagagcctgcagaagaacggcagcgtggtggccatgaccggcgacggcgtgaacgacgccgtggccctgaaggccgccgacatcggcgtggccatgggccagaccggcaccgacgtgtgcaaggaggccgccgacatgatcctggtggacgacgacttccagaccatcatgagcgccatcgaggagggcaagggcatctacaacaacatcaagaacttcgtgagattccagctgagcaccagcatcgccgccctgaccctgatcagcctggccaccctgatgaacttccccaaccccctgaacgccatgcagatcctgtggatcaacatcatcatggacggcccccccgcccagagcctgggcgtggagcccgtggacaaggacgtgatcagaaagccccccagaaactggaaggacagcatcctgaccaagaacctgatcctgaagatcctggtgagcagcatcatcatcgtgtgcggcaccctgttcgtgttctggagagagctgagagacaacgtgatcacccccagagacaccaccatgaccttcacctgcttcgtgttcttcgacatgttcaacgccctgagcagcagaagccagaccaagagcgtgttcgagatcggcctgtgcagcaacagaatgttctgctacgccgtgctgggcagcatcatgggccagctgctggtgatctacttcccccccctgcagaaggtgttccagaccgagagcctgagcatcctggacctgctgttcctgctgggcctgaccagcagcgtgtgcatcgtggccgagatcatcaagaaggtggagagaagcagagagaagatccagaagcacgtgagcagcaccagcagcagcttcctggaggtgtggctgtgggagagaagcggccagcagctggtggagatccacccccacctggagaccggcctgcccctgaccgaggacgtgagctgcgtgtag

SEQ ID NO: 73599 - DNA, 2922 bp, synthetic construct
  misc_feature 1..2922: note = Description of Artificial Sequence: Synthetic coding sequence
  source 1..2922: mol_type = other DNA
atggacagcctgctgccccccagcagattcagctacttcaagaagtaccccctgcacgccatcagaagatacctgagcaccctgagaaaccagagagccgaggagcaggtggccagattccagaagatccccaacggcgagaacgagaccatgatccccgtgctgaccagcaagaaggccagcgagctgcccgtgagcgaggtggccagcatcctgcaggccgacctgcagaacggcctgaacaagtgcgaggtgagccacagaagagccttccacggctggaacgagttcgacatcagcgaggacgagcccctgtggaagaagtacatcagccagttcaagaaccccctgatcatgctgctgctggccagcgccgtgatcagcgtgctgatgcaccagttcgacgacgccgtgagcatcaccgtggccatcctgatcgtggtgaccgtggccttcgtgcaggagtacagaagcgagaagagcctggaggagctgagcaagctggtgccccccgagtgccactgcgtgagagagggcaagctggagcacaccctggccagagacctggtgcccggcgacaccgtgtgcctgagcgtgggcgacagagtgcccgccgacctgagactgttcgaggccgtggacctgagcatcgacgagagcagcctgaccggcgagaccaccccctgcagcaaggtgaccgccccccagcccgccgccaccaacggcgacctggccagcagaagcaacatcgccttcatgggcaccctggtgagatgcggcaaggccaagggcgtggtgatcggcaccggcgagaacagcgagttcggcgaggtgttcaagatgatgcaggccgaggaggcccccaagacccccctgcagaagagcatggacctgctgggcaagcagctgagcttctacagcttcggcatcatcggcatcatcatgctggtgggctggctgctgggcaaggacatcctggagatgttcaccatcagcgtgagcctggccgtggccgccatccccgagggcctgcccatcgtggtgaccgtgaccctggccctgggcgtgatgagaatggtgaagaagagagccatcgtgaagaagctgcccatcgtggagaccctgggctgctgcaacgtgatctgcagcgacaagaccggcaccctgaccaagaacgagatgaccgtgacccacatcttcaccagcgacggcctgcacgccgaggtgaccggcgtgggctacaaccagttcggcgaggtgatcgtggacggcgacgtggtgcacggcttctacaaccccgccgtgagcagaatcgtggaggccggctgcgtgtgcaacgacgccgtgatcagaaacaacaccctgatgggcaagcccaccgagggcgccctgatcgccctggccatgaagatgggcctggacggcctgcagcaggactacatcagaaaggccgagtaccccttcagcagcgagcagaagtggatggccgtgaagtgcgtgcacagaacccagcaggacagacccgagatctgcttcatgaagggcgcctacgagcaggtgatcaagtactgcaccacctaccagagcaagggccagaccctgaccctgacccagcagcagagagacgtgtaccagcaggagaaggccagaatgggcagcgccggcctgagagtgctggccctggccagcggccccgagctgggccagctgaccttcctgggcctggtgggcatcatcgacccccccagaaccggcgtgaaggaggccgtgaccaccctgatcgccagcggcgtgagcatcaagatgatcaccggcgacagccaggagaccgccgtggccatcgccagcagactgggcctgtacagcaagaccagccagagcgtgagcggcgaggagatcgacgccatggacgtgcagcagctgagccagatcgtgcccaaggtggccgtgttctacagagccagccccagacacaagatgaagatcatcaagagcctgcagaagaacggcagcgtggtggccatgaccggcgacggcgtgaacgacgccgtggccctgaaggccgccgacatcggcgtggccatgggccagaccggcaccgacgtgtgcaaggaggccgccgacatgatcctggtggacgacgacttccagaccatcatgagcgccatcgaggagggcaagggcatctacaacaacatcaagaacttcgtgagattccagctgagcaccagcatcgccgccctgaccctgatcagcctggccaccctgatgaacttccccaaccccctgaacgccatgcagatcctgtggatcaacatcatcatggacggcccccccgcccagagcctgggcgtggagcccgtggacaaggacgtgatcagaaagccccccagaaactggaaggacagcatcctgaccaagaacctgatcctgaagatcctggtgagcagcatcatcatcgtgtgcggcaccctgttcgtgttctggagagagctgagagacaacgtgatcacccccagagacaccaccatgaccttcacctgcttcgtgttcttcgacatgttcaacgccctgagcagcagaagccagaccaagagcgtgttcgagatcggcctgtgcagcaacagaatgttctgctacgccgtgctgggcagcatcatgggccagctgctggtgatctacttcccccccctgcagaaggtgttccagaccgagagcctgagcatcctggacctgctgttcctgctgggcctgaccagcagcgtgtgcatcgtggccgagatcatcaagaaggtggagagaagcagagagaagatccagaagcacgtgtggctgtgggagagaagcggccagcagctggtggagatccacccccacctggagaccggcctgcccctgaccgaggacgtgagctgcgtgtag

SEQ ID NO: 73600 - DNA, 2820 bp, synthetic construct
  misc_feature 1..2820: note = Description of Artificial Sequence: Synthetic coding sequence
  source 1..2820: mol_type = other DNA
atgaaggtggccagattccagaagatccccaacggcgagaacgagaccatgatccccgtgctgaccagcaagaaggccagcgagctgcccgtgagcgaggtggccagcatcctgcaggccgacctgcagaacggcctgaacaagtgcgaggtgagccacagaagagccttccacggctggaacgagttcgacatcagcgaggacgagcccctgtggaagaagtacatcagccagttcaagaaccccctgatcatgctgctgctggccagcgccgtgatcagcgtgctgatgcaccagttcgacgacgccgtgagcatcaccgtggccatcctgatcgtggtgaccgtggccttcgtgcaggagtacagaagcgagaagagcctggaggagctgagcaagctggtgccccccgagtgccactgcgtgagagagggcaagctggagcacaccctggccagagacctggtgcccggcgacaccgtgtgcctgagcgtgggcgacagagtgcccgccgacctgagactgttcgaggccgtggacctgagcatcgacgagagcagcctgaccggcgagaccaccccctgcagcaaggtgaccgccccccagcccgccgccaccaacggcgacctggccagcagaagcaacatcgccttcatgggcaccctggtgagatgcggcaaggccaagggcgtggtgatcggcaccggcgagaacagcgagttcggcgaggtgttcaagatgatgcaggccgaggaggcccccaagacccccctgcagaagagcatggacctgctgggcaagcagctgagcttctacagcttcggcatcatcggcatcatcatgctggtgggctggctgctgggcaaggacatcctggagatgttcaccatcagcgtgagcctggccgtggccgccatccccgagggcctgcccatcgtggtgaccgtgaccctggccctgggcgtgatgagaatggtgaagaagagagccatcgtgaagaagctgcccatcgtggagaccctgggctgctgcaacgtgatctgcagcgacaagaccggcaccctgaccaagaacgagatgaccgtgacccacatcttcaccagcgacggcctgcacgccgaggtgaccggcgtgggctacaaccagttcggcgaggtgatcgtggacggcgacgtggtgcacggcttctacaaccccgccgtgagcagaatcgtggaggccggctgcgtgtgcaacgacgccgtgatcagaaacaacaccctgatgggcaagcccaccgagggcgccctgatcgccctggccatgaagatgggcctggacggcctgcagcaggactacatcagaaaggccgagtaccccttcagcagcgagcagaagtggatggccgtgaagtgcgtgcacagaacccagcaggacagacccgagatctgcttcatgaagggcgcctacgagcaggtgatcaagtactgcaccacctaccagagcaagggccagaccctgaccctgacccagcagcagagagacgtgtaccagcaggagaaggccagaatgggcagcgccggcctgagagtgctggccctggccagcggccccgagctgggccagctgaccttcctgggcctggtgggcatcatcgacccccccagaaccggcgtgaaggaggccgtgaccaccctgatcgccagcggcgtgagcatcaagatgatcaccggcgacagccaggagaccgccgtggccatcgccagcagactgggcctgtacagcaagaccagccagagcgtgagcggcgaggagatcgacgccatggacgtgcagcagctgagccagatcgtgcccaaggtggccgtgttctacagagccagccccagacacaagatgaagatcatcaagagcctgcagaagaacggcagcgtggtggccatgaccggcgacggcgtgaacgacgccgtggccctgaaggccgccgacatcggcgtggccatgggccagaccggcaccgacgtgtgcaaggaggccgccgacatgatcctggtggacgacgacttccagaccatcatgagcgccatcgaggagggcaagggcatctacaacaacatcaagaacttcgtgagattccagctgagcaccagcatcgccgccctgaccctgatcagcctggccaccctgatgaacttccccaaccccctgaacgccatgcagatcctgtggatcaacatcatcatggacggcccccccgcccagagcctgggcgtggagcccgtggacaaggacgtgatcagaaagccccccagaaactggaaggacagcatcctgaccaagaacctgatcctgaagatcctggtgagcagcatcatcatcgtgtgcggcaccctgttcgtgttctggagagagctgagagacaacgtgatcacccccagagacaccaccatgaccttcacctgcttcgtgttcttcgacatgttcaacgccctgagcagcagaagccagaccaagagcgtgttcgagatcggcctgtgcagcaacagaatgttctgctacgccgtgctgggcagcatcatgggccagctgctggtgatctacttcccccccctgcagaaggtgttccagaccgagagcctgagcatcctggacctgctgttcctgctgggcctgaccagcagcgtgtgcatcgtggccgagatcatcaagaaggtggagagaagcagagagaagatccagaagcacgtgtggctgtgggagagaagcggccagcagctggtggagatccacccccacctggagaccggcctgcccctgaccgaggacgtgagctgcgtgtag

SEQ ID NO: 73601 - DNA, 2760 bp, synthetic construct
  misc_feature 1..2760: note = Description of Artificial Sequence: Synthetic coding sequence
  source 1..2760: mol_type = other DNA
atgaaggtggccagattccagaagatccccaacggcgagaacgagaccatgatccccgtgctgaccagcaagaaggccagcgagctgcccgtgagcgaggtggccagcatcctgcaggccgacctgcagaacggcctgaacaagtgcgaggtgagccacagaagagccttccacggctggaacgagttcgacatcagcgaggacgagcccctgtggaagaagtacatcagccagttcaagaaccccctgatcatgctgctgctggccagcgccgtgatcagcgtgctgatgcaccagttcgacgacgccgtgagcatcaccgtggccatcctgatcgtggtgaccgtggccttcgtgcaggagtacagaagcgagaagagcctggaggagctgagcaagctggtgccccccgagtgccactgcgtgagagagggcaagctggagcacaccctggccagagacctggtgcccggcgacaccgtgtgcctgagcgtgggcgacagagtgcccgccgacctgagactgttcgaggccgtggacctgagcatcgacgagagcagcctgaccggcgagaccaccccctgcagcaaggtgaccgccccccagcccgccgccaccaacggcgacctggccagcagaagcaacatcgccttcatgggcaccctggtgagatgcggcaaggccaagggcgtggtgatcggcaccggcgagaacagcgagttcggcgaggtgttcaagatgatgcaggccgaggaggcccccaagacccccctgcagaagagcatggacctgctgggcaagcagctgagcttctacagcttcggcatcatcggcatcatcatgctggtgggctggctgctgggcaaggacatcctggagatgttcaccatcagcgtgagcctggccgtggccgccatccccgagggcctgcccatcgtggtgaccgtgaccctggccctgggcgtgatgagaatggtgaagaagagagccatcgtgaagaagctgcccatcgtggagaccctgggctgctgcaacgtgatctgcagcgacaagaccggcaccctgaccaagaacgagatgaccgtgacccacatcttcaccagcgacggcctgcacgccgaggtgaccggcgtgggctacaaccagttcggcgaggtgatcgtggacggcgacgtggtgcacggcttctacaaccccgccgtgagcagaatcgtggaggccggctgcgtgtgcaacgacgccgtgatcagaaacaacaccctgatgggcaagcccaccgagggcgccctgatcgccctggccatgaagatgggcctggacggcctgcagcaggactacatcagaaaggccgagtaccccttcagcagcgagcagaagtggatggccgtgaagtgcgtgcacagaacccagcaggacagacccgagatctgcttcatgaagggcgcctacgagcaggtgatcaagtactgcaccacctaccagagcaagggccagaccctgaccctgacccagcagcagagagacgtgtaccagcaggagaaggccagaatgggcagcgccggcctgagagtgctggccctggccagcggccccgagctgggccagctgaccttcctgggcctggtgggcatcatcgacccccccagaaccggcgtgaaggaggccgtgaccaccctgatcgccagcggcgtgagcatcaagatgatcaccggcgacagccaggagaccgccgtggccatcgccagcagactgggcctgtacagcaagaccagccagagcgtgagcggcgaggagatcgacgccatggacgtgcagcagctgagccagatcgtgcccaaggtggccgtgttctacagagccagccccagacacaagatgaagatcatcaagagcctgcagaagaacggcagcgtggtggccatgaccggcgacggcgtgaacgacgccgtggccctgaaggccgccgacatcggcgtggccatgggccagaccggcaccgacgtgtgcaaggaggccgccgacatgatcctggtggacgacgacttccagaccatcatgagcgccatcgaggagggcaagggcatctacaacaacatcaagaacttcgtgagattccagctgagcaccagcatcgccgccctgaccctgatcagcctggccaccctgatgaacttccccaaccccctgaacgccatgcagatcctgtggatcaacatcatcatggacggcccccccgcccagagcctgggcgtggagcccgtggacaaggacgtgatcagaaagccccccagaaactggaaggacagcatcctgaccaagaacctgatcctgaagatcctggtgagcagcatcatcatcgtgtgcggcaccctgttcgtgttctggagagagctgagagacaacgtgatcacccccagagacaccaccatgaccttcacctgcttcgtgttcttcgacatgttcaacgccctgagcagcagaagccagaccaagagcgtgttcgagatcggcctgtgcagcaacagaatgttctgctacgccgtgctgggcagcatcatgggccagctgctggtgatctacttcccccccctgcagaaggtgttccagaccgagagcctgagcatcctggacctgctgttcctgctgggcctgaccagcagcgtgtgcatcgtggccgagatcatcaagaaggtggagagaagcagagagaagatccagaagcacgtgagcagcaccagcagcagcttcctggaggtgtag

SEQ ID NO: 73602 - DNA, 2712 bp, synthetic construct
  misc_feature 1..2712: note = Description of Artificial Sequence: Synthetic coding sequence
  source 1..2712: mol_type = other DNA
atgatccccgtgctgaccagcaagaaggccagcgagctgcccgtgagcgaggtggccagcatcctgcaggccgacctgcagaacggcctgaacaagtgcgaggtgagccacagaagagccttccacggctggaacgagttcgacatcagcgaggacgagcccctgtggaagaagtacatcagccagttcaagaaccccctgatcatgctgctgctggccagcgccgtgatcagcgtgctgatgcaccagttcgacgacgccgtgagcatcaccgtggccatcctgatcgtggtgaccgtggccttcgtgcaggagtacagaagcgagaagagcctggaggagctgagcaagctggtgccccccgagtgccactgcgtgagagagggcaagctggagcacaccctggccagagacctggtgcccggcgacaccgtgtgcctgagcgtgggcgacagagtgcccgccgacctgagactgttcgaggccgtggacctgagcatcgacgagagcagcctgaccggcgagaccaccccctgcagcaaggtgaccgccccccagcccgccgccaccaacggcgacctggccagcagaagcaacatcgccttcatgggcaccctggtgagatgcggcaaggccaagggcgtggtgatcggcaccggcgagaacagcgagttcggcgaggtgttcaagatgatgcaggccgaggaggcccccaagacccccctgcagaagagcatggacctgctgggcaagcagctgagcttctacagcttcggcatcatcggcatcatcatgctggtgggctggctgctgggcaaggacatcctggagatgttcaccatcagcgtgagcctggccgtggccgccatccccgagggcctgcccatcgtggtgaccgtgaccctggccctgggcgtgatgagaatggtgaagaagagagccatcgtgaagaagctgcccatcgtggagaccctgggctgctgcaacgtgatctgcagcgacaagaccggcaccctgaccaagaacgagatgaccgtgacccacatcttcaccagcgacggcctgcacgccgaggtgaccggcgtgggctacaaccagttcggcgaggtgatcgtggacggcgacgtggtgcacggcttctacaaccccgccgtgagcagaatcgtggaggccggctgcgtgtgcaacgacgccgtgatcagaaacaacaccctgatgggcaagcccaccgagggcgccctgatcgccctggccatgaagatgggcctggacggcctgcagcaggactacatcagaaaggccgagtaccccttcagcagcgagcagaagtggatggccgtgaagtgcgtgcacagaacccagcaggacagacccgagatctgcttcatgaagggcgcctacgagcaggtgatcaagtactgcaccacctaccagagcaagggccagaccctgaccctgacccagcagcagagagacgtgtaccagcaggagaaggccagaatgggcagcgccggcctgagagtgctggccctggccagcggccccgagctgggccagctgaccttcctgggcctggtgggcatcatcgacccccccagaaccggcgtgaaggaggccgtgaccaccctgatcgccagcggcgtgagcatcaagatgatcaccggcgacagccaggagaccgccgtggccatcgccagcagactgggcctgtacagcaagaccagccagagcgtgagcggcgaggagatcgacgccatggacgtgcagcagctgagccagatcgtgcccaaggtggccgtgttctacagagccagccccagacacaagatgaagatcatcaagagcctgcagaagaacggcagcgtggtggccatgaccggcgacggcgtgaacgacgccgtggccctgaaggccgccgacatcggcgtggccatgggccagaccggcaccgacgtgtgcaaggaggccgccgacatgatcctggtggacgacgacttccagaccatcatgagcgccatcgaggagggcaagggcatctacaacaacatcaagaacttcgtgagattccagctgagcaccagcatcgccgccctgaccctgatcagcctggccaccctgatgaacttccccaaccccctgaacgccatgcagatcctgtggatcaacatcatcatggacggcccccccgcccagagcctgggcgtggagcccgtggacaaggacgtgatcagaaagccccccagaaactggaaggacagcatcctgaccaagaacctgatcctgaagatcctggtgagcagcatcatcatcgtgtgcggcaccctgttcgtgttctggagagagctgagagacaacgtgatcacccccagagacaccaccatgaccttcacctgcttcgtgttcttcgacatgttcaacgccctgagcagcagaagccagaccaagagcgtgttcgagatcggcctgtgcagcaacagaatgttctgctacgccgtgctgggcagcatcatgggccagctgctggtgatctacttcccccccctgcagaaggtgttccagaccgagagcctgagcatcctggacctgctgttcctgctgggcctgaccagcagcgtgtgcatcgtggccgagatcatcaagaaggtggagagaagcagagagaagatccagaagcacgtgagcagcaccagcagcagcttcctggaggtgtag

SEQ ID NO: 73603 - DNA, 363 bp, synthetic construct
  misc_feature 1..363: note = Description of Artificial Sequence: Synthetic coding sequence
  source 1..363: mol_type = other DNA
atgaaggtggccagattccagaagatccccaacggcgagaacgagaccatgatccccgtgctgaccagcaagaaggccagcgagctgcccgtgagcgaggtggccagcatcctgcaggccgacctgcagaacggcctgaacaagtgcgaggtgagccacagaagagccttccacggctggaacgagttcgacatcagcgaggacgagcccctgtggaagaagtacatcagccagttcaagaaccccctgatcatgctgctgctggccagcgccgtgatcagcgtgctgatgcaccagttcgacgacgccgtgagcatcaccgtggccatcctgatcgtggtgaccgtggccttcgtgcagtag

SEQ ID NO: 73604 - DNA, 2712 bp, synthetic construct; identical to SEQ ID NO: 73602
  misc_feature 1..2712: note = Description of Artificial Sequence: Synthetic coding sequence
  source 1..2712: mol_type = other DNA

SEQ ID NO: 73605 - DNA, 2772 bp, synthetic construct
  misc_feature 1..2772: note = Description of Artificial Sequence: Synthetic coding sequence
  source 1..2772: mol_type = other DNA
atgatccccgtgctgaccagcaagaaggccagcgagctgcccgtgagcgaggtggccagcatcctgcaggccgacctgcagaacggcctgaacaagtgcgaggtgagccacagaagagccttccacggctggaacgagttcgacatcagcgaggacgagcccctgtggaagaagtacatcagccagttcaagaaccccctgatcatgctgctgctggccagcgccgtgatcagcgtgctgatgcaccagttcgacgacgccgtgagcatcaccgtggccatcctgatcgtggtgaccgtggccttcgtgcaggagtacagaagcgagaagagcctggaggagctgagcaagctggtgccccccgagtgccactgcgtgagagagggcaagctggagcacaccctggccagagacctggtgcccggcgacaccgtgtgcctgagcgtgggcgacagagtgcccgccgacctgagactgttcgaggccgtggacctgagcatcgacgagagcagcctgaccggcgagaccaccccctgcagcaaggtgaccgccccccagcccgccgccaccaacggcgacctggccagcagaagcaacatcgccttcatgggcaccctggtgagatgcggcaaggccaagggcgtggtgatcggcaccggcgagaacagcgagttcggcgaggtgttcaagatgatgcaggccgaggaggcccccaagacccccctgcagaagagcatggacctgctgggcaagcagctgagcttctacagcttcggcatcatcggcatcatcatgctggtgggctggctgctgggcaaggacatcctggagatgttcaccatcagcgtgagcctggccgtggccgccatccccgagggcctgcccatcgtggtgaccgtgaccctggccctgggcgtgatgagaatggtgaagaagagagccatcgtgaagaagctgcccatcgtggagaccctgggctgctgcaacgtgatctgcagcgacaagaccggcaccctgaccaagaacgagatgaccgtgacccacatcttcaccagcgacggcctgcacgccgaggtgaccggcgtgggctacaaccagttcggcgaggtgatcgtggacggcgacgtggtgcacggcttctacaaccccgccgtgagcagaatcgtggaggccggctgcgtgtgcaacgacgccgtgatcagaaacaacaccctgatgggcaagcccaccgagggcgccctgatcgccctggccatgaagatgggcctggacggcctgcagcaggactacatcagaaaggccgagtaccccttcagcagcgagcagaagtggatggccgtgaagtgcgtgcacagaacccagcaggacagacccgagatctgcttcatgaagggcgcctacgagcaggtgatcaagtactgcaccacctaccagagcaagggccagaccctgaccctgacccagcagcagagagacgtgtaccagcaggagaaggccagaatgggcagcgccggcctgagagtgctggccctggccagcggccccgagctgggccagctgaccttcctgggcctggtgggcatcatcgacccccccagaaccggcgtgaaggaggccgtgaccaccctgatcgccagcggcgtgagcatcaagatgatcaccggcgacagccaggagaccgccgtggccatcgccagcagactgggcctgtacagcaagaccagccagagcgtgagcggcgaggagatcgacgccatggacgtgcagcagctgagccagatcgtgcccaaggtggccgtgttctacagagccagccccagacacaagatgaagatcatcaagagcctgcagaagaacggcagcgtggtggccatgaccggcgacggcgtgaacgacgccgtggccctgaaggccgccgacatcggcgtggccatgggccagaccggcaccgacgtgtgcaaggaggccgccgacatgatcctggtggacgacgacttccagaccatcatgagcgccatcgaggagggcaagggcatctacaacaacatcaagaacttcgtgagattccagctgagcaccagcatcgccgccctgaccctgatcagcctggccaccctgatgaacttccccaaccccctgaacgccatgcagatcctgtggatcaacatcatcatggacggcccccccgcccagagcctgggcgtggagcccgtggacaaggacgtgatcagaaagccccccagaaactggaaggacagcatcctgaccaagaacctgatcctgaagatcctggtgagcagcatcatcatcgtgtgcggcaccctgttcgtgttctggagagagctgagagacaacgtgatcacccccagagacaccaccatgaccttcacctgcttcgtgttcttcgacatgttcaacgccctgagcagcagaagccagaccaagagcgtgttcgagatcggcctgtgcagcaacagaatgttctgctacgccgtgctgggcagcatcatgggccagctgctggtgatctacttcccccccctgcagaaggtgttccagaccgagagcctgagcatcctggacctgctgttcctgctgggcctgaccagcagcgtgtgcatcgtggccgagatcatcaagaaggtggagagaagcagagagaagatccagaagcacgtgtggctgtgggagagaagcggccagcagctggtggagatccacccccacctggagaccggcctgcccctgaccgaggacgtgagctgcgtgtag

SEQ ID NO: 73606 - DNA, 249 bp, synthetic construct
  misc_feature 1..249: note = Description of Artificial Sequence: Synthetic coding sequence
  source 1..249: mol_type = other DNA
atgatccccgtgctgaccagcaagaaggccagcgagctgcccgtgagcgaggtggccagcatcctgcaggccgacctgcagaacggcctgaacaagtgcgaggtgagccacagaagagccttccacggctggaacgagttcgacatcagcgaggacgagcccctgtggaagaagtacatcagccagttcaagaaccccctgatcatgctgctgctggccagcgccgtgatcagcgtgctgatgcactag

SEQ ID NO: 73607 - DNA, 2760 bp, synthetic construct; identical to SEQ ID NO: 73601
  misc_feature 1..2760: note = Description of Artificial Sequence: Synthetic coding sequence
  source 1..2760: mol_type = other DNA

SEQ ID NO: 73608 - DNA, 309 bp, synthetic construct
  misc_feature 1..309: note = Description of Artificial Sequence: Synthetic coding sequence
  source 1..309: mol_type = other DNA
atgaaggtggccagattccagaagatccccaacggcgagaacgagaccatgatccccgtgctgaccagcaagaaggccagcgagctgcccgtgagcgaggtggccagcatcctgcaggccgacctgcagaacggcctgaacaagtgcgaggtgagccacagaagagccttccacggctggaacgagttcgacatcagcgaggacgagcccctgtggaagaagtacatcagccagttcaagaaccccctgatcatgctgctgctggccagcgccgtgatcagcgtgctgatgcaccagttcgacgactag

SEQ ID NO: 73609 - DNA, 2760 bp, synthetic construct; identical to SEQ ID NO: 73601
  misc_feature 1..2760: note = Description of Artificial Sequence: Synthetic coding sequence
  source 1..2760: mol_type = other DNA

SEQ ID NO: 73610 - DNA, 2772 bp, synthetic construct; identical to SEQ ID NO: 73605
  misc_feature 1..2772: note = Description of Artificial Sequence: Synthetic coding sequence
  source 1..2772: mol_type = other DNA

SEQ ID NO: 73611 - DNA, 2835 bp, synthetic construct
  misc_feature 1..2835: note = Description of Artificial Sequence: Synthetic coding sequence
  source 1..2835: mol_type = other DNA
atggacagcctgctgccccccagcagattcagctacttcaagaagtaccccctgcacgccatcagaagatacctgagcaccctgagaaaccagagagccgaggagcaggtggccagattccagaagatccccaacggcgagaacgagaccatgatccccgtgctgaccagcaagaaggccagcgagctgcccgtgagcgaggtggccagcatcctgcagttcaagaaccccctgatcatgctgctgctggccagcgccgtgatcagcgtgctgatgcaccagttcgacgacgccgtgagcatcaccgtggccatcctgatcgtggtgaccgtggccttcgtgcaggagtacagaagcgagaagagcctggaggagctgagcaagctggtgccccccgagtgccactgcgtgagagagggcaagctggagcacaccctggccagagacctggtgcccggcgacaccgtgtgcctgagcgtgggcgacagagtgcccgccgacctgagactgttcgaggccgtggacctgagcatcgacgagagcagcctgaccggcgagaccaccccctgcagcaaggtgaccgccccccagcccgccgccaccaacggcgacctggccagcagaagcaacatcgccttcatgggcaccctggtgagatgcggcaaggccaagggcgtggtgatcggcaccggcgagaacagcgagttcggcgaggtgttcaagatgatgcaggccgaggaggcccccaagacccccctgcagaagagcatggacctgctgggcaagcagctgagcttctacagcttcggcatcatcggcatcatcatgctggtgggctggctgctgggcaaggacatcctggagatgttcaccatcagcgtgagcctggccgtggccgccatccccgagggcctgcccatcgtggtgaccgtgaccctggccctgggcgtgatgagaatggtgaagaagagagccatcgtgaagaagctgcccatcgtggagaccctgggctgctgcaacgtgatctgcagcgacaagaccggcaccctgaccaagaacgagatgaccgtgacccacatcttcaccagcgacggcctgcacgccgaggtgaccggcgtgggctacaaccagttcggcgaggtgatcgtggacggcgacgtggtgcacggcttctacaaccccgccgtgagcagaatcgtggaggccggctgcgtgtgcaacgacgccgtgatcagaaacaacaccctgatgggcaagcccaccgagggcgccctgatcgccctggccatgaagatgggcctggacggcctgcagcaggactacatcagaaaggccgagtaccccttcagcagcgagcagaagtggatggccgtgaagtgcgtgcacagaacccagcaggacagacccgagatctgcttcatgaagggcgcctacgagcaggtgatcaagtactgcaccacctaccagagcaagggccagaccctgaccctgacccagcagcagagagacgtgtaccagcaggagaaggccagaatgggcagcgccggcctgagagtgctggccctggccagcggccccgagctgggccagctgaccttcctgggcctggtgggcatcatcgacccccccagaaccggcgtgaaggaggccgtgaccaccctgatcgccagcggcgtgagcatcaagatgatcaccggcgacagccaggagaccgccgtggccatcgccagcagactgggcctgtacagcaagaccagccagagcgtgagcggcgaggagatcgacgccatggacgtgcagcagctgagccagatcgtgcccaaggtggccgtgttctacagagccagccccagacacaagatgaagatcatcaagagcctgcagaagaacggcagcgtggtggccatgaccggcgacggcgtgaacgacgccgtggccctgaaggccgccgacatcggcgtggccatgggccagaccggcaccgacgtgtgcaaggaggccgccgacatgatcctggtggacgacgacttccagaccatcatgagcgccatcgaggagggcaagggcatctacaacaacatcaagaacttcgtgagattccagctgagcaccagcatcgccgccctgaccctgatcagcctggccaccctgatgaacttccccaaccccctgaacgccatgcagatcctgtggatcaacatcatcatggacggcccccccgcccagagcctgggcgtggagcccgtggacaaggacgtgatcagaaagccccccagaaactggaaggacagcatcctgaccaagaacctgatcctgaagatcctggtgagcagcatcatcatcgtgtgcggcaccctgttcgtgttctggagagagctgagagacaacgtgatcacccccagagacaccaccatgaccttcacctgcttcgtgttcttcgacatgttcaacgccctgagcagcagaagccagaccaagagcgtgttcgagatcggcctgtgcagcaacagaatgttctgctacgccgtgctgggcagcatcatgggccagctgctggtgatctacttcccccccctgcagaaggtgttccagaccgagagcctgagcatcctggacctgctgttcctgctgggcctgaccagcagcgtgtgcatcgtggccgagatcatcaagaaggtggagagaagcagagagaagatccagaagcacgtgagcagcaccagcagcagcttcctggaggtgtggctgtgggagagaagcggccagcagctggtggagatccacccccacctggagaccggcctgcccctgaccgaggacgtgagctgcgtgtag

SEQ ID NO: 73612 - DNA, 2841 bp, synthetic construct
  misc_feature 1..2841: note = Description of Artificial Sequence: Synthetic coding sequence
  source 1..2841: mol_type = other DNA
atggtggagggcagagtgagcgagttcctgaagaagctgggcttcagcggcggcggcagacagtaccaggccctggagaaggacgaggaggaggccctgatcgacgagcagagcgagctgaaggccatcgagaaggagaagaaggtgaccgccctgccccccaaggaggcctgcaagtgccagaaggaggacctggccagagccttctgcgtggacctgcacaccggcctgagcgagttcagcgtgacccagagaagactggcccacggctggaacgagttcgtggccgacaacagcgagcccgtgtggaagaagtacctggaccagttcaagaaccccctgatcctgctgctgctgggcagcgccctggtgagcgtgctgaccaaggagtacgaggacgccgtgagcatcgccaccgccgtgctggtggtggtgaccgtggccttcatccaggagtacagaagcgagaagagcctggaggagctgaccaagatggtgccccccgagtgcaactgcctgagagagggcaagctgcagcacctgctggccagagagctggtgcccggcgacgtggtgagcctgagcatcggcgacagaatccccgccgacatcagactgaccgaggtgaccgacctgctggtggacgagagcagcttcaccggcgaggccgagccctgcagcaagaccgacagccccctgaccggcggcggcgacctgaccaccctgagcaacatcgtgttcatgggcaccctggtgcagtacggcagaggccagggcgtggtgatcggcaccggcgagagcagccagttcggcgaggtgttcaagatgatgcaggccgaggagacccccaagacccccctgcagaagagcatggacagactgggcaagcagctgaccctgttcagcttcggcatcatcggcctgatcatgctgatcggctggagccagggcaagcagctgctgagcatgttcaccatcggcgtgagcctggccgtggccgccatccccgagggcctgcccatcgtggtgatggtgaccctggtgctgggcgtgctgagaatggccaagaagagagtgatcgtgaagaagctgcccatcgtggagaccctgggctgctgcagcgtgctgtgcagcgacaagaccggcaccctgaccgccaacgagatgaccgtgacccagctggtgaccagcgacggcctgagagccgaggtgagcggcgtgggctacgacggccagggcaccgtgtgcctgctgcccagcaaggaggtgatcaaggagttcagcaacgtgagcgtgggcaagctggtggaggccggctgcgtggccaacaacgccgtgatcagaaagaacgccgtgatgggccagcccaccgagggcgccctgatggccctggccatgaagatggacctgagcgacatcaagaacagctacatcagaaagaaggagatccccttcagcagcgagcagaagtggatggccgtgaagtgcagcctgaagaccgaggaccaggaggacatctacttcatgaagggcgccctggaggaggtgatcagatactgcaccatgtacaacaacggcggcatccccctgcccctgaccccccagcagagaagcttctgcctgcaggaggagaagagaatgggcagcctgggcctgagagtgctggccctggccagcggccccgagctgggcagactgaccttcctgggcctggtgggcatcatcgacccccccagagtgggcgtgaaggaggccgtgcaggtgctgagcgagagcggcgtgagcgtgaagatgatcaccggcgacgccctggagaccgccctggccatcggcagaaacatcggcctgtgcaacggcaagctgcaggccatgagcggcgaggaggtggacagcgtggagaagggcgagctggccgacagagtgggcaaggtgagcgtgttcttcagaaccagccccaagcacaagctgaagatcatcaaggccctgcaggagagcggcgccatcgtggccatgaccggcgacggcgtgaacgacgccgtggccctgaagagcgccgacatcggcatcgccatgggccagaccggcaccgacgtgagcaaggaggccgccaacatgatcctggtggacgacgacttcagcgccatcatgaacgccgtggaggagggcaagggcatcttctacaacatcaagaacttcgtgagattccagctgagcaccagcatcagcgccctgagcctgatcaccctgagcaccgtgttcaacctgcccagccccctgaacgccatgcagatcctgtggatcaacatcatcatggacggcccccccgcccagagcctgggcgtggagcccgtggacaaggacgccttcagacagccccccagaagcgtgagagacaccatcctgagcagagccctgatcctgaagatcctgatgagcgccgccatcatcatcagcggcaccctgttcatcttctggaaggagatgcccgaggacagagccagcacccccagaaccaccaccatgaccttcacctgcttcgtgttcttcgacctgttcaacgccctgacctgcagaagccagaccaagctgatcttcgagatcggcttcctgagaaaccacatgttcctgtacagcgtgctgggcagcatcctgggccagctggccgtgatctacatcccccccctgcagagagtgttccagaccgagaacctgggcgccctggacctgctgttcctgaccggcctggccagcagcgtgttcatcctgagcgagctgctgaagctgtgcgagaagtactgctgcagccccaagagagtgcagatgcaccccgaggacgtgtag

SEQ ID NO: 73613 - DNA, 2928 bp, synthetic construct
  misc_feature 1..2928: note = Description of Artificial Sequence: Synthetic coding sequence
  source 1..2928: mol_type = other DNA
atggtggagggcagagtgagcgagttcctgaagaagctgggcttcagcggcggcggcagacagtaccaggccctggagaaggacgaggaggaggccctgatcgacgagcagagcgagctgaaggccatcgagaaggagaagaaggtgaccgccctgccccccaaggaggcctgcaagtgccagaaggaggacctggccagagccttctgcgtggacctgcacaccggcctgagcgagttcagcgtgacccagagaagactggcccacggctggaacgagttcgtggccgacaacagcgagcccgtgtggaagaagtacctggaccagttcaagaaccccctgatcctgctgctgctgggcagcgccctggtgagcgtgctgaccaaggagtacgaggacgccgtgagcatcgccaccgccgtgctggtggtggtgaccgtggccttcatccaggagtacagaagcgagaagagcctggaggagctgaccaagatggtgccccccgagtgcaactgcctgagagagggcaagctgcagcacctgctggccagagagctggtgcccggcgacgtggtgagcctgagcatcggcgacagaatccccgccgacatcagactgaccgaggtgaccgacctgctggtggacgagagcagcttcaccggcgaggccgagccctgcagcaagaccgacagccccctgaccggcggcggcgacctgaccaccctgagcaacatcgtgttcatgggcaccctggtgcagtacggcagaggccagggcgtggtgatcggcaccggcgagagcagccagttcggcgaggtgttcaagatgatgcaggccgaggagacccccaagacccccctgcagaagagcatggacagactgggcaagcagctgaccctgttcagcttcggcatcatcggcctgatcatgctgatcggctggagccagggcaagcagctgctgagcatgttcaccatcggcgtgagcctggccgtggccgccatccccgagggcctgcccatcgtggtgatggtgaccctggtgctgggcgtgctgagaatggccaagaagagagtgatcgtgaagaagctgcccatcgtggagaccctgggctgctgcagcgtgctgtgcagcgacaagaccggcaccctgaccgccaacgagatgaccgtgacccagctggtgaccagcgacggcctgagagccgaggtgagcggcgtgggctacgacggccagggcaccgtgtgcctgctgcccagcaaggaggtgatcaaggagttcagcaacgtgagcgtgggcaagctggtggaggccggctgcgtggccaacaacgccgtgatcagaaagaacgccgtgatgggccagcccaccgagggcgccctgatggccctggccatgaagatggacctgagcgacatcaagaacagctacatcagaaagaaggagatccccttcagcagcgagcagaagtggatggccgtgaagtgcagcctgaagaccgaggaccaggaggacatctacttcatgaagggcgccctggaggaggtgatcagatactgcaccatgtacaacaacggcggcatccccctgcccctgaccccccagcagagaagcttctgcctgcaggaggagaagagaatgggcagcctgggcctgagagtgctggccctggccagcggccccgagctgggcagactgaccttcctgggcctggtgggcatcatcgacccccccagagtgggcgtgaaggaggccgtgcaggtgctgagcgagagcggcgtgagcgtgaagatgatcaccggcgacgccctggagaccgccctggccatcggcagaaacatcggcctgtgcaacggcaagctgcaggccatgagcggcgaggaggtggacagcgtggagaagggcgagctggccgacagagtgggcaaggtgagcgtgttcttcagaaccagccccaagcacaagctgaagatcatcaaggccctgcaggagagcggcgccatcgtggccatgaccggcgacggcgtgaacgacgccgtggccctgaagagcgccgacatcggcatcgccatgggccagaccggcaccgacgtgagcaaggaggccgccaacatgatcctggtggacgacgacttcagcgccatcatgaacgccgtggaggagggcaagggcatcttctacaacatcaagaacttcgtgagattccagctgagcaccagcatcagcgccctgagcctgatcaccctgagcaccgtgttcaacctgcccagccccctgaacgccatgcagatcctgtggatcaacatcatcatggacggcccccccgcccagagaagcagccagaagaccgaggtgtgctgcaccgccgtgagactgggcgtggagggcagaggcgagagcacctgggccggcagagccggcctgggcgtggagcccgtggacaaggacgccttcagacagccccccagaagcgtgagagacaccatcctgagcagagccctgatcctgaagatcctgatgagcgccgccatcatcatcagcggcaccctgttcatcttctggaaggagatgcccgaggacagagccagcacccccagaaccaccaccatgaccttcacctgcttcgtgttcttcgacctgttcaacgccctgacctgcagaagccagaccaagctgatcttcgagatcggcttcctgagaaaccacatgttcctgtacagcgtgctgggcagcatcctgggccagctggccgtgatctacatcccccccctgcagagagtgttccagaccgagaacctgggcgccctggacctgctgttcctgaccggcctggccagcagcgtgttcatcctgagcgagctgctgaagctgtgcgagaagtactgctgcagccccaagagagtgcagatgcaccccgaggacgtgtag

SEQ ID NO: 73614 - DNA, 2388 bp, synthetic construct
  misc_feature 1..2388: note = Description of Artificial Sequence: Synthetic coding sequence
  source 1..2388: mol_type = other DNA
atgagaacccccagcgccagccccagacagtgcctgagctggagcctgagccccagcagcagcctgagagagggcaagctgcagcacctgctggccagagagctggtgcccggcgacgtggtgagcctgagcatcggcgacagaatccccgccgacatcagactgaccgaggtgaccgacctgctggtggacgagagcagcttcaccggcgaggccgagccctgcagcaagaccgacagccccctgaccggcggcggcgacctgaccaccctgagcaacatcgtgttcatgggcaccctggtgcagtacggcagaggccagggcgtggtgatcggcaccggcgagagcagccagttcggcgaggtgttcaagatgatgcaggccgaggagacccccaagacccccctgcagaagagcatggacagactgggcaagcagctgaccctgttcagcttcggcatcatcggcctgatcatgctgatcggctggagccagggcaagcagctgctgagcatgttcaccatcggcgtgagcctggccgtggccgccatccccgagggcctgcccatcgtggtgatggtgaccctggtgctgggcgtgctgagaatggccaagaagagagtgatcgtgaagaagctgcccatcgtggagaccctgggctgctgcagcgtgctgtgcagcgacaagaccggcaccctgaccgccaacgagatgaccgtgacccagctggtgaccagcgacggcctgagagccgaggtgagcggcgtgggctacgacggccagggcaccgtgtgcctgctgcccagcaaggaggtgatcaaggagttcagcaacgtgagcgtgggcaagctggtggaggccggctgcgtggccaacaacgccgtgatcagaaagaacgccgtgatgggccagcccaccgagggcgccctgatggccctggccatgaagatggacctgagcgacatcaagaacagctacatcagaaagaaggagatccccttcagcagcgagcagaagtggatggccgtgaagtgcagcctgaagaccgaggaccaggaggacatctacttcatgaagggcgccctggaggaggtgatcagatactgcaccatgtacaacaacggcggcatccccctgcccctgaccccccagcagagaagcttctgcctgcaggaggagaagagaatgggcagcctgggcctgagagtgctggccctggccagcggccccgagctgggcagactgaccttcctgggcctggtgggcatcatcgacccccccagagtgggcgtgaaggaggccgtgcaggtgctgagcgagagcggcgtgagcgtgaagatgatcaccggcgacgccctggagaccgccctggccatcggcagaaacatcggcctgtgcaacggcaagctgcaggccatgagcggcgaggaggtggacagcgtggagaagggcgagctggccgacagagtgggcaaggtgagcgtgttcttcagaaccagccccaagcacaagctgaagatcatcaaggccctgcaggagagcggcgccatcgtggccatgaccggcgacggcgtgaacgacgccgtggccctgaagagcgccgacatcggcatcgccatgggccagaccggcaccgacgtgagcaaggaggccgccaacatgatcctggtggacgacgacttcagcgccatcatgaacgccgtggaggagggcaagggcatcttctacaacatcaagaacttcgtgagattccagctgagcaccagcatcagcgccctgagcctgatcaccctgagcaccgtgttcaacctgcccagccccctgaacgccatgcagatcctgtggatcaacatcatcatggacggcccccccgcccagagcctgggcgtggagcccgtggacaaggacgccttcagacagccccccagaagcgtgagagacaccatcctgagcagagccctgatcctgaagatcctgatgagcgccgccatcatcatcagcggcaccctgttcatcttctggaaggagatgcccgaggacagagccagcacccccagaaccaccaccatgaccttcacctgcttcgtgttcttcgacctgttcaacgccctgacctgcagaagccagaccaagctgatcttcgagatcggcttcctgagaaaccacatgttcctgtacagcgtgctgggcagcatcctgggccagctggccgtgatctacatcccccccctgcagagagtgttccagaccgagaacctgggcgccctggacctgctgttcctgaccggcctggccagcagcgtgttcatcctgagcgagctgctgaagctgtgcgagaagtactgctgcagccccaagagagtgcagatgcaccccgaggacgtgtag

SEQ ID NO: 73615 - DNA, 3090 bp, synthetic construct
  misc_feature 1..3090: note = Description of Artificial Sequence: Synthetic coding sequence
  source 1..3090: mol_type = other DNA
atggaggccgcccacctgctgcccgccgccgacgtgctgagacacttcagcgtgaccgccgagggcggcctgagccccgcccaggtgaccggcgccagagagagatacggccccaacgagctgcccagcgaggagggcaagagcctgtgggagctggtgctggagcagttcgaggacctgctggtgagaatcctgctgctggccgccctggtgagcttcgtgctggcctggttcgaggagggcgaggagaccaccaccgccttcgtggagcccctggtgatcatgctgatcctggtggccaacgccatcgtgggcgtgtggcaggagagaaacgccgagagcgccatcgaggccctgaaggagtacgagcccgagatgggcaaggtgatcagaagcgacagaaagggcgtgcagagaatcagagccagagacatcgtgcccggcgacatcgtggaggtggccgtgggcgacaaggtgcccgccgacctgagactgatcgagatcaagagcaccaccctgagagtggaccagagcatcctgaccggcgagagcgtgagcgtgaccaagcacaccgaggccatccccgaccccagagccgtgaaccaggacaagaagaacatgctgttcagcggcaccaacatcaccagcggcaaggccgtgggcgtggccgtggccaccggcctgcacaccgagctgggcaagatcagaagccagatggccgccgtggagcccgagagaacccccctgcagagaaagctggacgagttcggcagacagctgagccacgccatcagcgtgatctgcgtggccgtgtgggtgatcaacatcggccacttcgccgaccccgcccacggcggcagctggctgagaggcgccgtgtactacttcaagatcgccgtggccctggccgtggccgccatccccgagggcctgcccgccgtgatcaccacctgcctggccctgggcaccagaagaatggccagaaagaacgccatcgtgagaagcctgcccagcgtggagaccctgggctgcaccagcgtgatctgcagcgacaagaccggcaccctgaccaccaaccagatgagcgtgtgcagaatgttcgtggtggccgaggccgacgccggcagctgcctgctgcacgagttcaccatcagcggcaccacctacacccccgagggcgaggtgagacagggcgaccagcccgtgagatgcggccagttcgacggcctggtggagctggccaccatctgcgccctgtgcaacgacagcgccctggactacaacgaggccaagggcgtgtacgagaaggtgggcgaggccaccgagaccgccctgacctgcctggtggagaagatgaacgtgttcgacaccgacctgcaggccctgagcagagtggagagagccggcgcctgcaacaccgtgatcaagcagctgatgagaaaggagttcaccctggagttcagcagagacagaaagagcatgagcgtgtactgcacccccaccagaccccaccccaccggccagggcagcaagatgttcgtgaagggcgcccccgagagcgtgatcgagagatgcagcagcgtgagagtgggcagcagaaccgcccccctgacccccaccagcagagagcagatcctggccaagatcagagactggggcagcggcagcgacaccctgagatgcctggccctggccaccagagacgccccccccagaaaggaggacatggagctggacgactgcagcaagttcgtgcagtacgagaccgacctgaccttcgtgggctgcgtgggcatgctggacccccccagacccgaggtggccgcctgcatcaccagatgctaccaggccggcatcagagtggtgatgatcaccggcgacaacaagggcaccgccgtggccatctgcagaagactgggcatcttcggcgacaccgaggacgtggccggcaaggcctacaccggcagagagttcgacgacctgagccccgagcagcagagacaggcctgcagaaccgccagatgcttcgccagagtggagcccgcccacaagagcagaatcgtggagaacctgcagagcttcaacgagatcaccgccatgaccggcgacggcgtgaacgacgcccccgccctgaagaaggccgagatcggcatcgccatgggcagcggcaccgccgtggccaagagcgccgccgagatggtgctgagcgacgacaacttcgccagcatcgtggccgccgtggaggagggcagagccatctacagcaacatgaagcagttcatcagatacctgatcagcagcaacgtgggcgaggtggtgtgcatcttcctgaccgccatcctgggcctgcccgaggccctgatccccgtgcagctgctgtgggtgaacctggtgaccgacggcctgcccgccaccgccctgggcttcaacccccccgacctggacatcatggagaagctgcccagaagccccagagaggccctgatcagcggctggctgttcttcagatacctggccatcggcgtgtacgtgggcctggccaccgtggccgccgccacctggtggttcgtgtacgacgccgagggcccccacatcaacttctaccagctgagaaacttcctgaagtgcagcgaggacaaccccctgttcgccggcatcgactgcgaggtgttcgagagcagattccccaccaccatggccctgagcgtgctggtgaccatcgagatgtgcaacgccctgaacagcgtgagcgagaaccagagcctgctgagaatgcccccctggatgaacccctggctgctggtggccgtggccatgagcatggccctgcacttcctgatcctgctggtgccccccctgcccctgatcttccaggtgacccccctgagcggcagacagtgggtggtggtgctgcagatcagcctgcccgtgatcctgctggacgaggccctgaagtacctgagcagaaaccacatgcacgcctgcctgtaccccggcctgctgagaaccgtgagccaggcctggagcagacagcccctgaccaccagctggacccccgaccacaccggcctggccagcctgaagaagtag

SEQ ID NO: 73616 - DNA, 3132 bp, synthetic construct
  misc_feature 1..3132: note = Description of Artificial Sequence: Synthetic coding sequence
  source 1..3132: mol_type = other DNA
atggaggccgcccacctgctgcccgccgccgacgtgctgagacacttcagcgtgaccgccgagggcggcctgagccccgcccaggtgaccggcgccagagagagatacggccccaacgagctgcccagcgaggagggcaagagcctgtgggagctggtgctggagcagttcgaggacctgctggtgagaatcctgctgctggccgccctggtgagcttcgtgctggcctggttcgaggagggcgaggagaccaccaccgccttcgtggagcccctggtgatcatgctgatcctggtggccaacgccatcgtgggcgtgtggcaggagagaaacgccgagagcgccatcgaggccctgaaggagtacgagcccgagatgggcaaggtgatcagaagcgacagaaagggcgtgcagagaatcagagccagagacatcgtgcccggcgacatcgtggaggtggccgtgggcgacaaggtgcccgccgacctgagactgatcgagatcaagagcaccaccctgagagtggaccagagcatcctgaccggcgagagcgtgagcgtgaccaagcacaccgaggccatccccgaccccagagccgtgaaccaggacaagaagaacatgctgttcagcggcaccaacatcaccagcggcaaggccgtgggcgtggccgtggccaccggcctgcacaccgagctgggcaagatcagaagccagatggccgccgtggagcccgagagaacccccctgcagagaaagctggacgagttcggcagacagctgagccacgccatcagcgtgatctgcgtggccgtgtgggtgatcaacatcggccacttcgccgaccccgcccacggcggcagctggctgagaggcgccgtgtactacttcaagatcgccgtggccctggccgtggccgccatccccgagggcctgcccgccgtgatcaccacctgcctggccctgggcaccagaagaatggccagaaagaacgccatcgtgagaagcctgcccagcgtggagaccctgggctgcaccagcgtgatctgcagcgacaagaccggcaccctgaccaccaaccagatgagcgtgtgcagaatgttcgtggtggccgaggccgacgccggcagctgcctgctgcacgagttcaccatcagcggcaccacctacacccccgagggcgaggtgagacagggcgaccagcccgtgagatgcggccagttcgacggcctggtggagctggccaccatctgcgccctgtgcaacgacagcgccctggactacaacgaggccaagggcgtgtacgagaaggtgggcgaggccaccgagaccgccctgacctgcctggtggagaagatgaacgtgttcgacaccgacctgcaggccctgagcagagtggagagagccggcgcctgcaacaccgtgatcaagcagctgatgagaaaggagttcaccctggagttcagcagagacagaaagagcatgagcgtgtactgcacccccaccagaccccaccccaccggccagggcagcaagatgttcgtgaagggcgcccccgagagcgtgatcgagagatgcagcagcgtgagagtgggcagcagaaccgcccccctgacccccaccagcagagagcagatcctggccaagatcagagactggggcagcggcagcgacaccctgagatgcctggccctggccaccagagacgccccccccagaaaggaggacatggagctggacgactgcagcaagttcgtgcagtacgagaccgacctgaccttcgtgggctgcgtgggcatgctggacccccccagacccgaggtggccgcctgcatcaccagatgctaccaggccggcatcagagtggtgatgatcaccggcgacaacaagggcaccgccgtggccatctgcagaagactgggcatcttcggcgacaccgaggacgtggccggcaaggcctacaccggcagagagttcgacgacctgagccccgagcagcagagacaggcctgcagaaccgccagatgcttcgccagagtggagcccgcccacaagagcagaatcgtggagaacctgcagagcttcaacgagatcaccgccatgaccggcgacggcgtgaacgacgcccccgccctgaagaaggccgagatcggcatcgccatgggcagcggcaccgccgtggccaagagcgccgccgagatggtgctgagcgacgacaacttcgccagcatcgtggccgccgtggaggagggcagagccatctacagcaacatgaagcagttcatcagatacctgatcagcagcaacgtgggcgaggtggtgtgcatcttcctgaccgccatcctgggcctgcccgaggccctgatccccgtgcagctgctgtgggtgaacctggtgaccgacggcctgcccgccaccgccctgggcttcaacccccccgacctggacatcatggagaagctgcccagaagccccagagaggccctgatcagcggctggctgttcttcagatacctggccatcggcgtgtacgtgggcctggccaccgtggccgccgccacctggtggttcgtgtacgacgccgagggcccccacatcaacttctaccagctgagaaacttcctgaagtgcagcgaggacaaccccctgttcgccggcatcgactgcgaggtgttcgagagcagattccccaccaccatggccctgagcgtgctggtgaccatcgagatgtgcaacgccctgaacagcgtgagcgagaaccagagcctgctgagaatgcccccctggatgaacccctggctgctggtggccgtggccatgagcatggccctgcacttcctgatcctgctggtgccccccctgcccctgatcttccaggtgacccccctgagcggcagacagtgggtggtggtgctgcagatcagcctgcccgtgatcctgctggacgaggccctgaagtacctgagcagaaaccacatgcacgcctgcctgtaccccggcctgctgagaaccgtgagccaggcctggagcagacagcccctgaccaccagctggacccccgaccacaccggcagaaacgagcccgaggtgagcgccggcaacagagtggagagccccgtgtgcaccagcgactag

SEQ ID NO: 73617 - DNA, 3159 bp, synthetic construct
  misc_feature 1..3159: note = Description of Artificial Sequence: Synthetic coding sequence
  source 1..3159: mol_type = other DNA
atggaggccgcccacctgctgcccgccgccgacgtgctgagacacttcagcgtgaccgccgagggcggcctgagccccgcccaggtgaccggcgccagagagagatacggccccaacgagctgcccagcgaggagggcaagagcctgtgggagctggtgctggagcagttcgaggacctgctggtgagaatcctgctgctggccgccctggtgagcttcgtgctggcctggttcgaggagggcgaggagaccaccaccgccttcgtggagcccctggtgatcatgctgatcctggtggccaacgccatcgtgggcgtgtggcaggagagaaacgccgagagcgccatcgaggccctgaaggagtacgagcccgagatgggcaaggtgatcagaagcgacagaaagggcgtgcagagaatcagagccagagacatcgtgcccggcgacatcgtggaggtggccgtgggcgacaaggtgcccgccgacctgagactgatcgagatcaagagcaccaccctgagagtggaccagagcatcctgaccggcgagagcgtgagcgtgaccaagcacaccgaggccatccccgaccccagagccgtgaaccaggacaagaagaacatgctgttcagcggcaccaacatcaccagcggcaaggccgtgggcgtggccgtggccaccggcctgcacaccgagctgggcaagatcagaagccagatggccgccgtggagcccgagagaacccccctgcagagaaagctggacgagttcggcagacagctgagccacgccatcagcgtgatctgcgtggccgtgtgggtgatcaacatcggccacttcgccgaccccgcccacggcggcagctggctgagaggcgccgtgtactacttcaagatcgccgtggccctggccgtggccgccatccccgagggcctgcccgccgtgatcaccacctgcctggccctgggcaccagaagaatggccagaaagaacgccatcgtgagaagcctgcccagcgtggagaccctgggctgcaccagcgtgatctgcagcgacaagaccggcaccctgaccaccaaccagatgagcgtgtgcagaatgttcgtggtggccgaggccgacgccggcagctgcctgctgcacgagttcaccatcagcggcaccacctacacccccgagggcgaggtgagacagggcgaccagcccgtgagatgcggccagttcgacggcctggtggagctggccaccatctgcgccctgtgcaacgacagcgccctggactacaacgaggccaagggcgtgtacgagaaggtgggcgaggccaccgagaccgccctgacctgcctggtggagaagatgaacgtgttcgacaccgacctgcaggccctgagcagagtggagagagccggcgcctgcaacaccgtgatcaagcagctgatgagaaaggagttcaccctggagttcagcagagacagaaagagcatgagcgtgtactgcacccccaccagaccccaccccaccggccagggcagcaagatgttcgtgaagggcgcccccgagagcgtgatcgagagatgcagcagcgtgagagtgggcagcagaaccgcccccctgacccccaccagcagagagcagatcctggccaagatcagagactggggcagcggcagcgacaccctgagatgcctggccctggccaccagagacgccccccccagaaaggaggacatggagctggacgactgcagcaagttcgtgcagtacgagaccgacctgaccttcgtgggctgcgtgggcatgctggacccccccagacccgaggtggccgcctgcatcaccagatgctaccaggccggcatcagagtggtgatgatcaccggcgacaacaagggcaccgccgtggccatctgcagaagactgggcatcttcggcgacaccgaggacgtggccggcaaggcctacaccggcagagagttcgacgacctgagccccgagcagcagagacaggcctgcagaaccgccagatgcttcgccagagtggagcccgcccacaagagcagaatcgtggagaacctgcagagcttcaacgagatcaccgccatgaccggcgacggcgtgaacgacgcccccgccctgaagaaggccgagatcggcatcgccatgggcagcggcaccgccgtggccaagagcgccgccgagatggtgctgagcgacgacaacttcgccagcatcgtggccgccgtggaggagggcagagccatctacagcaacatgaagcagttcatcagatacctgatcagcagcaacgtgggcgaggtggtgtgcatcttcctgaccgccatcctgggcctgcccgaggccctgatccccgtgcagctgctgtgggtgaacctggtgaccgacggcctgcccgccaccgccctgggcttcaacccccccgacctggacatcatggagaagctgcccagaagccccagagaggccctgatcagcggctggctgttcttcagatacctggccatcggcgtgtacgtgggcctggccaccgtggccgccgccacctggtggttcgtgtacgacgccgagggcccccacatcaacttctaccagctgagaaacttcctgaagtgcagcgaggacaaccccctgttcgccggcatcgactgcgaggtgttcgagagcagattccccaccaccatggccctgagcgtgctggtgaccatcgagatgtgcaacgccctgaacagcgtgagcgagaaccagagcctgctgagaatgcccccctggatgaacccctggctgctggtggccgtggccatgagcatggccctgcacttcctgatcctgctggtgccccccctgcccctgatcttccaggtgacccccctgagcggcagacagtgggtggtggtgctgcagatcagcctgcccgtgatcctgctggacgaggccctgaagtacctgagcagaaaccacatgcacgcctgcctgtaccccggcctgctgagaaccgtgagccaggcctggagcagacagcccctgaccaccagctggacccccgaccacaccggcctggccagcctgggccagggccacagcatcgtgagcctgagcgagctgctgagagagggcggcagcagagaggagatgagccagaagtag

SEQ ID NO: 73618 - DNA, 3090 bp, synthetic construct; identical to SEQ ID NO: 73615
  misc_feature 1..3090: note = Description of Artificial Sequence: Synthetic coding sequence
  source 1..3090: mol_type = other DNA

SEQ ID NO: 73619 - DNA, 651 bp, synthetic construct
  misc_feature 1..651: note = Description of Artificial Sequence: Synthetic coding sequence
  source 1..651: mol_type = other DNA
atggagaagctgcccagaagccccagagaggccctgatcagcggctggctgttcttcagatacctggccatcggcgtgtacgtgggcctggccaccgtggccgccgccacctggtggttcgtgtacgacgccgagggcccccacatcaacttctaccagctgagaaacttcctgaagtgcagcgaggacaaccccctgttcgccggcatcgactgcgaggtgttcgagagcagattccccaccaccatggccctgagcgtgctggtgaccatcgagatgtgcaacgccctgaacagcgtgagcgagaaccagagcctgctgagaatgcccccctggatgaacccctggctgctggtggccgtggccatgagcatggccctgcacttcctgatcctgctggtgccccccctgcccctgatcttccaggtgacccccctgagcggcagacagtgggtggtggtgctgcagatcagcctgcccgtgatcctgctggacgaggccctgaagtacctgagcagaaaccacatgcacggccccggcacccagcacagactggccgtgagagccgcccagagaggcagaaagcagggcagaaacgagcccgaggtgagcgccggcaacagagtggagagccccggccccggcggctag

SEQ ID NO: 73620 - DNA, 3000 bp, synthetic construct
  misc_feature 1..3000: note = Description of Artificial Sequence: Synthetic coding sequence
  source 1..3000: mol_type = other DNA
atggaggccgcccacctgctgcccgccgccgacgtgctgagacacttcagcgtgaccgccgagggcggcctgagccccgcccaggtgaccggcgccagagagagatacggccccaacgagctgcccagcgaggagggcaagagcctgtgggagctggtgctggagcagttcgaggacctgctggtgagaatcctgctgctggccgccctggtgagcttcgtgctggcctggttcgaggagggcgaggagaccaccaccgccttcgtggagcccctggtgatcatgctgatcctggtggccaacgccatcgtgggcgtgtggcaggagagaaacgccgagagcgccatcgaggccctgaaggagtacgagcccgagatgggcaaggtgatcagaagcgacagaaagggcgtgcagagaatcagagccagagacatcgtgcccggcgacatcgtggaggtggccgtgggcgacaaggtgcccgccgacctgagactgatcgagatcaagagcaccaccctgagagtggaccagagcatcctgaccggcgagagcgtgagcgtgaccaagcacaccgaggccatccccgaccccagagccgtgaaccaggacaagaagaacatgctgttcagcggcaccaacatcaccagcggcaaggccgtgggcgtggccgtggccaccggcctgcacaccgagctgggcaagatcagaagccagatggccgccgtggagcccgagagaacccccctgcagagaaagctggacgagttcggcagacagctgagccacgccatcagcgtgatctgcgtggccgtgtgggtgatcaacatcggccacttcgccgaccccgcccacggcggcagctggctgagaggcgccgtgtactacttcaagatcgccgtggccctggccgtggccgccatccccgagggcctgcccgccgtgatcaccacctgcctggccctgggcaccagaagaatggccagaaagaacgccatcgtgagaagcctgcccagcgtggagaccctgggctgcaccagcgtgatctgcagcgacaagaccggcaccctgaccaccaaccagatgagcgtgtgcagaatgttcgtggtggccgaggccgacgccggcagctgcctgctgcacgagttcaccatcagcggcaccacctacacccccgagggcgaggtgagacagggcgaccagcccgtgagatgcggccagttcgacggcctggtggagctggccaccatctgcgccctgtgcaacgacagcgccctggactacaacgaggccaagggcgtgtacgagaaggtgggcgaggccaccgagaccgccctgacctgcctggtggagaagatgaacgtgttcgacaccgacctgcaggccctgagcagagtggagagagccggcgcctgcaacaccgtgatcaagcagctgatgagaaaggagttcaccctggagttcagcagagacagaaagagcatgagcgtgtactgcacccccaccagaccccaccccaccggccagggcagcaagatgttcgtgaagggcgcccccgagagcgtgatcgagagatgcagcagcgtgagagtgggcagcagaaccgcccccctgacccccaccagcagagagcagatcctggccaagatcagagactggggcagcggcagcgacaccctgagatgcctggccctggccaccagagacgccccccccagaaaggaggacatggagctggacgactgcagcaagttcgtgcagtacgagaccgacctgaccttcgtgggctgcgtgggcatgctggacccccccagacccgaggtggccgcctgcatcaccagatgctaccaggccggcatcagagtggtgatgatcaccggcgacaacaagggcaccgccgtggccatctgcagaagactgggcatcttcggcgacaccgaggacgtggccggcaaggcctacaccggcagagagttcgacgacctgagccccgagcagcagagacaggcctgcagaaccgccagatgcttcgccagagtggagcccgcccacaagagcagaatcgtggagaacctgcagagcttcaacgagatcaccgccatgaccggcgacggcgtgaacgacgcccccgccctgaagaaggccgagatcggcatcgccatgggcagcggcaccgccgtggccaagagcgccgccgagatggtgctgagcgacgacaacttcgccagcatcgtggccgccgtggaggagggcagagccatctacagcaacatgaagcagttcatcagatacctgatcagcagcaacgtgggcgaggtggtgtgcatcttcctgaccgccatcctgggcctgcccgaggccctgatccccgtgcagctgctgtgggtgaacctggtgaccgacggcctgcccgccaccgccctgggcttcaacccccccgacctggacatcatggagaagctgcccagaagccccagagaggccctgatcagcggctggctgttcttcagatacctggccatcggcgtgtacgtgggcctggccaccgtggccgccgccacctggtggttcgtgtacgacgccgagggcccccacatcaacttctaccagctgagaaacttcctgaagtgcagcgaggacaaccccctgttcgccggcatcgactgcgaggtgttcgagagcagattccccaccaccatggccctgagcgtgctggtgaccatcgagatgtgcaacgccctgaacagcgtgagcgagaaccagagcctgctgagaatgcccccctggatgaacccctggctgctggtggccgtggccatgagcatggccctgcacttcctgatcctgctggtgccccccctgcccctgatcttccaggtgacccccctgagcggcagacagtgggtggtggtgctgcagatcagcctgcccgtgatcctgctggacgaggccctgaagtacctgagcagaaaccacatgcacgaggagatgagccagaagtag

SEQ ID NO: 73621 - DNA, 2997 bp, synthetic construct
  misc_feature 1..2997: note = Description of Artificial Sequence: Synthetic coding sequence
  source 1..2997: mol_type = other DNA
atggaggccgcccacctgctgcccgccgccgacgtgctgagacacttcagcgtgaccgccgagggcggcctgagccccgcccaggtgaccggcgccagagagagatacggccccaacgagctgcccagcgaggagggcaagagcctgtgggagctggtgctggagcagttcgaggacctgctggtgagaatcctgctgctggccgccctggtgagcttcgtgctggcctggttcgaggagggcgaggagaccaccaccgccttcgtggagcccctggtgatcatgctgatcctggtggccaacgccatcgtgggcgtgtggcaggagagaaacgccgagagcgccatcgaggccctgaaggagtacgagcccgagatgggcaaggtgatcagaagcgacagaaagggcgtgcagagaatcagagccagagacatcgtgcccggcgacatcgtggaggtggccgtgggcgacaaggtgcccgccgacctgagactgatcgagatcaagagcaccaccctgagagtggaccagagcatcctgaccggcgagagcgtgagcgtgaccaagcacaccgaggccatccccgaccccagagccgtgaaccaggacaagaagaacatgctgttcagcggcaccaacatcaccagcggcaaggccgtgggcgtggccgtggccaccggcctgcacaccgagctgggcaagatcagaagccagatggccgccgtggagcccgagagaacccccctgcagagaaagctggacgagttcggcagacagctgagccacgccatcagcgtgatctgcgtggccgtgtgggtgatcaacatcggccacttcgccgaccccgcccacggcggcagctggctgagaggcgccgtgtactacttcaagatcgccgtggccctggccgtggccgccatccccgagggcctgcccgccgtgatcaccacctgcctggccctgggcaccagaagaatggccagaaagaacgccatcgtgagaagcctgcccagcgtggagaccctgggctgcaccagcgtgatctgcagcgacaagaccggcaccctgaccaccaaccagatgagcgtgtgcagaatgttcgtggtggccgaggccgacgccggcagctgcctgctgcacgagttcaccatcagcggcaccacctacacccccgagggcgaggtgagacagggcgaccagcccgtgagatgcggccagttcgacggcctggtggagctggccaccatctgcgccctgtgcaacgacagcgccctggactacaacgaggccaagggcgtgtacgagaaggtgggcgaggccaccgagaccgccctgacctgcctggtggagaagatgaacgtgttcgacaccgacctgcaggccctgagcagagtggagagagccggcgcctgcaacaccgtgatcaagcagctgatgagaaaggagttcaccctggagttcagcagagacagaaagagcatgagcgtgtactgcacccccaccagaccccaccccaccggccagggcagcaagatgttcgtgaagggcgcccccgagagcgtgatcgagagatgcagcagcgtgagagtgggcagcagaaccgcccccctgacccccaccagcagagagcagatcctggccaagatcagagactggggcagcggcagcgacaccctgagatgcctggccctggccaccagagacgccccccccagaaaggaggacatggagctggacgactgcagcaagttcgtgcagtacgagaccgacctgaccttcgtgggctgcgtgggcatgctggacccccccagacccgaggtggccgcctgcatcaccagatgctaccaggccggcatcagagtggtgatgatcaccggcgacaacaagggcaccgccgtggccatctgcagaagactgggcatcttcggcgacaccgaggacgtggccggcaaggcctacaccggcagagagttcgacgacctgagccccgagcagcagagacaggcctgcagaaccgccagatgcttcgccagagtggagcccgcccacaagagcagaatcgtggagaacctgcagagcttcaacgagatcaccgccatgaccggcgacggcgtgaacgacgcccccgccctgaagaaggccgagatcggcatcgccatgggcagcggcaccgccgtggccaagagcgccgccgagatggtgctgagcgacgacaacttcgccagcatcgtggccgccgtggaggagggcagagccatctacagcaacatgaagcagttcatcagatacctgatcagcagcaacgtgggcgaggtggtgtgcatcttcctgaccgccatcctgggcctgcccgaggccctgatccccgtgcagctgctgtgggtgaacctggtgaccgacggcctgcccgccaccgccctgggcttcaacccccccgacctggacatcatggagaagctgcccagaagccccagagaggccctgatcagcggctggctgttcttcagatacctggccatcggcgtgtacgtgggcctggccaccgtggccgccgccacctggtggttcgtgtacgacgccgagggcccccacatcaacttctaccagctgagaaacttcctgaagtgcagcgaggacaaccccctgttcgccggcatcgactgcgaggtgttcgagagcagattccccaccaccatggccctgagcgtgctggtgaccatcgagatgtgcaacgccctgaacagcgtgagcgagaaccagagcctgctgagaatgcccccctggatgaacccctggctgctggtggccgtggccatgagcatggccctgcacttcctgatcctgctggtgccccccctgcccctgatcttccaggtgacccccctgagcggcagacagtgggtggtggtgctgcagatcagcctgcccgtgatcctgctggacgaggccctgaagtacctgagcagaaaccacatgcacggccacacccagagctag

SEQ ID NO: 73622 - DNA, 2997 bp, synthetic construct
  misc_feature 1..2997: note = Description of Artificial Sequence: Synthetic coding sequence
  source 1..2997: mol_type = other DNA
atggaggccgcccacctgctgcccgccgccgacgtgctgagacacttcagcgtgaccgccgagggcggcctgagccccgcccaggtgaccggcgccagagagagatacggccccaacgagctgcccagcgaggagggcaagagcctgtgggagctggtgctggagcagttcgaggacctgctggtgagaatcctgctgctggccgccctggtgagcttcgtgctggcctggttcgaggagggcgaggagaccaccaccgccttcgtggagcccctggtgatcatgctgatcctggtggccaacgccatcgtgggcgtgtggcaggagagaaacgccgagagcgccatcgaggccctgaaggagtacgagcccgagatgggcaaggtgatcagaagcgacagaaagggcgtgcagagaatcagagccagagacatcgtgcccggcgacatcgtggaggtggccgtgggcgacaaggtgcccgccgacctgagactgatcgagatcaagagcaccaccctgagagtggaccagagcatcctgaccggcgagagcgtgagcgtgaccaagcacaccgaggccatccccgaccccagagccgtgaaccaggacaagaagaacatgctgttcagcggcaccaacatcaccagcggcaaggccgtgggcgtggccgtggccaccggcctgcacaccgagctgggcaagatcagaagccagatggccgccgtggagcccgagagaacccccctgcagagaaagctggacgagttcggcagacagctgagccacgccatcagcgtgatctgcgtggccgtgtgggtgatcaacatcggccacttcgccgaccccgcccacggcggcagctggctgagaggcgccgtgtactacttcaagatcgccgtggccctggccgtggccgccatccccgagggcctgcccgccgtgatcaccacctgcctggccctgggcaccagaagaatggccagaaagaacgccatcgtgagaagcctgcccagcgtggagaccctgggctgcaccagcgtgatctgcagcgacaagaccggcaccctgaccaccaaccagatgagcgtgtgcagaatgttcgtggtggccgaggccgacgccggcagctgcctgctgcacgagttcaccatcagcggcaccacctacacccccgagggcgaggtgagacagggcgaccagcccgtgagatgcggccagttcgacggcctggtggagctggccaccatctgcgccctgtgcaacgacagcgccctggactacaacgaggccaagggcgtgtacgagaaggtgggcgaggccaccgagaccgccctgacctgcctggtggagaagatgaacgtgttcgacaccgacctgcaggccctgagcagagtggagagagccggcgcctgcaacaccgtgatcaagcagctgatgagaaaggagttcaccctggagttcagcagagacagaaagagcatgagcgtgtactgcacccccaccagaccccaccccaccggccagggcagcaagatgttcgtgaagggcgcccccgagagcgtgatcgagagatgcagcagcgtgagagtgggcagcagaaccgcccccctgacccccaccagcagagagcagatcctggccaagatcagagactggggcagcggcagcgacaccctgagatgcctggccctggccaccagagacgccccccccagaaaggaggacatggagctggacgactgcagcaagttcgtgcagtacgagaccgacctgaccttcgtgggctgcgtgggcatgctggacccccccagacccgaggtggccgcctgcatcaccagatgctaccaggccggcatcagagtggtgatgatcaccggcgacaacaagggcaccgccgtggccatctgcagaagactgggcatcttcggcgacaccgaggacgtggccggcaaggcctacaccggcagagagttcgacgacctgagccccgagcagcagagacaggcctgcagaaccgccagatgcttcgccagagtggagcccgcccacaagagcagaatcgtggagaacctgcagagcttcaacgagatcaccgccatgaccggcgacggcgtgaacgacgcccccgccctgaagaaggccgagatcggcatcgccatgggcagcggcaccgccgtggccaagagcgccgccgagatggtgctgagcgacgacaacttcgccagcatcgtggccgccgtggaggagggcagagccatctacagcaacatgaagcagttcatcagatacctgatcagcagcaacgtgggcgaggtggtgtgcatcttcctgaccgccatcctgggcctgcccgaggccctgatccccgtgcagctgctgtgggtgaacctggtgaccgacggcctgcccgccaccgccctgggcttcaacccccccgacctggacatcatggagaagctgcccagaagccccagagaggccctgatcagcggctggctgttcttcagatacctggccatcggcgtgtacgtgggcctggccaccgtggccgccgccacctggtggttcgtgtacgacgccgagggcccccacatcaacttctaccagctgagaaacttcctgaagtgcagcgaggacaaccccctgttcgccggcatcgactgcgaggtgttcgagagcagattccccaccaccatggccctgagcgtgctggtgaccatcgagatgtgcaacgccctgaacagcgtgagcgagaaccagagcctgctgagaatgcccccctggatgaacccctggctgctggtggccgtggccatgagcatggccctgcacttcctgatcctgctggtgccccccctgcccctgatcttccaggtgacccccctgagcggcagacagtgggtggtggtgctgcagatcagcctgcccgtgatcctgctggacgaggccctgaagtacctgagcagaaaccacatgcacgagatgagccagaagtag

SEQ ID NO: 73623 - DNA, 1386 bp, synthetic construct
  misc_feature 1..1386: note = Description of Artificial Sequence: Synthetic coding sequence
  source 1..1386: mol_type = other DNA
atgaccgtgcccaaggagatgcccgagaagtgggccagagcccaggccccccccagctggagcagaaagaagcccagctggggcaccgaggaggagagaagagccagagccaacgacagagagtacaacgagaagttccagtacgccagcaactgcatcaagaccagcaagtacaacatcctgaccttcctgcccgtgaacctgttcgagcagttccaggaggtggccaacacctacttcctgttcctgctgatcctgcagctgatcccccagatcagcagcctgagctggttcaccaccatcgtgcccctggtgctggtgctgaccatcaccgccgtgaaggacgccaccgacgactacttcagacacaagagcgacaaccaggtgaacaacagacagagccaggtgctgatcaacggcatcctgcagcaggagcagtggatgaacgtgtgcgtgggcgacatcatcaagctggagaacaaccagttcgtggccgccgacctgctgctgctgagcagcagcgagccccacggcctgtgctacatcgagaccgccgagctggacggcgagaccaacatgaaggtgagacaggccatccccgtgaccagcgagctgggcgacatcagcaagctggccaagttcgacggcgaggtgatctgcgagccccccaacaacaagctggacaagttcagcggcaccctgtactggaaggagaacaagttccccctgagcaaccagaacatgctgctgagaggctgcgtgctgagaaacaccgagtggtgcttcggcctggtgatcttcgccggccccgacaccaagctgatgcagaacagcggcagaaccaagttcaagagaaccagcatcgacagactgatgaacaccctggtgctgtggatcttcggcttcctggtgtgcatgggcgtgatcctggccatcggcaacgccatctgggagcacgaggtgggcatgagattccaggtgtacctgccctgggacgaggccgtggacagcgccttcttcagcggcttcctgagcttctggagctacatcatcatcctgaacaccgtggtgcccatcagcctgtacgtgagcgtggaggtgatcagactgggccacagctacttcatcaactgggacaagaagatgttctgcatgaagaagagaacccccgccgaggccagaaccaccaccctgaacgaggagctgggccaggtggagtacatcttcagcgacaagaccggcaccctgacccagaacatcatggtgttcaacaagtgcagcatcaacggccacagctacgtgggcagcgagggccccagaagaaagggccccagctggcccggcaccgtggcccacgcctacagccacagcaccctgggcggctag

SEQ ID NO: 73624 - DNA, 1164 bp, synthetic construct
  misc_feature 1..1164: note = Description of Artificial Sequence: Synthetic coding sequence
  source 1..1164: mol_type = other DNA
atggccgtgtgcgccaagaagagaccccccgaggaggagagaagagccagagccaacgacagagagtacaacgagaagttccagtacgccagcaactgcatcaagaccagcaagtacaacatcctgaccttcctgcccgtgaacctgttcgagcagttccaggaggtggccaacacctacttcctgttcctgctgatcctgcagctgatcccccagatcagcagcctgagctggttcaccaccatcgtgcccctggtgctggtgctgaccatcaccgccgtgaaggacgccaccgacgactacttcagacacaagagcgacaaccaggtgaacaacagacagagccaggtgctgatcaacggcatcctgcagcaggagcagtggatgaacgtgtgcgtgggcgacatcatcaagctggagaacaaccagttcgtggccgccgacctgctgctgctgagcagcagcgagccccacggcctgtgctacatcgagaccgccgagctggacggcgagaccaacatgaaggtgagacaggccatccccgtgaccagcgagctgggcgacatcagcaagctggccaagttcgacggcgaggtgatctgcgagccccccaacaacaagctggacaagttcagcggcaccctgtactggaaggagaacaagttccccctgagcaaccagaacatgctgctgagaggctgcgtgctgagaaacaccgagtggtgcttcggcctggtgatcttcgccggccccgacaccaagctgatgcagaacagcggcagaaccaagttcaagagaaccagcatcgacagactgatgaacaccctggtgctgtggatcttcggcttcctggtgtgcatgggcgtgatcctggccatcggcaacgccatctgggagcacgaggtgggcatgagattccaggtgtacctgccctgggacgaggccgtggacagcgccttcttcagcggcttcctgagcttctggagctacatcatcatcctgaacaccgtggtgcccatcagcctgtacgtgagatacgtgcccagcctgacctggggcctgagcagagagagcggcggccccatcgagctgttcttcagcatgaagatgaagagcctgagaagcaacgagaagagcagcagcagctgcaccgtgaacatctag

SEQ ID NO: 73625 - DNA, 3672 bp, synthetic construct
  misc_feature 1..3672: note = Description of Artificial Sequence: Synthetic coding sequence
  source 1..3672: mol_type = other DNA
atggacaccctgagagccgtgcccctgttcagcatcagcggcctgttcagcttcccctacagagtgagccacggcatcgccggcatcctgctgggcgagatggccgtgtgcgccaagaagagaccccccgaggaggagagaagagccagagccaacgacagagagtacaacgagaagttccagtacgccagcaactgcatcaagaccagcaagtacaacatcctgaccttcctgcccgtgaacctgttcgagcagttccaggaggtggccaacacctacttcctgttcctgctgatcctgcagctgatcccccagatcagcagcctgagctggttcaccaccatcgtgcccctggtgctggtgctgaccatcaccgccgtgaaggacgccaccgacgactacttcagacacaagagcgacaaccaggtgaacaacagacagagccaggtgctgatcaacggcatcctgcagcaggagcagtggatgaacgtgtgcgtgggcgacatcatcaagctggagaacaaccagttcgtggccgccgacctgctgctgctgagcagcagcgagccccacggcctgtgctacatcgagaccgccgagctggacggcgagaccaacatgaaggtgagacaggccatccccgtgaccagcgagctgggcgacatcagcaagctggccaagttcgacggcgaggtgatctgcgagccccccaacaacaagctggacaagttcagcggcaccctgtactggaaggagaacaagttccccctgagcaaccagaacatgctgctgagaggctgcgtgctgagaaacaccgagtggtgcttcggcctggtgatcttcgccggccccgacaccaagctgatgcagaacagcggcagaaccaagttcaagagaaccagcatcgacagactgatgaacaccctggtgctgtggatcttcggcttcctggtgtgcatgggcgtgatcctggccatcggcaacgccatctgggagcacgaggtgggcatgagattccaggtgtacctgccctgggacgaggccgtggacagcgccttcttcagcggcttcctgagcttctggagctacatcatcatcctgaacaccgtggtgcccatcagcctgtacgtgagcgtggaggtgatcagactgggccacagctacttcatcaactgggacaagaagatgttctgcatgaagaagagaacccccgccgaggccagaaccaccaccctgaacgaggagctgggccaggtggagtacatcttcagcgacaagaccggcaccctgacccagaacatcatggtgttcaacaagtgcagcatcaacggccacagctacggcgacgtgttcgacgtgctgggccacaaggccgagctgggcgagagacccgagcccgtggacttcagcttcaaccccctggccgacaagaagttcctgttctgggaccccagcctgctggaggccgtgaagatcggcgacccccacacccacgagttcttcagactgctgagcctgtgccacaccgtgatgagcgaggagaagaacgagggcgagctgtactacaaggcccagagccccgacgagggcgccctggtgaccgccgccagaaacttcggcttcgtgttcagaagcagaacccccaagaccatcaccgtgcacgagatgggcaccgccatcacctaccagctgctggccatcctggacttcaacaacatcagaaagagaatgagcgtgatcgtgagaaaccccgagggcaagatcagactgtactgcaagggcgccgacaccatcctgctggacagactgcaccacagcacccaggagctgctgaacaccaccatggaccacctgaacgagtacgccggcgagggcctgagaaccctggtgctggcctacaaggacctggacgaggagtactacgaggagtgggccgagagaagactgcaggccagcctggcccaggacagcagagaggacagactggccagcatctacgaggaggtggagaacaacatgatgctgctgggcgccaccgccatcgaggacaagctgcagcagggcgtgcccgagaccatcgccctgctgaccctggccaacatcaagatctgggtgctgaccggcgacaagcaggagaccgccgtgaacatcggctacagctgcaagatgctgaccgacgacatgaccgaggtgttcatcgtgaccggccacaccgtgctggaggtgagagaggagctgagaaaggccagagagaagatgatggacagcagcagaagcgtgggcaacggcttcacctaccaggacaagctgagcagcagcaagctgaccagcgtgctggaggccgtggccggcgagtacgccctggtgatcaacggccacagcctggcccacgccctggaggccgacatggagctggagttcctggagaccgcctgcgcctgcaaggccgtgatctgctgcagagtgacccccctgcagaaggcccaggtggtggagctggtgaagaagtacaagaaggccgtgaccctggccatcggcgacggcgccaacgacgtgagcatgatcaagaccgcccacatcggcgtgggcatcagcggccaggagggcatccaggccgtgctggccagcgactacagcttcagccagttcaagttcctgcagagactgctgctggtgcacggcagatggagctacctgagaatgtgcaagttcctgtgctacttcttctacaagaacttcgccttcaccatggtgcacttctggttcggcttcttctgcggcttcagcgcccagaccgtgtacgaccagtacttcatcaccctgtacaacatcgtgtacaccagcctgcccgtgctggccatgggcgtgttcgaccaggacgtgcccgagcagagaagcatggagtaccccaagctgtacgagcccggccagctgaacctgctgttcaacaagagagagttcttcatctgcatcgcccagggcatctacaccagcgtgctgatgttcttcatcccctacggcgtgttcgccgacgccaccagagacgacggcacccagctggccgactaccagagcttcgccgtgaccgtggccaccagcctggtgatcgtggtgagcgtgcagatcggcctggacaccggctactggaccgccatcaaccacttcttcatctggggcagcctggccgtgtacttcgccatcctgttcgccatgcacagcaacggcctgttcgacatgttccccaaccagttcagattcgtgggcaacgcccagaacaccctggcccagcccaccgtgtggctgaccatcgtgctgaccaccgtggtgtgcatcatgcccgtggtggccttcagattcctgagactgaacctgaagcccgacctgagcgacaccgtgagatacacccagctggtgagaaagaagcagaaggcccagcacagatgcatgagaagagtgggcagaaccggcagcagaagaagcggctacgccttcagccaccaggagggcttcggcgagctgatcatgagcggcaagaacatgagactgagcagcctggccctgagcagcttcaccaccagaagcagcagcagctggatcgagagcctgagaagaaagaagagcgacagcgccagcagccccagcggcggcgccgacaagcccctgaagggctag

SEQ ID NO: 73626 - DNA, 3444 bp, synthetic construct
  misc_feature 1..3444: note = Description of Artificial Sequence: Synthetic coding sequence
  source 1..3444: mol_type = other DNA
atggccgaccagatccccctgtaccccgtgagaagcgccgccgccgccgccgccaacagaaagagagccgcctactacagcgccgccggccccagacccggcgccgacagacacagcagataccagctggaggacgagagcgcccacctggacgagatgcccctgatgatgagcgaggagggcttcgagaacgaggagagcgactaccacaccctgcccagagccagaatcatgcagagaaagagaggcctggagtggttcgtgtgcgacggctggaagttcctgtgcaccagctgctgcggctggctgatcaacatctgcagaagaaagaaggagctgaaggccagaaccgtgtggctgggctgccccgagaagtgcgaggagaagcaccccagaaacagcatcaagaaccagaagtacaacgtgttcaccttcatccccggcgtgctgtacgagcagttcaagttcttcctgaacctgtacttcctggtgatcagctgcagccagttcgtgcccgccctgaagatcggctacctgtacacctactgggcccccctgggcttcgtgctggccgtgaccatgaccagagaggccatcgacgagttcagaagattccagagagacaaggaggtgaacagccagctgtacagcaagctgaccgtgagaggcaaggtgcaggtgaagagcagcgacatccaggtgggcgacctgatcatcgtggagaagaaccagagaatccccagcgacatggtgttcctgagaaccagcgagaaggccggcagctgcttcatcagaaccgaccagctggacggcgagaccgactggaagctgaaggtggccgtgagctgcacccagcagctgcccgccctgggcgacctgttcagcatcagcgcctacgtgtacgcccagaagccccagatggacatccacagcttcgagggcaccttcaccagagaggacagcgacccccccatccacgagagcctgagcatcgagaacaccctgtgggccagcaccatcgtggccagcggcaccgtgatcggcgtggtgatctacaccggcaaggagaccagaagcgtgatgaacaccagcaaccccaagaacaaggtgggcctgctggacctggagctgaacagactgaccaaggccctgttcctggccctggtggccctgagcatcgtgatggtgaccctgcagggcttcgtgggcccctggtacagaaacctgttcagattcctgctgctgttcagctacatcatccccatcagcctgagagtgaacctggacatgggcaaggccgtgtacggctggatgatgatgaaggacgagaacatccccggcaccgtggtgagaaccagcaccatccccgaggagctgggcagactggtgtacctgctgaccgacaagaccggcaccctgacccagaacgagatgatcttcaagagactgcacctgggcaccgtgagctacggcgccgacaccatggacgagatccagagccacgtgagagacagctacagccagatgcagagccaggccggcggcaacaacaccggcagcacccccctgagaaaggcccagagcagcgcccccaaggtgagaaagagcgtgagcagcagaatccacgaggccgtgaaggccatcgtgctgtgccacaacgtgacccccgtgtacgagagcagagccggcgtgaccgaggagaccgagttcgccgaggccgaccaggacttcagcgacgagaacagaacctaccaggccagcagccccgacgaggtggccctggtgcagtggaccgagagcgtgggcctgaccctggtgagcagagacctgaccagcatgcagctgaagacccccagcggccaggtgctgagcttctgcatcctgcagctgttccccttcaccagcgagagcaagagaatgggcgtgatcgtgagagacgagagcaccgccgagatcaccttctacatgaagggcgccgacgtggccatgagccccatcgtgcagtacaacgactggctggaggaggagtgcggcaacatggccagagagggcctgagaaccctggtggtggccaagaaggccctgaccgaggagcagtaccaggacttcgagagcagatacacccaggccaagctgagcatgcacgacagaagcctgaaggtggccgccgtggtggagagcctggagagagagatggagctgctgtgcctgaccggcgtggaggaccagctgcaggccgacgtgagacccaccctggagatgctgagaaacgccggcatcaagatctggatgctgaccggcgacaagctggagaccgccacctgcatcgccaagagcagccacctggtgagcagaacccaggacatccacatcttcagacaggtgaccagcagaggcgaggcccacctggagctgaacgccttcagaagaaagcacgactgcgccctggtgatcagcggcgacagcctggaggtgtgcctgaagtactacgagcacgagttcgtggagctggcctgccagtgccccgccgtggtgtgctgcagatgcagccccacccagaaggccagaatcgtgaccctgctgcagcagcacaccggcagaagaacctgcgccatcggcgacggcggcaacgacgtgagcatgatccaggccgccgactgcggcatcggcatcgagggcaaggagggcaagcaggccagcctggccgccgacttcagcatcacccagttcagacacatcggcagactgctgatggtgcacggcagaaacagctacaagagaagcgccgccctgggccagttcgtgatgcacagaggcctgatcatcagcaccatgcaggccgtgttcagcagcgtgttctacttcgccagcgtgcccctgtaccagggcttcctgatggtgggctacgccaccatctacaccatgttccccgtgttcagcctggtgctggaccaggacgtgaagcccgagatggccatgctgtaccccgagctgtacaaggacctgaccaagggcagaagcctgagcttcaagaccttcctgatctgggtgctgatcagcatctaccagggcggcatcctgatgtacggcgccctggtgctgttcgagagcgagttcgtgcacgtggtggccatcagcttcaccgccctgatcctgaccgagctgctgatggtggccctgaccgtgagaacctggcactggctgatggtggtggccgagttcctgagcctgggctgctacgtgagcagcctggccttcctgaacgagtacttcggcatcggcagagtgagcttcggcgccttcctggacgtggccttcatcaccaccgtgaccttcctgtggaaggtgagcgccatcaccgtggtgagctgcctgcccctgtacgtgctgaagtacctgagaagaaagctgagcccccccagctactgcaagctggccagctag

SEQ ID NO: 73627 - DNA, 408 bp, synthetic construct
  misc_feature 1..408: note = Description of Artificial Sequence: Synthetic coding sequence
  source 1..408: mol_type = other DNA
atgcaggccgtgttcagcagcgtgttctacttcgccagcgtgcccctgtaccagggcttcctgatggtgggctacgccaccatctacaccatgttccccgtgttcagcctggtgctggaccaggacgtgaagcccgagatggccatgctgtaccccgagctgtacaaggacctgaccaagagccagcaggacggcagaagcaacagaagacagcacgagagactgaccagcggcaccagcggccacgtgtgggaccccggcagcttcttcagaatcagagtgagcggcaagggcgccagaaacgccggcaagatcctggtgctgcagaacctgccccacctgggcttcaacaagtacctgcccagaagacacccccacgtgtggggccccggcgccctgagagtgtag

SEQ ID NO: 73628 - DNA, 3411 bp, synthetic construct
  misc_feature 1..3411: note = Description of Artificial Sequence: Synthetic coding sequence
  source 1..3411: mol_type = other DNA
atggccgaccagatccccctgtaccccgtgagaagcgccgccgccgccgccgccaacagaaagagagccgcctactacagcgccgccggccccagacccggcgccgacagacacagcagataccagctggaggacgagagcgcccacctggacgagatgcccctgatgatgagcgaggagggcttcgagaacgaggagagcgactaccacaccctgcccagagccagaatcatgcagagaaagagaggcctggagtggttcgtgtgcgacggctggaagttcctgtgcaccagctgctgcggctggctgatcaacatctgcagaagaaagaaggagctgaaggccagaaccgtgtggctgggctgccccgagaagtgcgaggagaagcaccccagaaacagcatcaagaaccagaagtacaacgtgttcaccttcatccccggcgtgctgtacgagcagttcaagttcttcctgaacctgtacttcctggtgatcagctgcagccagttcgtgcccgccctgaagatcggctacctgtacacctactgggcccccctgggcttcgtgctggccgtgaccatgaccagagaggccatcgacgagttcagaagattccagagagacaaggaggtgaacagccagctgtacagcaagctgaccgtgagaggcaaggtgcaggtgaagagcagcgacatccaggtgggcgacctgatcatcgtggagaagaaccagagaatccccagcgacatggtgttcctgagaaccagcgagaaggccggcagctgcttcatcagaaccgaccagctggacggcgagaccgactggaagctgaaggtggccgtgagctgcacccagcagctgcccgccctgggcgacctgttcagcatcagcgcctacgtgtacgcccagaagccccagatggacatccacagcttcgagggcaccttcaccagagaggacagcgacccccccatccacgagagcctgagcatcgagaacaccctgtgggccagcaccatcgtggccagcggcaccgtgatcggcgtggtgatctacaccggcaaggagaccagaagcgtgatgaacaccagcaaccccaagaacaaggtgggcctgctggacctggagctgaacagactgaccaaggccctgttcctggccctggtggccctgagcatcgtgatggtgaccctgcagggcttcgtgggcccctggtacagaaacctgttcagattcctgctgctgttcagctacatcatccccatcagcctgagagtgaacctggacatgggcaaggccgtgtacggctggatgatgatgaaggacgagaacatccccggcaccgtggtgagaaccagcaccatccccgaggagctgggcagactggtgtacctgctgaccgacaagaccggcaccctgacccagaacgagatgatcttcaagagactgcacctgggcaccgtgagctacggcgccgacaccatggacgagatccagagccacgtgagagacagctacagccagatgcagagccaggccggcggcaacaacaccggcagcacccccctgagaaaggcccagagcagcgcccccaaggtgagaaagagcgtgagcagcagaatccacgaggccgtgaaggccatcgtgctgtgccacaacgtgacccccgtgtacgagagcagagccggcgtgaccgaggagaccgagttcgccgaggccgaccaggacttcagcgacgagaacagaacctaccaggccagcagccccgacgaggtggccctggtgcagtggaccgagagcgtgggcctgaccctggtgagcagagacctgaccagcatgcagctgaagacccccagcggccaggtgctgagcttctgcatcctgcagctgttccccttcaccagcgagagcaagagaatgggcgtgatcgtgagagacgagagcaccgccgagatcaccttctacatgaagggcgccgacgtggccatgagccccatcgtgcagtacaacgactggctggaggaggagtgcggcaacatggccagagagggcctgagaaccctggtggtggccaagaaggccctgaccgaggagcagtaccaggacttcgagagcagatacacccaggccaagctgagcatgcacgacagaagcctgaaggtggccgccgtggtggagagcctggagagagagatggagctgctgtgcctgaccggcgtggaggaccagctgcaggccgacgtgagacccaccctggagatgctgagaaacgccggcatcaagatctggatgctgaccggcgacaagctggagaccgccacctgcatcgccaagagcagccacctggtgagcagaacccaggacatccacatcttcagacaggtgaccagcagaggcgaggcccacctggagctgaacgccttcagaagaaagcacgactgcgccctggtgatcagcggcgacagcctggaggtgtgcctgaagtactacgagcacgagttcgtggagctggcctgccagtgccccgccgtggtgtgctgcagatgcagccccacccagaaggccagaatcgtgaccctgctgcagcagcacaccggcagaagaacctgcgccatcggcgacggcggcaacgacgtgagcatgatccaggccgccgactgcggcatcggcatcgagggcaaggagggcaagcaggccagcctggccgccgacttcagcatcacccagttcagacacatcggcagactgctgatggtgcacggcagaaacagctacaagagaagcgccgccctgggccagttcgtgatgcacagaggcctgatcatcagcaccatgcaggccgtgttcagcagcgtgttctacttcgccagcgtgcccctgtaccagggcttcctgatggtgggctacgccaccatctacaccatgttccccgtgttcagcctggtgctggaccaggacgtgaagcccgagatggccatgctgtaccccgagctgtacaaggacctgaccaagggcagaagcctgagcttcaagaccttcctgatctgggtgctgatcagcatctaccagggcggcatcctgatgtacggcgccctggtgctgttcgagagcgagttcgtgcacgtggtggccatcagcttcaccgccctgatcctgaccgagctgctgatggtggccctgaccgtgagaacctggcactggctgatggtggtggccgagttcctgagcctgggctgctacgtgagcagcctggccttcctgaacgagtacttcgacgtggccttcatcaccaccgtgaccttcctgtggaaggtgagcgccatcaccgtggtgagctgcctgcccctgtacgtgctgaagtacctgagaagaaagctgagcccccccagctactgcaagctggccagctag

SEQ ID NO: 73629 - DNA, 411 bp, synthetic construct
  misc_feature 1..411: note = Description of Artificial Sequence: Synthetic coding sequence
  source 1..411: mol_type = other DNA
atgcccctgatgatgagcgaggagggcttcgagaacgaggagagcgactaccacaccctgcccagagccagaatcatgcagagaaagagaggcctggagtggttcgtgtgcgacggctggaagttcctgtgcaccagctgctgcggctggctgatcaacatctgcagaagaaagaaggagctgaaggccagaaccgtgtggctgggctgccccgagaagtgcgaggagaagcaccccagaaacagcatcaagaaccagaagtacaacgtgttcaccttcatccccggcgtgctgtacgagcagttcaagttcttcctgaacctgtacttcctggtgatcagctgcagccagttcgtgcccgccctgaagatcggctacctgtacacctactgggcccccctgatgacctag

SEQ ID NO: 73630 - DNA, 609 bp, synthetic construct
  misc_feature 1..609: note = Description of Artificial Sequence: Synthetic coding sequence
  source 1..609: mol_type = other DNA
atgcagagaaagagaggcctggagtggttcgtgtgcgacggctggaagttcctgtgcaccagctgctgcggctggctgatcaacatctgcagaagaaagaaggagctgaaggccagaaccgtgtggctgggctgccccgagaagtgcgaggagaagcaccccagaaacagcatcaagaaccagaagtacaacgtgttcaccttcatccccggcgtgctgtacgagcagttcaagttcttcctgaacctgtacttcctggtgatcagctgcagccagttcgtgcccgccctgaagatcggctacctgtacacctactgggcccccctgggcttcgtgctggccgtgaccatgaccagagaggccatcgacgagttcagaagattccagagagacaaggaggtgaacagccagctgtacagcaagctgaccgtgagaggcaaggtgcaggtgaagagcagcgacatccaggtgggcgacctgatcatcgtggagaagaaccagagaatccccagcgacatggtgttcctgagaaccagcgagaaggccgtgagcaacaacctggactactgcagccacctggtgctgttcatcttctgcttcctgaactag

SEQ ID NO: 73631 - DNA, 1374 bp, synthetic construct
  misc_feature 1..1374: note = Description of Artificial Sequence: Synthetic coding sequence
  source 1..1374: mol_type = other DNA
atggccagagagggcctgagaaccctggtggtggccaagaaggccctgaccgaggagcagtaccaggacttcgagagcagatacacccaggccaagctgagcatgcacgacagaagcctgaaggtggccgccgtggtggagagcctggagagagagatggagctgctgtgcctgaccggcgtggaggaccagctgcaggccgacgtgagacccaccctggagatgctgagaaacgccggcatcaagatctggatgctgaccggcgacaagctggagaccgccacctgcatcgccaagagcagccacctggtgagcagaacccaggacatccacatcttcagacaggtgaccagcagaggcgaggcccacctggagctgaacgccttcagaagaaagcacgactgcgccctggtgatcagcggcgacagcctggaggtgtgcctgaagtactacgagcacgagttcgtggagctggcctgccagtgccccgccgtggtgtgctgcagatgcagccccacccagaaggccagaatcgtgaccctgctgcagcagcacaccggcagaagaacctgcgccatcggcgacggcggcaacgacgtgagcatgatccaggccgccgactgcggcatcggcatcgagggcaaggagggcaagcaggccagcctggccgccgacttcagcatcacccagttcagacacatcggcagactgctgatggtgcacggcagaaacagctacaagagaagcgccgccctgggccagttcgtgatgcacagaggcctgatcatcagcaccatgcaggccgtgttcagcagcgtgttctacttcgccagcgtgcccctgtaccagggcttcctgatggtgggctacgccaccatctacaccatgttccccgtgttcagcctggtgctggaccaggacgtgaagcccgagatggccatgctgtaccccgagctgtacaaggacctgaccaagggcagaagcctgagcttcaagaccttcctgatctgggtgctgatcagcatctaccagggcggcatcctgatgtacggcgccctggtgctgttcgagagcgagttcgtgcacgtggtggccatcagcttcaccgccctgatcctgaccgagctgctgatggtggccctgaccgtgagaacctggcactggctgatggtggtggccgagttcctgagcctgggctgctacgtgagcagcctggccttcctgaacgagtacttcgacgtggccttcatcaccaccgtgaccttcctgtggaaggtgagcgccatcaccgtggtgagctgcctgcccctgtacgtgctgaagtacctgagaagaaagctgagcccccccagctactgcaagctggccagctag

SEQ ID NO: 73632 - DNA, 4500 bp, synthetic construct
  misc_feature 1..4500: note = Description of Artificial Sequence: Synthetic coding sequence
  source 1..4500: mol_type = other DNA
atggagagagagcccgccggcaccgaggagcccggcccccccggcagaagaagaagaagagagggcagaaccagaaccgtgagaagcaacctgctgcccccccccggcgccgaggaccccgccgccggcgccgccaagggcgagagaagaagaagaagaggctgcgcccagcacctggccgacaacagactgaagaccaccaagtacaccctgctgagcttcctgcccaagaacctgttcgagcagttccacagacccgccaacgtgtacttcgtgttcatcgccctgctgaacttcgtgcccgccgtgaacgccttccagcccggcctggccctggcccccgtgctgttcatcctggccatcaccgccttcagagacctgtgggaggactacagcagacacagaagcgaccacaagatcaaccacctgggctgcctggtgttcagcagagaggagaagaagtacgtgaacagattctggaaggagatccacgtgggcgacttcgtgagactgagatgcaacgagatcttccccgccgacatcctgctgctgagcagcagcgaccccgacggcctgtgccacatcgagaccgccaacctggacggcgagaccaacctgaagagaagacaggtggtgagaggcttcagcgagctggtgagcgagttcaaccccctgaccttcaccagcgtgatcgagtgcgagaagcccaacaacgacctgagcagattcagaggctgcatcatccacgacaacggcaagaaggccggcctgtacaaggagaacctgctgctgagaggctgcaccctgagaaacaccgacgccgtggtgggcatcgtgatctacgccggccacgagaccaaggccctgctgaacaacagcggccccagatacaagagaagcaagctggagagacagatgaactgcgacgtgctgtggtgcgtgctgctgctggtgtgcatgagcctgttcagcgccgtgggccacggcctgtggatctggagataccaggagaagaagagcctgttctacgtgcccaagagcgacggcagcagcctgagccccgtgaccgccgccgtgtacagcttcctgaccatgatcatcgtgctgcaggtgctgatccccatcagcctgtacgtgagcatcgagatcgtgaaggcctgccaggtgtacttcatcaaccaggacatgcagctgtacgacgaggagaccgacagccagctgcagtgcagagccctgaacatcaccgaggacctgggccagatccagtacatcttcagcgacaagaccggcaccctgaccgagaacaagatggtgttcagaagatgcaccgtgagcggcgtggagtacagccacgacgccaacgcccagagactggccagataccaggaggccgacagcgaggaggaggaggtggtgcccagaggcggcagcgtgagccagagaggcagcatcggcagccaccagagcgtgagagtggtgcacagaacccagagcaccaagagccacagaagaaccggcagcagagccgaggccaagagagccagcatgctgagcaagcacaccgccttcagcagccccatggagaaggacatcacccccgaccccaagctgctggagaaggtgagcgagtgcgacaagagcctggccgtggccagacaccaggagcacctgctggcccacctgagccccgagctgagcgacgtgttcgacttcttcatcgccctgaccatctgcaacaccgtggtggtgaccagccccgaccagcccagaaccaaggtgagagtgagattcgagctgaagagccccgtgaagaccatcgaggacttcctgagaagattcacccccagctgcctgaccagcggctgcagcagcatcggcagcctggccgccaacaagagcagccacaagctgggcagcagcttccccagcacccccagcagcgacggcatgctgctgagactggaggagagactgggccagcccaccagcgccatcgccagcaacggctacagcagccaggccgacaactgggccagcgagctggcccaggagcaggagagcgagagagagctgagatacgaggccgagagccccgacgaggccgccctggtgtacgccgccagagcctacaactgcgtgctggtggagagactgcacgaccaggtgagcgtggagctgccccacctgggcagactgaccttcgagctgctgcacaccctgggcttcgacagcgtgagaaagagaatgagcgtggtgatcagacaccccctgaccgacgagatcaacgtgtacaccaagggcgccgacagcgtggtgatggacctgctgcagccctgcagcagcgtggacgccagaggcagacaccagaagaagatcagaagcaagacccagaactacctgaacgtgtacgccgccgagggcctgagaaccctgtgcatcgccaagagagtgctgagcaaggaggagtacgcctgctggctgcagagccacctggaggccgagagcagcctggagaacagcgaggagctgctgttccagagcgccatcagactggagaccaacctgcacctgctgggcgccaccggcatcgaggacagactgcaggacggcgtgcccgagaccatcagcaagctgagacaggccggcctgcagatctgggtgctgaccggcgacaagcaggagaccgccgtgaacatcgcctacgcctgcaagctgctggaccacgacgaggaggtgatcaccctgaacgccaccagccaggaggcctgcgccgccctgctggaccagtgcctgtgctacgtgcagagcagaggcctgcagagagcccccgagaagaccaagggcaaggtgagcatgagattcagcagcctgtgcccccccagcaccagcaccgccagcggcagaagacccagcctggtgatcgacggcagaagcctggcctacgccctggagaagaacctggaggacaagttcctgttcctggccaagcagtgcagaagcgtgctgtgctgcagaagcacccccctgcagaagagcatggtggtgaagctggtgagaagcaagctgaaggccatgaccctggccatcggcgacggcgccaacgacgtgagcatgatccaggtggccgacgtgggcgtgggcatcagcggccaggagggcatgcaggccgtgatggccagcgacttcgccgtgcccaagttcagatacctggagagactgctgatcctgcacggccactggtgctacagcagactggccaacatggtgctgtacttcttctacaagaacaccatgttcgtgggcctgctgttctggttccagttcttctgcggcttcagcgccagcaccatgatcgaccagtggtacctgatcttcttcaacctgctgttcagcagcctgccccccctggtgaccggcgtgctggacagagacgtgcccgccaacgtgctgctgaccaacccccagctgtacaagagcggccagaacatggaggagtacagacccagaaccttctggttcaacatggccgacgccgccttccagagcctggtgtgcttcagcatcccctacctggcctactacgacagcaacgtggacctgttcacctggggcacccccatcgtgaccatcgccctgctgaccttcctgctgcacctgggcatcgagaccaagacctggacctggctgaactggatcacctgcggcttcagcgtgctgctgttcttcaccgtggccctgatctacaacgccagctgcgccacctgctacccccccagcaacccctactggaccatgcaggccctgctgggcgaccccgtgttctacctgacctgcctgatgacccccgtggccgccctgctgcccagactgttcttcagaagcctgcagggcagagtgttccccacccagctgcagctggccagacagctgaccagaaagagccccagaagatgcagcgcccccaaggagaccttcgcccagggcagactgcccaaggacagcggcaccgagcacagcagcggcagaaccgtgaagaccagcgtgcccctgagccagcccagctggcacacccagcagcccgtgtgcagcctggaggccagcggcgagcccagcaccgtggacatgagcatgcccgtgagagagcacaccctgctggagggcctgagcgcccccgcccccatgagcagcgcccccggcgaggccgtgctgagaagccccggcggctgccccgaggagagcaaggtgagagccgccagcaccggcagagtgacccccctgagcagcctgttcagcctgcccaccttcagcctgctgaactggatcagcagctggagcctggtgagcagactgggcagcgtgctgcagttcagcagaaccgagcagctggccgacggccaggccggcagaggcctgcccgtgcagccccacagcggcagaagcggcctgcagggccccgaccacagactgctgatcggcgccagcagcagaagaagccagtag

SEQ ID NO: 73633 - DNA, 3405 bp, synthetic construct
  misc_feature 1..3405: note = Description of Artificial Sequence: Synthetic coding sequence
  source 1..3405: mol_type = other DNA
atggactgcagcctggtgagaaccctggtgcacagatactgcgccggcgaggagaactgggtggacagcagaaccatctacgtgggccacagagagcccccccccggcgccgaggcctacatcccccagagataccccgacaacagaatcgtgagcagcaagtacaccttctggaacttcatccccaagaacctgttcgagcagttcagaagagtggccaacttctacttcctgatcatcttcctggtgcagctgatcatcgacacccccaccagccccgtgaccagcggcctgcccctgttcttcgtgatcaccgtgaccgccatcaagcagggctacgaggactggctgagacacaaggccgacaacgccatgaaccagtgccccgtgcacttcatccagcacggcaagctggtgagaaagcagagcagaaagctgagagtgggcgacatcgtgatggtgaaggaggacgagaccttcccctgcgacctgatcttcctgagcagcaacagaggcgacggcacctgccacgtgaccaccgccagcctggacggcgagagcagccacaagacccactacgccgtgcaggacaccaagggcttccacaccgaggaggacatcggcggcctgcacgccaccatcgagtgcgagcagccccagcccgacctgtacaagttcgtgggcagaatcaacgtgtacagcgacctgaacgaccccgtggtgagacccctgggcagcgagaacctgctgctgagaggcgccaccctgaagaacaccgagaagatcttcggcgtggccatctacaccggcatggagaccaagatggccctgaactaccagagcaagagccagaagagaagcgccgtggagaagagcatgaacgccttcctgatcgtgtacctgtgcatcctgatcagcaaggccctgatcaacaccgtgctgaagtacatgtggcagagcgagcccttcagagacgagccctggtacaaccagaagaccgagagcgagagacagagaaacctgttcctgaaggccttcaccgacttcctggccttcatggtgctgttcaactacatcatccccgtgagcatgtacgtgaccgtggagatgcagaagttcctgggcagctacttcatcacctgggacgaggacatgttcgacgaggagaccggcgagggccccctggtgaacaccagcgacctgaacgaggagctgggccaggtggagtacatcttcaccgacaagaccggcaccctgaccgagaacaacatggagttcaaggagtgctgcatcgagggccacgtgtacgtgccccacgtgatctgcaacggccaggtgctgcccgagagcagcggcatcgacatgatcgacagcagccccagcgtgaacggcagagagagagaggagctgttcttcagagccctgtgcctgtgccacaccgtgcaggtgaaggacgacgacagcgtggacggccccagaaagagccccgacggcggcaagagctgcgtgtacatcagcagcagccccgacgaggtggccctggtggagggcgtgcagagactgggcttcacctacctgagactgaaggacaactacatggagatcctgaacagagagaaccacatcgagagattcgagctgctggagatcctgagcttcgacagcgtgagaagaagaatgagcgtgatcgtgaagagcgccaccggcgagatctacctgttctgcaagggcgccgacagcagcatcttccccagagtgatcgagggcaaggtggaccagatcagagccagagtggagagaaacgccgtggagggcctgagaaccctgtgcgtggcctacaagagactgatccaggaggagtacgagggcatctgcaagctgctgcaggccgccaaggtggccctgcaggacagagagaagaagctggccgaggcctacgagcagatcgagaaggacctgaccctgctgggcgccaccgccgtggaggacagactgcaggagaaggccgccgacaccatcgaggccctgcagaaggccggcatcaaggtgtgggtgctgaccggcgacaagatggagaccgccgccgccacctgctacgcctgcaagctgttcagaagaaacacccagctgctggagctgaccaccaagagaatcgaggagcagagcctgcacgacgtgctgttcgagctgagcaagaccgtgctgagacacagcggcagcctgaccagagacaacctgagcggcctgagcgccgacatgcaggactacggcctgatcatcgacggcgccgccctgagcctgatcatgaagcccagagaggacggcagcagcggcaactacagagagctgttcctggagatctgcagaagctgcagcgccgtgctgtgctgcagaatggcccccctgcagaaggcccagatcgtgaagctgatcaagttcagcaaggagcaccccatcaccctggccatcggcgacggcgccaacgacgtgagcatgatcctggaggcccacgtgggcatcggcgtgatcggcaaggagggcagacaggccgccagaaacagcgactacgccatccccaagttcaagcacctgaagaagatgctgctggtgcacggccacttctactacatcagaatcagcgagctggtgcagtacttcttctacaagaacgtgtgcttcatcttcccccagttcctgtaccagttcttctgcggcttcagccagcagaccctgtacgacaccgcctacctgaccctgtacaacatcagcttcaccagcctgcccatcctgctgtacagcctgatggagcagcacgtgggcatcgacgtgctgaagagagaccccaccctgtacagagacgtggccaagaacgccctgctgagatggagagtgttcatctactggaccctgctgggcctgttcgacgccctggtgttcttcttcggcgcctacttcgtgttcgagaacaccaccgtgaccagcaacggccagatcttcggcaactggaccttcggcaccctggtgttcaccgtgatggtgttcaccgtgaccctgaagctggccctggacacccactactggacctggatcaaccacttcgtgatctggggcagcctgctgttctacgtggtgttcagcctgctgtggggcggcgtgatctggcccttcctgaactaccagagaatgtactacgtgttcatccagatgctgagcagcggccccgcctggctggccatcgtgctgctggtgaccatcagcctgctgcccgacgtgctgaagaaggtgctgtgcagacagctgtggcccaccgccaccgagagagtgcagaccaagagccagtgcctgagcgtggagcagagcaccatcttcatgctgagccagaccagcagcagcctgagcttctag

SEQ ID NO: 73634 - DNA, 3576 bp, synthetic construct
  misc_feature 1..3576: note = Description of Artificial Sequence: Synthetic coding sequence
  source 1..3576: mol_type = other DNA
atggactgcagcctggtgagaaccctggtgcacagatactgcgccggcgaggagaactgggtggacagcagaaccatctacgtgggccacagagagcccccccccggcgccgaggcctacatcccccagagataccccgacaacagaatcgtgagcagcaagtacaccttctggaacttcatccccaagaacctgttcgagcagttcagaagagtggccaacttctacttcctgatcatcttcctggtgcagctgatcatcgacacccccaccagccccgtgaccagcggcctgcccctgttcttcgtgatcaccgtgaccgccatcaagcagggctacgaggactggctgagacacaaggccgacaacgccatgaaccagtgccccgtgcacttcatccagcacggcaagctggtgagaaagcagagcagaaagctgagagtgggcgacatcgtgatggtgaaggaggacgagaccttcccctgcgacctgatcttcctgagcagcaacagaggcgacggcacctgccacgtgaccaccgccagcctggacggcgagagcagccacaagacccactacgccgtgcaggacaccaagggcttccacaccgaggaggacatcggcggcctgcacgccaccatcgagtgcgagcagccccagcccgacctgtacaagttcgtgggcagaatcaacgtgtacagcgacctgaacgaccccgtggtgagacccctgggcagcgagaacctgctgctgagaggcgccaccctgaagaacaccgagaagatcttcggcgtggccatctacaccggcatggagaccaagatggccctgaactaccagagcaagagccagaagagaagcgccgtggagaagagcatgaacgccttcctgatcgtgtacctgtgcatcctgatcagcaaggccctgatcaacaccgtgctgaagtacatgtggcagagcgagcccttcagagacgagccctggtacaaccagaagaccgagagcgagagacagagaaacctgttcctgaaggccttcaccgacttcctggccttcatggtgctgttcaactacatcatccccgtgagcatgtacgtgaccgtggagatgcagaagttcctgggcagctacttcatcacctgggacgaggacatgttcgacgaggagaccggcgagggccccctggtgaacaccagcgacctgaacgaggagctgggccaggtggagtacatcttcaccgacaagaccggcaccctgaccgagaacaacatggagttcaaggagtgctgcatcgagggccacgtgtacgtgccccacgtgatctgcaacggccaggtgctgcccgagagcagcggcatcgacatgatcgacagcagccccagcgtgaacggcagagagagagaggagctgttcttcagagccctgtgcctgtgccacaccgtgcaggtgaaggacgacgacagcgtggacggccccagaaagagccccgacggcggcaagagctgcgtgtacatcagcagcagccccgacgaggtggccctggtggagggcgtgcagagactgggcttcacctacctgagactgaaggacaactacatggagatcctgaacagagagaaccacatcgagagattcgagctgctggagatcctgagcttcgacagcgtgagaagaagaatgagcgtgatcgtgaagagcgccaccggcgagatctacctgttctgcaagggcgccgacagcagcatcttccccagagtgatcgagggcaaggtggaccagatcagagccagagtggagagaaacgccgtggagggcctgagaaccctgtgcgtggcctacaagagactgatccaggaggagtacgagggcatctgcaagctgctgcaggccgccaaggtggccctgcaggacagagagaagaagctggccgaggcctacgagcagatcgagaaggacctgaccctgctgggcgccaccgccgtggaggacagactgcaggagaaggccgccgacaccatcgaggccctgcagaaggccggcatcaaggtgtgggtgctgaccggcgacaagatggagaccgccgccgccacctgctacgcctgcaagctgttcagaagaaacacccagctgctggagctgaccaccaagagaatcgaggagcagagcctgcacgacgtgctgttcgagctgagcaagaccgtgctgagacacagcggcagcctgaccagagacaacctgagcggcctgagcgccgacatgcaggactacggcctgatcatcgacggcgccgccctgagcctgatcatgaagcccagagaggacggcagcagcggcaactacagagagctgttcctggagatctgcagaagctgcagcgccgtgctgtgctgcagaatggcccccctgcagaaggcccagatcgtgaagctgatcaagttcagcaaggagcaccccatcaccctggccatcggcgacggcgccaacgacgtgagcatgatcctggaggcccacgtgggcatcggcgtgatcggcaaggagggcagacaggccgccagaaacagcgactacgccatccccaagttcaagcacctgaagaagatgctgctggtgcacggccacttctactacatcagaatcagcgagctggtgcagtacttcttctacaagaacgtgtgcttcatcttcccccagttcctgtaccagttcttctgcggcttcagccagcagaccctgtacgacaccgcctacctgaccctgtacaacatcagcttcaccagcctgcccatcctgctgtacagcctgatggagcagcacgtgggcatcgacgtgctgaagagagaccccaccctgtacagagacgtggccaagaacgccctgctgagatggagagtgttcatctactggaccctgctgggcctgttcgacgccctggtgttcttcttcggcgcctacttcgtgttcgagaacaccaccgtgaccagcaacggccagatcttcggcaactggaccttcggcaccctggtgttcaccgtgatggtgttcaccgtgaccctgaagctggccctggacacccactactggacctggatcaaccacttcgtgatctggggcagcctgctgttctacgtggtgttcagcctgctgtggggcggcgtgatctggcccttcctgaactaccagagaatgtactacgtgttcatccagatgctgagcagcggccccgcctggctggccatcgtgctgctggtgaccatcagcctgctgcccgacgtgctgaagaaggtgctgtgcagacagctgtggcccaccgccaccgagagagtgcagaacggctgcgcccagcccagagacagagacagcgagttcacccccctggccagcctgcagagccccggctaccagagcacctgccccagcgccgcctggtacagcagccacagccagcaggtgaccctggccgcctggaaggagaaggtgagcaccgagcccccccccatcctgggcggcagccaccaccactgcagcagcatccccagccacagctgccccagaagcagagtgggcatgctggtgtag

SEQ ID NO: 73635 - DNA, 3405 bp, synthetic construct; identical to SEQ ID NO: 73633
  misc_feature 1..3405: note = Description of Artificial Sequence: Synthetic coding sequence
  source 1..3405: mol_type = other DNA

SEQ ID NO: 73636 - DNA, 2808 bp, synthetic construct
  misc_feature 1..2808: note = Description of Artificial Sequence: Synthetic coding sequence
  source 1..2808: mol_type = other DNA
tgatacgtgggccacagagagcccccccccggcgccgaggcctacatcccccagagataccccgacaacagaatcgtgagcagcaagtacaccttctggaacttcatccccaagaacctgttcgagcagttcagaagagtggccaacttctacttcctgatcatcttcctggtgcagctgatcatcgacacccccaccagccccgtgaccagcggcctgcccctgttcttcgtgatcaccgtgaccgccatcaagcagggctacgaggactggctgagacacaaggccgacaacgccatgaaccagtgccccgtgcacttcatccagcacggcaagctggtgagaaagcagagcagaaagctgagagtgggcgacatcgtgatggtgaaggaggacgagaccttcccctgcgacctgatcttcctgagcagcaacagaggcgacggcacctgccacgtgaccaccgccagcctggacggcgagagcagccacaagacccactacgccgtgcaggacaccaagggcttccacaccgaggaggacatcggcggcctgcacgccaccatcgagtgcgagcagccccagcccgacctgtacaagttcgtgggcagaatcaacgtgtacagcgacctgaacgaccccgtggtgagacccctgggcagcgagaacctgctgctgagaggcgccaccctgaagaacaccgagaagatcttcggcgtggccatctacaccggcatggagaccaagatggccctgaactaccagagcaagagccagaagagaagcgccgtggagaagagcatgaacgccttcctgatcgtgtacctgtgcatcctgatcagcaaggccctgatcaacaccgtgctgaagtacatgtggcagagcgagcccttcagagacgagccctggtacaaccagaagaccgagagcgagagacagagaaacctgttcctgaaggccttcaccgacttcctggccttcatggtgctgttcaactacatcatccccgtgagcatgtacgtgaccgtggagatgcagaagttcctgggcagctacttcatcacctgggacgaggacatgttcgacgaggagaccggcgagggccccctggtgaacaccagcgacctgaacgaggagctgggccaggtggagtacatcttcaccgacaagaccggcaccctgaccgagaacaacatggagttcaaggagtgctgcatcgagggccacgtgtacgtgccccacgtgatctgcaacggccaggtgctgcccgagagcagcggcatcgacatgatcgacagcagccccagcgtgaacggcagagagagagaggagctgttcttcagagccctgtgcctgtgccacaccgtgcaggtgaaggacgacgacagcgtggacggccccagaaagagccccgacggcggcaagagctgcgtgtacatcagcagcagccccgacgaggtggccctggtggagggcgtgcagagactgggcttcacctacctgagactgaaggacaactacatggagatcctgaacagagagaaccacatcgagagattcgagctgctggagatcctgagcttcgacagcgtgagaagaagaatgagcgtgatcgtgaagagcgccaccggcgagatctacctgttctgcaagggcgccgacagcagcatcttccccagagtgatcgagggcaaggtggaccagatcagagccagagtggagagaaacgccgtggagggcctgagaaccctgtgcgtggcctacaagagactgatccaggaggagtacgagggcatctgcaagctgctgcaggccgccaaggtggccctgcaggacagagagaagaagctggccgaggcctacgagcagatcgagaaggacctgaccctgctgggcgccaccgccgtggaggacagactgcaggagaaggccgccgacaccatcgaggccctgcagaaggccggcatcaaggtgtgggtgctgaccggcgacaagatggagaccgccgccgccacctgctacgcctgcaagctgttcagaagaaacacccagctgctggagctgaccaccaagagaatcgaggagcagagcctgcacgacgtgctgttcgagctgagcaagaccgtgctgagacacagcggcagcctgaccagagacaacctgagcggcctgagcgccgacatgcaggactacggcctgatcatcgacggcgccgccctgagcctgatcatgaagcccagagaggacggcagcagcggcaactacagagagctgttcctggagatctgcagaagctgcagcgccgtgctgtgctgcagaatggcccccctgcagaaggcccagatcgtgaagctgatcaagttcagcaaggagcaccccatcaccctggccatcggcgacggcgccaacgacgtgagcatgatcctggaggcccacgtgggcatcggcgtgatcggcaaggagggcagacaggccgccagaaacagcgactacgccatccccaagttcaagcacctgaagaagatgctgctggtgcacggccacttctactacatcagaatcagcgagctggtgcagtacttcttctacaagaacgtgtgcttcatcttcccccagttcctgtaccagttcttctgcggcttcagccagcagaccctgtacgacaccgcctacctgaccctgtacaacatcagcttcaccagcctgcccatcctgctgtacagcctgatggagcagcacgtgggcatcgacgtgctgaagagagaccccaccctgtacagataccacccccccaacagcctgagctag

SEQ ID NO: 73637 - DNA, 1119 bp, synthetic construct
  misc_feature 1..1119: note = Description of Artificial Sequence: Synthetic coding sequence
  source 1..1119: mol_type = other DNA
atgagcgtgatcgtgaagagcgccaccggcgagatctacctgttctgcaagggcgccgacagcagcatcttccccagagtgatcgagggcaaggtggaccagatcagagccagagtggagagaaacgccgtggagggcctgagaaccctgtgcgtggcctacaagagactgatccaggaggagtacgagggcatctgcaagctgctgcaggccgccaaggtggccctgcaggacagagagaagaagctggccgaggcctacgagcagatcgagaaggacctgaccctgctgggcgccaccgccgtggaggacagactgcaggagaaggccgccgacaccatcgaggccctgcagaaggccggcatcaaggtgtgggtgctgaccggcgacaagatggagaccgccgccgccacctgctacgcctgcaagctgttcagaagaaacacccagctgctggagctgaccaccaagagaatcgaggagcagagcctgcacgacgtgctgttcgagctgagcaagaccgtgctgagacacagcggcagcctgaccagagacaacctgagcggcctgagcgccgacatgcaggactacggcctgatcatcgacggcgccgccctgagcctgatcatgaagcccagagaggacggcagcagcggcaactacagagagctgttcctggagatctgcagaagctgcagcgccgtgctgtgctgcagaatggcccccctgcagaaggcccagatcgtgaagctgatcaagttcagcaaggagcaccccatcaccctggccatcggcgacggcgccaacgacgtgagcatgatcctggaggcccacgtgggcatcggcgtgatcggcaaggagggcagacaggccgccagaaacagcgactacgccatccccaagttcaagcacctgaagaagatgctgctggtgcacggccacttctactacatcagaatcagcgagctggtgcagtacttcttctacaagaacgtgtgcttcatcttcccccagttcctgtaccagttcttctgcggcttcagccagcagggcagaagacaggagtgccccgccgccctggccagagtgcacctgctggacgcccccggcaccgtgtag

SEQ ID NO: 73638 - DNA, 1059 bp, synthetic construct
  misc_feature 1..1059: note = Description of Artificial Sequence: Synthetic coding sequence
  source 1..1059: mol_type = other DNA
tgaagcatcttccccagagtgatcgagggcaaggtggaccagatcagagccagagtggagagaaacgccgtggagggcctgagaaccctgtgcgtggcctacaagagactgatccaggaggagtacgagggcatctgcaagctgctgcaggccgccaaggtggccctgcaggacagagagaagaagctggccgaggcctacgagcagatcgagaaggacctgaccctgctgggcgccaccgccgtggaggacagactgcaggagaaggccgccgacaccatcgaggccctgcagaaggccggcatcaaggtgtgggtgctgaccggcgacaagatggagaccgccgccgccacctgctacgcctgcaagctgttcagaagaaacacccagctgctggagctgaccaccaagagaatcgaggagcagagcctgcacgacgtgctgttcgagctgagcaagaccgtgctgagacacagcggcagcctgaccagagacaacctgagcggcctgagcgccgacatgcaggactacggcctgatcatcgacggcgccgccctgagcctgatcatgaagcccagagaggacggcagcagcggcaactacagagagctgttcctggagatctgcagaagctgcagcgccgtgctgtgctgcagaatggcccccctgcagaaggcccagatcgtgaagctgatcaagttcagcaaggagcaccccatcaccctggccatcggcgacggcgccaacgacgtgagcatgatcctggaggcccacgtgggcatcggcgtgatcggcaaggagggcagacaggccgccagaaacagcgactacgccatccccaagttcaagcacctgaagaagatgctgctggtgcacggccacttctactacatcagaatcagcgagctggtgcagtacttcttctacaagaacgtgtgcttcatcttcccccagttcctgtaccagttcttctgcggcttcagccagcagggcagaagacaggagtgccccgccgccctggccagagtgcacctgctggacgcccccggcaccgtgtag

SEQ ID NO: 73639 - DNA, 3405 bp, synthetic construct; identical to SEQ ID NO: 73633
  misc_feature 1..3405: note = Description of Artificial Sequence: Synthetic coding sequence
  source 1..3405: mol_type = other DNA

SEQ ID NO: 73640 - DNA, 3534 bp, synthetic construct
  misc_feature 1..3534: note = Description of Artificial Sequence: Synthetic coding sequence
  source 1..3534: mol_type = other DNA
atgtggagatggatcagacagcagctgggcttcgaccccccccaccagagcgacaccagaaccatctacgtggccaacagattcccccagaacggcctgtacaccccccagaagttcatcgacaacagaatcatcagcagcaagtacaccgtgtggaacttcgtgcccaagaacctgttcgagcagttcagaagagtggccaacttctacttcctgatcatcttcctggtgcagctgatgatcgacacccccaccagccccgtgaccagcggcctgcccctgttcttcgtgatcaccgtgaccgccatcaagcagggctacgaggactggctgagacacaacagcgacaacgaggtgaacggcgcccccgtgtacgtggtgagaagcggcggcctggtgaagaccagaagcaagaacatcagagtgggcgacatcgtgagaatcgccaaggacgagatcttccccgccgacctggtgctgctgagcagcgacagactggacggcagctgccacgtgaccaccgccagcctggacggcgagaccaacctgaagacccacgtggccgtgcccgagaccgccctgctgcagaccgtggccaacctggacaccctggtggccgtgatcgagtgccagcagcccgaggccgacctgtacagattcatgggcagaatgatcatcacccagcagatggaggagatcgtgagacccctgggccccgagagcctgctgctgagaggcgccagactgaagaacaccaaggagatcttcggcgtggccgtgtacaccggcatggagaccaagatggccctgaactacaagagcaagagccagaagagaagcgccgtggagaagagcatgaacaccttcctgatcatctacctggtgatcctgatcagcgaggccgtgatcagcaccatcctgaagtacacctggcaggccgaggagaagtgggacgagccctggtacaaccagaagaccgagcaccagagaaacagcagcaagatcctgagattcatcagcgacttcctggccttcctggtgctgtacaacttcatcatccccatcagcctgtacgtgaccgtggagatgcagaagttcctgggcagcttcttcatcggctgggacctggacctgtaccacgaggagagcgaccagaaggcccaggtgaacaccagcgacctgaacgaggagctgggccaggtggagtacgtgttcaccgacaagaccggcaccctgaccgagaacgagatgcagttcagagagtgcagcatcaacggcatgaagtaccaggagatcaacggcagactggtgcccgagggccccacccccgacagcagcgagggcaacctgagctacctgagcagcctgagccacctgaacaacctgagccacctgaccaccagcagcagcttcagaaccagccccgagaacgagaccgagctgatcaaggagcacgacctgttcttcaaggccgtgagcctgtgccacaccgtgcagatcagcaacgtgcagaccgactgcaccggcgacggcccctggcagagcaacctggcccccagccagctggagtactacgccagcagccccgacgagaaggccctggtggaggccgccgccagaatcggcatcgtgttcatcggcaacagcgaggagaccatggaggtgaagaccctgggcaagctggagagatacaagctgctgcacatcctggagttcgacagcgacagaagaagaatgagcgtgatcgtgcaggcccccagcggcgagaagctgctgttcgccaagggcgccgagagcagcatcctgcccaagtgcatcggcggcgagatcgagaagaccagaatccacgtggacgagttcgccctgaagggcctgagaaccctgtgcatcgcctacagaaagttcaccagcaaggagtacgaggagatcgacaagagaatcttcgaggccagaaccgccctgcagcagagagaggagaagctggccgccgtgttccagttcatcgagaaggacctgatcctgctgggcgccaccgccgtggaggacagactgcaggacaaggtgagagagaccatcgaggccctgagaatggccggcatcaaggtgtgggtgctgaccggcgacaagcacgagaccgccgtgagcgtgagcctgagctgcggccacttccacagaaccatgaacatcctggagctgatcaaccagaagagcgacagcgagtgcgccgagcagctgagacagctggccagaagaatcaccgaggaccacgtgatccagcacggcctggtggtggacggcaccagcctgagcctggccctgagagagcacgagaagctgttcatggaggtgtgcagaaactgcagcgccgtgctgtgctgcagaatggcccccctgcagaaggccaaggtgatcagactgatcaagatcagccccgagaagcccatcaccctggccgtgggcgacggcgccaacgacgtgagcatgatccaggaggcccacgtgggcatcggcatcatgggcaaggagggcagacaggccgccagaaacagcgactacgccatcgccagattcaagttcctgagcaagctgctgttcgtgcacggccacttctactacatcagaatcgccaccctggtgcagtacttcttctacaagaacgtgtgcttcatcaccccccagttcctgtaccagttctactgcctgttcagccagcagaccctgtacgacagcgtgtacctgaccctgtacaacatctgcttcaccagcctgcccatcctgatctacagcctgctggagcagcacgtggacccccacgtgctgcagaacaagcccaccctgtacagagacatcagcaagaacagactgctgagcatcaagaccttcctgtactggaccatcctgggcttcagccacgccttcatcttcttcttcggcagctacctgctgatcggcaaggacaccagcctgctgggcaacggccagatgttcggcaactggaccttcggcaccctggtgttcaccgtgatggtgatcaccgtgaccgtgaagatggccctggagacccacttctggacctggatcaaccacctggtgacctggggcagcatcatcttctacttcgtgttcagcctgttctacggcggcatcctgtggcccttcctgggcagccagaacatgtacttcgtgttcatccagctgctgagcagcggcagcgcctggttcgccatcatcctgatggtggtgacctgcctgttcctggacatcatcaagaaggtgttcgacagacacctgcaccccaccagcaccgagaaggcccagctgaccgagaccaacgccggcatcaagtgcctggacagcatgtgctgcttccccgagggcgaggccgcctgcgccagcgtgggcagaatgctggagagagtgatcggcagatgcagccccacccacatcagcagaagctggagcgccagcgaccccttctacaccaacgacagaagcatcctgaccctgagcaccatggacagcagcacctgctag

SEQ ID NO: 73641 - DNA, 315 bp, synthetic construct
  misc_feature 1..315: note = Description of Artificial Sequence: Synthetic coding sequence
  source 1..315: mol_type = other DNA
atgtacttcgtgttcatccagctgctgagcagcggcagcgcctggttcgccatcatcctgatggtggtgacctgcctgttcctggacatcatcaagaaggtgttcgacagacacctgcaccccaccagcaccgagaaggcccagatgtacagcaacaccgtggccctgagcgacgagttcatcgccctgcagcccctgagcagagccagaaaccagctgagcaagctgagatggaagaagatcagagtgcagagcgcccagcacatgaacctgctgaaggccagcaccgagggcagaaccgtgggcacctgctag

SEQ ID NO: 73642 - DNA, 4503 bp, synthetic construct
  misc_feature 1..4503: note = Description of Artificial Sequence: Synthetic coding sequence
  source 1..4503: mol_type = other DNA
atggaccccagcatgggcgtgaacagcgtgaccatcagcgtggagggcatgacctgcaacagctgcgtgtggaccatcgagcagcagatcggcaaggtgaacggcgtgcaccacatcaaggtgagcctggaggagaagaacgccaccatcatctacgaccccaagctgcagacccccaagaccctgcaggaggccatcgacgacatgggcttcgacgccgtgatccacaaccccgaccccctgcccgtgctgaccgacaccctgttcctgaccgtgaccgccagcctgaccctgccctgggaccacatccagagcaccctgctgaagaccaagggcgtgaccgacatcaagatctacccccagaagagaaccgtggccgtgaccatcatccccagcatcgtgaacgccaaccagatcaaggagctggtgcccgagctgagcctggacaccggcaccctggagaagaagagcggcgcctgcgaggaccacagcatggcccaggccggcgaggtggtgctgaagatgaaggtggagggcatgacctgccacagctgcaccagcaccatcgagggcaagatcggcaagctgcagggcgtgcagagaatcaaggtgagcctggacaaccaggaggccaccatcgtgtaccagccccacctgatcagcgtggaggagatgaagaagcagatcgaggccatgggcttccccgccttcgtgaagaagcagcccaagtacctgaagctgggcgccatcgacgtggagagactgaagaacacccccgtgaagagcagcgagggcagccagcagagaagccccagctacaccaacgacagcaccgccaccttcatcatcgacggcatgcactgcaagagctgcgtgagcaacatcgagagcaccctgagcgccctgcagtacgtgagcagcatcgtggtgagcctggagaacagaagcgccatcgtgaagtacaacgccagcagcgtgacccccgagagcctgagaaaggccatcgaggccgtgagccccggcctgtacagagtgagcatcaccagcgaggtggagagcaccagcaacagccccagcagcagcagcctgcagaagatccccctgaacgtggtgagccagcccctgacccaggagaccgtgatcaacatcgacggcatgacctgcaacagctgcgtgcagagcatcgagggcgtgatcagcaagaagcccggcgtgaagagcatcagagtgagcctggccaacagcaacggcaccgtggagtacgaccccctgctgaccagccccgagaccctgagaggcgccatcgaggacatgggcttcgacgccaccctgagcgacaccaacgagcccctggtggtgatcgcccagcccagcagcgagatgcccctgctgaccagcaccaacgagttctacaccaagggcatgacccccgtgcaggacaaggaggagggcaagaacagcagcaagtgctacatccaggtgaccggcatgacctgcgccagctgcgtggccaacatcgagagaaacctgagaagagaggagggcatctacagcatcctggtggccctgatggccggcaaggccgaggtgagatacaaccccgccgtgatccagccccccatgatcgccgagttcatcagagagctgggcttcggcgccaccgtgatcgagaacgccgacgagggcgacggcgtgctggagctggtggtgagaggcatgacctgcgccagctgcgtgcacaagatcgagagcagcctgaccaagcacagaggcatcctgtactgcagcgtggccctggccaccaacaaggcccacatcaagtacgaccccgagatcatcggccccagagacatcatccacaccatcgagagcctgggcttcgaggccagcctggtgaagaaggacagaagcgccagccacctggaccacaagagagagatcagacagtggagaagaagcttcctggtgagcctgttcttctgcatccccgtgatgggcctgatgatctacatgatggtgatggaccaccacttcgccaccctgcaccacaaccagaacatgagcaaggaggagatgatcaacctgcacagcagcatgttcctggagagacagatcctgcccggcctgagcgtgatgaacctgctgagcttcctgctgtgcgtgcccgtgcagttcttcggcggctggtacttctacatccaggcctacaaggccctgaagcacaagaccgccaacatggacgtgctgatcgtgctggccaccaccatcgccttcgcctacagcctgatcatcctgctggtggccatgtacgagagagccaaggtgaaccccatcaccttcttcgacaccccccccatgctgttcgtgttcatcgccctgggcagatggctggagcacatcgccaagggcaagaccagcgaggccctggccaagctgatcagcctgcaggccaccgaggccaccatcgtgaccctggacagcgacaacatcctgctgagcgaggagcaggtggacgtggagctggtgcagagaggcgacatcatcaaggtggtgcccggcggcaagttccccgtggacggcagagtgatcgagggccacagcatggtggacgagagcctgatcaccggcgaggccatgcccgtggccaagaagcccggcagcaccgtgatcgccggcagcatcaaccagaacggcagcctgctgatctgcgccacccacgtgggcgccgacaccaccctgagccagatcgtgaagctggtggaggaggcccagaccagcaaggcccccatccagcagttcgccgacaagctgagcggctacttcgtgcccttcatcgtgttcgtgagcatcgccaccctgctggtgtggatcgtgatcggcttcctgaacttcgagatcgtggagacctacttccccggctacaacagaagcatcagcagaaccgagaccatcatcagattcgccttccaggccagcatcaccgtgctgtgcatcgcctgcccctgcagcctgggcctggccacccccaccgccgtgatggtgggcaccggcgtgggcgcccagaacggcatcctgatcaagggcggcgagcccctggagatggcccacaaggtgaaggtggtggtgttcgacaagaccggcaccatcacccacggcacccccgtggtgaaccaggtgaaggtgctgaccgagagcaacagaatcagccaccacaagatcctggccatcgtgggcaccgccgagagcaacagcgagcaccccctgggcaccgccatcaccaagtactgcaagcaggagctggacaccgagaccctgggcacctgcatcgacttccaggtggtgcccggctgcggcatcagctgcaaggtgaccaacatcgagggcctgctgcacaagaacaactggaacatcgaggacaacaacatcaagaacgccagcctggtgcagatcgacgccagcaacgagcagagcagcaccagcagcagcatgatcatcgacgcccagatcagcaacgccctgaacgcccagcagtacaaggtgctgatcggcaacagagagtggatgatcagaaacggcctggtgatcaacaacgacgtgaacgacttcatgaccgagcacgagagaaagggcagaaccgccgtgctggtggccgtggacgacgagctgtgcggcctgatcgccatcgccgacaccgtgaagcccgaggccgagctggccatccacatcctgaagagcatgggcctggaggtggtgctgatgaccggcgacaacagcaagaccgccagaagcatcgccagccaggtgggcatcaccaaggtgttcgccgaggtgctgcccagccacaaggtggccaaggtgaagcagctgcaggaggagggcaagagagtggccatggtgggcgacggcatcaacgacagccccgccctggccatggccaacgtgggcatcgccatcggcaccggcaccgacgtggccatcgaggccgccgacgtggtgctgatcagaaacgacctgctggacgtggtggccagcatcgacctgagcagagagaccgtgaagagaatcagaatcaacttcgtgttcgccctgatctacaacctggtgggcatccccatcgccgccggcgtgttcatgcccatcggcctggtgctgcagccctggatgggcagcgccgccatggccgccagcagcgtgagcgtggtgctgagcagcctgttcctgaagctgtacagaaagcccacctacgagagctacgagctgcccgccagaagccagatcggccagaagagccccagcgagatcagcgtgcacgtgggcatcgacgacaccagcagaaacagccccaagctgggcctgctggacagaatcgtgaactacagcagagccagcatcaacagcctgctgagcgacaagagaagcctgaacagcgtggtgaccagcgagcccgacaagcacagcctgctggtgggcgacttcagagaggacgacgacaccgccctgtag

SEQ ID NO: 73643 - DNA, 4269 bp, synthetic construct
  misc_feature 1..4269: note = Description of Artificial Sequence: Synthetic coding sequence
  source 1..4269: mol_type = other DNA
atggaccccagcatgggcgtgaacagcgtgaccatcagcgtggagggcatgacctgcaacagctgcgtgtggaccatcgagcagcagatcggcaaggtgaacggcgtgcaccacatcaaggtgagcctggaggagaagaacgccaccatcatctacgaccccaagctgcagacccccaagaccctgcaggaggccatcgacgacatgggcttcgacgccgtgatccacaaccccgaccccctgcccgtgctgaccgacaccctgttcctgaccgtgaccgccagcctgaccctgccctgggaccacatccagagcaccctgctgaagaccaagggcgtgaccgacatcaagatctacccccagaagagaaccgtggccgtgaccatcatccccagcatcgtgaacgccaaccagatcaaggagctggtgcccgagctgagcctggacaccggcaccctggagaagaagagcggcgcctgcgaggaccacagcatggcccaggccggcgaggtggtgctgaagatgaaggtggagggcatgacctgccacagctgcaccagcaccatcgagggcaagatcggcaagctgcagggcgtgcagagaatcaaggtgagcctggacaaccaggaggccaccatcgtgtaccagccccacctgatcagcgtggaggagatgaagaagcagatcgaggccatgggcttccccgccttcgtgaagaagcagcccaagtacctgaagctgggcgccatcgacgtggagagactgaagaacacccccgtgaagagcagcgagggcagccagcagagaagccccagctacaccaacgacagcaccgccaccttcatcatcgacggcatgcactgcaagagctgcgtgagcaacatcgagagcaccctgagcgccctgcagtacgtgagcagcatcgtggtgagcctggagaacagaagcgccatcgtgaagtacaacgccagcagcgtgacccccgagagcctgagaaaggccatcgaggccgtgagccccggcctgtacagagtgagcatcaccagcgaggtggagagcaccagcaacagccccagcagcagcagcctgcagaagatccccctgaacgtggtgagccagcccctgacccaggagaccgtgatcaacatcgacggcatgacctgcaacagctgcgtgcagagcatcgagggcgtgatcagcaagaagcccggcgtgaagagcatcagagtgagcctggccaacagcaacggcaccgtggagtacgaccccctgctgaccagccccgagaccctgagaggcgccatcgaggacatgggcttcgacgccaccctgagcgacaccaacgagcccctggtggtgatcgcccagcccagcagcgagatgcccctgctgaccagcaccaacgagttctacaccaagggcatgacccccgtgcaggacaaggaggagggcaagaacagcagcaagtgctacatccaggtgaccggcatgacctgcgccagctgcgtggccaacatcgagagaaacctgagaagagaggagggcatctacagcatcctggtggccctgatggccggcaaggccgaggtgagatacaaccccgccgtgatccagccccccatgatcgccgagttcatcagagagctgggcttcggcgccaccgtgatcgagaacgccgacgagggcgacggcgtgctggagctggtggtgagaggcatgacctgcgccagctgcgtgcacaagatcgagagcagcctgaccaagcacagaggcatcctgtactgcagcgtggccctggccaccaacaaggcccacatcaagtacgaccccgagatcatcggccccagagacatcatccacaccatcgagagcctgggcttcgaggccagcctggtgaagaaggacagaagcgccagccacctggaccacaagagagagatcagacagtggagaagaagcttcctggtgagcctgttcttctgcatccccgtgatgggcctgatgatctacatgatggtgatggaccaccacttcgccaccctgcaccacaaccagaacatgagcaaggaggagatgatcaacctgcacagcagcatgttcctggagagacagatcctgcccggcctgagcgtgatgaacctgctgagcttcctgctgtgcgtgcccgtgcagggcaagaccagcgaggccctggccaagctgatcagcctgcaggccaccgaggccaccatcgtgaccctggacagcgacaacatcctgctgagcgaggagcaggtggacgtggagctggtgcagagaggcgacatcatcaaggtggtgcccggcggcaagttccccgtggacggcagagtgatcgagggccacagcatggtggacgagagcctgatcaccggcgaggccatgcccgtggccaagaagcccggcagcaccgtgatcgccggcagcatcaaccagaacggcagcctgctgatctgcgccacccacgtgggcgccgacaccaccctgagccagatcgtgaagctggtggaggaggcccagaccagcaaggcccccatccagcagttcgccgacaagctgagcggctacttcgtgcccttcatcgtgttcgtgagcatcgccaccctgctggtgtggatcgtgatcggcttcctgaacttcgagatcgtggagacctacttccccggctacaacagaagcatcagcagaaccgagaccatcatcagattcgccttccaggccagcatcaccgtgctgtgcatcgcctgcccctgcagcctgggcctggccacccccaccgccgtgatggtgggcaccggcgtgggcgcccagaacggcatcctgatcaagggcggcgagcccctggagatggcccacaaggtgaaggtggtggtgttcgacaagaccggcaccatcacccacggcacccccgtggtgaaccaggtgaaggtgctgaccgagagcaacagaatcagccaccacaagatcctggccatcgtgggcaccgccgagagcaacagcgagcaccccctgggcaccgccatcaccaagtactgcaagcaggagctggacaccgagaccctgggcacctgcatcgacttccaggtggtgcccggctgcggcatcagctgcaaggtgaccaacatcgagggcctgctgcacaagaacaactggaacatcgaggacaacaacatcaagaacgccagcctggtgcagatcgacgccagcaacgagcagagcagcaccagcagcagcatgatcatcgacgcccagatcagcaacgccctgaacgcccagcagtacaaggtgctgatcggcaacagagagtggatgatcagaaacggcctggtgatcaacaacgacgtgaacgacttcatgaccgagcacgagagaaagggcagaaccgccgtgctggtggccgtggacgacgagctgtgcggcctgatcgccatcgccgacaccgtgaagcccgaggccgagctggccatccacatcctgaagagcatgggcctggaggtggtgctgatgaccggcgacaacagcaagaccgccagaagcatcgccagccaggtgggcatcaccaaggtgttcgccgaggtgctgcccagccacaaggtggccaaggtgaagcagctgcaggaggagggcaagagagtggccatggtgggcgacggcatcaacgacagccccgccctggccatggccaacgtgggcatcgccatcggcaccggcaccgacgtggccatcgaggccgccgacgtggtgctgatcagaaacgacctgctggacgtggtggccagcatcgacctgagcagagagaccgtgaagagaatcagaatcaacttcgtgttcgccctgatctacaacctggtgggcatccccatcgccgccggcgtgttcatgcccatcggcctggtgctgcagccctggatgggcagcgccgccatggccgccagcagcgtgagcgtggtgctgagcagcctgttcctgaagctgtacagaaagcccacctacgagagctacgagctgcccgccagaagccagatcggccagaagagccccagcgagatcagcgtgcacgtgggcatcgacgacaccagcagaaacagccccaagctgggcctgctggacagaatcgtgaactacagcagagccagcatcaacagcctgctgagcgacaagagaagcctgaacagcgtggtgaccagcgagcccgacaagcacagcctgctggtgggcgacttcagagaggacgacgacaccgccctgtag

SEQ ID NO: 73644 - DNA, 264 bp, synthetic construct
  misc_feature 1..264: note = Description of Artificial Sequence: Synthetic coding sequence
  source 1..264: mol_type = other DNA
gagtgcaacgaggagatcaagatggaccccagcatgggcgtgaacagcgtgaccatcagcgtggagggcatgacctgcaacagctgcgtgtggaccatcgagcagcagatcggcaaggtgaacggcgtgcaccacatcaaggtgagcctggaggagaagaacgccaccatcatcttctacgcccactggttcggcttcgccgccctggacggcatctgcagcaacggctgcttcatctgcttctgcagcaccttcttcagctag

SEQ ID NO: 73645 - DNA, 1512 bp, synthetic construct
  misc_feature 1..1512: note = Description of Artificial Sequence: Synthetic coding sequence
  source 1..1512: mol_type = other DNA
atggaccccagcatgggcgtgaacagcgtgaccatcagcgtggagggcatgacctgcaacagctgcgtgtggaccatcgagcagcagatcggcaaggtgaacggcgtgcaccacatcaaggtgaaggtggtggtgttcgacaagaccggcaccatcacccacggcacccccgtggtgaaccaggtgaaggtgctgaccgagagcaacagaatcagccaccacaagatcctggccatcgtgggcaccgccgagagcaacagcgagcaccccctgggcaccgccatcaccaagtactgcaagcaggagctggacaccgagaccctgggcacctgcatcgacttccaggtggtgcccggctgcggcatcagctgcaaggtgaccaacatcgagggcctgctgcacaagaacaactggaacatcgaggacaacaacatcaagaacgccagcctggtgcagatcgacgccagcaacgagcagagcagcaccagcagcagcatgatcatcgacgcccagatcagcaacgccctgaacgcccagcagtacaaggtgctgatcggcaacagagagtggatgatcagaaacggcctggtgatcaacaacgacgtgaacgacttcatgaccgagcacgagagaaagggcagaaccgccgtgctggtggccgtggacgacgagctgtgcggcctgatcgccatcgccgacaccgtgaagcccgaggccgagctggccatccacatcctgaagagcatgggcctggaggtggtgctgatgaccggcgacaacagcaagaccgccagaagcatcgccagccaggtgggcatcaccaaggtgttcgccgaggtgctgcccagccacaaggtggccaaggtgaagcagctgcaggaggagggcaagagagtggccatggtgggcgacggcatcaacgacagccccgccctggccatggccaacgtgggcatcgccatcggcaccggcaccgacgtggccatcgaggccgccgacgtggtgctgatcagaaacgacctgctggacgtggtggccagcatcgacctgagcagagagaccgtgaagagaatcagaatcaacttcgtgttcgccctgatctacaacctggtgggcatccccatcgccgccggcgtgttcatgcccatcggcctggtgctgcagccctggatgggcagcgccgccatggccgccagcagcgtgagcgtggtgctgagcagcctgttcctgaagctgtacagaaagcccacctacgagagctacgagctgcccgccagaagccagatcggccagaagagccccagcgagatcagcgtgcacgtgggcatcgacgacaccagcagaaacagccccaagctgggcctgctggacagaatcgtgaactacagcagagccagcatcaacagcctgctgagcgacaagagaagcctgaacagcgtggtgaccagcgagcccgacaagcacagcctgctggtgggcgacttcagagaggacgacgacaccgccctgtag

SEQ ID NO: 73646 - DNA, 2049 bp, synthetic construct
  misc_feature 1..2049: note = Description of Artificial Sequence: Synthetic coding sequence
  source 1..2049: mol_type = other DNA
agaaaccaggagtgcaacgaggagatcaagatggaccccagcatgggcgtgaacagcgtgaccatcagcgtggagggcatgacctgcaacagctgcgtgtggaccatcgagcagcagatcggcaaggtgaacggcgtgcaccacatcaaggtgagcctggaggagaagaacgccaccatcatctacgaccccaagctgcagacccccaagaccctgcaggaggccatcgacgacatgggcttcgacgccgtgatccacaaccccgaccccctgcccgtgctgaccgacaccctgttcctgaccgtgaccgccagcctgaccctgccctgggaccacatccagagcaccctgctgaagaccaagggcgtgaccgacatcaagatctacccccagaagagaaccgtggccgtgaccatcatccccagcatcgtgaacgccaaccagatcaaggagctggtgcccgagctgagcctggacaccggcaccctggagaagaagagcggcgcctgcgaggaccacagcatggcccaggccggcgaggtggtgctgaagatgaaggtggagggcatgacctgccacagctgcaccagcaccatcgagggcaagatcggcaagctgcagggcgtgcagagaatcaaggtgagcctggacaaccaggaggccaccatcgtgtaccagccccacctgatcagcgtggaggagatgaagaagcagatcgaggccatgggcttccccgccttcgtgaagaagcagcccaagtacctgaagctgggcgccatcgacgtggagagactgaagaacacccccgtgaagagcagcgagggcagccagcagagaagccccagctacaccaacgacagcaccgccaccttcatcatcgacggcatgcactgcaagagctgcgtgagcaacatcgagagcaccctgagcgccctgcagtacgtgagcagcatcgtggtgagcctggagaacagaagcgccatcgtgaagtacaacgccagcagcgtgacccccgagagcctgagaaaggccatcgaggccgtgagccccggcctgtacagagtgagcatcaccagcgaggtggagagcaccagcaacagccccagcagcagcagcctgcagaagatccccctgaacgtggtgagccagcccctgacccaggagaccgtgatcaacatcgacggcatgacctgcaacagctgcgtgcagagcatcgagggcgtgatcagcaagaagcccggcgtgaagagcatcagagtgagcctggccaacagcaacggcaccgtggagtacgaccccctgctgaccagccccgagaccctgagaggcgccatcgaggacatgggcttcgacgccaccctgagcgacaccaacgagcccctggtggtgatcgcccagcccagcagcgagatgcccctgctgaccagcaccaacgagttctacaccaagggcatgacccccgtgcaggacaaggaggagggcaagaacagcagcaagtgctacatccaggtgaccggcatgacctgcgccagctgcgtggccaacatcgagagaaacctgagaagagaggagggcatctacagcatcctggtggccctgatggccggcaaggccgaggtgagatacaaccccgccgtgatccagccccccatgatcgccgagttcatcagagagctgggcttcggcgccaccgtgatcgagaacgccgacgagggcgacggcgtgctggagctggtggtgagaggcatgacctgcgccagctgcgtgcacaagatcgagagcagcctgaccaagcacagaggcatcctgtactgcagcgtggccctggccaccaacaaggcccacatcaagtacgaccccgagatcatcggccccagagacatcatccacaccatcgaggtgagcgccaagaacctgtgcttctgcgtgctgacctacctgatcagcacccccgtgaaccacttctggttcgccagcgacagaggcaacgagaagaagagcaacagcttcgagcacttcaagcaggacctgagccagaacctgatgtag

SEQ ID NO: 73647 - DNA, 825 bp, synthetic construct
  misc_feature 1..825: note = Description of Artificial Sequence: Synthetic coding sequence
  source 1..825: mol_type = other DNA
atggaccccagcatgggcgtgaacagcgtgaccatcagcgtggagggcatgacctgcaacagctgcgtgtggaccatcgagcagcagatcggcaaggtgaacggcgtgcaccacatcaaggtgagcctggaggagaagaacgccaccatcatctacgaccccaagctgcagacccccaagaccctgcaggaggccatcgacgacatgggcttcgacgccgtgatccacaaccccgaccccctgcccgtgctgaccgacaccctgttcctgaccgtgaccgccagcctgaccctgccctgggaccacatccagagcaccctgctgaagaccaagggcgtgaccgacatcaagatctacccccagaagagaaccgtggccgtgaccatcatccccagcatcgtgaacgccaaccagatcaaggagctggtgcccgagctgagcctggacaccggcaccctggagaagaagagcggcgcctgcgaggaccacagcatggcccaggccggcgaggtggtgctgaagatgaaggtggagggcatgacctgccacagctgcaccagcaccatcgagggcaagatcggcaagctgcagggcgtgcagagaatcaaggtgagcctggacaaccaggaggccaccatcgtgtaccagccccacctgatcagcgtggaggagatgaagaagcagatcgaggccatgggcttccccgccttcgtgaagaagcagcccaagtacctgaagctgggcgccatcgacgtggagagactgaagaacacccccgtgaagagcagcgagggcagccagcagagaagccccagctaccagtag

SEQ ID NO: 73648 - DNA, 546 bp, synthetic construct
  misc_feature 1..546: note = Description of Artificial Sequence: Synthetic coding sequence
  source 1..546: mol_type = other DNA
atgagacccagcggcacctgcgccagctgcggcagcgacccccccccccccacccaggtgcccagcagcagaaacgactgcggcagcaccgtgcccgacaaccccttcgtgagaaccctgccccacaccaccatgagcggccaccagctgccccccgccggcacccagagacccggccccgccgcctgcctggtgcccggcagcctgcccagcctgcccagccagcccggcccctggggcgccctgggcaccgccgccgccgagggcatgagctgcagcaacaccagaaccgccctggagttcgccctgttccccaaggagatgctgctgggcagctggtacggctggggcctgagcctgtacagaagaggcagatgccaggacagcgcccaccccgaggaggacacctgcccccacggcgagggcgcccccgcccaggccggcgagagcgtgcccagccagcagctgtgccaccaccccgccggcaactggggcggcctgtactgggtgatcggcaaggccttcagcctggcctggaactgctag

SEQ ID NO: 73649 - DNA, 642 bp, synthetic construct
  misc_feature 1..642: note = Description of Artificial Sequence: Synthetic coding sequence
  source 1..642: mol_type = other DNA
atgagagtgagaggccccgccagactgatcgccagcggcgccagactgctgctgagaatgctgagcgccctgcccggctggggccccgcccacctgcagagacccctgctgggccccgccagctgcctgggcatcctgagacccgccatgaccgcccacagcttcgccctgcccgtgatcatcttcaccaccttctggggcctggtgggcatcgccggcccctggttcgtgcccaagggccccaacagaggcgtgatcatcaccatgctggtggccaccgccgtgtgctgctacctgctgtgccccgccctgggcatgaccgtggcccccctgagcctgaccacccccagcagcggccccagccccacccagctgtgcctggtgaccagcagcctgctgctggcccccagagaccccgacccccagggcctgcccggcagctggaagagcagccagagcagccagcccgccagagccctgggcagccccggccacagcagcggcagaggcgacgtgctgctgcagtacccccactgcagcggcgtgtgccccctgagccagggcgacgccgccggcgagctggtgtgggtgggcagcttccccctgcagaccggccagatgcccggcctgagccccagctag

SEQ ID NO: 73650 - DNA, 495 bp, synthetic construct
  misc_feature 1..495: note = Description of Artificial Sequence: Synthetic coding sequence
  source 1..495: mol_type = other DNA
atgaccgcccacagcttcgccctgcccgtgatcatcttcaccaccttctggggcctggtgggcatcgccggcccctggttcgtgcccaagggccccaacagaggcgtgatcatcaccatgctggtggccaccgccgtgtgctgctacctgctgtgccccgccctgggcatgaccgtggcccccctgagcctgaccacccccagcagcggccccagccccacccagctgtgcctggtgaccagcagcctgctgctggcccccagagaccccgacccccagggcctgcccggcagctggaagagcagccagagcagccagcccgccagagccctgggcagccccggccacagcagcggcagaggcgacgtgctgctgcagtacccccactgcagcggcgtgtgccccctgagccagggcgacgccgccggcgagctggtgtgggtgggcagcttccccctgcagaccggccagatgcccggcctgagccccagctag

SEQ ID NO: 73651 - DNA, 393 bp, synthetic construct
  misc_feature 1..393: note = Description of Artificial Sequence: Synthetic coding sequence
  source 1..393: mol_type = other DNA
atgagagtgagaggccccgccagactgatcgccagcggcgccagactgctgctgagaatgctgagcgccctgcccggctggggccccgcccacctgcagagacccctgctgggccccgccagctgcctgggcatcctgagacccgccatgaccgcccacagcttcgccctgcccgtgatcatcttcaccaccttctggggcctggtgggcatcgccggcccctggttcgtgcccaagggccccaacagaggcgtgatcatcaccatgctggtggccaccgccgtgtgctgctacctgttctggctgatcgccatcctggcccagctgaaccccctgttcggcccccagctgaagaacgagaccatctggtacgtgagattcctgtgggagtag

SEQ ID NO: 73652 - DNA, 246 bp, synthetic construct
  misc_feature 1..246: note = Description of Artificial Sequence: Synthetic coding sequence
  source 1..246: mol_type = other DNA
atgaccgcccacagcttcgccctgcccgtgatcatcttcaccaccttctggggcctggtgggcatcgccggcccctggttcgtgcccaagggccccaacagaggcgtgatcatcaccatgctggtggccaccgccgtgtgctgctacctgttctggctgatcgccatcctggcccagctgaaccccctgttcggcccccagctgaagaacgagaccatctggtacgtgagattcctgtgggagtag

SEQ ID NO: 73653 - DNA, 564 bp, synthetic construct
  misc_feature 1..564: note = Description of Artificial Sequence: Synthetic coding sequence
  source 1..564: mol_type = other DNA
atgaccgcccacagcttcgccctgcccgtgatcatcttcaccaccttctggggcctggtgggcatcgccggcccctggttcgtgcccaagggccccaacagaggcgtgatcatcaccatgctggtggccaccgccgtgtgctgctacctgttctggctgatcgccatcctggcccagctgaaccccctgttcggcccccagctgaagaacgagaccatctggtgccccgccctgggcatgaccgtggcccccctgagcctgaccacccccagcagcggccccagccccacccagctgtgcctggtgaccagcagcctgctgctggcccccagagaccccgacccccagggcctgcccggcagctggaagagcagccagagcagccagcccgccagagccctgggcagccccggccacagcagcggcagaggcgacgtgctgctgcagtacccccactgcagcggcgtgtgccccctgagccagggcgacgccgccggcgagctggtgtgggtgggcagcttccccctgcagaccggccagatgcccggcctgagccccagctag

SEQ ID NO: 73654 - DNA, 357 bp, synthetic construct
  misc_feature 1..357: note = Description of Artificial Sequence: Synthetic coding sequence
  source 1..357: mol_type = other DNA
atggccagccagagccagggcatccagcagctgctgcaggccgagaagagagccgccgagaaggtgagcgaggccagaaagagaaagaacagaagactgaagcaggccaaggaggaggcccaggccgagatcgagcagtacagactgcagagagagaaggagttcaaggccaaggaggccgccgccctgggcagcagaggcagctgcagcaccgaggtggagaaggagacccaggagaagatgaccatcctgcagacctacttcagacagaacagagacgaggtgctggacaacctgctggccttcgtgtgcgacatcagacccgagatccacgagaactacagaatcaacggctag

SEQ ID NO: 73655 - DNA, 357 bp, synthetic construct
  misc_feature 1..357: note = Description of Artificial Sequence: Synthetic coding sequence
  source 1..357: mol_type = other DNA
atggccagccagagccagggcatccagcagctgctgcaggccgagaagagagccgccgagaaggtggccgacgccagaaagagaaaggccagaagactgaagcaggccaaggaggaggcccagatggaggtggagcagtacagaagagagagagagcacgagttccagagcaagcagcaggccgccatgggcagccagggcaacctgagcgccgaggtggagcaggccaccagaagacaggtgcagggcatgcagagcagccagcagagaaacagagagagagtgctggcccagctgctgggcatggtgtgcgacgtgagaccccaggtgcaccccaactacagaatcagcgcctag

SEQ ID NO: 73656 - DNA, 237 bp, synthetic construct
  misc_feature 1..237: note = Description of Artificial Sequence: Synthetic coding sequence
  source 1..237: mol_type = other DNA
atggccagccagagccagggcatccagcagctgctgcaggccgagaagagagccgccgagaaggtggccgacgccagaaagagaaaggccagaagactgaagcaggccaccagaagacaggtgcagggcatgcagagcagccagcagagaaacagagagagagtgctggcccagctgctgggcatggtgtgcgacgtgagaccccaggtgcaccccaactacagaatcagcgcctag

SEQ ID NO: 73657 - DNA, 357 bp, synthetic construct; identical to SEQ ID NO: 73655
  misc_feature 1..357: note = Description of Artificial Sequence: Synthetic coding sequence
  source 1..357: mol_type = other DNA

SEQ ID NO: 73658 - DNA, 477 bp, synthetic construct
  misc_feature 1..477: note = Description of Artificial Sequence: Synthetic coding sequence
  source 1..477: mol_type = other DNA
ggcggccagcagcacgccgtgccctgcccccacggcggccccggcggccagggccagcccagagccgaggccgccggcaccggccagggccacagaggcggccacagacccggcgccgtggtgggcgccgcccagcacctgcacagaggcctgggcgtggccggcggcggccccggccccggccccgccgtgctgcagaccagaaaggccagaagactgaagcaggccaaggaggaggcccagatggaggtggagcagtacagaagagagagagagcacgagttccagagcaagcagcaggccgccatgggcagccagggcaacctgagcgccgaggtggagcaggccaccagaagacaggtgcagggcatgcagagcagccagcagagaaacagagagagagtgctggcccagctgctgggcatggtgtgcgacgtgagaccccaggtgcaccccaactacagaatcagcgcctag

SEQ ID NO: 73659 - DNA, 237 bp, synthetic construct; identical to SEQ ID NO: 73656
  misc_feature 1..237: note = Description of Artificial Sequence: Synthetic coding sequence
  source 1..237: mol_type = other DNA

SEQ ID NO: 73660 - DNA, 237 bp, synthetic construct; identical to SEQ ID NO: 73656
  misc_feature 1..237: note = Description of Artificial Sequence: Synthetic coding sequence
  source 1..237: mol_type = other DNA

SEQ ID NO: 73661 - DNA, 357 bp, synthetic construct; identical to SEQ ID NO: 73655
  misc_feature 1..357: note = Description of Artificial Sequence: Synthetic coding sequence
  source 1..357: mol_type = other DNA

SEQ ID NO: 73662 - DNA, 237 bp, synthetic construct; identical to SEQ ID NO: 73656
  misc_feature 1..237: note = Description of Artificial Sequence: Synthetic coding sequence
  source 1..237: mol_type = other DNA

SEQ ID NO: 73663 - DNA, 357 bp, synthetic construct; identical to SEQ ID NO: 73655
  misc_feature 1..357: note = Description of Artificial Sequence: Synthetic coding sequence
  source 1..357: mol_type = other DNA

SEQ ID NO: 73664 - DNA, 237 bp, synthetic construct; identical to SEQ ID NO: 73656
  misc_feature 1..237: note = Description of Artificial Sequence: Synthetic coding sequence
  source 1..237: mol_type = other DNA

SEQ ID NO: 73665 - DNA, 237 bp, synthetic construct; identical to SEQ ID NO: 73656
  misc_feature 1..237: note = Description of Artificial Sequence: Synthetic coding sequence
  source 1..237: mol_type = other DNA

SEQ ID NO: 73666 - DNA, 357 bp, synthetic construct; identical to SEQ ID NO: 73655
  misc_feature 1..357: note = Description of Artificial Sequence: Synthetic coding sequence
  source 1..357: mol_type = other DNA

SEQ ID NO: 73667 - DNA, 237 bp, synthetic construct; identical to SEQ ID NO: 73656
  misc_feature 1..237: note = Description of Artificial Sequence: Synthetic coding sequence
  source 1..237: mol_type = other DNA

SEQ ID NO: 73668 - DNA, 357 bp, synthetic construct; identical to SEQ ID NO: 73655
  misc_feature 1..357: note = Description of Artificial Sequence: Synthetic coding sequence
  source 1..357: mol_type = other DNA

SEQ ID NO: 73669 - DNA, 357 bp, synthetic construct; identical to SEQ ID NO: 73655
  misc_feature 1..357: note = Description of Artificial Sequence: Synthetic coding sequence
  source 1..357: mol_type = other DNA

SEQ ID NO: 73670 - DNA, 234 bp, synthetic construct
  misc_feature 1..234: note = Description of Artificial Sequence: Synthetic coding sequence
  source 1..234: mol_type = other DNA
atggaggtggagcagtacagaagagagagagagcacgagttccagagcaagcagcaggccgccatgggcagccagggcaacctgagcgccgaggtggagcaggccaccagaagacaggtgcagggcatgcagagcagccagcagagaaacagagagagagtgctggcccagctgctgggcatggtgtgcgacgtgagaccccaggtgcaccccaactacagaatcagcgcctag

SEQ ID NO: 73671 - DNA, 348 bp, synthetic construct
  misc_feature 1..348: note = Description of Artificial Sequence: Synthetic coding sequence
  source 1..348: mol_type = other DNA
gtggagcccggcatccagcagctgctgcaggccgagaagagagccgccgagaaggtggccgacgccagaaagagaaaggccagaagactgaagcaggccaaggaggaggcccagatggaggtggagcagtacagaagagagagagagcacgagttccagagcaagcagcaggccgccatgggcagccagggcaacctgagcgccgaggtggagcaggccaccagaagacaggtgcagggcatgcagagcagccagcagagaaacagagagagagtgctggcccagctgctgggcatggtgtgcgacgtgagaccccaggtgcaccccaactacagaatcagcgcctag

SEQ ID NO: 73672 - DNA, 468 bp, synthetic construct
  misc_feature 1..468: note = Description of Artificial Sequence: Synthetic coding sequence
  source 1..468: mol_type = other DNA
atgagcgagagcaagagcggccccgagtacgccagcttcttcgccgtgatgggcgccagcgccgccatggtgttcagcgccctgggcgccgcctacggcaccgccaagagcggcaccggcatcgccgccatgagcgtgatgagacccgagcagatcatgaagagcatcatccccgtggtgatggccggcatcatcgccatctacggcctggtggtggccgtgctgatcgccaacagcctgaacgacgacatcagcctgtacaagagcttcctgcagctgggcgccggcctgagcgtgggcctgagcggcctggccgccggcttcgccatcggcatcgtgggcgacgccggcgtgagaggcaccgcccagcagcccagactgttcgtgggcatgatcctgatcctgatcttcgccgaggtgctgggcctgtacggcctgatcgtggccctgatcctgagcaccaagtag

SEQ ID NO: 73673 - DNA, 477 bp, synthetic construct
  misc_feature 1..477: note = Description of Artificial Sequence: Synthetic coding sequence
  source 1..477: mol_type = other DNA
atgtggagcaacctgggcatcggcctggccatcagcctgagcgtggtgggcgccgcctggggcatctacatcaccggcagcagcatcatcggcggcggcgtgaaggcccccagaatcaagaccaagaacctggtgagcatcatcttctgcgaggccgtggccatctacggcatcatcatggccatcgtgatcagcaacatggccgagcccttcagcgccaccgaccccaaggccatcggccacagaaactaccacgccggctacagcatgttcggcgccggcctgaccgtgggcctgagcaacctgttctgcggcgtgtgcgtgggcatcgtgggcagcggcgccgccctggccgacgcccagaaccccagcctgttcgtgaagatcctgatcgtggagatcttcggcagcgccatcggcctgttcggcgtgatcgtggccatcctgcagaccagcagagtgaagatgggcgactag

SEQ ID NO: 73674 - DNA, 129 bp, synthetic construct
  misc_feature 1..129: note = Description of Artificial Sequence: Synthetic coding sequence
  source 1..129: mol_type = other DNA
gtgggcagcggcgccgccctggccgacgcccagaaccccagcctgttcgtgaagatcctgatcgtggagatcttcggcagcctggccagcctgggcagcagcagccagttcttcagaccccccgagtag

SEQ ID NO: 73675 - DNA, 759 bp, synthetic construct
  misc_feature 1..759: note = Description of Artificial Sequence: Synthetic coding sequence
  source 1..759: mol_type = other DNA
atgaccggcctggccctgctgtacagcggcgtgttcgtggccttctgggcctgcgccctggccgtgggcgaggccggcagctggagagccggcgccgccagcagacccagctggcccggcagaaacagcgccggcaagtggcccgccggcaacaccggcccccccagagccctgcaccccagactgtggggcctggcccccgccagagccagcgacagcgacaagggcgaccccgacttccagctgctggaggagggcttcctgaccgagaccagccccttcatgtggagcaacctgggcatcggcctggccatcagcctgagcgtggtgggcgccgcctggggcatctacatcaccggcagcagcatcatcggcggcggcgtgaaggcccccagaatcaagaccaagaacctggtgagcatcatcttctgcgaggccgtggccatctacggcatcatcatggccatcgtgatcagcaacatggccgagcccttcagcgccaccgaccccaaggccatcggccacagaaactaccacgccggctacagcatgttcggcgccggcctgaccgtgggcctgagcaacctgttctgcggcgtgtgcgtgggcatcgtgggcagcggcgccgccctggccgacgcccagaaccccagcctgttcgtgaagatcctgatcgtggagatcttcggcagcgccatcggcctgttcggcgtgatcgtggccatcctgcagaccagcagagtgaagatgggcgactag

SEQ ID NO: 73676 - DNA, 618 bp, synthetic construct
  misc_feature 1..618: note = Description of Artificial Sequence: Synthetic coding sequence
  source 1..618: mol_type = other DNA
atgaccggcctggccctgctgtacagcggcgtgttcgtggccttctgggcctgcgccctggccgtgggcgtgtgctacaccatcttcgacctgggcttcagattcgacgtggcctggttcctgaccgagaccagccccttcatgtggagcaacctgggcatcggcctggccatcagcctgagcgtggtgggcgccgcctggggcatctacatcaccggcagcagcatcatcggcggcggcgtgaaggcccccagaatcaagaccaagaacctggtgagcatcatcttctgcgaggccgtggccatctacggcatcatcatggccatcgtgatcagcaacatggccgagcccttcagcgccaccgaccccaaggccatcggccacagaaactaccacgccggctacagcatgttcggcgccggcctgaccgtgggcctgagcaacctgttctgcggcgtgtgcgtgggcatcgtgggcagcggcgccgccctggccgacgcccagaaccccagcctgttcgtgaagatcctgatcgtggagatcttcggcagcgccatcggcctgttcggcgtgatcgtggccatcctgcagaccagcagagtgaagatgggcgactag

SEQ ID NO: 73677 - DNA, 261 bp, synthetic construct
  misc_feature 1..261: note = Description of Artificial Sequence: Synthetic coding sequence
  source 1..261: mol_type = other DNA
atgtggagcaacctgggcatcggcctggccatcagcctgagcgtggtgggcgccgcctggggcatctacatcaccggcagcagcatcatcggcggcggcgtgaaggcccccagaatcaagaccaagaacctggtgagcatcatcttctgcgaggccgtggccatctacggcatcatcatggccatcgtgatcagcaacatggccgagcccttcagcgccaccgaccccaaggccatcggccacagaaactaccacgcctag

SEQ ID NO: 73678 - DNA, 477 bp, synthetic construct; identical to SEQ ID NO: 73673
  misc_feature 1..477: note = Description of Artificial Sequence: Synthetic coding sequence
  source 1..477: mol_type = other DNA

SEQ ID NO: 73679 - DNA, 786 bp, synthetic construct
  misc_feature 1..786: note = Description of Artificial Sequence: Synthetic coding sequence
  source 1..786: mol_type = other DNA
atgaccggcctggccctgctgtacagcggcgtgttcgtggccttctgggcctgcgccctggccgtgggcgtgtgctacaccatcttcgacctgggcttcagattcgacgtggcctggttcctgaccgagaccagccccttcatgtggagcaacctgggcatcggcctggccatcagcctgagcgtggtgggcgccgcctggggcatctacatcaccggcagcagcatcatcggcggcggcgtgaaggcccccagaatcaagaccaagaacctggtgagcatcatcttctgcgaggccgtggccatctacggcatcatcatggccatcgtgatcagcaacatggccgagcccttcagcgccaccgaccccaaggccatcggccacagaaactaccacgccggctacagcatgttcggcgccggcctgaccgtgggcctgagcaacctgttctgcggcgtgtgcgtgggcatcgtgggcagcggcgccgccctggccgacgcccagaaccccagcctgttcgtgaagatcctgatcgtggagatcttcggcagcgccatcggcctgttcggcgtgatcgtggccatcctgcaggtgatgaaccccctgggcaagcccctgtgcccctgcccccagcccagcctgaccctgctgctggagaagctgaagtgcagccccagcctgcccatcaccatcgacagccccaagcagctgccccccccccacttccacctgctggtgttcagctacagaggcagcctgttcctgagcctgatctggtgccactag

SEQ ID NO: 73680 - DNA, 681 bp, synthetic construct
  misc_feature 1..681: note = Description of Artificial Sequence: Synthetic coding sequence
  source 1..681: mol_type = other DNA
atggccctgagcgacgccgacgtgcagaagcagatcaagcacatgatggccttcatcgagcaggaggccaacgagaaggccgaggagatcgacgccaaggccgaggaggagttcaacatcgagaagggcagactggtgcagacccagagactgaagatcatggagtactacgagaagaaggagaagcagatcgagcagcagaagaagatccagatgagcaacctgatgaaccaggccagactgaaggtgctgagagccagagacgacctgatcaccgacctgctgaacgaggccaagcagagactgagcaaggtggtgaaggacaccaccagataccaggtgctgctggacggcctggtgctgcagggcctgtaccagctgctggagcccagaatgatcgtgagatgcagaaagcaggacttccccctggtgaaggccgccgtgcagaaggccatccccatgtacaagatcgccaccaagaacgacgtggacgtgcagatcgaccaggagagctacctgcccgaggacatcgccggcggcgtggagatctacaacggcgacagaaagatcaaggtgagcaacaccctggagagcagactggacctgatcgcccagcagatgatgcccgaggtgagaggcgccctgttcggcgccaacgccaacagaaagttcctggactag

SEQ ID NO: 73681 - DNA, 591 bp, synthetic construct
  misc_feature 1..591: note = Description of Artificial Sequence: Synthetic coding sequence
  source 1..591: mol_type = other DNA
atggccctgagcgacgccgacgtgcagaagcagatcaagcacatgatggccttcatcgagcaggaggccaacgagaaggccgaggagatcgacgccaaggccgaggaggagttcaacatcgagaagggcagactggtgcagacccagagactgaagatcatggagtactacgagaagaaggagaagcagatcgagcagcagaagaagatccagatgagcaacctgatgaaccaggccagactgaaggtgctgagagccagagacgacctgatcaccggcctgtaccagctgctggagcccagaatgatcgtgagatgcagaaagcaggacttccccctggtgaaggccgccgtgcagaaggccatccccatgtacaagatcgccaccaagaacgacgtggacgtgcagatcgaccaggagagctacctgcccgaggacatcgccggcggcgtggagatctacaacggcgacagaaagatcaaggtgagcaacaccctggagagcagactggacctgatcgcccagcagatgatgcccgaggtgagaggcgccctgttcggcgccaacgccaacagaaagttcctggactag

SEQ ID NO: 73682 - DNA, 615 bp, synthetic construct
  misc_feature 1..615: note = Description of Artificial Sequence: Synthetic coding sequence
  source 1..615: mol_type = other DNA
atggccctgagcgacgccgacgtgcagaagcaggccgaggaggagttcaacatcgagaagggcagactggtgcagacccagagactgaagatcatggagtactacgagaagaaggagaagcagatcgagcagcagaagaagatccagatgagcaacctgatgaaccaggccagactgaaggtgctgagagccagagacgacctgatcaccgacctgctgaacgaggccaagcagagactgagcaaggtggtgaaggacaccaccagataccaggtgctgctggacggcctggtgctgcagggcctgtaccagctgctggagcccagaatgatcgtgagatgcagaaagcaggacttccccctggtgaaggccgccgtgcagaaggccatccccatgtacaagatcgccaccaagaacgacgtggacgtgcagatcgaccaggagagctacctgcccgaggacatcgccggcggcgtggagatctacaacggcgacagaaagatcaaggtgagcaacaccctggagagcagactggacctgatcgcccagcagatgatgcccgaggtgagaggcgccctgttcggcgccaacgccaacagaaagttcctggactag

SEQ ID NO: 73683 - DNA, 1056 bp, synthetic construct
  misc_feature 1..1056: note = Description of Artificial Sequence: Synthetic coding sequence
  source 1..1056: mol_type = other DNA
atgagcttcttccccgagctgtacttcaacgtggacaacggctacctggagggcctggtgagaggcctgaaggccggcgtgctgagccaggccgactacctgaacctggtgcagtgcgagaccctggaggacctgaagctgcacctgcagagcaccgactacggcaacttcctggccaacgaggccagccccctgaccgtgagcgtgatcgacgacagactgaaggagaagatggtggtggagttcagacacatgagaaaccacgcctacgagcccctggccagcttcctggacttcatcacctacagctacatgatcgacaacgtgatcctgctgatcaccggcaccctgcaccagagaagcatcgccgagctggtgcccaagtgccaccccctgggcagcttcgagcagatggaggccgtgaacatcgcccagacccccgccgagctgtacaacgccatcctggtggacacccccctggccgccttcttccaggactgcatcagcgagcaggacctggacgagatgaacatcgagatcatcagaaacaccctgtacaaggcctacctggagagcttctacaagttctgcaccctgctgggcggcaccaccgccgacgccatgtgccccatcctggagttcgaggccgacagaagagccttcatcatcaccatcaacagcttcggcaccgagctgagcaaggaggacagagccaagctgttcccccactgcggcagactgtaccccgagggcctggcccagctggccagagccgacgactacgagcaggtgaagaacgtggccgactactaccccgagtacaagctgctgttcgagggcgccggcagcaaccccggcgacaagaccctggaggacagattcttcgagcacgaggtgaagctgaacaagctggccttcctgaaccagttccacttcggcgtgttctacgccttcgtgaagctgaaggagcaggagtgcagaaacatcgtgtggatcgccgagtgcatcgcccagagacacagagccaagatcgacaactacatccccatcttctag

SEQ ID NO: 73684 - DNA, 825 bp, synthetic construct
  misc_feature 1..825: note = Description of Artificial Sequence: Synthetic coding sequence
  source 1..825: mol_type = other DNA
atggtggtggagttcagacacatgagaaaccacgcctacgagcccctggccagcttcctggacttcatcacctacagctacatgatcgacaacgtgatcctgctgatcaccggcaccctgcaccagagaagcatcgccgagctggtgcccaagtgccaccccctgggcagcttcgagcagatggaggccgtgaacatcgcccagacccccgccgagctgtacaacgccatcctggtggacacccccctggccgccttcttccaggactgcatcagcgagcaggacctggacgagatgaacatcgagatcatcagaaacaccctgtacaaggcctacctggagagcttctacaagttctgcaccctgctgggcggcaccaccgccgacgccatgtgccccatcctggagttcgaggccgacagaagagccttcatcatcaccatcaacagcttcggcaccgagctgagcaaggaggacagagccaagctgttcccccactgcggcagactgtaccccgagggcctggcccagctggccagagccgacgactacgagcaggtgaagaacgtggccgactactaccccgagtacaagctgctgttcgagggcgccggcagcaaccccggcgacaagaccctggaggacagattcttcgagcacgaggtgaagctgaacaagctggccttcctgaaccagttccacttcggcgtgttctacgccttcgtgaagctgaaggagcaggagtgcagaaacatcgtgtggatcgccgagtgcatcgcccagagacacagagccaagatcgacaactacatccccatcttctag

SEQ ID NO: 73685 - DNA, 1179 bp, synthetic construct
  misc_feature 1..1179: note = Description of Artificial Sequence: Synthetic coding sequence
  source 1..1179: mol_type = other DNA
atgagcttcttccccgagctgtacttcaacgtggacaacggctacctggagggcctggtgagaggcctgaaggccggcgtgctgagccaggccgactacctgaacctggtgcagtgcgagaccctggaggacctgaagctgcacctgcagagcaccgactacggcaacttcctggccaacgaggccagccccctgaccgtgagcgtgatcgacgacagactgaaggagaagatggtggtggagttcagacacatgagaaaccacgcctacgagcccctggccagcttcctggacttcatcacccaggagagcgaggccggcacccccgagggccccggcaacatgcccaagctgggcagcagacccagccccggccacagaccccccttcctgagagtgagcctgctgccctggccccccagcagctacagctacatgatcgacaacgtgatcctgctgatcaccggcaccctgcaccagagaagcatcgccgagctggtgcccaagtgccaccccctgggcagcttcgagcagatggaggccgtgaacatcgcccagacccccgccgagctgtacaacgccatcctggtggacacccccctggccgccttcttccaggactgcatcagcgagcaggacctggacgagatgaacatcgagatcatcagaaacaccctgtacaaggcctacctggagagcttctacaagttctgcaccctgctgggcggcaccaccgccgacgccatgtgccccatcctggagttcgaggccgacagaagagccttcatcatcaccatcaacagcttcggcaccgagctgagcaaggaggacagagccaagctgttcccccactgcggcagactgtaccccgagggcctggcccagctggccagagccgacgactacgagcaggtgaagaacgtggccgactactaccccgagtacaagctgctgttcgagggcgccggcagcaaccccggcgacaagaccctggaggacagattcttcgagcacgaggtgaagctgaacaagctggccttcctgaaccagttccacttcggcgtgttctacgccttcgtgaagctgaaggagcaggagtgcagaaacatcgtgtggatcgccgagtgcatcgcccagagacacagagccaagatcgacaactacatccccatcttctag

SEQ ID NO: 73686 - DNA, 1149 bp, synthetic construct
  misc_feature 1..1149: note = Description of Artificial Sequence: Synthetic coding sequence
  source 1..1149: mol_type = other DNA
atgaccgagttctggctgatcagcgcccccggcgagaagacctgccagcagacctgggagaagctgcacgccgccaccagcaagaacaacaacctggccgtgaccagcaagttcaacatccccgacctgaaggtgggcaccctggacgtgctggtgggcctgagcgacgagctggccaagctggacgccttcgtggagggcgtggtgaagaaggtggcccagtacatggccgacgtgctggaggacagcaaggacaaggtgcaggagaacctgctggccaacggcgtggacctggtgacctacatcaccagattccagtgggacatggccaagtaccccatcaagcagagcctgaagaacatcagcgagatcatcgccaagggcgtgacccagatcgacaacgacctgaagagcagagccagcgcctacaacaacctgaagggcaacctgcagaacctggagagaaagaacgccggcagcctgctgaccagaagcctggccgagatcgtgaagaaggacgacttcgtgctggacagcgagtacctggtgaccctgctggtggtggtgcccaagctgaaccacaacgactggatcaagcagtacgagaccctggccgagatggtggtgcccagaagcagcaacgtgctgagcgaggaccaggacagctacctgtgcaacgtgaccctgttcagaaaggccgtggacgacttcagacacaaggccagagagaacaagttcatcgtgagagacttccagtacaacgaggaggagatgaaggccgacaaggaggagatgaacagactgagcaccgacaagaagaagcagttcggccccctggtgagatggctgaaggtgaacttcagcgaggccttcatcgcctggatccacgtgaaggccctgagagtgttcgtggagagcgtgctgagatacggcctgcccgtgaacttccaggccatgctgctgcagcccaacaagaagaccctgaagaagctgagagaggtgctgcacgagctgtacaagcacctggacagcagcgccgccgccatcatcgacgcccccatggacatccccggcctgaacctgagccagcaggagtactacccctacgtgtactacaagatcgactgcaacctgctggagttcaagtag

SEQ ID NO: 73687 - DNA, 1149 bp, synthetic construct; identical to SEQ ID NO: 73686
  misc_feature 1..1149: note = Description of Artificial Sequence: Synthetic coding sequence
  source 1..1149: mol_type = other DNA

SEQ ID NO: 73688 - DNA, 1053 bp, synthetic construct
  misc_feature 1..1053: note = Description of Artificial Sequence: Synthetic coding sequence
  source 1..1053: mol_type = other DNA
atggccgtgttcgtggtgctgctggccctggtggccggcgtgctgggcaacgagttcagcatcctgaagagccccggcagcgtggtgttcagaaacggcaactggcccatccccggcgagagaatccccgacgtggccgccctgagcatgggcttcagcgtgaaggaggacctgagctggcccggcctggccgtgggcaacctgttccacagacccagagccaccgtgatggtgatggtgaagggcgtgaacaagctggccctgccccccggcagcgtgatcagctaccccctggagaacgccgtgcccttcagcctggacagcgtggccaacagcatccacagcctgttcagcgaggagacccccgtggtgctgcagctggcccccagcgaggagagagtgtacatggtgggcaaggccaacagcgtgttcgaggacctgagcgtgaccctgagacagctgagaaacagactgttccaggagaacagcgtgctgagcagcctgcccctgaacagcctgagcagaaacaacgaggtggacctgctgttcctgagcgagctgcaggtgctgcacgacatcagcagcctgctgagcagacacaagcacctggccaaggaccacagccccgacctgtacagcctggagctggccggcctggacgagatcggcaagagatacggcgaggacagcgagcagttcagagacgccagcaagatcctggtggacgccctgcagaagttcgccgacgacatgtacagcctgtacggcggcaacgccgtggtggagctggtgaccgtgaagagcttcgacaccagcctgatcagaaagaccagaaccatcctggaggccaagcaggccaagaaccccgccagcccctacaacctggcctacaagtacaacttcgagtacagcgtggtgttcaacatggtgctgtggatcatgatcgccctggccctggccgtgatcatcaccagctacaacatctggaacatggaccccggctacgacagcatcatctacagaatgaccaaccagaagatcagaatggactag

SEQ ID NO: 73689 - DNA, 732 bp, synthetic construct
  misc_feature 1..732: note = Description of Artificial Sequence: Synthetic coding sequence
  source 1..732: mol_type = other DNA
tgatgccccgccggccccttcagagtggccccccagtgctgcggcagaagaggcaccatggccgtgttcgtggtgctgctggccctggtggccggcgtgctgggcaacgagttcagcatcctgaagagccccggcagcgtggtgttcagaaacggcaactggcccatccccggcgagagaatccccgacgtggccgccctgagcatgggcttcagcgtgaaggaggacctgagctggcccggcctggccgtgggcaacctgttccacagacccagagccaccgtgatggtgatggtgaagggcgtgaacaagctggccctgccccccggcagcgtgatcagctaccccctggagaacgtggacctgctgttcctgagcgagctgcaggtgctgcacgacatcagcagcctgctgagcagacacaagcacctggccaaggaccacagccccgacctgtacagcctggagctggccggcctggacgagatcggcaagagatacggcgaggacagcgagcagttcagagacgccagcaagatcctggtggacgccctgcagaagttcgccgacgacatgtacagcctgtacggcggcaacgccgtggtggagctggtgaccgtgaagagcttcgacaccagcctgatcagaaagaccagaaccatcctggaggccaagcaggccaagaaccccgccagcccctacaacctggcctacaagtacaacttcgagtag

SEQ ID NO: 73690 - DNA, 612 bp, synthetic construct
  misc_feature 1..612: note = Description of Artificial Sequence: Synthetic coding sequence
  source 1..612: mol_type = other DNA
gagagcgagagagtgaccagcagcagatgcggctgcagaccctgccccgccggccccttcagagtggccccccagtgctgcggcagaagaggcaccatggccgtgttcgtggtgctgctggccctggtggccggcgtgctgggcaacgagttcagcatcctgaagagccccggcagcgtggtgttcagaaacggcaactggcccatccccggcgagagaatccccgacgtggccgccctgagcatgggcttcagcgtgaaggaggacctgagctggcccggcctggccgtgggcaacctgttccacagacccagagccaccgtgatggtgatggtgaagggcgtgaacaagctggccctgccccccggcagcgtgatcagctaccccctggagaacagagtgtacatggtgggcaaggccaacagcgtgttcgaggacctgagcgtgaccctgagacagctgagaaacagactgttccaggagaacagcgtgctgagcagcctgcccctgaacagcctgagcagaaacaacgaggtggacctgctgttcctgagcgagctgcaggtgctgcacgacatcagcagcctgctgagcagacacaagcacctgtag

SEQ ID NO: 73691 - DNA, 780 bp, synthetic construct
  misc_feature 1..780: note = Description of Artificial Sequence: Synthetic coding sequence
  source 1..780: mol_type = other DNA
tgagtgccccccgccagaagcgtgagccccagaagcgccgccgccgccgccgccccctggctgtgcctgagctgcagctggagatggtggagagacctgagctggcccggcctggccgtgggcaacctgttccacagacccagagccaccgtgatggtgatggtgaagggcgtgaacaagctggccctgccccccggcagcgtgatcagctaccccctggagaacgccgtgcccttcagcctggacagcgtggccaacagcatccacagcctgttcagcgaggagacccccgtggtgctgcagctggcccccagcgaggagagagtgtacatggtgggcaaggccaacagcgtgttcgaggacctgagcgtgaccctgagacagctgagaaacagactgttccaggagaacagcgtgctgagcagcctgcccctgaacagcctgagcagaaacaacgaggtggacctgctgttcctgagcgagctgcaggtgctgcacgacatcagcagcctgctgagcagacacaagcacctggccaaggaccacagccccgacctgtacagcctggagctggccggcctggacgagatcggcaagagatacggcgaggacagcgagcagttcagagacgccagcaagatcctggtggacgccctgcagaagttcgccgacgacatgtacagcctgtacggcggcaacgccgtggtggagctggtgaccgtgaagagcttcgacaccagcctgatcagaaagaccagaaccatcctggaggccaagtag

SEQ ID NO: 73692 - DNA, 957 bp, synthetic construct
  misc_feature 1..957: note = Description of Artificial Sequence: Synthetic coding sequence
  source 1..957: mol_type = other DNA
atggccgtgttcgtggtgctgctggccctggtggccggcgtgctgggcaacgagttcagcatcctgaagagccccggcagcgtggtgttcagaaacggcaactggcccatccccggcgagagaatccccgacgtggccgccctgagcatgggcttcagcgtgaaggaggacctgagctggcccggcctggccgtgggcaacctgttccacagacccagagccaccgtgatggtgatggtgaagggcgtgaacaagctggccctgccccccggcagcgtgatcagctaccccctggagaacagagtgtacatggtgggcaaggccaacagcgtgttcgaggacctgagcgtgaccctgagacagctgagaaacagactgttccaggagaacagcgtgctgagcagcctgcccctgaacagcctgagcagaaacaacgaggtggacctgctgttcctgagcgagctgcaggtgctgcacgacatcagcagcctgctgagcagacacaagcacctggccaaggaccacagccccgacctgtacagcctggagctggccggcctggacgagatcggcaagagatacggcgaggacagcgagcagttcagagacgccagcaagatcctggtggacgccctgcagaagttcgccgacgacatgtacagcctgtacggcggcaacgccgtggtggagctggtgaccgtgaagagcttcgacaccagcctgatcagaaagaccagaaccatcctggaggccaagcaggccaagaaccccgccagcccctacaacctggcctacaagtacaacttcgagtacagcgtggtgttcaacatggtgctgtggatcatgatcgccctggccctggccgtgatcatcaccagctacaacatctggaacatggaccccggctacgacagcatcatctacagaatgaccaaccagaagatcagaatggactag

SEQ ID NO: 73693 - DNA, 819 bp, synthetic construct
  misc_feature 1..819: note = Description of Artificial Sequence: Synthetic coding sequence
  source 1..819: mol_type = other DNA
atggccgtgttcgtggtgctgctggccctggtggccggcgtgctgggcaacgagttcagcatcctgaagagccccggcagcgtggtgttcagaaacggcaactggcccatccccggcgagagaatccccgacgtggccgccctgagcatgggcttcagcgtgaaggaggacctgagctggcccggcctggccgtgggcaacctgttccacagacccagagccaccgtgatggtgatggtgaagggcgtgaacaagctggccctgccccccggcagcgtgatcagctaccccctggagaacgtggacctgctgttcctgagcgagctgcaggtgctgcacgacatcagcagcctgctgagcagacacaagcacctggccaaggaccacagccccgacctgtacagcctggagctggccggcctggacgagatcggcaagagatacggcgaggacagcgagcagttcagagacgccagcaagatcctggtggacgccctgcagaagttcgccgacgacatgtacagcctgtacggcggcaacgccgtggtggagctggtgaccgtgaagagcttcgacaccagcctgatcagaaagaccagaaccatcctggaggccaagcaggccaagaaccccgccagcccctacaacctggcctacaagtacaacttcgagtacagcgtggtgttcaacatggtgctgtggatcatgatcgccctggccctggccgtgatcatcaccagctacaacatctggaacatggaccccggctacgacagcatcatctacagaatgaccaaccagaagatcagaatggactag

SEQ ID NO: 73694 - DNA, 498 bp, synthetic construct
  misc_feature 1..498: note = Description of Artificial Sequence: Synthetic coding sequence
  source 1..498: mol_type = other DNA
atggccgtgttcgtggtgctgctggccctggtggccggcgtgctgggcaacgagttcagcatcctgaagagccccggcagcgtggtgttcagaaacggcaactggcccatccccggcgagagaatccccgacgtggccgccctgagcatgggcttcagcgtgaaggaggacctgagctggcccggcctggccgtgggcaacctgttccacagacccagagccaccgtgatggtgatggtgaagggcgtgaacaagctggccctgccccccggcagcgtgatcagctaccccctggagaacgccgtgcccttcagcctggacagcgtggccaacagcatccacagcctgttcagcgaggagacccccgtggtgctgcagctggcccccagcgaggagagagtgtacatggtgggcaccatgaagctgacctgcagcttcttcctgaactgcaagtgctacatgatcttccaggcctgctgcctggtgatcagcatctag

SEQ ID NO: 73695 - DNA, 825 bp, synthetic construct
  misc_feature 1..825: note = Description of Artificial Sequence: Synthetic coding sequence
  source 1..825: mol_type = other DNA
atggtgatggtgaagggcgtgaacaagctggccctgccccccggcagcgtgatcagctaccccctggagaacgccgtgcccttcagcctggacagcgtggccaacagcatccacagcctgttcagcgaggagacccccgtggtgctgcagctggcccccagcgaggagagagtgtacatggtgggcaaggccaacagcgtgttcgaggacctgagcgtgaccctgagacagctgagaaacagactgttccaggagaacagcgtgctgagcagcctgcccctgaacagcctgagcagaaacaacgaggtggacctgctgttcctgagcgagctgcaggtgctgcacgacatcagcagcctgctgagcagacacaagcacctggccaaggaccacagccccgacctgtacagcctggagctggccggcctggacgagatcggcaagagatacggcgaggacagcgagcagttcagagacgccagcaagatcctggtggacgccctgcagaagttcgccgacgacatgtacagcctgtacggcggcaacgccgtggtggagctggtgaccgtgaagagcttcgacaccagcctgatcagaaagaccagaaccatcctggaggccaagcaggccaagaaccccgccagcccctacaacctggcctacaagtacaacttcgagtacagcgtggtgttcaacatggtgctgtggatcatgatcgccctggccctggccgtgatcatcaccagctacaacatctggaacatggaccccggctacgacagcatcatctacagaatgaccaaccagaagatcagaatggactag

SEQ ID NO: 73696 - DNA, 2517 bp, synthetic construct
  misc_feature 1..2517: note = Description of Artificial Sequence: Synthetic coding sequence
  source 1..2517: mol_type = other DNA
atgggcgagctgttcagaagcgaggagatgaccctggcccagctgttcctgcagagcgaggccgcctactgctgcgtgagcgagctgggcgagctgggcaaggtgcagttcagagacctgaaccccgacgtgaacgtgttccagagaaagttcgtgaacgaggtgagaagatgcgaggagatggacagaaagctgagattcgtggagaaggagatcagaaaggccaacatccccatcatggacaccggcgagaaccccgaggtgcccttccccagagacatgatcgacctggaggccaacttcgagaagatcgagaacgagctgaaggagatcaacaccaaccaggaggccctgaagagaaacttcctggagctgaccgagctgaagttcatcctgagaaagacccagcagttcttcgacgaggccgagctgcaccaccagcagatggccgaccccgacctgctggaggagagcagcagcctgctggagcccagcgagatgggcagaggcacccccctgagactgggcttcgtggccggcgtgatcaacagagagagaatccccaccttcgagagaatgctgtggagagtgtgcagaggcaacgtgttcctgagacaggccgagatcgagaaccccctggaggaccccgtgaccggcgactacgtgcacaagagcgtgttcatcatcttcttccagggcgaccagctgaagaacagagtgaagaagatctgcgagggcttcagagccagcctgtacccctgccccgagaccccccaggagagaaaggagatggccagcggcgtgaacaccagaatcgacgacctgcagatggtgctgaaccagaccgaggaccacagacagagagtgctgcaggccgccgccaagaacatcagagtgtggttcatcaaggtgagaaagatgaaggccatctaccacaccctgaacctgtgcaacatcgacgtgacccagaagtgcctgatcgccgaggtgtggtgccccgtgaccgacctggacagcatccagttcgccctgagaagaggcaccgagcacagcggcagcaccgtgcccagcatcctgaacagaatgcagaccaaccagaccccccccacctacaacaagaccaacaagttcacctacggcttccagaacatcgtggacgcctacggcatcggcacctacagagagatcaaccccgccccctacaccatcatcaccttccccttcctgttcgccgtgatgttcggcgacttcggccacggcatcctgatgaccctgttcgccgtgtggatggtgctgagagagagcagaatcctgagccagaagaacgagaacgagatgttcagcaccgtgttcagcggcagatacatcatcctgctgatgggcgtgttcagcatgtacaccggcctgatctacaacgactgcttcagcaagagcctgaacatcttcggcagcagctggagcgtgagacccatgttcacctacaactggaccgaggagaccctgagaggcaaccccgtgctgcagctgaaccccgccctgcccggcgtgttcggcggcccctaccccttcggcatcgaccccatctggaacatcgccaccaacaagctgaccttcctgaacagcttcaagatgaagatgagcgtgatcctgggcatcatccacatgctgttcggcgtgagcctgagcctgttcaaccacatctacttcaagaagcccctgaacatctacttcggcttcatccccgagatcatcttcatgaccagcctgttcggctacctggtgatcctgatcttctacaagtggaccgcctacgacgcccacaccagcgagaacgcccccagcctgctgatccacttcatcaacatgttcctgttcagctaccccgagagcggctacagcatgctgtacagcggccagaagggcatccagtgcttcctggtggtggtggccctgctgtgcgtgccctggatgctgctgttcaagcccctggtgctgagaagacagtacctgagaagaaagcacctgggcaccctgaacttcggcggcatcagagtgggcaacggccccaccgaggaggacgccgagatcatccagcacgaccagctgagcacccacagcgaggacgccgacgagttcgacttcggcgacaccatggtgcaccaggccatccacaccatcgagtactgcctgggctgcatcagcaacaccgccagctacctgagactgtgggccctgagcctggcccacgcccagctgagcgaggtgctgtggaccatggtgatccacatcggcctgagcgtgaagagcctggccggcggcctggtgctgttcttcttcttcaccgccttcgccaccctgaccgtggccatcctgctgatcatggagggcctgagcgccttcctgcacgccctgagactgcactgggtggagttccagaacaagttctacagcggcaccggcttcaagttcctgcccttcagcttcgagcacatcagagagggcaagttcgaggagtag

SEQ ID NO: 73697 - DNA, 2514 bp, synthetic construct
  misc_feature 1..2514: note = Description of Artificial Sequence: Synthetic coding sequence
  source 1..2514: mol_type = other DNA
atgggcgagctgttcagaagcgaggagatgaccctggcccagctgttcctgcagagcgaggccgcctactgctgcgtgagcgagctgggcgagctgggcaaggtgcagttcagagacctgaaccccgacgtgaacgtgttccagagaaagttcgtgaacgaggtgagaagatgcgaggagatggacagaaagctgagattcgtggagaaggagatcagaaaggccaacatccccatcatggacaccggcgagaaccccgaggtgcccttccccagagacatgatcgacctggaggccaacttcgagaagatcgagaacgagctgaaggagatcaacaccaaccaggaggccctgaagagaaacttcctggagctgaccgagctgaagttcatcctgagaaagacccagcagttcttcgacgagatggccgaccccgacctgctggaggagagcagcagcctgctggagcccagcgagatgggcagaggcacccccctgagactgggcttcgtggccggcgtgatcaacagagagagaatccccaccttcgagagaatgctgtggagagtgtgcagaggcaacgtgttcctgagacaggccgagatcgagaaccccctggaggaccccgtgaccggcgactacgtgcacaagagcgtgttcatcatcttcttccagggcgaccagctgaagaacagagtgaagaagatctgcgagggcttcagagccagcctgtacccctgccccgagaccccccaggagagaaaggagatggccagcggcgtgaacaccagaatcgacgacctgcagatggtgctgaaccagaccgaggaccacagacagagagtgctgcaggccgccgccaagaacatcagagtgtggttcatcaaggtgagaaagatgaaggccatctaccacaccctgaacctgtgcaacatcgacgtgacccagaagtgcctgatcgccgaggtgtggtgccccgtgaccgacctggacagcatccagttcgccctgagaagaggcaccgagcacagcggcagcaccgtgcccagcatcctgaacagaatgcagaccaaccagaccccccccacctacaacaagaccaacaagttcacctacggcttccagaacatcgtggacgcctacggcatcggcacctacagagagatcaaccccgccccctacaccatcatcaccttccccttcctgttcgccgtgatgttcggcgacttcggccacggcatcctgatgaccctgttcgccgtgtggatggtgctgagagagagcagaatcctgagccagaagaacgagaacgagatgttcagcaccgtgttcagcggcagatacatcatcctgctgatgggcgtgttcagcatgtacaccggcctgatctacaacgactgcttcagcaagagcctgaacatcttcggcagcagctggagcgtgagacccatgttcacctacaactggaccgaggagaccctgagaggcaaccccgtgctgcagctgaaccccgccctgcccggcgtgttcggcggcccctaccccttcggcatcgaccccatctggaacatcgccaccaacaagctgaccttcctgaacagcttcaagatgaagatgagcgtgatcctgggcatcatccacatgctgttcggcgtgagcctgagcctgttcaaccacatctacttcaagaagcccctgaacatctacttcggcttcatccccgagatcatcttcatgaccagcctgttcggctacctggtgatcctgatcttctacaagtggaccgcctacgacgcccacaccagcgagaacgcccccagcctgctgatccacttcatcaacatgttcctgttcagctaccccgagagcggctacagcatgctgtacagcggccagaagggcatccagtgcttcctggtggtggtggccctgctgtgcgtgccctggatgctgctgttcaagcccctggtgctgagaagacagtacctgagaagaaagcacctgggcaccctgaacttcggcggcatcagagtgggcaacggccccaccgaggaggacgccgagatcatccagcacgaccagctgagcacccacagcgaggacgccgacgagcccagcgaggacgaggtgttcgacttcggcgacaccatggtgcaccaggccatccacaccatcgagtactgcctgggctgcatcagcaacaccgccagctacctgagactgtgggccctgagcctggcccacgcccagctgagcgaggtgctgtggaccatggtgatccacatcggcctgagcgtgaagagcctggccggcggcctggtgctgttcttcttcttcaccgccttcgccaccctgaccgtggccatcctgctgatcatggagggcctgagcgccttcctgcacgccctgagactgcactgggtggagttccagaacaagttctacagcggcaccggcttcaagttcctgcccttcagcttcgagcacatcagagagggcaagttcgaggagtag

SEQ ID NO: 73698 - DNA, 2496 bp, synthetic construct
  misc_feature 1..2496: note = Description of Artificial Sequence: Synthetic coding sequence
  source 1..2496: mol_type = other DNA
atgggcgagctgttcagaagcgaggagatgaccctggcccagctgttcctgcagagcgaggccgcctactgctgcgtgagcgagctgggcgagctgggcaaggtgcagttcagagacctgaaccccgacgtgaacgtgttccagagaaagttcgtgaacgaggtgagaagatgcgaggagatggacagaaagctgagattcgtggagaaggagatcagaaaggccaacatccccatcatggacaccggcgagaaccccgaggtgcccttccccagagacatgatcgacctggaggccaacttcgagaagatcgagaacgagctgaaggagatcaacaccaaccaggaggccctgaagagaaacttcctggagctgaccgagctgaagttcatcctgagaaagacccagcagttcttcgacgagatggccgaccccgacctgctggaggagagcagcagcctgctggagcccagcgagatgggcagaggcacccccctgagactgggcttcgtggccggcgtgatcaacagagagagaatccccaccttcgagagaatgctgtggagagtgtgcagaggcaacgtgttcctgagacaggccgagatcgagaaccccctggaggaccccgtgaccggcgactacgtgcacaagagcgtgttcatcatcttcttccagggcgaccagctgaagaacagagtgaagaagatctgcgagggcttcagagccagcctgtacccctgccccgagaccccccaggagagaaaggagatggccagcggcgtgaacaccagaatcgacgacctgcagatggtgctgaaccagaccgaggaccacagacagagagtgctgcaggccgccgccaagaacatcagagtgtggttcatcaaggtgagaaagatgaaggccatctaccacaccctgaacctgtgcaacatcgacgtgacccagaagtgcctgatcgccgaggtgtggtgccccgtgaccgacctggacagcatccagttcgccctgagaagaggcaccgagcacagcggcagcaccgtgcccagcatcctgaacagaatgcagaccaaccagaccccccccacctacaacaagaccaacaagttcacctacggcttccagaacatcgtggacgcctacggcatcggcacctacagagagatcaaccccgccccctacaccatcatcaccttccccttcctgttcgccgtgatgttcggcgacttcggccacggcatcctgatgaccctgttcgccgtgtggatggtgctgagagagagcagaatcctgagccagaagaacgagaacgagatgttcagcaccgtgttcagcggcagatacatcatcctgctgatgggcgtgttcagcatgtacaccggcctgatctacaacgactgcttcagcaagagcctgaacatcttcggcagcagctggagcgtgagacccatgttcacctacaactggaccgaggagaccctgagaggcaaccccgtgctgcagctgaaccccgccctgcccggcgtgttcggcggcccctaccccttcggcatcgaccccatctggaacatcgccaccaacaagctgaccttcctgaacagcttcaagatgaagatgagcgtgatcctgggcatcatccacatgctgttcggcgtgagcctgagcctgttcaaccacatctacttcaagaagcccctgaacatctacttcggcttcatccccgagatcatcttcatgaccagcctgttcggctacctggtgatcctgatcttctacaagtggaccgcctacgacgcccacaccagcgagaacgcccccagcctgctgatccacttcatcaacatgttcctgttcagctaccccgagagcggctacagcatgctgtacagcggccagaagggcatccagtgcttcctggtggtggtggccctgctgtgcgtgccctggatgctgctgttcaagcccctggtgctgagaagacagtacctgagaagaaagcacctgggcaccctgaacttcggcggcatcagagtgggcaacggccccaccgaggaggacgccgagatcatccagcacgaccagctgagcacccacagcgaggacgccgacgagttcgacttcggcgacaccatggtgcaccaggccatccacaccatcgagtactgcctgggctgcatcagcaacaccgccagctacctgagactgtgggccctgagcctggcccacgcccagctgagcgaggtgctgtggaccatggtgatccacatcggcctgagcgtgaagagcctggccggcggcctggtgctgttcttcttcttcaccgccttcgccaccctgaccgtggccatcctgctgatcatggagggcctgagcgccttcctgcacgccctgagactgcactgggtggagttccagaacaagttctacagcggcaccggcttcaagttcctgcccttcagcttcgagcacatcagagagggcaagttcgaggagtag

SEQ ID NO: 73699 - DNA, 2367 bp, synthetic construct
  misc_feature 1..2367: note = Description of Artificial Sequence: Synthetic coding sequence
  source 1..2367: mol_type = other DNA
atgggcgagctgttcagaagcgaggagatgaccctggcccagctgttcctgcagagcgaggccgcctactgctgcgtgagcgagctgggcgagctgggcaaggtgcagttcagagacctgaaccccgacgtgaacgtgttccagagaaagttcgtgaacgaggtgagaagatgcgaggagatggacagaaagctgagattcgtggagaaggagatcagaaaggccaacatccccatcatggacaccggcgagaaccccgaggtgcccttccccagagacatgatcgacctggagatggccgaccccgacctgctggaggagagcagcagcctgctggagcccagcgagatgggcagaggcacccccctgagactgggcttcgtggccggcgtgatcaacagagagagaatccccaccttcgagagaatgctgtggagagtgtgcagaggcaacgtgttcctgagacaggccgagatcgagaaccccctggaggaccccgtgaccggcgactacgtgcacaagagcgtgttcatcatcttcttccagggcgaccagctgaagaacagagtgaagaagatctgcgagggcttcagagccagcctgtacccctgccccgagaccccccaggagagaaaggagatggccagcggcgtgaacaccagaatcgacgacctgcagatggtgctgaaccagaccgaggaccacagacagagagtgctgcaggccgccgccaagaacatcagagtgtggttcatcaaggtgagaaagatgaaggccatctaccacaccctgaacctgtgcaacatcgacgtgacccagaagtgcctgatcgccgaggtgtggtgccccgtgaccgacctggacagcatccagttcgccctgagaagaggcaccgagcacagcggcagcaccgtgcccagcatcctgaacagaatgcagaccaaccagaccccccccacctacaacaagaccaacaagttcacctacggcttccagaacatcgtggacgcctacggcatcggcacctacagagagatcaaccccgccccctacaccatcatcaccttccccttcctgttcgccgtgatgttcggcgacttcggccacggcatcctgatgaccctgttcgccgtgtggatggtgctgagagagagcagaatcctgagccagaagaacgagaacgagatgttcagcaccgtgttcagcggcagatacatcatcctgctgatgggcgtgttcagcatgtacaccggcctgatctacaacgactgcttcagcaagagcctgaacatcttcggcagcagctggagcgtgagacccatgttcacctacaactggaccgaggagaccctgagaggcaaccccgtgctgcagctgaaccccgccctgcccggcgtgttcggcggcccctaccccttcggcatcgaccccatctggaacatcgccaccaacaagctgaccttcctgaacagcttcaagatgaagatgagcgtgatcctgggcatcatccacatgctgttcggcgtgagcctgagcctgttcaaccacatctacttcaagaagcccctgaacatctacttcggcttcatccccgagatcatcttcatgaccagcctgttcggctacctggtgatcctgatcttctacaagtggaccgcctacgacgcccacaccagcgagaacgcccccagcctgctgatccacttcatcaacatgttcctgttcagctaccccgagagcggctacagcatgctgtacagcggccagaagggcatccagtgcttcctggtggtggtggccctgctgtgcgtgccctggatgctgctgttcaagcccctggtgctgagaagacagtacctgagaagaaagcacctgggcaccctgaacttcggcggcatcagagtgggcaacggccccaccgaggaggacgccgagatcatccagcacgaccagctgagcacccacagcgaggacgccgacgagttcgacttcggcgacaccatggtgcaccaggccatccacaccatcgagtactgcctgggctgcatcagcaacaccgccagctacctgagactgtgggccctgagcctggcccacgcccagctgagcgaggtgctgtggaccatggtgatccacatcggcctgagcgtgaagagcctggccggcggcctggtgctgttcttcttcttcaccgccttcgccaccctgaccgtggccatcctgctgatcatggagggcctgagcgccttcctgcacgccctgagactgcactgggtggagttccagaacaagttctacagcggcaccggcttcaagttcctgcccttcagcttcgagcacatcagagagggcaagttcgaggagtag

SEQ ID NO: 73700 - DNA, 1452 bp, synthetic construct
  misc_feature 1..1452: note = Description of Artificial Sequence: Synthetic coding sequence
  source 1..1452: mol_type = other DNA
atgcagaccaaccagaccccccccacctacaacaagaccaacaagttcacctacggcttccagaacatcgtggacgcctacggcatcggcacctacagagagatcaaccccgccccctacaccatcatcaccttccccttcctgttcgccgtgatgttcggcgacttcggccacggcatcctgatgaccctgttcgccgtgtggatggtgctgagagagagcagaatcctgagccagaagaacgagaacgagatgttcagcaccgtgttcagcggcagatacatcatcctgctgatgggcgtgttcagcatgtacaccggcctgatctacaacgactgcttcagcaagagcctgaacatcttcggcagcagctggagcgtgagacccatgttcacctacaactggaccgaggagaccctgagaggcaaccccgtgctgcagctgaaccccgccctgcccggcgtgttcggcggcccctaccccttcggcatcgaccccatctggaacatcgccaccaacaagctgaccttcctgaacagcttcaagatgaagatgagcgtgatcctgggcatcatccacatgctgttcggcgtgagcctgagcctgttcaaccacatctacttcaagaagcccctgaacatctacttcggcttcatccccgagatcatcttcatgaccagcctgttcggctacctggtgatcctgatcttctacaagtggaccgcctacgacgcccacaccagcgagaacgcccccagcctgctgatccacttcatcaacatgttcctgttcagctaccccgagagcggctacagcatgctgtacagcggccagaagggcatccagtgcttcctggtggtggtggccctgctgtgcgtgccctggatgctgctgttcaagcccctggtgctgagaagacagtacctgagaagaaagcacctgggcaccctgaacttcggcggcatcagagtgggcaacggccccaccgaggaggacgccgagatcatccagcacgaccagctgagcacccacagcgaggacgccgacgagcccagcgaggacgaggtgttcgacttcggcgacaccatggtgcaccaggccatccacaccatcgagtactgcctgggctgcatcagcaacaccgccagctacctgagactgtgggccctgagcctggcccacgcccagctgagcgaggtgctgtggaccatggtgatccacatcggcctgagcgtgaagagcctggccggcggcctggtgctgttcttcttcttcaccgccttcgccaccctgaccgtggccatcctgctgatcatggagggcctgagcgccttcctgcacgccctgagactgcactgggtggagttccagaacaagttctacagcggcaccggcttcaagttcctgcccttcagcttcgagcacatcagagagggcaagttcgaggagtag

SEQ ID NO: 73701 - DNA, 2514 bp, synthetic construct
  misc_feature 1..2514: note = Description of Artificial Sequence: Synthetic coding sequence
  source 1..2514: mol_type = other DNA
atgggcgagctgttcagaagcgaggagatgaccctggcccagctgttcctgcagagcgaggccgcctactgctgcgtgagcgagctgggcgagctgggcaaggtgcagttcagagacctgaaccccgacgtgaacgtgttccagagaaagttcgtgaacgaggtgagaagatgcgaggagatggacagaaagctgagattcgtggagaaggagatcagaaaggccaacatccccatcatggacaccggcgagaaccccgaggtgcccttccccagagacatgatcgacctggaggccaacttcgagaagatcgagaacgagctgaaggagatcaacaccaaccaggaggccctgaagagaaacttcctggagctgaccgagctgaagttcatcctgagaaagacccagcagttcttcgacgagatggccgaccccgacctgctggaggagagcagcagcctgctggagcccagcgagatgggcagaggcacccccctgagactgggcttcgtggccggcgtgatcaacagagagagaatccccaccttcgagagaatgctgtggagagtgtgcagaggcaacgtgttcctgagacaggccgagatcgagaaccccctggaggaccccgtgaccggcgactacgtgcacaagagcgtgttcatcatcttcttccagggcgaccagctgaagaacagagtgaagaagatctgcgagggcttcagagccagcctgtacccctgccccgagaccccccaggagagaaaggagatggccagcggcgtgaacaccagaatcgacgacctgcagatggtgctgaaccagaccgaggaccacagacagagagtgctgcaggccgccgccaagaacatcagagtgtggttcatcaaggtgagaaagatgaaggccatctaccacaccctgaacctgtgcaacatcgacgtgacccagaagtgcctgatcgccgaggtgtggtgccccgtgaccgacctggacagcatccagttcgccctgagaagaggcaccgagcacagcggcagcaccgtgcccagcatcctgaacagaatgcagaccaaccagaccccccccacctacaacaagaccaacaagttcacctacggcttccagaacatcgtggacgcctacggcatcggcacctacagagagatcaaccccgccccctacaccatcatcaccttccccttcctgttcgccgtgatgttcggcgacttcggccacggcatcctgatgaccctgttcgccgtgtggatggtgctgagagagagcagaatcctgagccagaagaacgagaacgagatgttcagcaccgtgttcagcggcagatacatcatcctgctgatgggcgtgttcagcatgtacaccggcctgatctacaacgactgcttcagcaagagcctgaacatcttcggcagcagctggagcgtgagacccatgttcacctacaactggaccgaggagaccctgagaggcaaccccgtgctgcagctgaaccccgccctgcccggcgtgttcggcggcccctaccccttcggcatcgaccccatctggaacatcgccaccaacaagctgaccttcctgaacagcttcaagatgaagatgagcgtgatcctgggcatcatccacatgctgttcggcgtgagcctgagcctgttcaaccacatctacttcaagaagcccctgaacatctacttcggcttcatccccgagatcatcttcatgaccagcctgttcggctacctggtgatcctgatcttctacaagtggaccgcctacgacgcccacaccagcgagaacgcccccagcctgctgatccacttcatcaacatgttcctgttcagctaccccgagagcggctacagcatgctgtacagcggccagaagggcatccagtgcttcctggtggtggtggccctgctgtgcgtgccctggatgctgctgttcaagcccctggtgctgagaagacagtacctgagaagaaagcacctgggcaccctgaacttcggcggcatcagagtgggcaacggccccaccgaggaggacgccgagatcatccagcacgaccagctgagcacccacagcgaggacgccgacgagcccagcaccagcggccagttcgacttcggcgacaccatggtgcaccaggccatccacaccatcgagtactgcctgggctgcatcagcaacaccgccagctacctgagactgtgggccctgagcctggcccacgcccagctgagcgaggtgctgtggaccatggtgatccacatcggcctgagcgtgaagagcctggccggcggcctggtgctgttcttcttcttcaccgccttcgccaccctgaccgtggccatcctgctgatcatggagggcctgagcgccttcctgcacgccctgagactgcactgggtggagttccagaacaagttctacagcggcaccggcttcaagttcctgcccttcagcttcgagcacatcagagagggcaagttcgaggagtag

SEQ ID NO: 73702 - DNA, 2571 bp, synthetic construct
  misc_feature 1..2571: note = Description of Artificial Sequence: Synthetic coding sequence
  source 1..2571: mol_type = other DNA
atgggcagcctgttcagaagcgagaccatgtgcctggcccagctgttcctgcagagcggcaccgcctacgagtgcctgagcgccctgggcgagaagggcctggtgcagttcagagacctgaaccagaacgtgagcagcttccagagaaagttcgtgggcgaggtgaagagatgcgaggagctggagagaatcctggtgtacctggtgcaggagatcaacagagccgacatccccctgcccgagggcgaggccagcccccccgccccccccctgaagcaggtgctggagatgcaggagcagctgcagaagctggaggtggagctgagagaggtgaccaagaacaaggagaagctgagaaagaacctgctggagctgatcgagtacacccacatgctgagagtgaccaagaccttcgtgaagagaaacgtggagttcgagcccacctacgaggagttccccagcctggagagcgacagcctgctggactacagctgcatgcagagactgggcgccaagctgggcttcgtgagcggcctgatcaaccagggcaaggtggaggccttcgagaagatgctgtggagagtgtgcaagggctacaccatcgtgagctacgccgagctggacgagagcctggaggaccccgagaccggcgaggtgatcaagtggtacgtgttcctgatcagcttctggggcgagcagatcggccacaaggtgaagaagatctgcgactgctaccactgccacgtgtacccctaccccaacaccgccgaggagagaagagagatccaggagggcctgaacaccagaatccaggacctgtacaccgtgctgcacaagaccgaggactacctgagacaggtgctgtgcaaggccgccgagagcgtgtacagcagagtgatccaggtgaagaagatgaaggccatctaccacatgctgaacatgtgcagcttcgacgtgaccaacaagtgcctgatcgccgaggtgtggtgccccgaggccgacctgcaggacctgagaagagccctggaggagggcagcagagagagcggcgccaccatccccagcttcatgaacatcatccccaccaaggagaccccccccaccagaatcagaaccaacaagttcaccgagggcttccagaacatcgtggacgcctacggcgtgggcagctacagagaggtgaaccccgccctgttcaccatcatcaccttccccttcctgttcgccgtgatgttcggcgacttcggccacggcttcgtgatgttcctgttcgccctgctgctggtgctgaacgagaaccaccccagactgaaccagagccaggagatcatgagaatgttcttcaacggcagatacatcctgctgctgatgggcctgttcagcgtgtacaccggcctgatctacaacgactgcttcagcaagagcgtgaacctgttcggcagcggctggaacgtgagcgccatgtacagcagcagccacccccccgccgagcacaagaagatggtgctgtggaacgacagcgtggtgagacacaacagcatcctgcagctggaccccagcatccccggcgtgttcagaggcccctaccccctgggcatcgaccccatctggaacctggccaccaacagactgaccttcctgaacagcttcaagatgaagatgagcgtgatcctgggcatcatccacatgaccttcggcgtgatcctgggcatcttcaaccacctgcacttcagaaagaagttcaacatctacctggtgagcatccccgagctgctgttcatgctgtgcatcttcggctacctgatcttcatgatcttctacaagtggctggtgttcagcgccgagaccagcagagtggcccccagcatcctgatcgagttcatcaacatgttcctgttccccgccagcaagaccagcggcctgtacaccggccaggagtacgtgcagagagtgctgctggtggtgaccgccctgagcgtgcccgtgctgttcctgggcaagcccctgttcctgctgtggctgcacaacggcagaagctgcttcggcgtgaacagaagcggctacaccctgatcagaaaggacagcgaggaggaggtgagcctgctgggcagccaggacatcgaggagggcaaccaccaggtggaggacggctgcagagagatggcctgcgaggagttcaacttcggcgagatcctgatgacccaggtgatccacagcatcgagtactgcctgggctgcatcagcaacaccgccagctacctgagactgtgggccctgagcctggcccacgcccagctgagcgacgtgctgtgggccatgctgatgagagtgggcctgagagtggacaccacctacggcgtgctgctgctgctgcccgtgatcgccctgttcgccgtgctgaccatcttcatcctgctgatcatggagggcctgagcgccttcctgcacgccatcagactgcactgggtggagttccagaacaagttctacgtgggcgccggcaccaagttcgtgcccttcagcttcagcctgctgagcagcaagttcaacaacgacgacagcgtggcctag

SEQ ID NO: 73703 - DNA, 1119 bp, synthetic construct
  misc_feature 1..1119: note = Description of Artificial Sequence: Synthetic coding sequence
  source 1..1119: mol_type = other DNA
atgggcagcctgttcagaagcgagaccatgtgcctggcccagctgttcctgcagagcggcaccgcctacgagtgcctgagcgccctgggcgagaagggcctggtgcagttcagagacctgaaccagaacgtgagcagcttccagagaaagttcgtgggcgaggtgaagagatgcgaggagctggagagaatcctggtgtacctggtgcaggagatcaacagagccgacatccccctgcccgagggcgaggccagcccccccgccccccccctgaagcaggtgctggagatgcaggagcagctgcagaagctggaggtggagctgagagaggtgaccaagaacaaggagaagctgagaaagaacctgctggagctgatcgagtacacccacatgctgagagtgaccaagaccttcgtgaagagaaacgtggagttcgagcccacctacgaggagttccccagcctggagagcgacagcctgctggactacagctgcatgcagagactgggcgccaagctgggcttcgtgagcggcctgatcaaccagggcaaggtggaggccttcgagaagatgctgtggagagtgtgcaagggctacaccatcgtgagctacgccgagctggacgagagcctggaggaccccgagaccggcgaggtgatcaagtggtacgtgttcctgatcagcttctggggcgagcagatcggccacaaggtgaagaagatctgcgactgctaccactgccacgtgtacccctaccccaacaccgccgaggagagaagagagatccaggagggcctgaacaccagaatccaggacctgtacaccgtgctgcacaagaccgaggactacctgagacaggtgctgtgcaaggccgccgagagcgtgtacagcagagtgatccaggtgaagaagatgaaggccatctaccacatgctgaacatgtgcagcttcgacgtgaccaacaagtgcctgatcgccgaggtgtggtgccccgaggccgacctgcaggacctgagaagagccctggaggagggcagcgtgagactgcccagcagccccctgcccggcaccgaggagagactgatggagctgatcaacagcgagaagaagagaaagtag

SEQ ID NO: 73704 - DNA, 2523 bp, synthetic construct
  misc_feature 1..2523: note = Description of Artificial Sequence: Synthetic coding sequence
  source 1..2523: mol_type = other DNA
atggtgagcgtgttcagaagcgaggagatgtgcctgagccagctgttcctgcaggtggaggccgcctactgctgcgtggccgagctgggcgagctgggcctggtgcagttcaaggacctgaacatgaacgtgaacagcttccagagaaagttcgtgaacgaggtgagaagatgcgagagcctggagagaatcctgagattcctggaggacgagatgcagaacgagatcgtggtgcagctgctggagaagagccccctgacccccctgcccagagagatgatcaccctggagaccgtgctggagaagctggagggcgagctgcaggaggccaaccagaaccagcaggccctgaagcagagcttcctggagctgaccgagctgaagtacctgctgaagaagacccaggacttcttcgagaccgagaccaacctggccgacgacttcttcaccgaggacaccagcggcctgctggagctgaaggccgtgcccgcctacatgaccggcaagctgggcttcatcgccggcgtgatcaacagagagagaatggccagcttcgagagactgctgtggagaatctgcagaggcaacgtgtacctgaagttcagcgagatggacgcccccctggaggaccccgtgaccaaggaggagatccagaagaacatcttcatcatcttctaccagggcgagcagctgagacagaagatcaagaagatctgcgacggcttcagagccaccgtgtacccctgccccgagcccgccgtggagagaagagagatgctggagagcgtgaacgtgagactggaggacctgatcaccgtgatcacccagaccgagagccacagacagagactgctgcaggaggccgccgccaactggcacagctggctgatcaaggtgcagaagatgaaggccgtgtaccacatcctgaacatgtgcaacatcgacgtgacccagcagtgcgtgatcgccgagatctggttccccgtggccgacgccaccagaatcaagagagccctggagcagggcatggagctgagcggcagcagcatggcccccatcatgaccaccgtgcagagcaagaccgccccccccaccttcaacagaaccaacaagttcaccgccggcttccagaacatcgtggacgcctacggcgtgggcagctacagagagatcaaccccgccccctacaccatcatcaccttccccttcctgttcgccgtgatgttcggcgactgcggccacggcaccgtgatgctgctggccgccctgtggatgatcctgaacgagagaagactgctgagccagaagaccgacaacgagatctggaacaccttcttccacggcagatacctgatcctgctgatgggcatcttcagcatctacaccggcctgatctacaacgactgcttcagcaagagcctgaacatcttcggcagcagctggagcgtgcagcccatgttcagaaacggcacctggaacacccacgtgatggaggagagcctgtacctgcagctggaccccgccatccccggcgtgtacttcggcaacccctaccccttcggcatcgaccccatctggaacctggccagcaacaagctgaccttcctgaacagctacaagatgaagatgagcgtgatcctgggcatcgtgcagatggtgttcggcgtgatcctgagcctgttcaaccacatctacttcagaagaaccctgaacatcatcctgcagttcatccccgagatgatcttcatcctgtgcctgttcggctacctggtgttcatgatcatcttcaagtggtgctgcttcgacgtgcacgtgagccagcacgcccccagcatcctgatccacttcatcaacatgttcctgttcaactacagcgacagcagcaacgcccccctgtacaagcaccagcaggaggtgcagagcttcttcgtggtgatggccctgatcagcgtgccctggatgctgctgatcaagcccttcatcctgagagccagccacagaaagagccagctgcaggccagcagaatccaggaggacgccaccgagaacatcgagggcgacagcagcagccccagcagcagaagcggccagagaaccagcgccgacacccacggcgccctggacgaccacggcgaggagttcaacttcggcgacgtgttcgtgcaccaggccatccacaccatcgagtactgcctgggctgcatcagcaacaccgccagctacctgagactgtgggccctgagcctggcccacgcccagctgagcgaggtgctgtggaccatggtgatgaacagcggcctgcagaccagaggctggggcggcatcgtgggcgtgttcatcatcttcgccgtgttcgccgtgctgaccgtggccatcctgctgatcatggagggcctgagcgccttcctgcacgccctgagactgcactgggtggagttccagaacaagttctacgtgggcgacggctacaagttcagccccttcagcttcaagcacatcctggacggcaccgccgaggagtag

SEQ ID NO: 73705 - DNA, 2523 bp, synthetic construct; identical to SEQ ID NO: 73704
  misc_feature 1..2523: note = Description of Artificial Sequence: Synthetic coding sequence
  source 1..2523: mol_type = other DNA

SEQ ID NO: 73706 - DNA, 2523 bp, synthetic construct; identical to SEQ ID NO: 73704
  misc_feature 1..2523: note = Description of Artificial Sequence: Synthetic coding sequence
  source 1..2523: mol_type = other DNA

SEQ ID NO: 73707 - DNA, 3108 bp, synthetic construct
  misc_feature 1..3108: note = Description of Artificial Sequence: Synthetic coding sequence
  source 1..3108: mol_type = other DNA
atgggcaaggccgagaactacgagctgtacagcgtggagctgggccccggccccggcggcgacatggccgccaagatgagcaagaagaagaaggccggcggcggcggcggcaagagaaaggagaagctggagaacatgaagaaggagatggagatcaacgaccaccagctgagcgtggccgagctggagcagaagtaccagaccagcgccaccaagggcctgagcgccagcctggccgccgagctgctgctgagagacggccccaacgccctgagaccccccagaggcacccccgagtacgtgaagttcgccagacagctggccggcggcctgcagtgcctgatgtgggtggccgccgccatctgcctgatcgccttcgccatccaggccagcgagggcgacctgaccaccgacgacaacctgtacctggccatcgccctgatcgccgtggtggtggtgaccggctgcttcggctactaccaggagttcaagagcaccaacatcatcgccagcttcaagaacctggtgccccagcaggccaccgtgatcagagacggcgacaagttccagatcaacgccgaccagctggtggtgggcgacctggtggagatgaagggcggcgacagagtgcccgccgacatcagaatcctggccgcccagggctgcaaggtggacaacagcagcctgaccggcgagagcgagccccagaccagaagccccgagtgcacccacgagagccccctggagaccagaaacatcgccttcttcagcaccatgtgcctggagggcaccgtgcagggcctggtggtgaacaccggcgacagaaccatcatcggcagaatcgccagcctggccagcggcgtggagaacgagaagacccccatcgccatcgagatcgagcacttcgtggacatcatcgccggcctggccatcctgttcggcgccaccttcttcatcgtggccatgtgcatcggctacaccttcctgagagccatggtgttcttcatggccatcgtggtggcctacgtgcccgagggcctgctggccaccgtgaccgtgtgcctgagcctgaccgccaagagactggccagcaagaactgcgtggtgaagaacctggaggccgtggagaccctgggcagcaccagcgtgatctgcagcgacaagaccggcaccctgacccagaacagaatgaccgtgagccacctgtggttcgacaaccacatccacaccgccgacaccaccgaggaccagagcggccagaccttcgaccagagcagcgagacctggagagccctgtgcagagtgctgaccctgtgcaacagagccgccttcaagagcggccaggacgccgtgcccgtgcccaagagaatcgtgatcggcgacgccagcgagaccgccctgctgaagttcagcgagctgaccctgggcaacgccatgggctacagagacagattccccaaggtgtgcgagatccccttcaacagcaccaacaagttccagctgagcatccacaccctggaggaccccagagaccccagacacctgctggtgatgaagggcgcccccgagagagtgctggagagatgcagcagcatcctgatcaagggccaggagctgcccctggacgagcagtggagagaggccttccagaccgcctacctgagcctgggcggcctgggcgagagagtgctgggcttctgccagctgtacctgaacgagaaggactacccccccggctacgccttcgacgtggaggccatgaacttccccagcagcggcctgtgcttcgccggcctggtgagcatgatcgacccccccagagccaccgtgcccgacgccgtgctgaagtgcagaaccgccggcatcagagtgatcatggtgaccggcgaccaccccatcaccgccaaggccatcgccgccagcgtgggcatcatcagcgagggcagcgagaccgtggaggacatcgccgccagactgagagtgcccgtggaccaggtgaacagaaaggacgccagagcctgcgtgatcaacggcatgcagctgaaggacatggaccccagcgagctggtggaggccctgagaacccaccccgagatggtgttcgccagaaccagcccccagcagaagctggtgatcgtggagagctgccagagactgggcgccatcgtggccgtgaccggcgacggcgtgaacgacagccccgccctgaagaaggccgacatcggcgtggccatgggcatcgccggcagcgacgccgccaagaacgccgccgacatgatcctgctggacgacaacttcgccagcatcgtgaccggcgtggagcagggcagactgatcttcgacaacctgaagaagagcatcgcctacaccctgaccaagaacatccccgagctgaccccctacctgatctacatcaccgtgagcgtgcccctgcccctgggctgcatcaccatcctgttcatcgagctgtgcaccgacatcttccccagcgtgagcctggcctacgagaaggccgagagcgacatcatgcacctgagacccagaaaccccaagagagacagactggtgaacgagcccctggccgcctacagctacttccagatcggcgccatccagagcttcgccggcttcaccgactacttcaccgccatggcccaggagggctggttccccctgctgtgcgtgggcctgagagcccagtgggaggaccaccacctgcaggacctgcaggacagctacggccaggagtggaccttcggccagagactgtaccagcagtacacctgctacaccgtgttcttcatcagcatcgaggtgtgccagatcgccgacgtgctgatcagaaagaccagaagactgagcgccttccagcagggcttcttcagaaacaagatcctggtgatcgccatcgtgttccaggtgtgcatcggctgcttcctgtgctactgccccggcatgcccaacatcttcaacttcatgcccatcagattccagtggtggctggtgcccctgccctacggcatcctgatcttcgtgtacgacgagatcagaaagctgggcgtgagatgctgccccggcagctggtgggaccaggagctgtactactag

SEQ ID NO: 73708 - DNA, 876 bp, synthetic construct
  misc_feature 1..876: note = Description of Artificial Sequence: Synthetic coding sequence
  source 1..876: mol_type = other DNA
atggccgccctgcaggagaagaagacctgcggccagagaatggaggagttccagagatactgctggaaccccgacaccggccagatgctgggcagaaccctgagcagatgggtgtggatcagcctgtactacgtggccttctacgtggtgatgaccggcctgttcgccctgtgcctgtacgtgctgatgcagaccgtggacccctacacccccgactaccaggaccagctgagaagccccggcgtgaccctgagacccgacgtgtacggcgagaagggcctggagatcgtgtacaacgtgagcgacaacagaacctgggccgacctgacccagaccctgcacgccttcctggccggctacagccccgccgcccaggaggacagcatcaactgcaccagcgagcagtacttcttccaggagagcttcagagcccccaaccacaccaagttcagctgcaagttcaccgccgacatgctgcagaactgcagcggcctggccgaccccaacttcggcttcgaggagggcaagccctgcttcatcatcaagatgaacagaatcgtgaagttcctgcccagcaacggcagcgcccccagagtggactgcgccttcctggaccagcccagagagctgggccagcccctgcaggtgaagtactacccccccaacggcaccttcagcctgcactacttcccctactacggcaagaaggcccagccccactacagcaaccccctggtggccgccaagctgctgaacatccccagaaacgccgaggtggccatcgtgtgcaaggtgatggccgagcacgtgaccttcaacaacccccacgacccctacgagggcaaggtggagttcaagctgaagatcgagaagtag

SEQ ID NO: 73709 - DNA, 1290 bp, synthetic construct
  misc_feature 1..1290: note = Description of Artificial Sequence: Synthetic coding sequence
  source 1..1290: mol_type = other DNA
atgcagctgagaaaccccgagctgcacctgggctgcgccctggccctgagattcctggccctggtgagctgggacatccccggcgccagagccctggacaacggcctggccagaacccccaccatgggctggctgcactgggagagattcatgtgcaacctggactgccaggaggagcccgacagctgcatcagcgagaagctgttcatggagatggccgagctgatggtgagcgagggctggaaggacgccggctacgagtacctgtgcatcgacgactgctggatggccccccagagagacagcgagggcagactgcaggccgacccccagagattcccccacggcatcagacagctggccaactacgtgcacagcaagggcctgaagctgggcatctacgccgacgtgggcaacaagacctgcgccggcttccccggcagcttcggctactacgacatcgacgcccagaccttcgccgactggggcgtggacctgctgaagttcgacggctgctactgcgacagcctggagaacctggccgacggctacaagcacatgagcctggccctgaacagaaccggcagaagcatcgtgtacagctgcgagtggcccctgtacatgtggcccttccagaagcccaactacaccgagatcagacagtactgcaaccactggagaaacttcgccgacatcgacgacagctggaagagcatcaagagcatcctggactggaccagcttcaaccaggagagaatcgtggacgtggccggccccggcggctggaacgaccccgacatgctggtgatcggcaacttcggcctgagctggaaccagcaggtgacccagatggccctgtgggccatcatggccgcccccctgttcatgagcaacgacctgagacacatcagcccccaggccaaggccctgctgcaggacaaggacgtgatcgccatcaaccaggaccccctgggcaagcagggctaccagctgagacagggcgacaacttcgaggtgtgggagagacccctgagcggcctggcctgggccgtggccatgatcaacagacaggagatcggcggccccagaagctacaccatcgccgtggccagcctgggcaagggcgtggcctgcaaccccgcctgcttcatcacccagctgctgcccgtgaagagaaagctgggcttctacgagtggaccagcagactgagaagccacatcaaccccaccggcaccgtgctgctgcagctggagaacaccatgcagatgagcctgaaggacctgctgtag

SEQ ID NO: 73710 - DNA, 3120 bp, synthetic construct
  misc_feature 1..3120: note = Description of Artificial Sequence: Synthetic coding sequence
  source 1..3120: mol_type = other DNA
atgcaccagaagacccccgagatctacagcgtggagctgagcggcaccaaggacatcgtgaagaccgacaagggcgacggcaaggagaagtacagaggcctgaagaacaactgcctggagctgaagaagaagaaccacaaggaggagttccagaaggagctgcacctggacgaccacaagctgagcaacagagagctggaggagaagtacggcaccgacatcatcatgggcctgagcagcaccagagccgccgagctgctggccagagacggccccaacagcctgaccccccccaagcagacccccgagatcgtgaagttcctgaagcagatggtgggcggcttcagcatcctgctgtgggtgggcgccttcctgtgctggatcgcctacggcatccagtacagcagcgacaagagcgccagcctgaacaacgtgtacctgggctgcgtgctgggcctggtggtgatcctgaccggcatcttcgcctactaccaggaggccaagagcaccaacatcatgagcagcttcaacaagatgatcccccagcaggccctggtgatcagagacagcgagaagaagaccatccccagcgagcagctggtggtgggcgacatcgtggaggtgaagggcggcgaccagatccccgccgacatcagagtgctgagcagccagggctgcagagtggacaacagcagcctgaccggcgagagcgagccccagcccagaagcagcgagttcacccacgagaaccccctggagaccaagaacatctgcttctacagcaccacctgcctggagggcaccgtgaccggcatggtgatcaacaccggcgacagaaccatcatcggccacatcgccagcctggccagcggcgtgggcaacgagaagacccccatcgccatcgagatcgagcacttcgtgcacatcgtggccggcgtggccgtgagcatcggcatcctgttcttcatcatcgccgtgagcctgaagtaccaggtgctggacagcatcatcttcctgatcggcatcatcgtggccaacgtgcccgagggcctgctggccaccgtgaccgtgaccctgagcctgaccgccaagagaatggccaagaagaactgcctggtgaagaacctggaggccgtggagaccctgggcagcaccagcatcatctgcagcgacaagaccggcaccctgacccagaacagaatgaccgtggcccacctgtggttcgacaaccagatcttcgtggccgacaccagcgaggaccacagcaaccaggtgttcgaccagagcagcagaacctgggccagcctgagcaagatcatcaccctgtgcaacagagccgagttcaagcccggccaggagaacgtgcccatcatgaagaaggccgtgatcggcgacgccagcgagaccgccctgctgaagttcagcgaggtgatcctgggcgacgtgatggagatcagaaagagaaacagaaaggtggccgagatccccttcaacagcaccaacaagttccagctgagcatccacgagatggacgacccccacggcaagagattcctgatggtgatgaagggcgcccccgagagaatcctggagaagtgcagcaccatcatgatcaacggcgaggagcaccccctggacaagagcaccgccaagaccttccacaccgcctacatggagctgggcggcctgggcgagagagtgctgggcttctgccacctgtacctgcccgccgacgagttccccgagacctacagcttcgacatcgacgccatgaacttccccaccagcaacctgtgcttcgtgggcctgctgagcatgatcgacccccccagaagcaccgtgcccgacgccgtgaccaagtgcagaagcgccggcatcaaggtgatcatggtgaccggcgaccaccccatcaccgccaaggccatcgccaagagcgtgggcatcatcagcgccaacagcgagaccgtggaggacatcgcccacagactgaacatcgccgtggagcaggtgaacaagagagacgccaaggccgccgtggtgaccggcatggagctgaaggacatgagcagcgagcagctggacgagatcctggccaactaccaggagatcgtgttcgccagaaccagcccccagcagaagctgatcatcgtggagggctgccagagacaggacgccgtggtggccgtgaccggcgacggcgtgaacgacagccccgccctgaagaaggccgacatcggcatcgccatgggcatcgccggcagcgacgccgccaagaacgccgccgacatggtgctgctggacgacaacttcgccagcatcgtgaccggcgtggaggagggcagactgatcttcgacaacctgaagaagaccatcgcctacagcctgaccaagaacatcgccgagctgtgccccttcctgatctacatcatcgtgggcctgcccctgcccatcggcaccatcaccatcctgttcatcgacctgggcaccgacatcatccccagcatcgccctggcctacgagaaggccgagagcgacatcatgaacagaaagcccagacacaagaacaaggacagactggtgaaccagcccctggccgtgtacagctacctgcacatcggcctgatgcaggccctgggcgccttcctggtgtacttcaccgtgtacgcccaggagggcttcctgcccagaaccctgatcaacctgagagtggagtgggagaaggactacgtgaacgacctgaaggacagctacggccaggagtggaccagataccagagagagtacctggagtggaccggctacaccgccttcttcgtgggcatcctggtgcagcagatcgccgacctgatcatcagaaagaccagaagaaacagcatcttccagcagggcctgttcagaaacaaggtgatctgggtgggcatcaccagccagatcatcatcggcctgatcctgagctacggcctgggcagcgtgaccgccctgagcttcaccatgctgagagcccagtactggttcgtggccgtgccccacgccatcctgatctgggtgtacgacgaggtgagaaagctgttcatcagactgtaccccggcagctggtgggacaagaacatgtactactag

SEQ ID NO: 73711 - DNA, 3072 bp, synthetic construct
  misc_feature 1..3072: note = Description of Artificial Sequence: Synthetic coding sequence
  source 1..3072: mol_type = other DNA
atgggcaagggcgtgggcagagacaagtacgagcccgccgccgtgagcgagcagggcgacaagaagggcaagaagggcaagaaggacagagacatggacgagctgaagaaggaggtgagcatggacgaccacaagctgagcctggacgagctgcacagaaagtacggcaccgacctgagcagaggcctgaccagcgccagagccgccgagatcctggccagagacggccccaacgccctgacccccccccccaccacccccgagtggatcaagttctgcagacagctgttcggcggcttcagcatgctgctgtggatcggcgccatcctgtgcttcctggcctacagcatccaggccgccaccgaggaggagccccagaacgacaacctgtacctgggcgtggtgctgagcgccgtggtgatcatcaccggctgcttcagctactaccaggaggccaagagcagcaagatcatggagagcttcaagaacatggtgccccagcaggccctggtgatcagaaacggcgagaagatgagcatcaacgccgaggaggtggtggtgggcgacctggtggaggtgaagggcggcgacagaatccccgccgacctgagaatcatcagcgccaacggctgcaaggtggacaacagcagcctgaccggcgagagcgagccccagaccagaagccccgacttcaccaacgagaaccccctggagaccagaaacatcgccttcttcagcaccaactgcgtggagggcaccgccagaggcatcgtggtgtacaccggcgacagaaccgtgatgggcagaatcgccaccctggccagcggcctggagggcggccagacccccatcgccgccgagatcgagcacttcatccacatcatcaccggcgtggccgtgttcctgggcgtgagcttcttcatcctgagcctgatcctggagtacacctggctggaggccgtgatcttcctgatcggcatcatcgtggccaacgtgcccgagggcctgctggccaccgtgaccgtgtgcctgaccctgaccgccaagagaatggccagaaagaactgcctggtgaagaacctggaggccgtggagaccctgggcagcaccagcaccatctgcagcgacaagaccggcaccctgacccagaacagaatgaccgtggcccacatgtggttcgacaaccagatccacgaggccgacaccaccgagaaccagagcggcgtgagcttcgacaagaccagcgccacctggctggccctgagcagaatcgccggcctgtgcaacagagccgtgttccaggccaaccaggagaacctgcccatcctgaagagagccgtggccggcgacgccagcgagagcgccctgctgaagtgcatcgagctgtgctgcggcagcgtgaaggagatgagagagagatacgccaagatcgtggagatccccttcaacagcaccaacaagtaccagctgagcatccacaagaaccccaacaccagcgagccccagcacctgctggtgatgaagggcgcccccgagagaatcctggacagatgcagcagcatcctgctgcacggcaaggagcagcccctggacgaggagctgaaggacgccttccagaacgcctacctggagctgggcggcctgggcgagagagtgctgggcttctgccacctgttcctgcccgacgagcagttccccgagggcttccagttcgacaccgacgacgtgaacttccccatcgacaacctgtgcttcgtgggcctgatcagcatgatcgacccccccagagccgccgtgcccgacgccgtgggcaagtgcagaagcgccggcatcaaggtgatcatggtgaccggcgaccaccccatcaccgccaaggccatcgccaagggcgtgggcatcatcagcgagggcaacgagaccgtggaggacatcgccgccagactgaacatccccgtgagccaggtgaaccccagagacgccaaggcctgcgtggtgcacggcagcgacctgaaggacatgaccagcgagcagctggacgacatcctgaagtaccacaccgagatcgtgttcgccagaaccagcccccagcagaagctgatcatcgtggagggctgccagagacagggcgccatcgtggccgtgaccggcgacggcgtgaacgacagccccgccctgaagaaggccgacatcggcgtggccatgggcatcgccggcagcgacgtgagcaagcaggccgccgacatgatcctgctggacgacaacttcgccagcatcgtgaccggcgtggaggagggcagactgatcttcgacaacctgaagaagagcatcgcctacaccctgaccagcaacatccccgagatcacccccttcctgatcttcatcatcgccaacatccccctgcccctgggcaccgtgaccatcctgtgcatcgacctgggcaccgacatggtgcccgccatcagcctggcctacgagcaggccgagagcgacatcatgaagagacagcccagaaaccccaagaccgacaagctggtgaacgagagactgatcagcatggcctacggccagatcggcatgatccaggccctgggcggcttcttcacctacttcgtgatcctggccgagaacggcttcctgcccatccacctgctgggcctgagagtggactgggacgacagatggatcaacgacgtggaggacagctacggccagcagtggacctacgagcagagaaagatcgtggagttcacctgccacaccgccttcttcgtgagcatcgtggtggtgcagtgggccgacctggtgatctgcaagaccagaagaaacagcgtgttccagcagggcatgaagaacaagatcctgatcttcggcctgttcgaggagaccgccctggccgccttcctgagctactgccccggcatgggcgtggccctgagaatgtaccccctgaagcccacctggtggttctgcgccttcccctacagcctgctgatcttcgtgtacgacgaggtgagaaagctgatcatcagaagaagacccggcggctgggtggagaaggagacctactactag

SEQ ID NO: 73712 - DNA, 2043 bp, synthetic construct
  misc_feature 1..2043: note = Description of Artificial Sequence: Synthetic coding sequence
  source 1..2043: mol_type = other DNA
ggcaaggaggtgggcagagacaagtacgagcccgccgccgtgagcgagcagggcgacaagaagggcaagaagggcaagaaggacagagacatggacgagctgaagaaggaggtgagcatggacgaccacaagctgagcctggacgagctgcacagaaagtacggcaccgacctgagcagaggcctgaccagcgccagagccgccgagatcctggccagagacggccccaacgccctgacccccccccccaccacccccgagtggatcaagttctgcagacagctgttcggcggcttcagcatgctgctgtggatcggcgccatcctgtgcttcctggcctacagcatccaggccgccaccgaggaggagccccagaacgacaacctgtacctgggcgtggtgctgagcgccgtggtgatcatcaccggctgcttcagctactaccaggaggccaagagcagcaagatcatggagagcttcaagaacatggtgccccagcaggccctggtgatcagaaacggcgagaagatgagcatcaacgccgaggaggtggtggtgggcgacctggtggaggtgaagggcggcgacagaatccccgccgacctgagaatcatcagcgccaacggctgcaaggtggacaacagcagcctgaccggcgagagcgagccccagaccagaagccccgacttcaccaacgagaaccccctggagaccagaaacatcgccttcttcagcaccaactgcgtggagggcaccgccagaggcatcgtggtgtacaccggcgacagaaccgtgatgggcagaatcgccaccctggccagcggcctggagggcggccagacccccatcgccgccgagatcgagcacttcatccacatcatcaccggcgtggccgtgttcctgggcgtgagcttcttcatcctgagcctgatcctggagtacacctggctggaggccgtgatcttcctgatcggcatcatcgtggccaacgtgcccgagggcctgctggccaccgtgaccgtgtgcctgaccctgaccgccaagagaatggccagaaagaactgcctggtgaagaacctggaggccgtggagaccctgggcagcaccagcaccatctgcagcgacaagaccggcaccctgacccagaacagaatgaccgtggcccacatgtggttcgacaaccagatccacgaggccgacaccaccgagaaccagagcggcgtgagcttcgacaagaccagcgccacctggctggccctgagcagaatcgccggcctgtgcaacagagccgtgttccaggccaaccaggagaacctgcccatcctgaagagagccgtggccggcgacgccagcgagagcgccctgctgaagtgcatcgagctgtgctgcggcagcgtgaaggagatgagagagagatacgccaagatcgtggagatccccttcaacagcaccaacaagtaccagctgagcatccacaagaaccccaacaccagcgagccccagcacctgctggtgatgaagggcgcccccgagagaatcctggacagatgcagcagcatcctgctgcacggcaaggagcagcccctggacgaggagctgaaggacgccttccagaacgcctacctggagctgggcggcctgggcgagagagtgctgggcttctgccacctgttcctgcccgacgagcagttccccgagggcttccagttcgacaccgacgacgtgaacttccccatcgacaacctgtgcttcgtgggcctgatcagcatgatcgacccccccagagccgccgtgcccgacgccgtgggcaagtgcagaagcgccggcatcaaggtgatcatggtgaccggcgaccaccccatcaccgccaaggccatcgccaagggcgtgggcatcatcagcgagggcaacgagcccatgagcagaggcaagagctggagcagccccgccacccagcccagcagcagcgtgagctggtggtgcagcggccccacctggagcagcgtgagacccggcggcatcagaagcagcagcagaggctag

SEQ ID NO: 73713 - DNA, 435 bp, synthetic construct
  misc_feature 1..435: note = Description of Artificial Sequence: Synthetic coding sequence
  source 1..435: mol_type = other DNA
atggacgagctgaagaaggaggtgagcatggacgaccacaagctgagcctggacgagctgcacagaaagtacggcaccgacctgagcagaggcctgaccagcgccagagccgccgagatcctggccagagacggccccaacgccctgacccccccccccaccacccccgagtggatcaagttctgcagacagctgttcggcggcttcagcatgctgctgtggatcggcgccatcctgtgcttcctggcctacagcatccaggccgccaccgaggaggagccccagaacgacaacctgtacctgggcgtggtgctgagcgccgtggtgatcatcaccggctgcttcagctactaccaggaggccaagagcagcaagatcatggagagcttcaagaacatggtgccccagcaggccctggtgatcagaaacggctag

SEQ ID NO: 73714 - DNA, 2979 bp, synthetic construct
  misc_feature 1..2979: note = Description of Artificial Sequence: Synthetic coding sequence
  source 1..2979: mol_type = other DNA
atggacgagctgaagaaggaggtgagcatggacgaccacaagctgagcctggacgagctgcacagaaagtacggcaccgacctgagcagaggcctgaccagcgccagagccgccgagatcctggccagagacggccccaacgccctgacccccccccccaccacccccgagtggatcaagttctgcagacagctgttcggcggcttcagcatgctgctgtggatcggcgccatcctgtgcttcctggcctacagcatccaggccgccaccgaggaggagccccagaacgacaacctgtacctgggcgtggtgctgagcgccgtggtgatcatcaccggctgcttcagctactaccaggaggccaagagcagcaagatcatggagagcttcaagaacatggtgccccagcaggccctggtgatcagaaacggcgagaagatgagcatcaacgccgaggaggtggtggtgggcgacctggtggaggtgaagggcggcgacagaatccccgccgacctgagaatcatcagcgccaacggctgcaaggtggacaacagcagcctgaccggcgagagcgagccccagaccagaagccccgacttcaccaacgagaaccccctggagaccagaaacatcgccttcttcagcaccaactgcgtggagggcaccgccagaggcatcgtggtgtacaccggcgacagaaccgtgatgggcagaatcgccaccctggccagcggcctggagggcggccagacccccatcgccgccgagatcgagcacttcatccacatcatcaccggcgtggccgtgttcctgggcgtgagcttcttcatcctgagcctgatcctggagtacacctggctggaggccgtgatcttcctgatcggcatcatcgtggccaacgtgcccgagggcctgctggccaccgtgaccgtgtgcctgaccctgaccgccaagagaatggccagaaagaactgcctggtgaagaacctggaggccgtggagaccctgggcagcaccagcaccatctgcagcgacaagaccggcaccctgacccagaacagaatgaccgtggcccacatgtggttcgacaaccagatccacgaggccgacaccaccgagaaccagagcggcgtgagcttcgacaagaccagcgccacctggctggccctgagcagaatcgccggcctgtgcaacagagccgtgttccaggccaaccaggagaacctgcccatcctgaagagagccgtggccggcgacgccagcgagagcgccctgctgaagtgcatcgagctgtgctgcggcagcgtgaaggagatgagagagagatacgccaagatcgtggagatccccttcaacagcaccaacaagtaccagctgagcatccacaagaaccccaacaccagcgagccccagcacctgctggtgatgaagggcgcccccgagagaatcctggacagatgcagcagcatcctgctgcacggcaaggagcagcccctggacgaggagctgaaggacgccttccagaacgcctacctggagctgggcggcctgggcgagagagtgctgggcttctgccacctgttcctgcccgacgagcagttccccgagggcttccagttcgacaccgacgacgtgaacttccccatcgacaacctgtgcttcgtgggcctgatcagcatgatcgacccccccagagccgccgtgcccgacgccgtgggcaagtgcagaagcgccggcatcaaggtgatcatggtgaccggcgaccaccccatcaccgccaaggccatcgccaagggcgtgggcatcatcagcgagggcaacgagaccgtggaggacatcgccgccagactgaacatccccgtgagccaggtgaaccccagagacgccaaggcctgcgtggtgcacggcagcgacctgaaggacatgaccagcgagcagctggacgacatcctgaagtaccacaccgagatcgtgttcgccagaaccagcccccagcagaagctgatcatcgtggagggctgccagagacagggcgccatcgtggccgtgaccggcgacggcgtgaacgacagccccgccctgaagaaggccgacatcggcgtggccatgggcatcgccggcagcgacgtgagcaagcaggccgccgacatgatcctgctggacgacaacttcgccagcatcgtgaccggcgtggaggagggcagactgatcttcgacaacctgaagaagagcatcgcctacaccctgaccagcaacatccccgagatcacccccttcctgatcttcatcatcgccaacatccccctgcccctgggcaccgtgaccatcctgtgcatcgacctgggcaccgacatggtgcccgccatcagcctggcctacgagcaggccgagagcgacatcatgaagagacagcccagaaaccccaagaccgacaagctggtgaacgagagactgatcagcatggcctacggccagatcggcatgatccaggccctgggcggcttcttcacctacttcgtgatcctggccgagaacggcttcctgcccatccacctgctgggcctgagagtggactgggacgacagatggatcaacgacgtggaggacagctacggccagcagtggacctacgagcagagaaagatcgtggagttcacctgccacaccgccttcttcgtgagcatcgtggtggtgcagtgggccgacctggtgatctgcaagaccagaagaaacagcgtgttccagcagggcatgaagaacaagatcctgatcttcggcctgttcgaggagaccgccctggccgccttcctgagctactgccccggcatgggcgtggccctgagaatgtaccccctgaagcccacctggtggttctgcgccttcccctacagcctgctgatcttcgtgtacgacgaggtgagaaagctgatcatcagaagaagacccggcggctgggtggagaaggagacctactactag

SEQ ID NO: 73715 - DNA, 321 bp, synthetic construct
  misc_feature 1..321: note = Description of Artificial Sequence: Synthetic coding sequence
  source 1..321: mol_type = other DNA
atggacgagctgaagaaggaggtgagcatggacgaccacaagctgagcctggacgagctgcacagaaagtacggcaccgacctgagcagaggcctgaccagcgccagagccgccgagatcctggccagagacggccccaacgccctgacccccccccccaccacccccgagtggatcaagttctgcagacagctgttcggcggcttcagcatgctgctgtggatcggcgccatcctgtgcttcctggcctacagcatccaggccgccaccgaggaggagccccagaacgacaacctgtacctgggcgtggtgctgagctag

SEQ ID NO: 73716 - DNA, 474 bp, synthetic construct
  misc_feature 1..474: note = Description of Artificial Sequence: Synthetic coding sequence
  source 1..474: mol_type = other DNA
agacagcccagaaaccccaagaccgacaagctggtgaacgagagactgatcagcatggcctacggccagatcggcatgatccaggccctgggcggcttcttcacctacttcgtgatcctggccgagaacggcttcctgcccatccacctgctgggcctgagagtggactgggacgacagatggatcaacgacgtggaggacagctacggccagcagtggacctacgagcagagaaagatcgtggagttcacctgccacaccgccttcttcgtgagcatcgtggtggtgcagtgggccgacctggtgatctgcaagaccagaagaaacagcgtgttccagcagggcatgaagaacaagatcctgatcttcggcctgttcgaggagaccgccctggccgccttcctgagctactgccccggcatgggcgtggccctgagaatgtaccccctgaagaccctgacccagtacagctag

SEQ ID NO: 73717 - DNA, 480 bp, synthetic construct
  misc_feature 1..480: note = Description of Artificial Sequence: Synthetic coding sequence
  source 1..480: mol_type = other DNA
atgaagagacagcccagaaaccccaagaccgacaagctggtgaacgagagactgatcagcatggcctacggccagatcggcatgatccaggccctgggcggcttcttcacctacttcgtgatcctggccgagaacggcttcctgcccatccacctgctgggcctgagagtggactgggacgacagatggatcaacgacgtggaggacagctacggccagcagtggacctacgagcagagaaagatcgtggagttcacctgccacaccgccttcttcgtgagcatcgtggtggtgcagtgggccgacctggtgatctgcaagaccagaagaaacagcgtgttccagcagggcatgaagaacaagatcctgatcttcggcctgttcgaggagaccgccctggccgccttcctgagctactgccccggcatgggcgtggccctgagaatgtaccccctgaagaccctgacccagtacagctag

SEQ ID NO: 73718 - DNA, 3072 bp, synthetic construct
  misc_feature 1..3072: note = Description of Artificial Sequence: Synthetic coding sequence
  source 1..3072: mol_type = other DNA
atggccttcaaggtgggcagagacaagtacgagcccgccgccgtgagcgagcagggcgacaagaagggcaagaagggcaagaaggacagagacatggacgagctgaagaaggaggtgagcatggacgaccacaagctgagcctggacgagctgcacagaaagtacggcaccgacctgagcagaggcctgaccagcgccagagccgccgagatcctggccagagacggccccaacgccctgacccccccccccaccacccccgagtggatcaagttctgcagacagctgttcggcggcttcagcatgctgctgtggatcggcgccatcctgtgcttcctggcctacagcatccaggccgccaccgaggaggagccccagaacgacaacctgtacctgggcgtggtgctgagcgccgtggtgatcatcaccggctgcttcagctactaccaggaggccaagagcagcaagatcatggagagcttcaagaacatggtgccccagcaggccctggtgatcagaaacggcgagaagatgagcatcaacgccgaggaggtggtggtgggcgacctggtggaggtgaagggcggcgacagaatccccgccgacctgagaatcatcagcgccaacggctgcaaggtggacaacagcagcctgaccggcgagagcgagccccagaccagaagccccgacttcaccaacgagaaccccctggagaccagaaacatcgccttcttcagcaccaactgcgtggagggcaccgccagaggcatcgtggtgtacaccggcgacagaaccgtgatgggcagaatcgccaccctggccagcggcctggagggcggccagacccccatcgccgccgagatcgagcacttcatccacatcatcaccggcgtggccgtgttcctgggcgtgagcttcttcatcctgagcctgatcctggagtacacctggctggaggccgtgatcttcctgatcggcatcatcgtggccaacgtgcccgagggcctgctggccaccgtgaccgtgtgcctgaccctgaccgccaagagaatggccagaaagaactgcctggtgaagaacctggaggccgtggagaccctgggcagcaccagcaccatctgcagcgacaagaccggcaccctgacccagaacagaatgaccgtggcccacatgtggttcgacaaccagatccacgaggccgacaccaccgagaaccagagcggcgtgagcttcgacaagaccagcgccacctggctggccctgagcagaatcgccggcctgtgcaacagagccgtgttccaggccaaccaggagaacctgcccatcctgaagagagccgtggccggcgacgccagcgagagcgccctgctgaagtgcatcgagctgtgctgcggcagcgtgaaggagatgagagagagatacgccaagatcgtggagatccccttcaacagcaccaacaagtaccagctgagcatccacaagaaccccaacaccagcgagccccagcacctgctggtgatgaagggcgcccccgagagaatcctggacagatgcagcagcatcctgctgcacggcaaggagcagcccctggacgaggagctgaaggacgccttccagaacgcctacctggagctgggcggcctgggcgagagagtgctgggcttctgccacctgttcctgcccgacgagcagttccccgagggcttccagttcgacaccgacgacgtgaacttccccatcgacaacctgtgcttcgtgggcctgatcagcatgatcgacccccccagagccgccgtgcccgacgccgtgggcaagtgcagaagcgccggcatcaaggtgatcatggtgaccggcgaccaccccatcaccgccaaggccatcgccaagggcgtgggcatcatcagcgagggcaacgagaccgtggaggacatcgccgccagactgaacatccccgtgagccaggtgaaccccagagacgccaaggcctgcgtggtgcacggcagcgacctgaaggacatgaccagcgagcagctggacgacatcctgaagtaccacaccgagatcgtgttcgccagaaccagcccccagcagaagctgatcatcgtggagggctgccagagacagggcgccatcgtggccgtgaccggcgacggcgtgaacgacagccccgccctgaagaaggccgacatcggcgtggccatgggcatcgccggcagcgacgtgagcaagcaggccgccgacatgatcctgctggacgacaacttcgccagcatcgtgaccggcgtggaggagggcagactgatcttcgacaacctgaagaagagcatcgcctacaccctgaccagcaacatccccgagatcacccccttcctgatcttcatcatcgccaacatccccctgcccctgggcaccgtgaccatcctgtgcatcgacctgggcaccgacatggtgcccgccatcagcctggcctacgagcaggccgagagcgacatcatgaagagacagcccagaaaccccaagaccgacaagctggtgaacgagagactgatcagcatggcctacggccagatcggcatgatccaggccctgggcggcttcttcacctacttcgtgatcctggccgagaacggcttcctgcccatccacctgctgggcctgagagtggactgggacgacagatggatcaacgacgtggaggacagctacggccagcagtggacctacgagcagagaaagatcgtggagttcacctgccacaccgccttcttcgtgagcatcgtggtggtgcagtgggccgacctggtgatctgcaagaccagaagaaacagcgtgttccagcagggcatgaagaacaagatcctgatcttcggcctgttcgaggagaccgccctggccgccttcctgagctactgccccggcatgggcgtggccctgagaatgtaccccctgaagcccacctggtggttctgcgccttcccctacagcctgctgatcttcgtgtacgacgaggtgagaaagctgatcatcagaagaagacccggcggctgggtggagaaggagacctactactag

SEQ ID NO: 73719 - DNA, 3063 bp, synthetic construct
  misc_feature 1..3063: note = Description of Artificial Sequence: Synthetic coding sequence
  source 1..3063: mol_type = other DNA
atgggcagaggcgccggcagagagtacagccccgccgccaccaccgccgagaacggcggcggcaagaagaagcagaaggagaaggagctggacgagctgaagaaggaggtggccatggacgaccacaagctgagcctggacgagctgggcagaaagtaccaggtggacctgagcaagggcctgaccaaccagagagcccaggacgtgctggccagagacggccccaacgccctgacccccccccccaccacccccgagtgggtgaagttctgcagacagctgttcggcggcttcagcatcctgctgtggatcggcgccatcctgtgcttcctggcctacggcatccaggccgccatggaggacgagcccagcaacgacaacctgtacctgggcgtggtgctggccgccgtggtgatcgtgaccggctgcttcagctactaccaggaggccaagagcagcaagatcatggacagcttcaagaacatggtgccccagcaggccctggtgatcagagagggcgagaagatgcagatcaacgccgaggaggtggtggtgggcgacctggtggaggtgaagggcggcgacagagtgcccgccgacctgagaatcatcagcagccacggctgcaaggtggacaacagcagcctgaccggcgagagcgagccccagaccagaagccccgagttcacccacgagaaccccctggagaccagaaacatctgcttcttcagcaccaactgcgtggagggcaccgccagaggcatcgtgatcgccaccggcgacagaaccgtgatgggcagaatcgccaccctggccagcggcctggaggtgggcagaacccccatcgccatggagatcgagcacttcatccagctgatcaccggcgtggccgtgttcctgggcgtgagcttcttcgtgctgagcctgatcctgggctacagctggctggaggccgtgatcttcctgatcggcatcatcgtggccaacgtgcccgagggcctgctggccaccgtgaccgtgtgcctgaccctgaccgccaagagaatggccagaaagaactgcctggtgaagaacctggaggccgtggagaccctgggcagcaccagcaccatctgcagcgacaagaccggcaccctgacccagaacagaatgaccgtggcccacatgtggttcgacaaccagatccacgaggccgacaccaccgaggaccagagcggcgccaccttcgacaagagaagccccacctggaccgccctgagcagaatcgccggcctgtgcaacagagccgtgttcaaggccggccaggagaacatcagcgtgagcaagagagacaccgccggcgacgccagcgagagcgccctgctgaagtgcatcgagctgagctgcggcagcgtgagaaagatgagagacagaaaccccaaggtggccgagatccccttcaacagcaccaacaagtaccagctgagcatccacgagagagaggacagcccccagagccacgtgctggtgatgaagggcgcccccgagagaatcctggacagatgcagcaccatcctggtgcagggcaaggagatccccctggacaaggagatgcaggacgccttccagaacgcctacatggagctgggcggcctgggcgagagagtgctgggcttctgccagctgaacctgcccagcggcaagttccccagaggcttcaagttcgacaccgacgagctgaacttccccaccgagaagctgtgcttcgtgggcctgatgagcatgatcgacccccccagagccgccgtgcccgacgccgtgggcaagtgcagaagcgccggcatcaaggtgatcatggtgaccggcgaccaccccatcaccgccaaggccatcgccaagggcgtgggcatcatcagcgagggcaacgagaccgtggaggacatcgccgccagactgaacatccccatgagccaggtgaaccccagagaggccaaggcctgcgtggtgcacggcagcgacctgaaggacatgaccagcgagcagctggacgagatcctgaagaaccacaccgagatcgtgttcgccagaaccagcccccagcagaagctgatcatcgtggagggctgccagagacagggcgccatcgtggccgtgaccggcgacggcgtgaacgacagccccgccctgaagaaggccgacatcggcatcgccatgggcatcagcggcagcgacgtgagcaagcaggccgccgacatgatcctgctggacgacaacttcgccagcatcgtgaccggcgtggaggagggcagactgatcttcgacaacctgaagaagagcatcgcctacaccctgaccagcaacatccccgagatcacccccttcctgctgttcatcatcgccaacatccccctgcccctgggcaccgtgaccatcctgtgcatcgacctgggcaccgacatggtgcccgccatcagcctggcctacgaggccgccgagagcgacatcatgaagagacagcccagaaacagccagaccgacaagctggtgaacgagagactgatcagcatggcctacggccagatcggcatgatccaggccctgggcggcttcttcacctacttcgtgatcctggccgagaacggcttcctgcccagcagactgctgggcatcagactggactgggacgacagaaccatgaacgacctggaggacagctacggccaggagtggacctacgagcagagaaaggtggtggagttcacctgccacaccgccttcttcgccagcatcgtggtggtgcagtgggccgacctgatcatctgcaagaccagaagaaacagcgtgttccagcagggcatgaagaacaagatcctgatcttcggcctgctggaggagaccgccctggccgccttcctgagctactgccccggcatgggcgtggccctgagaatgtaccccctgaaggtgacctggtggttctgcgccttcccctacagcctgctgatcttcatctacgacgaggtgagaaagctgatcctgagaagataccccggcggctgggtggagaaggagacctactactag

SEQ ID NO: 73720 - DNA, 3030 bp, synthetic construct
  misc_feature 1..3030: note = Description of Artificial Sequence: Synthetic coding sequence
  source 1..3030: mol_type = other DNA
atgggcagaggcgccggcagagagtacagccccgccgccaccaccgccgagaacggcggcggcaagaagaagcagaaggagaaggagctggacgagctgaagaaggaggtggccatggacgaccacaagctgagcctggacgagctgggcagaaagtaccaggtggacctgagcaagggcctgaccaaccagagagcccaggacgtgctggccagagacggccccaacgccctgacccccccccccaccacccccgagtgggtgaagttctgcagacagctgttcggcggcttcagcatcctgctgtggatcggcgccatcctgtgcttcctggcctacggcatccaggccgccatggaggacgagcccagcaacgacaacctgtacctgggcgtggtgctggccgccgtggtgatcgtgaccggctgcttcagctactaccaggaggccaagagcagcaagatcatggacagcttcaagaacatggtgccccagcaggccctggtgatcagagagggcgagaagatgcagatcaacgccgaggaggtggtggtgggcgacctggtggaggtgaagggcggcgacagagtgcccgccgacctgagaatcatcagcagccacggctgcaaggtggacaacagcagcctgaccggcgagagcgagccccagaccagaagccccgagttcacccacgagaaccccctggagaccagaaacatctgcttcttcagcaccaactgcgtggagggcaccgccagaggcatcgtgatcgccaccggcgacagaaccgtgatgggcagaatcgccaccctggccagcggcctggaggtgggcagaacccccatcgccatggagatcgagcacttcatccagctgatcaccggcgtggccgtgttcctgggcgtgagcttcttcgtgctgagcctgatcctgggctacagctggctggaggccgtgatcttcctgatcggcatcatcgtggccaacgtgcccgagggcctgctggccaccgtgaccgtgtgcctgaccctgaccgccaagagaatggccagaaagaactgcctggtgaagaacctggaggccgtggagaccctgggcagcaccagcaccatctgcagcgacaagaccggcaccctgacccagaacagaatgaccgtggcccacatgtggttcgacaaccagatccacgaggccgacaccaccgaggaccagagcggcgccaccttcgacaagagaagccccacctggaccgccctgagcagaatcgccggcctgtgcaacagagccgtgttcaaggccggccaggagaacatcagcgtgagcaagagagacaccgccggcgacgccagcgagagcgccctgctgaagtgcatcgagctgagctgcggcagcgtgagaaagatgagagacagaaaccccaaggtggccgagatccccttcaacagcaccaacaagtaccagctgagcatccacgagagagaggacagcccccagagccacgtgctggtgatgaagggcgcccccgagagaatcctggacagatgcagcaccatcctggtgcagggcaaggagatccccctggacaaggagatgcaggacgccttccagaacgcctacatggagctgggcggcctgggcgagagagtgctgggcttctgccagctgaacctgcccagcggcaagttccccagaggcttcaagttcgacaccgacgagctgaacttccccaccgagaagctgtgcttcgtgggcctgatgagcatgatcgacccccccagagccgccgtgcccgacgccgtgggcaagtgcagaagcgccggcatcaaggtgatcatggtgaccggcgaccaccccatcaccgccaaggccatcgccaagggcgtgggcatcatcagcgagggcaacgagaccgtggaggacatcgccgccagactgaacatccccatgagccaggtgaaccccagagaggccaaggcctgcgtggtgcacggcagcgacctgaaggacatgaccagcgagcagctggacgagatcctgaagaaccacaccgagatcgtgttcgccagaaccagcccccagcagaagctgatcatcgtggagggctgccagagacagggcgccatcgtggccgtgaccggcgacggcgtgaacgacagccccgccctgaagaaggccgacatcggcatcgccatgggcatcagcggcagcgacgtgagcaagcaggccgccgacatgatcctgctggacgacaacttcgccagcatcgtgaccggcgtggaggagggcagactgatcttcgacaacctgaagaagagcatcgcctacaccctgaccagcaacatccccgagatcacccccttcctgctgttcatcatcgccaacatccccctgcccctgggcaccgtgaccatcctgtgcatcgacctgggcaccgacatggtgcccgccatcagcctggcctacgaggccgccgagagcgacatcatgaagagacagcccagaaacagccagaccgacaagctggtgaacgagagactgatcagcatggcctacggccagatcggcatgatccaggccctgggcggcttcttcacctacttcgtgatcctggccgagaacggcttcctgcccagcagactgctgggcatcagactggactgggacgacagaaccatgaacgacctggaggacagctacggccaggagtggacctacgagcagagaaaggtggtggagttcacctgccacaccgccttcttcgccagcatcgtggtggtgcagtgggccgacctgatcatctgcaagaccagaagaaacagcgtgttccagcagggcatgaagaacaagatcctgatcttcggcctgctggaggagaccgccctggccgccttcctgagctactgccccggcatgggcgtggccctgagaatgtaccccctgaacctgctgatcttcatctacgacgaggtgagaaagctgatcctgagaagataccccggcggctgggtggagaaggagacctactactag

SEQ ID NO: 73721 - DNA, 2172 bp, synthetic construct
  misc_feature 1..2172: note = Description of Artificial Sequence: Synthetic coding sequence
  source 1..2172: mol_type = other DNA
atgctgagcagcgccctggccctgagcggcgccctggtgaagagactgaagccccccaacggccacttcatcctgaccgacacccacgacctgaacaccagcaagatcgagcacagcctgttcaccgtgtgcctgaccctgaccgccaagagaatggccagaaagaactgcctggtgaagaacctggaggccgtggagaccctgggcagcaccagcaccatctgcagcgacaagaccggcaccctgacccagaacagaatgaccgtggcccacatgtggttcgacaaccagatccacgaggccgacaccaccgaggaccagagcggcgccaccttcgacaagagaagccccacctggaccgccctgagcagaatcgccggcctgtgcaacagagccgtgttcaaggccggccaggagaacatcagcgtgagcaagagagacaccgccggcgacgccagcgagagcgccctgctgaagtgcatcgagctgagctgcggcagcgtgagaaagatgagagacagaaaccccaaggtggccgagatccccttcaacagcaccaacaagtaccagctgagcatccacgagagagaggacagcccccagagccacgtgctggtgatgaagggcgcccccgagagaatcctggacagatgcagcaccatcctggtgcagggcaaggagatccccctggacaaggagatgcaggacgccttccagaacgcctacatggagctgggcggcctgggcgagagagtgctgggcttctgccagctgaacctgcccagcggcaagttccccagaggcttcaagttcgacaccgacgagctgaacttccccaccgagaagctgtgcttcgtgggcctgatgagcatgatcgacccccccagagccgccgtgcccgacgccgtgggcaagtgcagaagcgccggcatcaaggtgatcatggtgaccggcgaccaccccatcaccgccaaggccatcgccaagggcgtgggcatcatcagcgagggcaacgagaccgtggaggacatcgccgccagactgaacatccccatgagccaggtgaaccccagagaggccaaggcctgcgtggtgcacggcagcgacctgaaggacatgaccagcgagcagctggacgagatcctgaagaaccacaccgagatcgtgttcgccagaaccagcccccagcagaagctgatcatcgtggagggctgccagagacagggcgccatcgtggccgtgaccggcgacggcgtgaacgacagccccgccctgaagaaggccgacatcggcatcgccatgggcatcagcggcagcgacgtgagcaagcaggccgccgacatgatcctgctggacgacaacttcgccagcatcgtgaccggcgtggaggagggcagactgatcttcgacaacctgaagaagagcatcgcctacaccctgaccagcaacatccccgagatcacccccttcctgctgttcatcatcgccaacatccccctgcccctgggcaccgtgaccatcctgtgcatcgacctgggcaccgacatggtgcccgccatcagcctggcctacgaggccgccgagagcgacatcatgaagagacagcccagaaacagccagaccgacaagctggtgaacgagagactgatcagcatggcctacggccagatcggcatgatccaggccctgggcggcttcttcacctacttcgtgatcctggccgagaacggcttcctgcccagcagactgctgggcatcagactggactgggacgacagaaccatgaacgacctggaggacagctacggccaggagtggacctacgagcagagaaaggtggtggagttcacctgccacaccgccttcttcgccagcatcgtggtggtgcagtgggccgacctgatcatctgcaagaccagaagaaacagcgtgttccagcagggcatgaagaacaagatcctgatcttcggcctgctggaggagaccgccctggccgccttcctgagctactgccccggcatgggcgtggccctgagaatgtaccccctgaaggtgacctggtggttctgcgccttcccctacagcctgctgatcttcatctacgacgaggtgagaaagctgatcctgagaagataccccggcggctgggtggagaaggagacctactactag

SEQ ID NO: 73722 - DNA, 2145 bp, synthetic construct
  misc_feature 1..2145: note = Description of Artificial Sequence: Synthetic coding sequence
  source 1..2145: mol_type = other DNA
tgacagctgatcaccggcgtggccgtgttcctgggcgtgagcttcttcgtgctgagcctgatcctgggctacagctggctggaggccgtgatcttcctgatcggcatcatcgtggccaacgtgcccgagggcctgctggccaccgtgaccgtgtgcctgaccctgaccgccaagagaatggccagaaagaactgcctggtgaagaacctggaggccgtggagaccctgggcagcaccagcaccatctgcagcgacaagaccggcaccctgacccagaacagaatgaccgtggcccacatgtggttcgacaaccagatccacgaggccgacaccaccgaggaccagagcggcgccaccttcgacaagagaagccccacctggaccgccctgagcagaatcgccggcctgtgcaacagagccgtgttcaaggccggccaggagaacatcagcgtgagcaagagagacaccgccggcgacgccagcgagagcgccctgctgaagtgcatcgagctgagctgcggcagcgtgagaaagatgagagacagaaaccccaaggtggccgagatccccttcaacagcaccaacaagtaccagctgagcatccacgagagagaggacagcccccagagccacgtgctggtgatgaagggcgcccccgagagaatcctggacagatgcagcaccatcctggtgcagggcaaggagatccccctggacaaggagatgcaggacgccttccagaacgcctacatggagctgggcggcctgggcgagagagtgctgggcttctgccagctgaacctgcccagcggcaagttccccagaggcttcaagttcgacaccgacgagctgaacttccccaccgagaagctgtgcttcgtgggcctgatgagcatgatcgacccccccagagccgccgtgcccgacgccgtgggcaagtgcagaagcgccggcatcaaggtgatcatggtgaccggcgaccaccccatcaccgccaaggccatcgccaagggcgtgggcatcatcagcgagggcaacgagaccgtggaggacatcgccgccagactgaacatccccatgagccaggtgaaccccagagaggccaaggcctgcgtggtgcacggcagcgacctgaaggacatgaccagcgagcagctggacgagatcctgaagaaccacaccgagatcgtgttcgccagaaccagcccccagcagaagctgatcatcgtggagggctgccagagacagggcgccatcgtggccgtgaccggcgacggcgtgaacgacagccccgccctgaagaaggccgacatcggcatcgccatgggcatcagcggcagcgacgtgagcaagcaggccgccgacatgatcctgctggacgacaacttcgccagcatcgtgaccggcgtggaggagggcagactgatcttcgacaacctgaagaagagcatcgcctacaccctgaccagcaacatccccgagatcacccccttcctgctgttcatcatcgccaacatccccctgcccctgggcaccgtgaccatcctgtgcatcgacctgggcaccgacatggtgcccgccatcagcctggcctacgaggccgccgagagcgacatcatgaagagacagcccagaaacagccagaccgacaagctggtgaacgagagactgatcagcatggcctacggccagatcgagaacggcttcctgcccagcagactgctgggcatcagactggactgggacgacagaaccatgaacgacctggaggacagctacggccaggagtggacctacgagcagagaaaggtggtggagttcacctgccacaccgccttcttcgccagcatcgtggtggtgcagtgggccgacctgatcatctgcaagaccagaagaaacagcgtgttccagcagggcatgaagaacaagatcctgatcttcggcctgctggaggagaccgccctggccgccttcctgagctactgccccggcatgggcgtggccctgagaatgtaccccctgaaggtgacctggtggttctgcgccttcccctacagcctgctgatcttcatctacgacgaggtgagaaagctgatcctgagaagataccccggcggctgggtggagaaggagacctactactag

SEQ ID NO: 73723 - DNA, 819 bp, synthetic construct
  misc_feature 1..819: note = Description of Artificial Sequence: Synthetic coding sequence
  source 1..819: mol_type = other DNA
atggacagcttcaagaacatggtgccccagcaggccctggtgatcagagagggcgagaagatgcagatcaacgccgaggaggtggtggtgggcgacctggtggaggtgaagggcggcgacagagtgcccgccgacctgagaatcatcagcagccacggctgcaaggtggacaacagcagcctgaccggcgagagcgagccccagaccagaagccccgagttcacccacgagaaccccctggagaccagaaacatctgcttcttcagcaccaactgcgtggagggcaccgccagaggcatcgtgatcgccaccggcgacagaaccgtgatgggcagaatcgccaccctggccagcggcctggaggtgggcagaacccccatcgccatggagatcgagcacttcatccagctgatcaccggcgtggccgtgttcctgggcgtgagcttcttcgtgctgagcctgatcctgggctacagctggctggaggccgtgatcttcctgatcggcatcatcgtggccaacgtgcccgagggcctgctggccaccgtgaccgtgtgcctgaccctgaccgccaagagaatggccagaaagaactgcctggtgaagaacctggaggccgtggagaccctgggcagcaccagcaccatctgcagcgacaagaccggcaccctgacccagaacagaatgaccgtggcccacatgtggttcgacaaccagatccacgaggccgacaccaccgaggaccagagcggcgactgggtgctgcagagaggctggatcggcctggaggaggccgagggcagcggcgtggtgggctag

SEQ ID NO: 73724 - DNA, 3042 bp, synthetic construct
  misc_feature 1..3042: note = Description of Artificial Sequence: Synthetic coding sequence
  source 1..3042: mol_type = other DNA
atgggcgacaagaaggacgacaaggacagccccaagaagaacaagggcaaggagagaagagacctggacgacctgaagaaggaggtggccatgaccgagcacaagatgagcgtggaggaggtgtgcagaaagtacaacaccgactgcgtgcagggcctgacccacagcaaggcccaggagatcctggccagagacggccccaacgccctgacccccccccccaccacccccgagtgggtgaagttctgcagacagctgttcggcggcttcagcatcctgctgtggatcggcgccatcctgtgcttcctggcctacggcatccaggccggcaccgaggacgaccccagcggcgacaacctgtacctgggcatcgtgctggccgccgtggtgatcatcaccggctgcttcagctactaccaggaggccaagagcagcaagatcatggagagcttcaagaacatggtgccccagcaggccctggtgatcagagagggcgagaagatgcaggtgaacgccgaggaggtggtggtgggcgacctggtggagatcaagggcggcgacagagtgcccgccgacctgagaatcatcagcgcccacggctgcaaggtggacaacagcagcctgaccggcgagagcgagccccagaccagaagccccgactgcacccacgacaaccccctggagaccagaaacatcaccttcttcagcaccaactgcgtggagggcaccgccagaggcgtggtggtggccaccggcgacagaaccgtgatgggcagaatcgccaccctggccagcggcctggaggtgggcaagacccccatcgccatcgagatcgagcacttcatccagctgatcaccggcgtggccgtgttcctgggcgtgagcttcttcatcctgagcctgatcctgggctacacctggctggaggccgtgatcttcctgatcggcatcatcgtggccaacgtgcccgagggcctgctggccaccgtgaccgtgtgcctgaccctgaccgccaagagaatggccagaaagaactgcctggtgaagaacctggaggccgtggagaccctgggcagcaccagcaccatctgcagcgacaagaccggcaccctgacccagaacagaatgaccgtggcccacatgtggttcgacaaccagatccacgaggccgacaccaccgaggaccagagcggcaccagcttcgacaagagcagccacacctgggtggccctgagccacatcgccggcctgtgcaacagagccgtgttcaagggcggccaggacaacatccccgtgctgaagagagacgtggccggcgacgccagcgagagcgccctgctgaagtgcatcgagctgagcagcggcagcgtgaagctgatgagagagagaaacaagaaggtggccgagatccccttcaacagcaccaacaagtaccagctgagcatccacgagaccgaggaccccaacgacaacagatacctgctggtgatgaagggcgcccccgagagaatcctggacagatgcagcaccatcctgctgcagggcaaggagcagcccctggacgaggagatgaaggaggccttccagaacgcctacctggagctgggcggcctgggcgagagagtgctgggcttctgccactactacctgcccgaggagcagttccccaagggcttcgccttcgactgcgacgacgtgaacttcaccaccgacaacctgtgcttcgtgggcctgatgagcatgatcgacccccccagagccgccgtgcccgacgccgtgggcaagtgcagaagcgccggcatcaaggtgatcatggtgaccggcgaccaccccatcaccgccaaggccatcgccaagggcgtgggcatcatcagcgagggcaacgagaccgtggaggacatcgccgccagactgaacatccccgtgagccaggtgaaccccagagacgccaaggcctgcgtgatccacggcaccgacctgaaggacttcaccagcgagcagatcgacgagatcctgcagaaccacaccgagatcgtgttcgccagaaccagcccccagcagaagctgatcatcgtggagggctgccagagacagggcgccatcgtggccgtgaccggcgacggcgtgaacgacagccccgccctgaagaaggccgacatcggcgtggccatgggcatcgccggcagcgacgtgagcaagcaggccgccgacatgatcctgctggacgacaacttcgccagcatcgtgaccggcgtggaggagggcagactgatcttcgacaacctgaagaagagcatcgcctacaccctgaccagcaacatccccgagatcacccccttcctgctgttcatcatggccaacatccccctgcccctgggcaccatcaccatcctgtgcatcgacctgggcaccgacatggtgcccgccatcagcctggcctacgaggccgccgagagcgacatcatgaagagacagcccagaaaccccagaaccgacaagctggtgaacgagagactgatcagcatggcctacggccagatcggcatgatccaggccctgggcggcttcttcagctacttcgtgatcctggccgagaacggcttcctgcccggcaacctggtgggcatcagactgaactgggacgacagaaccgtgaacgacctggaggacagctacggccagcagtggacctacgagcagagaaaggtggtggagttcacctgccacaccgccttcttcgtgagcatcgtggtggtgcagtgggccgacctgatcatctgcaagaccagaagaaacagcgtgttccagcagggcatgaagaacaagatcctgatcttcggcctgttcgaggagaccgccctggccgccttcctgagctactgccccggcatggacgtggccctgagaatgtaccccctgaagcccagctggtggttctgcgccttcccctacagcttcctgatcttcgtgtacgacgagatcagaaagctgatcctgagaagaaaccccggcggctgggtggagaaggagacctactactag

SEQ ID NO: 73725 - DNA, 2952 bp, synthetic construct
  misc_feature 1..2952: note = Description of Artificial Sequence: Synthetic coding sequence
  source 1..2952: mol_type = other DNA
atgaccgagcacaagatgagcgtggaggaggtgtgcagaaagtacaacaccgactgcgtgcagggcctgacccacagcaaggcccaggagatcctggccagagacggccccaacgccctgacccccccccccaccacccccgagtgggtgaagttctgcagacagctgttcggcggcttcagcatcctgctgtggatcggcgccatcctgtgcttcctggcctacggcatccaggccggcaccgaggacgaccccagcggcgacaacctgtacctgggcatcgtgctggccgccgtggtgatcatcaccggctgcttcagctactaccaggaggccaagagcagcaagatcatggagagcttcaagaacatggtgccccagcaggccctggtgatcagagagggcgagaagatgcaggtgaacgccgaggaggtggtggtgggcgacctggtggagatcaagggcggcgacagagtgcccgccgacctgagaatcatcagcgcccacggctgcaaggtggacaacagcagcctgaccggcgagagcgagccccagaccagaagccccgactgcacccacgacaaccccctggagaccagaaacatcaccttcttcagcaccaactgcgtggagggcaccgccagaggcgtggtggtggccaccggcgacagaaccgtgatgggcagaatcgccaccctggccagcggcctggaggtgggcaagacccccatcgccatcgagatcgagcacttcatccagctgatcaccggcgtggccgtgttcctgggcgtgagcttcttcatcctgagcctgatcctgggctacacctggctggaggccgtgatcttcctgatcggcatcatcgtggccaacgtgcccgagggcctgctggccaccgtgaccgtgtgcctgaccctgaccgccaagagaatggccagaaagaactgcctggtgaagaacctggaggccgtggagaccctgggcagcaccagcaccatctgcagcgacaagaccggcaccctgacccagaacagaatgaccgtggcccacatgtggttcgacaaccagatccacgaggccgacaccaccgaggaccagagcggcaccagcttcgacaagagcagccacacctgggtggccctgagccacatcgccggcctgtgcaacagagccgtgttcaagggcggccaggacaacatccccgtgctgaagagagacgtggccggcgacgccagcgagagcgccctgctgaagtgcatcgagctgagcagcggcagcgtgaagctgatgagagagagaaacaagaaggtggccgagatccccttcaacagcaccaacaagtaccagctgagcatccacgagaccgaggaccccaacgacaacagatacctgctggtgatgaagggcgcccccgagagaatcctggacagatgcagcaccatcctgctgcagggcaaggagcagcccctggacgaggagatgaaggaggccttccagaacgcctacctggagctgggcggcctgggcgagagagtgctgggcttctgccactactacctgcccgaggagcagttccccaagggcttcgccttcgactgcgacgacgtgaacttcaccaccgacaacctgtgcttcgtgggcctgatgagcatgatcgacccccccagagccgccgtgcccgacgccgtgggcaagtgcagaagcgccggcatcaaggtgatcatggtgaccggcgaccaccccatcaccgccaaggccatcgccaagggcgtgggcatcatcagcgagggcaacgagaccgtggaggacatcgccgccagactgaacatccccgtgagccaggtgaaccccagagacgccaaggcctgcgtgatccacggcaccgacctgaaggacttcaccagcgagcagatcgacgagatcctgcagaaccacaccgagatcgtgttcgccagaaccagcccccagcagaagctgatcatcgtggagggctgccagagacagggcgccatcgtggccgtgaccggcgacggcgtgaacgacagccccgccctgaagaaggccgacatcggcgtggccatgggcatcgccggcagcgacgtgagcaagcaggccgccgacatgatcctgctggacgacaacttcgccagcatcgtgaccggcgtggaggagggcagactgatcttcgacaacctgaagaagagcatcgcctacaccctgaccagcaacatccccgagatcacccccttcctgctgttcatcatggccaacatccccctgcccctgggcaccatcaccatcctgtgcatcgacctgggcaccgacatggtgcccgccatcagcctggcctacgaggccgccgagagcgacatcatgaagagacagcccagaaaccccagaaccgacaagctggtgaacgagagactgatcagcatggcctacggccagatcggcatgatccaggccctgggcggcttcttcagctacttcgtgatcctggccgagaacggcttcctgcccggcaacctggtgggcatcagactgaactgggacgacagaaccgtgaacgacctggaggacagctacggccagcagtggacctacgagcagagaaaggtggtggagttcacctgccacaccgccttcttcgtgagcatcgtggtggtgcagtgggccgacctgatcatctgcaagaccagaagaaacagcgtgttccagcagggcatgaagaacaagatcctgatcttcggcctgttcgaggagaccgccctggccgccttcctgagctactgccccggcatggacgtggccctgagaatgtaccccctgaagcccagctggtggttctgcgccttcccctacagcttcctgatcttcgtgtacgacgagatcagaaagctgatcctgagaagaaaccccggcggctgggtggagaaggagacctactactag

SEQ ID NO: 73726 - DNA, 3681 bp, synthetic construct
  misc_feature 1..3681: note = Description of Artificial Sequence: Synthetic coding sequence
  source 1..3681: mol_type = other DNA
atgggcgacaagaaggacgacaaggacagccccaagaagaacaagggcaaggagagaagagacctggacgacctgaagaaggaggtggccatgaccgagcacaagatgagcgtggaggaggtgtgcagaaagtacaacaccgactgcgtgcagggcctgacccacagcaaggcccaggagatcctggccagagacggccccaacgccctgacccccccccccaccacccccgagtgggtgaagttctgcagacagctgttcggcggcttcagcatcctgctgtggatcggcgccatcctgtgcttcctggcctacggcatccaggccggcaccgaggacgaccccagcggcgacaacctgtacctgggcatcgtgctggccgccgtggtgatcatcaccggctgcttcagctactaccaggaggccaagagcagcaagatcatggagagcttcaagaacatggtgccccagcaggccctggtgatcagagagggcgagaagatgcaggtgaacgccgaggaggtggtggtgggcgacctggtggagatcaagggcggcgacagagtgcccgccgacctgagaatcatcagcgcccacggctgcaaggtggacaacagcagcctgaccggcgagagcgagccccagaccagaagccccgactgcacccacgacaaccccctggagaccagaaacatcaccttcttcagcaccaactgcgtggagggcaccgccagaggcgtggtggtggccaccggcgacagaaccgtgatgggcagaatcgccaccctggccagcggcctggaggtgggcaagacccccatcgccatcgagatcgagcacttcatccagctgatcaccggcgtggccgtgttcctgggcgtgagcttcttcatcctgagcctgatcctgggctacacctggctggaggccgtgatcttcctgatcggcatcatcgtggccaacgtgcccgagggcctgctggccaccgtgaccgtgtgcctgaccctgaccgccaagagaatggccagaaagaactgcctggtgaagaacctggaggccgtggagaccctgggcagcaccagcaccatctgcagcgacaagaccggcaccctgacccagaacagaatgaccgtggcccacatgtggttcgacaaccagatccacgaggccgacaccaccgaggaccagagcggcaccagcttcgacaagagcagccacacctgggtggccctgagccacatcgccggcctgtgcaacagagccgtgttcaagggcggccaggacaacatccccgtgctgaagagagacgtggccggcgacgccagcgagagcgccctgctgaagtgcatcgagctgagcagcggcagcgtgaagctgatgagagagagaaacaagaaggtggccgagatccccttcaacagcaccaacaagtaccagctgagcatccacgagaccgaggaccccaacgacaacagatacctgctggtgatgaagggcgcccccgagagaatcctggacagatgcagcaccatcctgctgcagggcaaggagcagcccctggacgaggagatgaaggaggccttccagaacgcctacctggagctgggcggcctgggcgagagagtgctgggcttctgccactactacctgcccgaggagcagttccccaagggcttcgccttcgactgcgacgacgtgaacttcaccaccgacaacctgtgcttcgtgggcctgatgagcatgatcgacccccccagagccgccgtgcccgacgccgtgggcaagtgcagaagcgccggcatcaaggtgatcatggtgaccggcgaccaccccatcaccgccaaggccatcgccaagggcgtgggcatcatcagcgagggcaacgagaccgtggaggacatcgccgccagactgaacatccccgtgagccaggtgaaccccagagacgccaaggcctgcgtgatccacggcaccgacctgaaggacttcaccagcgagcagatcgacgagatcctgcagaaccacaccgagatcgtgttcgccagaaccagcccccagcagaagctgatcatcgtggagggctgccagagacagggcgccatcgtggccgtgaccggcgacggcgtgaacgacagccccgccctgaagaaggccgacatcggcgtggccatgggcatcgccggcagcgacgtgagcaagcaggccgccgacatgatcctgctggacgacaacttcgccagcatcgtgaccggcgtggaggagggcagactgatcttcgacaacctgaagaagagcatcgcctacaccctgaccagcaacatccccgagatcacccccttcctgctgttcatcatggccaacatccccctgcccctgggcaccatcaccatcctgtgcatcgacctgggcaccgacatggtgcccgccatcagcctggcctacgaggccgccgagagcgacatcatgaagagacagcccagaaaccccagaaccgacaagctggtgaacgagagactgatcagcatggcctacggccagatcggcatgatccaggccctgggcggcttcttcagctacttcgtgatcctggccgagaacggcttcctgcccggcaacctggtgggcatcagactgaactgggacgacagaaccgtgaacgacctggaggacagctacggccagcagtggacctacgagcagagaaaggtggtggagttcacctgccacaccgccttcttcgtgagcatcgtggtggtgcagtgggccgacctgatcatctgcaagaccagaagaaacagcgtgttccagcagggcatgaagaacaagatcctgatcttcggcctgttcgaggagaccgccctggccgccttcctgagctactgccccggcatggacgtggccctgagaatgtaccccctgaagcccagctggtggttctgcgccttcccctacagcttcctgatcttcgtgtacgacgagatcagaaagctgatcctgagaagaaaccccggcggcgagggcgccagacagggcagcagaggcggcagaggcgccgccggcagccaggccgccggccccagactgcccagcccctgctggatggccctgccccccggcagccacagcagcctgagcagccacctgagcggccaccccctgtgcctgctgaccggcctgtgcctgtgcggcttcctggtgagcctgcccctgtgccccagcctgtgctgggccgccagactggcctgcctgagccccagcctgaccctgagcctgagcttcctgctgtgcctgagcagactgggcggcgagggcaacctgctgctgaccagcgcccccccccacagacccagcctgcccagaccccccggccccggcccccccctgagcgtgccccccatcctgtacagcggcggcagaagccccctgttcctgtggccccacctgggcccccaccccctgcactacctgctgcccccccccctgtggctggccagcctgccctgccccaagcccctgagcagcctgttcagcgtgagcgtgagcctgcccctgctgacccccctgagcatcccccccgcccccgccaccagcctgggcagcttcctgctgcccttcagcccccccgccgacgccatcagcggcagcggccagctgagcaacatcagcgtgggcagagagtag

SEQ ID NO: 73727 - DNA, 444 bp, synthetic construct
  misc_feature 1..444: note = Description of Artificial Sequence: Synthetic coding sequence
  source 1..444: mol_type = other DNA
atgggcagcggcggcagcgacagctacagaatcgccaccagccaggacaagaaggacgacaaggacagccccaagaagaacaagggcaaggagagaagagacctggacgacctgaagaaggaggtggccatgaccgagcacaagatgagcgtggaggaggtgtgcagaaagtacaacaccgactgcgtgcagggcctgacccacagcaaggcccaggagatcctggccagagacggccccaacgccctgacccccccccccaccacccccgagtgggtgaagttctgcagacagctgttcggcggcttcagcatcctgctgtggatcggcgccatcctgtgcttcctggcctacggcatccaggccggcaccgaggacgaccccagcggcgacaacctgtacctgggcatcgtgctggccgccgtggtgatcatcaccggctag

SEQ ID NO: 73728 - DNA, 2049 bp, synthetic construct
  misc_feature 1..2049: note = Description of Artificial Sequence: Synthetic coding sequence
  source 1..2049: mol_type = other DNA
atgggcagaatcgccaccctggccagcggcctggaggtgggcaagacccccatcgccatcgagatcgagcacttcatccagctgatcaccggcgtggccgtgttcctgggcgtgagcttcttcatcctgagcctgatcctgggctacacctggctggaggccgtgatcttcctgatcggcatcatcgtggccaacgtgcccgagggcctgctggccaccgtgaccgtgtgcctgaccctgaccgccaagagaatggccagaaagaactgcctggtgaagaacctggaggccgtggagaccctgggcagcaccagcaccatctgcagcgacaagaccggcaccctgacccagaacagaatgaccgtggcccacatgtggttcgacaaccagatccacgaggccgacaccaccgaggaccagagcggcaccagcttcgacaagagcagccacacctgggtggccctgagccacatcgccggcctgtgcaacagagccgtgttcaagggcggccaggacaacatccccgtgctgaagagagacgtggccggcgacgccagcgagagcgccctgctgaagtgcatcgagctgagcagcggcagcgtgaagctgatgagagagagaaacaagaaggtggccgagatccccttcaacagcaccaacaagtaccagctgagcatccacgagaccgaggaccccaacgacaacagatacctgctggtgatgaagggcgcccccgagagaatcctggacagatgcagcaccatcctgctgcagggcaaggagcagcccctggacgaggagatgaaggaggccttccagaacgcctacctggagctgggcggcctgggcgagagagtgctgggcttctgccactactacctgcccgaggagcagttccccaagggcttcgccttcgactgcgacgacgtgaacttcaccaccgacaacctgtgcttcgtgggcctgatgagcatgatcgacccccccagagccgccgtgcccgacgccgtgggcaagtgcagaagcgccggcatcaaggtgatcatggtgaccggcgaccaccccatcaccgccaaggccatcgccaagggcgtgggcatcatcagcgagggcaacgagaccgtggaggacatcgccgccagactgaacatccccgtgagccaggtgaaccccagagacgccaaggcctgcgtgatccacggcaccgacctgaaggacttcaccagcgagcagatcgacgagatcctgcagaaccacaccgagatcgtgttcgccagaaccagcccccagcagaagctgatcatcgtggagggctgccagagacagggcgccatcgtggccgtgaccggcgacggcgtgaacgacagccccgccctgaagaaggccgacatcggcgtggccatgggcatcgccggcagcgacgtgagcaagcaggccgccgacatgatcctgctggacgacaacttcgccagcatcgtgaccggcgtggaggagggcagactgatcttcgacaacctgaagaagagcatcgcctacaccctgaccagcaacatccccgagatcacccccttcctgctgttcatcatggccaacatccccctgcccctgggcaccatcaccatcctgtgcatcgacctgggcaccgacatggtgcccgccatcagcctggcctacgaggccgccgagagcgacatcatgaagagacagcccagaaaccccagaaccgacaagctggtgaacgagagactgatcagcatggcctacggccagatcggcatgatccaggccctgggcggcttcttcagctacttcgtgatcctggccgagaacggcttcctgcccggcaacctggtgggcatcagactgaactgggacgacagaaccgtgaacgacctggaggacagctacggccagcagtggacctacgagcagagaaaggtggtggagttcacctgccacaccgccttcttcgtgagcatcgtggtggtgcagtgggccgacctgatcatctgcaagaccagaagaaccagaagcagcagcagagcctag

SEQ ID NO: 73729 - DNA, 3075 bp, synthetic construct
  misc_feature 1..3075: note = Description of Artificial Sequence: Synthetic coding sequence
  source 1..3075: mol_type = other DNA
atgggcggctgggaggaggagagaaacagaagagccaccgacaagaaggacgacaaggacagccccaagaagaacaagggcaaggagagaagagacctggacgacctgaagaaggaggtggccatgaccgagcacaagatgagcgtggaggaggtgtgcagaaagtacaacaccgactgcgtgcagggcctgacccacagcaaggcccaggagatcctggccagagacggccccaacgccctgacccccccccccaccacccccgagtgggtgaagttctgcagacagctgttcggcggcttcagcatcctgctgtggatcggcgccatcctgtgcttcctggcctacggcatccaggccggcaccgaggacgaccccagcggcgacaacctgtacctgggcatcgtgctggccgccgtggtgatcatcaccggctgcttcagctactaccaggaggccaagagcagcaagatcatggagagcttcaagaacatggtgccccagcaggccctggtgatcagagagggcgagaagatgcaggtgaacgccgaggaggtggtggtgggcgacctggtggagatcaagggcggcgacagagtgcccgccgacctgagaatcatcagcgcccacggctgcaaggtggacaacagcagcctgaccggcgagagcgagccccagaccagaagccccgactgcacccacgacaaccccctggagaccagaaacatcaccttcttcagcaccaactgcgtggagggcaccgccagaggcgtggtggtggccaccggcgacagaaccgtgatgggcagaatcgccaccctggccagcggcctggaggtgggcaagacccccatcgccatcgagatcgagcacttcatccagctgatcaccggcgtggccgtgttcctgggcgtgagcttcttcatcctgagcctgatcctgggctacacctggctggaggccgtgatcttcctgatcggcatcatcgtggccaacgtgcccgagggcctgctggccaccgtgaccgtgtgcctgaccctgaccgccaagagaatggccagaaagaactgcctggtgaagaacctggaggccgtggagaccctgggcagcaccagcaccatctgcagcgacaagaccggcaccctgacccagaacagaatgaccgtggcccacatgtggttcgacaaccagatccacgaggccgacaccaccgaggaccagagcggcaccagcttcgacaagagcagccacacctgggtggccctgagccacatcgccggcctgtgcaacagagccgtgttcaagggcggccaggacaacatccccgtgctgaagagagacgtggccggcgacgccagcgagagcgccctgctgaagtgcatcgagctgagcagcggcagcgtgaagctgatgagagagagaaacaagaaggtggccgagatccccttcaacagcaccaacaagtaccagctgagcatccacgagaccgaggaccccaacgacaacagatacctgctggtgatgaagggcgcccccgagagaatcctggacagatgcagcaccatcctgctgcagggcaaggagcagcccctggacgaggagatgaaggaggccttccagaacgcctacctggagctgggcggcctgggcgagagagtgctgggcttctgccactactacctgcccgaggagcagttccccaagggcttcgccttcgactgcgacgacgtgaacttcaccaccgacaacctgtgcttcgtgggcctgatgagcatgatcgacccccccagagccgccgtgcccgacgccgtgggcaagtgcagaagcgccggcatcaaggtgatcatggtgaccggcgaccaccccatcaccgccaaggccatcgccaagggcgtgggcatcatcagcgagggcaacgagaccgtggaggacatcgccgccagactgaacatccccgtgagccaggtgaaccccagagacgccaaggcctgcgtgatccacggcaccgacctgaaggacttcaccagcgagcagatcgacgagatcctgcagaaccacaccgagatcgtgttcgccagaaccagcccccagcagaagctgatcatcgtggagggctgccagagacagggcgccatcgtggccgtgaccggcgacggcgtgaacgacagccccgccctgaagaaggccgacatcggcgtggccatgggcatcgccggcagcgacgtgagcaagcaggccgccgacatgatcctgctggacgacaacttcgccagcatcgtgaccggcgtggaggagggcagactgatcttcgacaacctgaagaagagcatcgcctacaccctgaccagcaacatccccgagatcacccccttcctgctgttcatcatggccaacatccccctgcccctgggcaccatcaccatcctgtgcatcgacctgggcaccgacatggtgcccgccatcagcctggcctacgaggccgccgagagcgacatcatgaagagacagcccagaaaccccagaaccgacaagctggtgaacgagagactgatcagcatggcctacggccagatcggcatgatccaggccctgggcggcttcttcagctacttcgtgatcctggccgagaacggcttcctgcccggcaacctggtgggcatcagactgaactgggacgacagaaccgtgaacgacctggaggacagctacggccagcagtggacctacgagcagagaaaggtggtggagttcacctgccacaccgccttcttcgtgagcatcgtggtggtgcagtgggccgacctgatcatctgcaagaccagaagaaacagcgtgttccagcagggcatgaagaacaagatcctgatcttcggcctgttcgaggagaccgccctggccgccttcctgagctactgccccggcatggacgtggccctgagaatgtaccccctgaagcccagctggtggttctgcgccttcccctacagcttcctgatcttcgtgtacgacgagatcagaaagctgatcctgagaagaaaccccggcggctgggtggagaaggagacctactactag

SEQ ID NO: 73730 - DNA, 3081 bp, synthetic construct
  misc_feature 1..3081: note = Description of Artificial Sequence: Synthetic coding sequence
  source 1..3081: mol_type = other DNA
atgggcagcggcggcagcgacagctacagaatcgccaccagccaggacaagaaggacgacaaggacagccccaagaagaacaagggcaaggagagaagagacctggacgacctgaagaaggaggtggccatgaccgagcacaagatgagcgtggaggaggtgtgcagaaagtacaacaccgactgcgtgcagggcctgacccacagcaaggcccaggagatcctggccagagacggccccaacgccctgacccccccccccaccacccccgagtgggtgaagttctgcagacagctgttcggcggcttcagcatcctgctgtggatcggcgccatcctgtgcttcctggcctacggcatccaggccggcaccgaggacgaccccagcggcgacaacctgtacctgggcatcgtgctggccgccgtggtgatcatcaccggctgcttcagctactaccaggaggccaagagcagcaagatcatggagagcttcaagaacatggtgccccagcaggccctggtgatcagagagggcgagaagatgcaggtgaacgccgaggaggtggtggtgggcgacctggtggagatcaagggcggcgacagagtgcccgccgacctgagaatcatcagcgcccacggctgcaaggtggacaacagcagcctgaccggcgagagcgagccccagaccagaagccccgactgcacccacgacaaccccctggagaccagaaacatcaccttcttcagcaccaactgcgtggagggcaccgccagaggcgtggtggtggccaccggcgacagaaccgtgatgggcagaatcgccaccctggccagcggcctggaggtgggcaagacccccatcgccatcgagatcgagcacttcatccagctgatcaccggcgtggccgtgttcctgggcgtgagcttcttcatcctgagcctgatcctgggctacacctggctggaggccgtgatcttcctgatcggcatcatcgtggccaacgtgcccgagggcctgctggccaccgtgaccgtgtgcctgaccctgaccgccaagagaatggccagaaagaactgcctggtgaagaacctggaggccgtggagaccctgggcagcaccagcaccatctgcagcgacaagaccggcaccctgacccagaacagaatgaccgtggcccacatgtggttcgacaaccagatccacgaggccgacaccaccgaggaccagagcggcaccagcttcgacaagagcagccacacctgggtggccctgagccacatcgccggcctgtgcaacagagccgtgttcaagggcggccaggacaacatccccgtgctgaagagagacgtggccggcgacgccagcgagagcgccctgctgaagtgcatcgagctgagcagcggcagcgtgaagctgatgagagagagaaacaagaaggtggccgagatccccttcaacagcaccaacaagtaccagctgagcatccacgagaccgaggaccccaacgacaacagatacctgctggtgatgaagggcgcccccgagagaatcctggacagatgcagcaccatcctgctgcagggcaaggagcagcccctggacgaggagatgaaggaggccttccagaacgcctacctggagctgggcggcctgggcgagagagtgctgggcttctgccactactacctgcccgaggagcagttccccaagggcttcgccttcgactgcgacgacgtgaacttcaccaccgacaacctgtgcttcgtgggcctgatgagcatgatcgacccccccagagccgccgtgcccgacgccgtgggcaagtgcagaagcgccggcatcaaggtgatcatggtgaccggcgaccaccccatcaccgccaaggccatcgccaagggcgtgggcatcatcagcgagggcaacgagaccgtggaggacatcgccgccagactgaacatccccgtgagccaggtgaaccccagagacgccaaggcctgcgtgatccacggcaccgacctgaaggacttcaccagcgagcagatcgacgagatcctgcagaaccacaccgagatcgtgttcgccagaaccagcccccagcagaagctgatcatcgtggagggctgccagagacagggcgccatcgtggccgtgaccggcgacggcgtgaacgacagccccgccctgaagaaggccgacatcggcgtggccatgggcatcgccggcagcgacgtgagcaagcaggccgccgacatgatcctgctggacgacaacttcgccagcatcgtgaccggcgtggaggagggcagactgatcttcgacaacctgaagaagagcatcgcctacaccctgaccagcaacatccccgagatcacccccttcctgctgttcatcatggccaacatccccctgcccctgggcaccatcaccatcctgtgcatcgacctgggcaccgacatggtgcccgccatcagcctggcctacgaggccgccgagagcgacatcatgaagagacagcccagaaaccccagaaccgacaagctggtgaacgagagactgatcagcatggcctacggccagatcggcatgatccaggccctgggcggcttcttcagctacttcgtgatcctggccgagaacggcttcctgcccggcaacctggtgggcatcagactgaactgggacgacagaaccgtgaacgacctggaggacagctacggccagcagtggacctacgagcagagaaaggtggtggagttcacctgccacaccgccttcttcgtgagcatcgtggtggtgcagtgggccgacctgatcatctgcaagaccagaagaaacagcgtgttccagcagggcatgaagaacaagatcctgatcttcggcctgttcgaggagaccgccctggccgccttcctgagctactgccccggcatggacgtggccctgagaatgtaccccctgaagcccagctggtggttctgcgccttcccctacagcttcctgatcttcgtgtacgacgagatcagaaagctgatcctgagaagaaaccccggcggctgggtggagaaggagacctactactag

SEQ ID NO: 73731 - DNA, 3090 bp, synthetic construct
  misc_feature 1..3090: note = Description of Artificial Sequence: Synthetic coding sequence
  source 1..3090: mol_type = other DNA
atgggcctgtggggcaagaagggcaccgtggccccccacgaccagagccccagaagaagacccaagaagggcctgatcaagaagaagatggtgaagagagagaagcagaagagaaacatggaggagctgaagaaggaggtggtgatggacgaccacaagctgaccctggaggagctgagcaccaagtacagcgtggacctgaccaagggccacagccaccagagagccaaggagatcctgaccagaggcggccccaacaccgtgacccccccccccaccacccccgagtgggtgaagttctgcaagcagctgttcggcggcttcagcctgctgctgtggaccggcgccatcctgtgcttcgtggcctacagcatccagatctacttcaacgaggagcccaccaaggacaacctgtacctgagcatcgtgctgagcgtggtggtgatcgtgaccggctgcttcagctactaccaggaggccaagagcagcaagatcatggagagcttcaagaacatggtgccccagcaggccctggtgatcagaggcggcgagaagatgcagatcaacgtgcaggaggtggtgctgggcgacctggtggagatcaagggcggcgacagagtgcccgccgacctgagactgatcagcgcccagggctgcaaggtggacaacagcagcctgaccggcgagagcgagccccagagcagaagccccgacttcacccacgagaaccccctggagaccagaaacatctgcttcttcagcaccaactgcgtggagggcaccgccagaggcatcgtgatcgccaccggcgacagcaccgtgatgggcagaatcgccagcctgaccagcggcctggccgtgggccagacccccatcgccgccgagatcgagcacttcatccacctgatcaccgtggtggccgtgttcctgggcgtgaccttcttcgccctgagcctgctgctgggctacggctggctggaggccatcatcttcctgatcggcatcatcgtggccaacgtgcccgagggcctgctggccaccgtgaccgtgtgcctgaccctgaccgccaagagaatggccagaaagaactgcctggtgaagaacctggaggccgtggagaccctgggcagcaccagcaccatctgcagcgacaagaccggcaccctgacccagaacagaatgaccgtggcccacatgtggttcgacatgaccgtgtacgaggccgacaccaccgaggagcagaccggcaagaccttcaccaagagcagcgacacctggttcatgctggccagaatcgccggcctgtgcaacagagccgacttcaaggccaaccaggagatcctgcccatcgccaagagagccaccaccggcgacgccagcgagagcgccctgctgaagttcatcgagcagagctacagcagcgtggccgagatgagagagaagaaccccaaggtggccgagatccccttcaacagcaccaacaagtaccagatgagcatccacctgagagaggacagcagccagacccacgtgctgatgatgaagggcgcccccgagagaatcctggagttctgcagcaccttcctgctgaacggccaggagtacagcatgaacgacgagatgaaggaggccttccagaacgcctacctggagctgggcggcctgggcgagagagtgctgggcttctgcttcctgaacctgcccagcagcttcagcaagggcttccccttcaacaccgacgagatcaacttccccatggacaacctgtgcttcgtgggcctgatcagcatgatcgacccccccagagccgccgtgcccgacgccgtgagcaagtgcagaagcgccggcatcaaggtgatcatggtgaccggcgaccaccccatcaccgccaaggccatcgccaagggcgtgggcatcatcagcgagggcaccgagaccgccgaggaggtggccgccagactgaagatccccatcagcaaggtggacgccagcgccgccaaggccatcgtggtgcacggcgccgagctgaaggacatccagagcaagcagctggaccagatcctgcagaaccaccccgagatcgtgttcgccagaaccagcccccagcagaagctgatcatcgtggagggctgccagagactgggcgccgtggtggccgtgaccggcgacggcgtgaacgacagccccgccctgaagaaggccgacatcggcatcgccatgggcatcagcggcagcgacgtgagcaagcaggccgccgacatgatcctgctggacgacaacttcgccagcatcgtgaccggcgtggaggagggcagactgatcttcgacaacctgaagaagagcatcatgtacaccctgaccagcaacatccccgagatcacccccttcctgatgttcatcatcctgggcatccccctgcccctgggcaccatcaccatcctgtgcatcgacctgggcaccgacatggtgcccgccatcagcctggcctacgagagcgccgagagcgacatcatgaagagactgcccagaaaccccaagaccgacaacctggtgaaccacagactgatcggcatggcctacggccagatcggcatgatccaggccctggccggcttcttcacctacttcgtgatcctggccgagaacggcttcagacccgtggacctgctgggcatcagactgcactgggaggacaagtacctgaacgacctggaggacagctacggccagcagtggacctacgagcagagaaaggtggtggagttcacctgccagaccgccttcttcgtgaccatcgtggtggtgcagtgggccgacctgatcatcagcaagaccagaagaaacagcctgttccagcagggcatgagaaacaaggtgctgatcttcggcatcctggaggagaccctgctggccgccttcctgagctacacccccggcatggacgtggccctgagaatgtaccccctgaagatcacctggtggctgtgcgccatcccctacagcatcctgatcttcgtgtacgacgagatcagaaagctgctgatcagacagcaccccgacggctgggtggagagagagacctactactag

SEQ ID NO: 73732 - DNA, 498 bp, synthetic construct
  misc_feature 1..498: note = Description of Artificial Sequence: Synthetic coding sequence
  source 1..498: mol_type = other DNA
atgatccaggccctggccggcttcttcacctacttcgtgatcctggccgagaacggcttcagacccgtggacctgctgggcatcagactgcactgggaggacaagtacctgaacgacctggaggacagctacggccagcagtggacctacgagcagagaaaggtggtggagttcacctgccagaccgccttcttcgtgaccatcgtggtggtgcagtgggccgacctgatcatcagcaagaccagaagaaacagcctgttccagcagggcatgagaaacaaggtgctgatcttcggcatcctggaggagaccctgctggccgccttcctgagctacacccccggcatggacgtggccctgagaatgtaccccctgaagatcacctggtggctgtgcgccatcccctacagcatcctgatcttcgtgtacgacgagatcagaaagctgctgatcagacagcaccccgacggctgggtggagagagagacctactactag

SEQ ID NO: 73733 - DNA, 888 bp, synthetic construct
  misc_feature 1..888: note = Description of Artificial Sequence: Synthetic coding sequence
  source 1..888: mol_type = other DNA
atgggcaagagaaagtgcagccccgccagccagagcctgttcctgttccagttccagaagatggagctgaagttcaagatcctgctgttctacgtgatcttctacggctgcctggccggcatcttcatcggcaccatccaggtgatgctgctgaccatcagcgagttcaagcccacctaccaggacagagtggccccccccggcctgacccagatcccccagatccagaagaccgagatcagcttcagacccaacgaccccaagagctacgaggcctacgtgctgaacatcgtgagattcctggagaagtacaaggacagcgcccagagagacgacatgatcttcgaggactgcggcgacgtgcccagcgagcccaaggagagaggcgacttcaaccacgagagaggcgagagaaaggtgtgcagattcaagctggagtggctgggcaactgcagcggcctgaacgacgagacctacggctacaaggagggcaagccctgcatcatcatcaagctgaacagagtgctgggcttcaagcccaagccccccaagaacgagagcctggagacctaccccgtgatgaagtacaaccccaacgtgctgcccgtgcagtgcaccggcaagagagacgaggacaaggacaaggtgggcaacgtggagtacttcggcctgggcaacagccccggcttccccctgcagtactacccctactacggcaagctgctgcagcccaagtacctgcagcccctgctggccgtgcagttcaccaacctgaccatggacaccgagatcagaatcgagtgcaaggcctacggcgagaacatcggctacagcgagaaggacagattccagggcagattcgacgtgaagatcgaggtgaagagctag

SEQ ID NO: 73734 - DNA, 912 bp, synthetic construct
  misc_feature 1..912: note = Description of Artificial Sequence: Synthetic coding sequence
  source 1..912: mol_type = other DNA
atggccagaggcaaggccaaggaggagggcagctggaagaagttcatctggaacagcgagaagaaggagttcctgggcagaaccggcggcagctggttcaagatcctgctgttctacgtgatcttctacggctgcctggccggcatcttcatcggcaccatccaggtgatgctgctgaccatcagcgagttcaagcccacctaccaggacagagtggccccccccggcctgacccagatcccccagatccagaagaccgagatcagcttcagacccaacgaccccaagagctacgaggcctacgtgctgaacatcgtgagattcctggagaagtacaaggacagcgcccagagagacgacatgatcttcgaggactgcggcgacgtgcccagcgagcccaaggagagaggcgacttcaaccacgagagaggcgagagaaaggtgtgcagattcaagctggagtggctgggcaactgcagcggcctgaacgacgagacctacggctacaaggagggcaagccctgcatcatcatcaagctgaacagagtgctgggcttcaagcccaagccccccaagaacgagagcctggagacctaccccgtgatgaagtacaaccccaacgtgctgcccgtgcagtgcaccggcaagagagacgaggacaaggacaaggtgggcaacgtggagtacttcggcctgggcaacagccccggcttccccctgcagtactacccctactacggcaagctgctgcagcccaagtacctgcagcccctgctggccgtgcagttcaccaacctgaccatggacaccgagatcagaatcgagtgcaaggcctacggcgagaacatcggctacagcgagaaggacagattccagggcagattcgacgtgaagatcgaggtgaagagctag

SEQ ID NO: 73735 - DNA, 912 bp, synthetic construct; identical to SEQ ID NO: 73734
  misc_feature 1..912: note = Description of Artificial Sequence: Synthetic coding sequence
  source 1..912: mol_type = other DNA

SEQ ID NO: 73736 - DNA, 744 bp, synthetic construct
  misc_feature 1..744: note = Description of Artificial Sequence: Synthetic coding sequence
  source 1..744: mol_type = other DNA
atgctgctgaccatcagcgagttcaagcccacctaccaggacagagtggccccccccggcctgacccagatcccccagatccagaagaccgagatcagcttcagacccaacgaccccaagagctacgaggcctacgtgctgaacatcgtgagattcctggagaagtacaaggacagcgcccagagagacgacatgatcttcgaggactgcggcgacgtgcccagcgagcccaaggagagaggcgacttcaaccacgagagaggcgagagaaaggtgtgcagattcaagctggagtggctgggcaactgcagcggcctgaacgacgagacctacggctacaaggagggcaagccctgcatcatcatcaagctgaacagagtgctgggcttcaagcccaagccccccaagaacgagagcctggagacctaccccgtgatgaagtacaaccccaacgtgctgcccgtgcagtgcaccggcaagagagacgaggacaaggacaaggtgggcaacgtggagtacttcggcctgggcaacagccccggcttccccctgcagtactacccctactacggcaagctgctgcagcccaagtacctgcagcccctgctggccgtgcagttcaccaacctgaccatggacaccgagatcagaatcgagtgcaaggcctacggcgagaacatcggctacagcgagaaggacagattccagggcagattcgacgtgaagatcgaggtgaagagctag

SEQ ID NO: 73737 - DNA, 873 bp, synthetic construct
  misc_feature 1..873: note = Description of Artificial Sequence: Synthetic coding sequence
  source 1..873: mol_type = other DNA
atggtgatccagaaggagaagaagagctgcggccaggtggtggaggagtggaaggagttcgtgtggaaccccagaacccaccagttcatgggcagaaccggcaccagctgggccttcatcctgctgttctacctggtgttctacggcttcctgaccgccatgttcaccctgaccatgtgggtgatgctgcagaccgtgagcgaccacacccccaagtaccaggacagactggccacccccggcctgatgatcagacccaagaccgagaacctggacgtgatcgtgaacgtgagcgacaccgagagctgggaccagcacgtgcagaagctgaacaagttcctggagccctacaacgacagcatccaggcccagaagaacgacgtgtgcagacccggcagatactacgagcagcccgacaacggcgtgctgaactaccccaagagagcctgccagttcaacagaacccagctgggcaactgcagcggcatcggcgacagcacccactacggctacagcaccggccagccctgcgtgttcatcaagatgaacagagtgatcaacttctacgccggcgccaaccagagcatgaacgtgacctgcgccggcaagagagacgaggacgccgagaacctgggcaacttcgtgatgttccccgccaacggcaacatcgacctgatgtacttcccctactacggcaagaagttccacgtgaactacacccagcccctggtggccgtgaagttcctgaacgtgacccccaacgtggaggtgaacgtggagtgcagaatcaacgccgccaacatcgccaccgacgacgagagagacaagttcgccggcagagtggccttcaagctgagaatcaacaagacctag

SEQ ID NO: 73738 - DNA, 840 bp, synthetic construct
  misc_feature 1..840: note = Description of Artificial Sequence: Synthetic coding sequence
  source 1..840: mol_type = other DNA
atgaccaagaacgagaagaagagcctgaaccagagcctggccgagtggaagctgttcatctacaaccccaccaccggcgagttcctgggcagaaccgccaagagctggggcctgatcctgctgttctacctggtgttctacggcttcctggccgccctgttcagcttcaccatgtgggtgatgctgcagaccctgaacgacgaggtgcccaagtacagagaccagatccccagccccggcctgatggtgttccccaagcccgtgaccgccctggagtacaccttcagcagaagcgaccccaccagctacgccggctacatcgaggacctgaagaagttcctgaagccctacaccctggaggagcagaagaacctgaccgtgtgccccgacggcgccctgttcgagcagaagggccccgtgtacgtggcctgccagttccccatcagcctgctgcaggcctgcagcggcatgaacgaccccgacttcggctacagccagggcaacccctgcatcctggtgaagatgaacagaatcatcggcctgaagcccgagggcgtgcccagaatcgactgcgtgagcaagaacgaggacatccccaacgtggccgtgtacccccacaacggcatgatcgacctgaagtacttcccctactacggcaagaagctgcacgtgggctacctgcagcccctggtggccgtgcaggtgagcttcgcccccaacaacaccggcaaggaggtgaccgtggagtgcaagatcgacggcagcgccaacctgaagagccaggacgacagagacaagttcctgggcagagtgatgttcaagatcaccgccagagcctag

SEQ ID NO: 73739 - DNA, 582 bp, synthetic construct
  misc_feature 1..582: note = Description of Artificial Sequence: Synthetic coding sequence
  source 1..582: mol_type = other DNA
atgctgagcgagggcgacatcctgttcagcagcctgctgagcagccccagcctgttctggccccccggcctgatcctgctgttctacctggtgttctacggcttcctggccgccctgttcagcttcaccatgtgggtgatgctgcagaccctgaacgacgaggtgcccaagtacagagaccagatccccagccccggcctgatggtgttccccaagcccgtgaccgccctggagtacaccttcagcagaagcgaccccaccagctacgccggctacatcgaggacctgaagaagttcctgaagccctacaccctggaggagcagaagaacctgaccgtgtgccccgacggcgccctgttcgagcagaagggccccgtgtacgtggcctgccagttccccatcagcctgctgcaggcctgcagcggcatgaacgaccccgacttcggctacagccagggcaacccctgcatcctggtgaagatgaacagaatcatcggcctgaagcccgagggcgtgcccagaatcgactgcgtgagcaagaccaacaacgtgaaggacggcatgaagatctaccagatgtag

SEQ ID NO: 73740 - DNA, 2139 bp, synthetic construct
  misc_feature 1..2139: note = Description of Artificial Sequence: Synthetic coding sequence
  source 1..2139: mol_type = other DNA
atggccctgctggccatgcacagctggagatgggccgccgccgccgccgccttcgagaagagaagacacagcgccatcctgatcagacccctggtgagcgtgagcggcagcggcccccagtggagaccccaccagctgggcgccctgggcaccgccagagcctaccagatccccgagagcctgaagagcatcacctggcagagactgggcaagggcaacagcggccagttcctggacgccgccaaggccctgcaggtgtggcccctgatcgagaagagaacctgctggcacggccacgccggcggcggcctgcacaccgaccccaaggagggcgccatgaacatcgtggtgcccttcatgttcaagtacgccgtggacagcctgaaccagatgagcggcaacatgctgaacctgagcgacgcccccaacaccgtggccaccatggccaccgccgtgctgatcggctacggcgtgagcagagccggcgccgccttcttcaacgaggtgagaaacgccgtgttcggcaaggtggcccagaacagcatcagaagaatcgccaagaacgtgttcctgcacctgcacaacctggacctgggcttccacctgagcagacagaccggcgccctgagcaaggccatcgacagaggcaccagaggcatcagcttcgtgctgagcgccctggtgttcaacctgctgcccatcatgttcgaggtgatgctggtgagcggcgtgctgtactacaagtgcggcgcccagttcgccctggtgaccctgggcaccctgggcacctacaccgccttcaccgtggccgtgaccagatggagaaccagattcagaatcgagatgaacaaggccgacaacgacgccggcaacgccgccatcgacagcctgctgaactacgagaccgtgaagtacttcaacaacgagagatacgaggcccagagatacgacggcttcctgaagacctacgagaccgccagcctgaagagcaccagcaccctggccatgctgaacttcggccagagcgccatcttcagcgtgggcctgaccgccatcatggtgctggccagccagggcatcgtggccggcaccctgaccgtgggcgacctggtgatggtgaacggcctgctgttccagctgagcctgcccctgaacttcctgggcaccgtgtacagagagaccagacaggccctgatcgacatgaacaccctgttcaccctgctgaaggtggacacccagatcaaggacaaggtgatggccagccccctgcagatcaccccccagaccgccaccgtggccttcgacaacgtgcacttcgagtacatcgagggccagaaggtgctgagcggcatcagcttcgaggtgcccgccggcaagaaggtggccatcgtgggcggcagcggcagcggcaagagcaccatcgtgagactgctgttcagattctacgagccccagaagggcagcatctacctggccggccagaacatccaggacgtgagcctggagagcctgagaagagccgtgggcgtggtgccccaggacgccgtgctgttccacaacaccatctactacaacctgctgtacggcaacatcagcgccagccccgaggaggtgtacgccgtggccaagctggccggcctgcacgacgccatcctgagaatgccccacggctacgacacccaggtgggcgagagaggcctgaagctgagcggcggcgagaagcagagagtggccatcgccagagccatcctgaaggacccccccgtgatcctgtacgacgaggccaccagcagcctggacagcatcaccgaggagaccatcctgggcgccatgaaggacgtggtgaagcacagaaccagcatcttcatcgcccacagactgagcaccgtggtggacgccgacgagatcatcgtgctggaccagggcaaggtggccgagagaggcacccaccacggcctgctggccaacccccacagcatctacagcgagatgtggcacacccagagcagcagagtgcagaaccacgacaaccccaagtgggaggccaagaaggagaacatcagcaaggaggaggagagaaagaagctgcaggaggagatcgtgaacagcgtgaagggctgcggcaactgcagctgctag

SEQ ID NO: 73741 - DNA, 2046 bp, synthetic construct
  misc_feature 1..2046: note = Description of Artificial Sequence: Synthetic coding sequence
  source 1..2046: mol_type = other DNA
atgagactgtggaaggccgtggtggtgaccctggccttcatgagcgtggacatctgcgtgaccaccgccatctacgtgttcagccacctggacagaagcctgctggaggacatcagacacttcaacatcttcgacagcgtgctggacctgtgggccgcctgcctgtacagaagctgcctgctgctgggcgccaccatcggcgtggccaagaacagcgccctgggccccagaagactgagagccagctggctggtgatcaccctggtgtgcctgttcgtgggcatctacgccatggtgaagctgctgctgttcagcgaggtgagaagacccatcagagacccctggttctgggccctgttcgtgtggacctacatcagcctgggcgccagcttcctgctgtggtggctgctgagcaccgtgagacccggcacccaggccctggagcccggcgccgccaccgaggccgagggcttccccggcagcggcagacccccccccgagcaggccagcggcgccaccctgcagaagctgctgagctacaccaagcccgacgtggccttcctggtggccgccagcttcttcctgatcgtggccgccctgggcgagaccttcctgccctactacaccggcagagccatcgacggcatcgtgatccagaagagcatggaccagttcagcaccgccgtggtgatcgtgtgcctgctggccatcggcagcagcttcgccgccggcatcagaggcggcatcttcaccctgatcttcgccagactgaacatcagactgagaaactgcctgttcagaagcctggtgagccaggagaccagcttcttcgacgagaacagaaccggcgacctgatcagcagactgaccagcgacaccaccatggtgagcgacctggtgagccagaacatcaacgtgttcctgagaaacaccgtgaaggtgaccggcgtggtggtgttcatgttcagcctgagctggcagctgagcctggtgaccttcatgggcttccccatcatcatgatggtgagcaacatctacggcaagtactacaagagactgagcaaggaggtgcagaacgccctggccagagccagcaacaccgccgaggagaccatcagcgccatgaagaccgtgagaagcttcgccaacgaggaggaggaggccgaggtgtacctgagaaagctgcagcaggtgtacaagctgaacagaaaggaggccgccgcctacatgtactacgtgtggggcagcggcctgaccctgctggtggtgcaggtgagcatcctgtactacggcggccacctggtgatcagcggccagatgaccagcggcaacctgatcgccttcatcatctacgagttcgtgctgggcgactgcatggagagcgtgggcagcgtgtacagcggcctgatgcagggcgtgggcgccgccgagaaggtgttcgagttcatcgacagacagcccaccatggtgcacgacggcagcctggcccccgaccacctggagggcagagtggacttcgagaacgtgaccttcacctacagaaccagaccccacacccaggtgctgcagaacgtgagcttcagcctgagccccggcaaggtgaccgccctggtgggccccagcggcagcggcaagagcagctgcgtgaacatcctggagaacttctaccccctggagggcggcagagtgctgctggacggcaagcccatcagcgcctacgaccacaagtacctgcacagagtgatcagcctggtgagccaggagcccgtgctgttcgccagaagcatcaccgacaacatcagctacggcctgcccaccgtgcccttcgagatggtggtggaggccgcccagaaggccaacgcccacggcttcatcatggagctgcaggacggctacagcaccgagaccggcgagaagggcgcccagctgagcggcggccagaagcagagagtggccatggccagagccctggtgagaaacccccccgtgctgatcctggacgaggccaccagcgccctggacgccgagagcgagtacctgatctag

SEQ ID NO: 73742 - DNA, 2052 bp, synthetic construct
  misc_feature 1..2052: note = Description of Artificial Sequence: Synthetic coding sequence
  source 1..2052: mol_type = other DNA
atgagactgtggaaggccgtggtggtgaccctggccttcatgagcgtggacatctgcgtgaccaccgccatctacgtgttcagccacctggacagaagcctgctggaggacatcagacacttcaacatcttcgacagcgtgctggacctgtgggccgcctgcctgtacagaagctgcctgctgctgggcgccaccatcggcgtggccaagaacagcgccctgggccccagaagactgagagccagctggctggtgatcaccctggtgtgcctgttcgtgggcatctacgccatggtgaagctgctgctgttcagcgaggtgagaagacccatcagagacccctggttctgggccctgttcgtgtggacctacatcagcctgggcgccagcttcctgctgtggtggctgctgagcaccgtgagacccggcacccaggccctggagcccggcgccgccaccgaggccgagggcttccccggcagcggcagacccccccccgagcaggccagcggcgccaccctgcagaagctgctgagctacaccaagcccgacgtggccttcctggtggccgccagcttcttcctgatcgtggccgccctgggcgagaccttcctgccctactacaccggcagagccatcgacggcatcgtgatccagaagagcatggaccagttcagcaccgccgtggtgatcgtgtgcctgctggccatcggcagcagcttcgccgccggcatcagaggcggcatcttcaccctgatcttcgccagactgaacatcagactgagaaactgcctgttcagaagcctggtgagccaggagaccagcttcttcgacgagaacagaaccggcgacctgatcagcagactgaccagcgacaccaccatggtgagcgacctggtgagccagaacatcaacgtgttcctgagaaacaccgtgaaggtgaccggcgtggtggtgttcatgttcagcctgagctggcagctgagcctggtgaccttcatgggcttccccatcatcatgatggtgagcaacatctacggcaagtactacaagagactgagcaaggaggtgcagaacgccctggccagagccagcaacaccgccgaggagaccatcagcgccatgaagaccgtgagaagcttcgccaacgaggaggaggaggccgaggtgtacctgagaaagctgcagcaggtgtacaagctgaacagaaaggaggccgccgcctacatgtactacgtgtggggcagcggcctgaccctgctggtggtgcaggtgagcatcctgtactacggcggccacctggtgatcagcggccagatgaccagcggcaacctgatcgccttcatcatctacgagttcgtgctgggcgactgcatggagagcgtgggcagcgtgtacagcggcctgatgcagggcgtgggcgccgccgagaaggtgttcgagttcatcgacagacagcccaccatggtgcacgacggcagcctggcccccgaccacctggagggcagagtggacttcgagaacgtgaccttcacctacagaaccagaccccacacccaggtgctgcagaacgtgagcttcagcctgagccccggcaaggtgaccgccctggtgggccccagcggcagcggcaagagcagctgcgtgaacatcctggagaacttctaccccctggagggcggcagagtgctgctggacggcaagcccatcagcgcctacgaccacaagtacctgcacagagtgatcagcctggtgagccaggagcccgtgctgttcgccagaagcatcaccgacaacatcagctacggcctgcccaccgtgcccttcgagatggtggtggaggccgcccagaaggccaacgcccacggcttcatcatggagctgcaggacggctacagcaccgagaccggcgagaagggcgcccagctgagcggcggccagaagcagagagtggccatggccagagccctggtgagaaacccccccgtgctgatcctggacgaggccaccagcgccctggacgccgagagcgagtacctgtgcgccggctag

SEQ ID NO: 73743 - DNA, 300 bp, synthetic construct
  misc_feature 1..300: note = Description of Artificial Sequence: Synthetic coding sequence
  source 1..300: mol_type = other DNA
atggccgcccccgccgagccctgcgccggccagggcgtgtggaaccagaccgagcccgagcccgccgccaccagcctgctgagcctgtgcttcctgagaaccgccggcgtgtgggtgccccccatgtacctgtgggtgctgggccccatctacctgctgttcatccaccaccacggcagaggctacctgagaatgagccccctgttcaaggccaagatggtggccgccatccccggcagcctggagcccggcaacgtgagaggcagacagggcaccggctggaacctggtgaagagctag

SEQ ID NO: 73744 - DNA, 372 bp, synthetic construct
  misc_feature 1..372: note = Description of Artificial Sequence: Synthetic coding sequence
  source 1..372: mol_type = other DNA
atgcccagcgccggcaccctgccctgggtgcagggcatcatctgcaacgccaacaacccctgcttcagataccccacccccggcgaggcccccggcgtggtgggcaacttcaacaagagcatcgtggccagactgttcagcgacgccagaagactgctgctgtacagccagaaggacaccagcatgaaggacatgagaaaggtgctgagaaccctgcagcagatcaagaagagcagcagcaacctgaagctgcaggacttcctggtggacaacgagaccttcagcggcttcctgtaccacaacctgagcctgcccaagagcaccgtggacaagatgctgagagccgacgtgatcctgcacaaggtgagctag

SEQ ID NO: 73745 - DNA, 6786 bp, synthetic construct
  misc_feature 1..6786: note = Description of Artificial Sequence: Synthetic coding sequence
  source 1..6786: mol_type = other DNA
atggcctgctggccccagctgagactgctgctgtggaagaacctgaccttcagaagaagacagacctgccagctgctgctggaggtggcctggcccctgttcatcttcctgatcctgatcagcgtgagactgagctaccccccctacgagcagcacgagtgccacttccccaacaaggccatgcccagcgccggcaccctgccctgggtgcagggcatcatctgcaacgccaacaacccctgcttcagataccccacccccggcgaggcccccggcgtggtgggcaacttcaacaagagcatcgtggccagactgttcagcgacgccagaagactgctgctgtacagccagaaggacaccagcatgaaggacatgagaaaggtgctgagaaccctgcagcagatcaagaagagcagcagcaacctgaagctgcaggacttcctggtggacaacgagaccttcagcggcttcctgtaccacaacctgagcctgcccaagagcaccgtggacaagatgctgagagccgacgtgatcctgcacaaggtgttcctgcagggctaccagctgcacctgaccagcctgtgcaacggcagcaagagcgaggagatgatccagctgggcgaccaggaggtgagcgagctgtgcggcctgcccagagagaagctggccgccgccgagagagtgctgagaagcaacatggacatcctgaagcccatcctgagaaccctgaacagcaccagccccttccccagcaaggagctggccgaggccaccaagaccctgctgcacagcctgggcaccctggcccaggagctgttcagcatgagaagctggagcgacatgagacaggaggtgatgttcctgaccaacgtgaacagcagcagcagcagcacccagatctaccaggccgtgagcagaatcgtgtgcggccaccccgagggcggcggcctgaagatcaagagcctgaactggtacgaggacaacaactacaaggccctgttcggcggcaacggcaccgaggaggacgccgagaccttctacgacaacagcaccaccccctactgcaacgacctgatgaagaacctggagagcagccccctgagcagaatcatctggaaggccctgaagcccctgctggtgggcaagatcctgtacacccccgacacccccgccaccagacaggtgatggccgaggtgaacaagaccttccaggagctggccgtgttccacgacctggagggcatgtgggaggagctgagccccaagatctggaccttcatggagaacagccaggagatggacctggtgagaatgctgctggacagcagagacaacgaccacttctgggagcagcagctggacggcctggactggaccgcccaggacatcgtggccttcctggccaagcaccccgaggacgtgcagagcagcaacggcagcgtgtacacctggagagaggccttcaacgagaccaaccaggccatcagaaccatcagcagattcatggagtgcgtgaacctgaacaagctggagcccatcgccaccgaggtgtggctgatcaacaagagcatggagctgctggacgagagaaagttctgggccggcatcgtgttcaccggcatcacccccggcagcatcgagctgccccaccacgtgaagtacaagatcagaatggacatcgacaacgtggagagaaccaacaagatcaaggacggctactgggaccccggccccagagccgaccccttcgaggacatgagatacgtgtggggcggcttcgcctacctgcaggacgtggtggagcaggccatcatcagagtgctgaccggcaccgagaagaagaccggcgtgtacatgcagcagatgccctacccctgctacgtggacgacatcttcctgagagtgatgagcagaagcatgcccctgttcatgaccctggcctggatctacagcgtggccgtgatcatcaagggcatcgtgtacgagaaggaggccagactgaaggagaccatgagaatcatgggcctggacaacagcatcctgtggttcagctggttcatcagcagcctgatccccctgctggtgagcgccggcctgctggtggtgatcctgaagctgggcaacctgctgccctacagcgaccccagcgtggtgttcgtgttcctgagcgtgttcgccgtggtgaccatcctgcagtgcttcctgatcagcaccctgttcagcagagccaacctggccgccgcctgcggcggcatcatctacttcaccctgtacctgccctacgtgctgtgcgtggcctggcaggactacgtgggcttcaccctgaagatcttcgccagcctgctgagccccgtggccttcggcttcggctgcgagtacttcgccctgttcgaggagcagggcatcggcgtgcagtgggacaacctgttcgagagccccgtggaggaggacggcttcaacctgaccaccagcgtgagcatgatgctgttcgacaccttcctgtacggcgtgatgacctggtacatcgaggccgtgttccccggccagtacggcatccccagaccctggtacttcccctgcaccaagagctactggttcggcgaggagagcgacgagaagagccaccccggcagcaaccagaagagaatcagcgagatctgcatggaggaggagcccacccacctgaagctgggcgtgagcatccagaacctggtgaaggtgtacagagacggcatgaaggtggccgtggacggcctggccctgaacttctacgagggccagatcaccagcttcctgggccacaacggcgccggcaagaccaccaccatgagcatcctgaccggcctgttcccccccaccagcggcaccgcctacatcctgggcaaggacatcagaagcgagatgagcaccatcagacagaacctgggcgtgtgcccccagcacaacgtgctgttcgacatgctgaccgtggaggagcacatctggttctacgccagactgaagggcctgagcgagaagcacgtgaaggccgagatggagcagatggccctggacgtgggcctgcccagcagcaagctgaagagcaagaccagccagctgagcggcggcatgcagagaaagctgagcgtggccctggccttcgtgggcggcagcaaggtggtgatcctggacgagcccaccgccggcgtggacccctacagcagaagaggcatctgggagctgctgctgaagtacagacagggcagaaccatcatcctgagcacccaccacatggacgaggccgacgtgctgggcgacagaatcgccatcatcagccacggcaagctgtgctgcgtgggcagcagcctgttcctgaagaaccagctgggcaccggctactacctgaccctggtgaagaaggacgtggagagcagcctgagcagctgcagaaacagcagcagcaccgtgagctacctgaagaaggaggacagcgtgagccagagcagcagcgacgccggcctgggcagcgaccacgagagcgacaccctgaccatcgacgtgagcgccatcagcaacctgatcagaaagcacgtgagcgaggccagactggtggaggacatcggccacgagctgacctacgtgctgccctacgaggccgccaaggagggcgccttcgtggagctgttccacgagatcgacgacagactgagcgacctgggcatcagcagctacggcatcagcgagaccaccctggaggagatcttcctgaaggtggccgaggagagcggcgtggacgccgagaccagcgacggcaccctgcccgccagaagaaacagaagagccttcggcgacaagcagagctgcctgagacccttcaccgaggacgacgccgccgaccccaacgacagcgacatcgaccccgagagcagagagaccgacctgctgagcggcatggacggcaagggcagctaccaggtgaagggctggaagctgacccagcagcagttcgtggccctgctgtggaagagactgctgatcgccagaagaagcagaaagggcttcttcgcccagatcgtgctgcccgccgtgttcgtgtgcatcgccctggtgttcagcctgatcgtgccccccttcggcaagtaccccagcctggagctgcagccctggatgtacaacgagcagtacaccttcgtgagcaacgacgcccccgaggacaccggcaccctggagctgctgaacgccctgaccaaggaccccggcttcggcaccagatgcatggagggcaaccccatccccgacaccccctgccaggccggcgaggaggagtggaccaccgcccccgtgccccagaccatcatggacctgttccagaacggcaactggaccatgcagaaccccagccccgcctgccagtgcagcagcgacaagatcaagaagatgctgcccgtgtgcccccccggcgccggcggcctgccccccccccagagaaagcagaacaccgccgacatcctgcaggacctgaccggcagaaacatcagcgactacctggtgaagacctacgtgcagatcatcgccaagagcctgaagaacaagatctgggtgaacgagttcagatacggcggcttcagcctgggcgtgagcaacacccaggccctgccccccagccaggaggtgaacgacgccatcaagcagatgaagaagcacctgaagctggccaaggacagcagcgccgacagattcctgaacagcctgggcagattcatgaccggcctggacaccaagaacaacgtgaaggtgtggttcaacaacaagggctggcacgccatcagcagcttcctgaacgtgatcaacaacgccatcctgagagccaacctgcagaagggcgagaaccccagccactacggcatcaccgccttcaaccaccccctgaacctgaccaagcagcagctgagcgaggtggccctgatgaccaccagcgtggacgtgctggtgagcatctgcgtgatcttcgccatgagcttcgtgcccgccagcttcgtggtgttcctgatccaggagagagtgagcaaggccaagcacctgcagttcatcagcggcgtgaagcccgtgatctactggctgagcaacttcgtgtgggacatgtgcaactacgtggtgcccgccaccctggtgatcatcatcttcatctgcttccagcagaagagctacgtgagcagcaccaacctgcccgtgctggccctgctgctgctgctgtacggctggagcatcacccccctgatgtaccccgccagcttcgtgttcaagatccccagcaccgcctacgtggtgctgaccagcgtgaacctgttcatcggcatcaacggcagcgtggccaccttcgtgctggagctgttcaccgacaacaagctgaacaacatcaacgacatcctgaagagcgtgttcctgatcttcccccacttctgcctgggcagaggcctgatcgacatggtgaagaaccaggccatggccgacgccctggagagattcggcgagaacagattcgtgagccccctgagctgggacctggtgggcagaaacctgttcgccatggccgtggagggcgtggtgttcttcctgatcaccgtgctgatccagtacagattcttcatcagacccagacccgtgaacgccaagctgagccccctgaacgacgaggacgaggacgtgagaagagagagacagagaatcctggacggcggcggccagaacgacatcctggagatcaaggagctgaccaagatctacagaagaaagagaaagcccgccgtggacagaatctgcgtgggcatcccccccggcgagtgcttcggcctgctgggcgtgaacggcgccggcaagagcagcaccttcaagatgctgaccggcgacaccaccgtgaccagaggcgacgccttcctgaacaagaacagcatcctgagcaacatccacgaggtgcaccagaacatgggctactgcccccagttcgacgccatcaccgagctgctgaccggcagagagcacgtggagttcttcgccctgctgagaggcgtgcccgagaaggaggtgggcaaggtgggcgagtgggccatcagaaagctgggcctggtgaagtacggcgagaagtacgccggcaactacagcggcggcaacaagagaaagctgagcaccgccatggccctgatcggcggcccccccgtggtgttcctggacgagcccaccaccggcatggaccccaaggccagaagattcctgtggaactgcgccctgagcgtggtgaaggagggcagaagcgtggtgctgaccagccacagcatggaggagtgcgaggccctgtgcaccagaatggccatcatggtgaacggcagattcagatgcctgggcagcgtgcagcacctgaagaacagattcggcgacggctacaccatcgtggtgagaatcgccggcagcaaccccgacctgaagcccgtgcaggacttcttcggcctggccttccccggcagcgtgctgaaggagaagcacagaaacatgctgcagtaccagctgcccagcagcctgagcagcctggccagaatcttcagcatcctgagccagagcaagaagagactgcacatcgaggactacagcgtgagccagaccaccctggaccaggtgttcgtgaacttcgccaaggaccagagcgacgacgaccacctgaaggacctgagcctgcacaagaaccagaccgtggtggacgtggccgtgctgaccagcttcctgcaggacgagaaggtgaaggagagctacgtgtag

SEQ ID NO: 73746 - DNA, 1092 bp, synthetic construct
  misc_feature 1..1092: note = Description of Artificial Sequence: Synthetic coding sequence
  source 1..1092: mol_type = other DNA
atggcctgctggccccagctgagactgctgctgtggaagaacctgaccttcagaagaagacagacctgccagctgctgctggaggtggcctggcccctgttcatcttcctgatcctgatcagcgtgagactgagctaccccccctacgagcagcacgagtgccacttccccaacaaggccatgcccagcgccggcaccctgccctgggtgcagggcatcatctgcaacgccaacaacccctgcttcagataccccacccccggcgaggcccccggcgtggtgggcaacttcaacaagagcatcgtggccagactgttcagcgacgccagaagactgctgctgtacagccagaaggacaccagcatgaaggacatgagaaaggtgctgagaaccctgcagcagatcaagaagagcagcagcaacctgaagctgcaggacttcctggtggacaacgagaccttcagcggcttcctgtaccacaacctgagcctgcccaagagcaccgtggacaagatgctgagagccgacgtgatcctgcacaaggtgttcctgcagggctaccagctgcacctgaccagcctgtgcaacggcagcaagagcgaggagatgatccagctgggcgaccaggaggtgagcgagctgtgcggcctgcccagagagaagctggccgccgccgagagagtgctgagaagcaacatggacatcctgaagcccatcctgatggacgtgacctgcgacgacatcgcccacggccagctgaccgtgcccagaagcgccgccgtggccgccaccggcgacgccaagcccaacatgatgggcagagagaccctgctgagcatctgcgccagcgtgcccaaggtggagttccacgagagacacatcctgaagcacttcagcttctgcgtgtgcgtgagcgtgagcctgttccccgccaagggcatcgtgagcttcagctgggccagcttcagaatctgggtgctgtggaaggccgtgttctggcagcacggcgagagcatggccgtgtgggagggccagctgggcctgggcctgaacatcgccttcgagtacttcaccagcatcgacgtgggctag

SEQ ID NO: 73747 - DNA, 4632 bp, synthetic construct
  misc_feature 1..4632: note = Description of Artificial Sequence: Synthetic coding sequence
  source 1..4632: mol_type = other DNA
atgaacaagatggccctggccagcttcatgaagggcagaaccgtgatcggcacccccgacgaggagaccatggacatcgagctgcccaagaagtaccacgagatggtgggcgtgatcttcagcgacaccttcagctacagactgaagttcaactggggctacagaatccccgtgatcaaggagcacagcgagtacaccgagcactgctgggccatgcacggcgagatcttctgctacctggccaagtactggctgaagggcttcgtggccttccaggccgccatcaacgccgccatcatcgaggtgaccaccaaccacagcgtgatggaggagctgaccagcgtgatcggcatcaacatgaagatcccccccttcatcagcaagggcgagatcatgaacgagtggttccacttcacctgcctggtgagcttcagcagcttcatctacttcgccagcctgaacgtggccagagagagaggcaagttcaagaagctgatgaccgtgatgggcctgagagagagcgccttctggctgagctggggcctgacctacatctgcttcatcttcatcatgagcatcttcatggccctggtgatcaccagcatccccatcgtgttccacaccggcttcatggtgatcttcaccctgtacagcctgtacggcctgagcctgatcgccctggccttcctgatgagcgtgctgatcagaaagcccatgctggccggcctggccggcttcctgttcaccgtgttctggggctgcctgggcttcaccgtgctgtacagacagctgcccctgagcctgggctgggtgctgagcctgctgagccccttcgccttcaccgccggcatggcccagatcacccacctggacaactacctgagcggcgtgatcttccccgaccccagcggcgacagctacaagatgatcgccaccttcttcatcctggccttcgacaccctgttctacctgatcttcaccctgtacttcgagagagtgctgcccgacaaggacggccacggcgacagccccctgttcttcctgaagagcagcttctggagcaagcaccagaacacccaccacgagatcttcgagaacgagatcaaccccgagcacagcagcgacgacagcttcgagcccgtgagccccgagttccacggcaaggaggccatcagaatcagaaacgtgatcaaggagtacaacggcaagaccggcaaggtggaggccctgcagggcatcttcttcgacatctacgagggccagatcaccgccatcctgggccacaacggcgccggcaagagcaccctgctgaacatcctgagcggcctgagcgtgagcaccgagggcagcgccaccatctacaacacccagctgagcgagatcaccgacatggaggagatcagaaagaacatcggcttctgcccccagttcaacttccagttcgacttcctgaccgtgagagagaacctgagagtgttcgccaagatcaagggcatccagcccaaggaggtggagcaggaggtgaagagaatcatcatggagctggacatgcagagcatccaggacatcatcgccaagaagctgagcggcggccagaagagaaagctgaccctgggcatcgccatcctgggcgacccccaggtgctgctgctggacgagcccaccgccggcctggaccccttcagcagacacagagtgtggagcctgctgaaggagcacaaggtggacagactgatcctgttcagcacccagttcatggacgaggccgacatcctggccgacagaaaggtgttcctgagcaacggcaagctgaagtgcgccggcagcagcctgttcctgaagagaaagtggggcatcggctaccacctgagcctgcacagaaacgagatgtgcgacaccgagaagatcaccagcctgatcaagcagcacatccccgacgccaagctgaccaccgagagcgaggagaagctggtgtacagcctgcccctggagaagaccaacaagttccccgacctgtacagcgacctggacaagtgcagcgaccagggcatcagaaactacgccgtgagcgtgaccagcctgaacgaggtgttcctgaacctggagggcaagagcgccatcgacgagcccgacttcgacatcggcaagcaggagaagatccacgtgaccagaaacaccggcgacgagagcgagatggagcaggtgctgtgcagcctgcccgagaccagaaaggccgtgagcagcgccgccctgtggagaagacagatctacgccgtggccaccctgagattcctgaagctgagaagagagagaagagccctgctgtgcctgctgctggtgctgggcatcgccttcatccccatcatcctggagaagatcatgtacaaggtgaccagagagacccactgctgggagttcagccccagcatgtacttcctgagcctggagcagatccccaagacccccctgaccagcctgctgatcgtgaacaacaccggcagcaacatcgaggacctggtgcacagcctgaagtgccaggacatcgtgctggagatcgacgacttcagaaacagaaacggcagcgacgaccccagctacaacggcgccatcatcgtgagcggcgaccagaaggactacagattcagcgtggcctgcaacaccaagaagctgaactgcttccccgtgctgatgggcatcgtgagcaacgccctgatgggcatcttcaacttcaccgagctgatccagatggagagcaccagcttcagcagagacgacatcgtgctggacctgggcttcatcgacggcagcatcttcctgctgctgatcaccaactgcgtgagccccttcatcggcatgagcagcatcagcgactacaagaagaacgtgcagagccagctgtggatcagcggcctgtggcccagcgcctactggtgcggccaggccctggtggacatccccctgtacttcctgatcctgttcagcatccacctgatctactacttcatcttcctgggcttccagctgagctgggagctgatgttcgtgctggtggtgtgcatcatcggctgcgccgtgagcctgatcttcctgacctacgtgctgagcttcatcttcagaaagtggagaaagaacaacggcttctggagcttcggcttcttcatcatcctgatctgcgtgagcaccatcatggtgagcacccagtacgagaagctgaacctgatcctgtgcatgatcttcatccccagcttcaccctgctgggctacgtgatgctgctgatccagctggacttcatgagaaacctggacagcctggacaacagaatcaacgaggtgaacaagaccatcctgctgaccaccctgatcccctacctgcagagcgtgatcttcctgttcgtgatcagatgcctggagatgaagtacggcaacgagatcatgaacaaggaccccgtgttcagaatcagccccagaagcagagagacccaccccaaccccgaggagcccgaggaggaggacgaggacgtgcaggccgagagagtgcaggccgccaacgccctgaccgcccccaacctggaggaggagcccgtgatcaccgccagctgcctgcacaaggagtactacgagaccaagaagagctgcttcagcaccagaaagaagaagatcgccatcagaaacgtgagcttctgcgtgaagaagggcgaggtgctgggcctgctgggccacaacggcgccggcaagagcaccagcatcaagatgatcaccggctgcaccaagcccaccgccggcgtggtggtgctgcagggcagcagagccagcgtgagacagcagcacgacaacagcctgaagttcctgggctactgcccccaggagaacagcctgtggcccaagctgaccatgaaggagcacctggagctgtacgccgccgtgaagggcctgggcaaggaggacgccgccctgagcatcagcagactggtggaggccctgaagctgcaggagcagctgaaggcccccgtgaagaccctgagcgagggcatcaagagaaagctgtgcttcgtgctgagcatcctgggcaaccccagcgtggtgctgctggacgagcccttcaccggcatggaccccgagggccagcagcagatgtggcagatcctgcaggccaccgtgaagaacaaggagagaggcaccctgctgaccacccactacatgagcgaggccgaggccgtgtgcgacagaatggccatgatggtgagcggcaccctgagatgcatcggcagcatccagcacctgaagaacaagttcggcagagactacctgctggagatcaagatgaaggagcccacccaggtggaggccctgcacaccgagatcctgaagctgttcccccaggccgcctggcaggagagatacagcagcctgatggcctacaagctgcccgtggaggacgtgcaccccctgagcagagccttcttcaagctggaggccatgaagcagaccttcaacctggaggagtacagcctgagccaggccaccctggagcaggtgttcctggagctgtgcaaggagcaggagctgggcaacgtggacgacaagatcgacaccaccgtggagtggaagctgctgccccaggaggacccctag

SEQ ID NO: 73748 - DNA, 1401 bp, synthetic construct
  misc_feature 1..1401: note = Description of Artificial Sequence: Synthetic coding sequence
  source 1..1401: mol_type = other DNA
atgaacaagatggccctggccagcttcatgaagggcagaaccgtgatcggcacccccgacgaggagaccatggacatcgagctgcccaagaagtaccacgagatggtgggcgtgatcttcagcgacaccttcagctacagactgaagttcaactggggctacagaatccccgtgatcaaggagcacagcgagtacaccgagcactgctgggccatgcacggcgagatcttctgctacctggccaagtactggctgaagggcttcgtggccttccaggccgccatcaacgccgccatcatcgaggtgaccaccaaccacagcgtgatggaggagctgaccagcgtgatcggcatcaacatgaagatcccccccttcatcagcaagggcgagatcatgaacgagtggttccacttcacctgcctggtgagcttcagcagcttcatctacttcgccagcctgaacgtggccagagagagaggcaagttcaagaagctgatgaccgtgatgggcctgagagagagcgccttctggctgagctggggcctgacctacatctgcttcatcttcatcatgagcatcttcatggccctggtgatcaccagcatccccatcgtgttccacaccggcttcatggtgatcttcaccctgtacagcctgtacggcctgagcctgatcgccctggccttcctgatgagcgtgctgatcagaaagcccatgctggccggcctggccggcttcctgttcaccgtgttctggggctgcctgggcttcaccgtgctgtacagacagctgcccctgagcctgggctgggtgctgagcctgctgagccccttcgccttcaccgccggcatggcccagatcacccacctggacaactacctgagcggcgtgatcttccccgaccccagcggcgacagctacaagatgatcgccaccttcttcatcctggccttcgacaccctgttctacctgatcttcaccctgtacttcgagagagtgctgcccgacaaggacggccacggcgacagccccctgttcttcctgaagagcagcttctggagcaagcaccagaacacccaccacgagatcttcgagaacgagatcaaccccgagcacagcagcgacgacagcttcgagcccgtgagccccgagttccacggcaaggaggccatcagaatcagaaacgtgatcaaggagtacaacggcaagaccggcaaggtggaggccctgcagggcatcttcttcgacatctacgagggccagatcaccgccatcctgggccacaacggcgccggcaagagcaccctgctgaacatcctgagcggcctgagcgtgagcaccgagggcaagaagaactacaacggcatcagacacgccaagcacagcagacactactgctag

SEQ ID NO: 73749 - DNA, 279 bp, synthetic construct
  misc_feature 1..279: note = Description of Artificial Sequence: Synthetic coding sequence
  source 1..279: mol_type = other DNA
atgaacaagatggccctggccagcttcatgaagggcagaaccgtgatcggcacccccgacgaggagaccatggacatcgagctgcccaagaagtaccacgagatggtgggcgtgatcttcagcgacaccttcagctacagactgaagttcaactggggctacagaatccccgtgatcaaggagcacagcgagtacaccggccacaacaagagcttctgcaacggcggcgtggacatcagctactggaacaagtacgaggacaccaccttccacttctag

SEQ ID NO: 73750 - DNA, 1359 bp, synthetic construct
  misc_feature 1..1359: note = Description of Artificial Sequence: Synthetic coding sequence
  source 1..1359: mol_type = other DNA
atgaacaagatggccctggccagcttcatgaagggcagaaccgtgatcggcacccccgacgaggagaccatggacatcgagctgcccaagaagtaccacgagatggtgggcgtgatcttcagcgacaccttcagctacagactgaagttcaactggggctacagaatccccgtgatcaaggagcacagcgagtacaccgagcactgctgggccatgcacggcgagatcttctgctacctggccaagtactggctgaagggcttcgtggccttccaggccgccatcaacgccgccatcatcgaggtgaccaccaaccacagcgtgatggaggagctgaccagcgtgatcggcatcaacatgaagatcccccccttcatcagcaagggcgagatcatgaacgagtggttccacttcacctgcctggtgagcttcagcagcttcatctacttcgccagcctgaacgtggccagagagagaggcaagttcaagaagctgatgaccgtgatgggcctgagagagagcgccttctggctgagctggggcctgacctacatctgcttcatcttcatcatgagcatcttcatggccctggtgatcaccagcatccccatcgtgttccacaccggcttcatggtgatcttcaccctgtacagcctgtacggcctgagcctgatcgccctggccttcctgatgagcgtgctgatcagaaagcccatgctggccggcctggccggcttcctgttcaccgtgttctggggctgcctgggcttcaccgtgctgtacagacagctgcccctgagcctgggctgggtgctgagcctgctgagccccttcgccttcaccgccggcatggcccagatcacccacctggacaactacctgagcggcgtgatcttccccgaccccagcggcgacagctacaagatgatcgccaccttcttcatcctggccttcgacaccctgttctacctgatcttcaccctgtacttcgagagagtgctgcccgacaaggacggccacggcgacagccccctgttcttcctgaagagcagcttctggagcaagcaccagaacacccaccacgagatcttcgagaacgagatcaaccccgagcacagcagcgacgacagcttcgagcccgtgagccccgagttccacggcaaggaggccatcagaatcagaaacgtgatcaaggagtacaacggcaagaccggcaaggtggaggccctgcagggcagcgaggagagactgtgccccgccgcccacagactgagatgcggcgagagactgtgccccgccgcccaccacctgggctgcgaggagagaccctgccccgccgccacccccagcggcaactag

SEQ ID NO: 73751 - DNA, 7788 bp, synthetic construct
  misc_feature 1..7788: note = Description of Artificial Sequence: Synthetic coding sequence
  source 1..7788: mol_type = other DNA
atggccagcctgttccaccagctgcagatcctggtgtggaagaactggctgggcgtgaagagacagcccctgtggaccctggtgctgatcctgtggcccgtgatcatcttcatcatcctggccatcaccagaaccaagttcccccccaccgccaagcccacctgctacctggcccccagaaacctgcccagcaccggcttcttccccttcctgcagaccctgctgtgcgacaccgacagcaagtgcaaggacaccccctacggcccccaggacctgctgagaagaaagggcatcgacgacgccctgttcaaggacagcgagatcctgagaaagagcagcaacctggacaaggacagcagcctgagcttccagagcacccaggtgcccgagagaagacacgccagcctggccaccgtgttccccagccccagcagcgacctggagatccccggcacctacaccttcaacggcagccaggtgctggccagaatcctgggcctggagaagctgctgaagcagaacagcaccagcgaggacatcagaagagagctgtgcgacagctacagcggctacatcgtggacgacgccttcagctggaccttcctgggcagaaacgtgttcaacaagttctgcctgagcaacatgaccctgctggagagcagcctgcaggagctgaacaagcagttcagccagctgagcagcgaccccaacaaccagaagatcgtgttccaggagatcgtgagaatgctgagcttcttcagccaggtgcaggagcagaaggccgtgtggcagctgctgagcagcttccccaacgtgttccagaacgacaccagcctgagcaacctgttcgacgtgctgagaaaggccaacagcgtgctgctggtggtgcagaaggtgtaccccagattcgccaccaacgagggcttcagaaccctgcagaagagcgtgaagcacctgctgtacaccctggacagccccgcccagggcgacagcgacaacatcacccacgtgtggaacgaggacgacggccagaccctgagccccagcagcctggccgcccagctgctgatcctggagaacttcgaggacgccctgctgaacatcagcgccaacagcccctacatcccctacctggcctgcgtgagaaacgtgaccgacagcctggccagaggcagccccgagaacctgagactgctgcagagcaccatcagattcaagaagagcttcctgagaaacggcagctacgaggactacttcccccccgtgcccgaggtgctgaagagcaagctgagccagctgagaaacctgaccgagctgctgtgcgagagcgagaccttcagcctgatcgagaagagctgccagctgagcgacatgagcttcggcagcctgtgcgaggagagcgagttcgacctgcagctgctggaggccgccgagctgggcaccgagatcgccgccagcctgctgtaccacgacaacgtgatcagcaagaaggtgagagacctgctgaccggcgaccccagcaagatcaacctgaacatggaccagttcctggagcaggccctgcagatgaactacctggagaacatcacccagctgatccccatcatcgaggccatgctgcacgtgaacaacagcgccgacgccagcgagaagcccggccagctgctggagatgttcaagaacgtggaggagctgaaggaggacctgagaagaaccaccggcatgagcaacagaaccatcgacaagctgctggccatccccatccccgacaacagagccgagatcatcagccaggtgttctggctgcacagctgcgacaccaacatcaccacccccaagctggaggacgccatgaaggagttctgcaacctgagcctgagcgagagaagcagacagagctacctgatcggcctgaccctgctgcactacctgaacatctacaacttcacctacaaggtgttcttccccagaaaggaccagaagcccgtggagaagatgatggagctgttcatcagactgaaggagatcctgaaccagatggccagcggcacccaccccctgctggacaagatgagaagcctgaagcagatgcacctgcccagaagcgtgcccctgacccaggccatgtacagaagcaacagaatgaacaccccccagggcagcttcagcaccatcagccaggccctgtgcagccagggcatcaccaccgagtacctgaccgccatgctgcccagcagccagagacccaagggcaaccacaccaaggacttcctgacctacaagctgaccaaggagcagatcgccagcaagtacggcatccccatcaacagcacccccttctgcttcagcctgtacaaggacatcatcaacatgcccgccggccccgtgatctgggccttcctgaagcccatgctgctgggcagaatcctgtacgccccctacaaccccgtgaccaaggccatcatggagaagagcaacgtgaccctgagacagctggccgagctgagagagaagagccaggagtggatggacaagagccccctgttcatgaacagcttccacctgctgaaccaggccatccccatgctgcagaacaccctgagaaaccccttcgtgcaggtgttcgtgaagttcagcgtgggcctggacgccgtggagctgctgaagcagatcgacgagctggacatcctgagactgaagctggagaacaacatcgacatcatcgaccagctgaacaccctgagcagcctgaccgtgaacatcagcagctgcgtgctgtacgacagaatccaggccgccaagaccatcgacgagatggagagagaggccaagagactgtacaagagcaacgagctgttcggcagcgtgatcttcaagctgcccagcaacagaagctggcacagaggctacgacagcggcaacgtgttcctgccccccgtgatcaagtacaccatcagaatgagcctgaagaccgcccagaccaccagaagcctgagaaccaagatctgggcccccggcccccacaacagccccagccacaaccagatctacggcagagccttcatctacctgcaggacagcatcgagagagccatcatcgagctgcagaccggcagaaacagccaggagatcgccgtgcaggtgcaggccatcccctacccctgcttcatgaaggacaacttcctgaccagcgtgagctacagcctgcccatcgtgctgatggtggcctgggtggtgttcatcgccgccttcgtgaagaagctggtgtacgagaaggacctgagactgcacgagtacatgaagatgatgggcgtgaacagctgcagccacttcttcgcctggctgatcgagagcgtgggcttcctgctggtgaccatcgtgatcctgatcatcatcctgaagttcggcaacatcctgcccaagaccaacggcttcatcctgttcctgtacttcagcgactacagcttcagcgtgatcgccatgagctacctgatcagcgtgttcttcaacaacaccaacatcgccgccctgatcggcagcctgatctacatcatcgccttcttccccttcatcgtgctggtgaccgtggagaacgagctgagctacgtgctgaaggtgttcatgagcctgctgagccccaccgccttcagctacgccagccagtacatcgccagatacgaggagcagggcatcggcctgcagtgggagaacatgtacaccagccccgtgcaggacgacaccaccagcttcggctggctgtgctgcctgatcctggccgacagcttcatctacttcctgatcgcctggtacgtgagaaacgtgttccccggcacctacggcatggccgccccctggtacttccccatcctgcccagctactggaaggagagattcggctgcgccgaggtgaagcccgagaagagcaacggcctgatgttcaccaacatcatgatgcagaacaccaaccccagcgccagccccgagtacatgttcagcagcaacatcgagcccgagcccaaggacctgaccgtgggcgtggccctgcacggcgtgaccaagatctacggcagcaaggtggccgtggacaacctgaacctgaacttctacgagggccacatcaccagcctgctgggccccaacggcgccggcaagaccaccaccatcagcatgctgaccggcctgttcggcgccagcgccggcaccatcttcgtgtacggcaaggacatcaagaccgacctgcacaccgtgagaaagaacatgggcgtgtgcatgcagcacgacgtgctgttcagctacctgaccaccaaggagcacctgctgctgtacggcagcatcaaggtgccccactggaccaagaagcagctgcacgaggaggtgaagagaaccctgaaggacaccggcctgtacagccacagacacaagagagtgggcaccctgagcggcggcatgaagagaaagctgagcatcagcatcgccctgatcggcggcagcagagtggtgatcctggacgagcccagcaccggcgtggacccctgcagcagaagaagcatctgggacgtgatcagcaagaacaagaccgccagaaccatcatcctgagcacccaccacctggacgaggccgaggtgctgagcgacagaatcgccttcctggagcagggcggcctgagatgctgcggcagccccttctacctgaaggaggccttcggcgacggctaccacctgaccctgaccaagaagaagagccccaacctgaacgccaacgccgtgtgcgacaccatggccgtgaccgccatgatccagagccacctgcccgaggcctacctgaaggaggacatcggcggcgagctggtgtacgtgctgccccccttcagcaccaaggtgagcggcgcctacctgagcctgctgagagccctggacaacggcatgggcgacctgaacatcggctgctacggcatcagcgacaccaccgtggaggaggtgttcctgaacctgaccaaggagagccagaagaacagcgccatgagcctggagcacctgacccagaagaagatcggcaacagcaacgccaacggcatcagcacccccgacgacctgagcgtgagcagcagcaacttcaccgacagagacgacaagatcctgaccagaggcgagagactggacggcttcggcctgctgctgaagaagatcatggccatcctgatcaagagattccaccacaccagaagaaactggaagggcctgatcgcccaggtgatcctgcccatcgtgttcgtgaccaccgccatgggcctgggcaccctgagaaacagcagcaacagctaccccgagatccagatcagccccagcctgtacggcaccagcgagcagaccgccttctacgccaactaccaccccagcaccgaggccctggtgagcgccatgtgggacttccccggcatcgacaacatgtgcctgaacaccagcgacctgcagtgcctgaacaaggacagcctggagaagtggaacaccagcggcgagcccatcaccaacttcggcgtgtgcagctgcagcgagaacgtgcaggagtgccccaagttcaactacagccccccccacagaagaacctacagcagccaggtgatctacaacctgaccggccagagagtggagaactacctgatcagcaccgccaacgagttcgtgcagaagagatacggcggctggagcttcggcctgcccctgaccaaggacctgagattcgacatcaccggcgtgcccgccaacagaaccctggccaaggtgtggtacgaccccgagggctaccacagcctgcccgcctacctgaacagcctgaacaacttcctgctgagagtgaacatgagcaagtacgacgccgccagacacggcatcatcatgtacagccacccctaccccggcgtgcaggaccaggagcaggccaccatcagcagcctgatcgacatcctggtggccctgagcatcctgatgggctacagcgtgaccaccgccagcttcgtgacctacgtggtgagagagcaccagaccaaggccaagcagctgcagcacatcagcggcatcggcgtgacctgctactgggtgaccaacttcatctacgacatggtgttctacctggtgcccgtggccttcagcatcggcatcatcgccatcttcaagctgcccgccttctacagcgagaacaacctgggcgccgtgagcctgctgctgctgctgttcggctacgccaccttcagctggatgtacctgctggccggcctgttccacgagaccggcatggccttcatcacctacgtgtgcgtgaacctgttcttcggcatcaacagcatcgtgagcctgagcgtggtgtacttcctgagcaaggagaagcccaacgaccccaccctggagctgatcagcgagaccctgaagagaatcttcctgatcttcccccagttctgcttcggctacggcctgatcgagctgagccagcagcagagcgtgctggacttcctgaaggcctacggcgtggagtaccccaacgagaccttcgagatgaacaagctgggcgccatgttcgtggccctggtgagccagggcaccatgttcttcagcctgagactgctgatcaacgagagcctgatcaagaagctgagactgttcttcagaaagttcaacagcagccacgtgagagagaccatcgacgaggacgaggacgtgagagccgagagactgagagtggagagcggcgccgccgagttcgacctggtgcagctgtactgcctgaccaagacctaccagctgatccacaagaagatcatcgccgtgaacaacatcagcatcggcatccccgccggcgagtgcttcggcctgctgggcgtgaacggcgccggcaagaccaccatcttcaagatgctgaccggcgacatcatccccagcagcggcaacatcctgatcagaaacaagaccggcagcctgggccacgtggacagccacagcagcctggtgggctactgcccccaggaggacgccctggacgacctggtgaccgtggaggagcacctgtacttctacgccagagtgcacggcatccccgagaaggacatcaaggagaccgtgcacaagctgctgagaagactgcacctgatgcccttcaaggacagagccaccagcatgtgcagctacggcaccaagagaaagctgagcaccgccctggccctgatcggcaagcccagcatcctgctgctggacgagcccagcagcggcatggaccccaagagcaagagacacctgtggaagatcatcagcgaggaggtgcagaacaagtgcagcgtgatcctgaccagccacagcatggaggagtgcgaggccctgtgcaccagactggccatcatggtgaacggcaagttccagtgcatcggcagcctgcagcacatcaagagcagattcggcagaggcttcaccgtgaaggtgcacctgaagaacaacaaggtgaccatggagaccctgaccaagttcatgcagctgcacttccccaagacctacctgaaggaccagcacctgagcatgctggagtaccacgtgcccgtgaccgccggcggcgtggccaacatcttcgacctgctggagaccaacaagaccgccctgaacatcaccaacttcctggtgagccagaccaccctggaggaggtgttcatcaacttcgccaaggaccagaagagctacgagaccgccgacaccagcagccagggcagcaccatcagcgtggacagccaggacgaccagatggagagctag

SEQ ID NO: 73752 - DNA, 6834 bp, synthetic construct
  misc_feature 1..6834: note = Description of Artificial Sequence: Synthetic coding sequence
  source 1..6834: mol_type = other DNA
atgttcacctacatcaagatcatcaccagcggcgacagcgacaacatcacccacgtgtggaacgaggacgacggccagaccctgagccccagcagcctggccgcccagctgctgatcctggagaacttcgaggacgccctgctgaacatcagcgccaacagcccctacatcccctacctggcctgcgtgagaaacgtgaccgacagcctggccagaggcagccccgagaacctgagactgctgcagagcaccatcagattcaagaagagcttcctgagaaacggcagctacgaggactacttcccccccgtgcccgaggtgctgaagagcaagctgagccagctgagaaacctgaccgagctgctgtgcgagagcgagaccttcagcctgatcgagaagagctgccagctgagcgacatgagcttcggcagcctgtgcgaggagagcgagttcgacctgcagctgctggaggccgccgagctgggcaccgagatcgccgccagcctgctgtaccacgacaacgtgatcagcaagaaggtgagagacctgctgaccggcgaccccagcaagatcaacctgaacatggaccagttcctggagcaggccctgcagatgaactacctggagaacatcacccagctgatccccatcatcgaggccatgctgcacgtgaacaacagcgccgacgccagcgagaagcccggccagctgctggagatgttcaagaacgtggaggagctgaaggaggacctgagaagaaccaccggcatgagcaacagaaccatcgacaagctgctggccatccccatccccgacaacagagccgagatcatcagccaggtgttctggctgcacagctgcgacaccaacatcaccacccccaagctggaggacgccatgaaggagttctgcaacctgagcctgagcgagagaagcagacagagctacctgatcggcctgaccctgctgcactacctgaacatctacaacttcacctacaaggtgttcttccccagaaaggaccagaagcccgtggagaagatgatggagctgttcatcagactgaaggagatcctgaaccagatggccagcggcacccaccccctgctggacaagatgagaagcctgaagcagatgcacctgcccagaagcgtgcccctgacccaggccatgtacagaagcaacagaatgaacaccccccagggcagcttcagcaccatcagccaggccctgtgcagccagggcatcaccaccgagtacctgaccgccatgctgcccagcagccagagacccaagggcaaccacaccaaggacttcctgacctacaagctgaccaaggagcagatcgccagcaagtacggcatccccatcaacagcacccccttctgcttcagcctgtacaaggacatcatcaacatgcccgccggccccgtgatctgggccttcctgaagcccatgctgctgggcagaatcctgtacgccccctacaaccccgtgaccaaggccatcatggagaagagcaacgtgaccctgagacagctggccgagctgagagagaagagccaggagtggatggacaagagccccctgttcatgaacagcttccacctgctgaaccaggccatccccatgctgcagaacaccctgagaaaccccttcgtgcaggtgttcgtgaagttcagcgtgggcctggacgccgtggagctgctgaagcagatcgacgagctggacatcctgagactgaagctggagaacaacatcgacatcatcgaccagctgaacaccctgagcagcctgaccgtgaacatcagcagctgcgtgctgtacgacagaatccaggccgccaagaccatcgacgagatggagagagaggccaagagactgtacaagagcaacgagctgttcggcagcgtgatcttcaagctgcccagcaacagaagctggcacagaggctacgacagcggcaacgtgttcctgccccccgtgatcaagtacaccatcagaatgagcctgaagaccgcccagaccaccagaagcctgagaaccaagatctgggcccccggcccccacaacagccccagccacaaccagatctacggcagagccttcatctacctgcaggacagcatcgagagagccatcatcgagctgcagaccggcagaaacagccaggagatcgccgtgcaggtgcaggccatcccctacccctgcttcatgaaggacaacttcctgaccagcgtgagctacagcctgcccatcgtgctgatggtggcctgggtggtgttcatcgccgccttcgtgaagaagctggtgtacgagaaggacctgagactgcacgagtacatgaagatgatgggcgtgaacagctgcagccacttcttcgcctggctgatcgagagcgtgggcttcctgctggtgaccatcgtgatcctgatcatcatcctgaagttcggcaacatcctgcccaagaccaacggcttcatcctgttcctgtacttcagcgactacagcttcagcgtgatcgccatgagctacctgatcagcgtgttcttcaacaacaccaacatcgccgccctgatcggcagcctgatctacatcatcgccttcttccccttcatcgtgctggtgaccgtggagaacgagctgagctacgtgctgaaggtgttcatgagcctgctgagccccaccgccttcagctacgccagccagtacatcgccagatacgaggagcagggcatcggcctgcagtgggagaacatgtacaccagccccgtgcaggacgacaccaccagcttcggctggctgtgctgcctgatcctggccgacagcttcatctacttcctgatcgcctggtacgtgagaaacgtgttccccggcacctacggcatggccgccccctggtacttccccatcctgcccagctactggaaggagagattcggctgcgccgaggtgaagcccgagaagagcaacggcctgatgttcaccaacatcatgatgcagaacaccaaccccagcgccagccccgagtacatgttcagcagcaacatcgagcccgagcccaaggacctgaccgtgggcgtggccctgcacggcgtgaccaagatctacggcagcaaggtggccgtggacaacctgaacctgaacttctacgagggccacatcaccagcctgctgggccccaacggcgccggcaagaccaccaccatcagcatgctgaccggcctgttcggcgccagcgccggcaccatcttcgtgtacggcaaggacatcaagaccgacctgcacaccgtgagaaagaacatgggcgtgtgcatgcagcacgacgtgctgttcagctacctgaccaccaaggagcacctgctgctgtacggcagcatcaaggtgccccactggaccaagaagcagctgcacgaggaggtgaagagaaccctgaaggacaccggcctgtacagccacagacacaagagagtgggcaccctgagcggcggcatgaagagaaagctgagcatcagcatcgccctgatcggcggcagcagagtggtgatcctggacgagcccagcaccggcgtggacccctgcagcagaagaagcatctgggacgtgatcagcaagaacaagaccgccagaaccatcatcctgagcacccaccacctggacgaggccgaggtgctgagcgacagaatcgccttcctggagcagggcggcctgagatgctgcggcagccccttctacctgaaggaggccttcggcgacggctaccacctgaccctgaccaagaagaagagccccaacctgaacgccaacgccgtgtgcgacaccatggccgtgaccgccatgatccagagccacctgcccgaggcctacctgaaggaggacatcggcggcgagctggtgtacgtgctgccccccttcagcaccaaggtgagcggcgcctacctgagcctgctgagagccctggacaacggcatgggcgacctgaacatcggctgctacggcatcagcgacaccaccgtggaggaggtgttcctgaacctgaccaaggagagccagaagaacagcgccatgagcctggagcacctgacccagaagaagatcggcaacagcaacgccaacggcatcagcacccccgacgacctgagcgtgagcagcagcaacttcaccgacagagacgacaagatcctgaccagaggcgagagactggacggcttcggcctgctgctgaagaagatcatggccatcctgatcaagagattccaccacaccagaagaaactggaagggcctgatcgcccaggtgatcctgcccatcgtgttcgtgaccaccgccatgggcctgggcaccctgagaaacagcagcaacagctaccccgagatccagatcagccccagcctgtacggcaccagcgagcagaccgccttctacgccaactaccaccccagcaccgaggccctggtgagcgccatgtgggacttccccggcatcgacaacatgtgcctgaacaccagcgacctgcagtgcctgaacaaggacagcctggagaagtggaacaccagcggcgagcccatcaccaacttcggcgtgtgcagctgcagcgagaacgtgcaggagtgccccaagttcaactacagccccccccacagaagaacctacagcagccaggtgatctacaacctgaccggccagagagtggagaactacctgatcagcaccgccaacgagttcgtgcagaagagatacggcggctggagcttcggcctgcccctgaccaaggacctgagattcgacatcaccggcgtgcccgccaacagaaccctggccaaggtgtggtacgaccccgagggctaccacagcctgcccgcctacctgaacagcctgaacaacttcctgctgagagtgaacatgagcaagtacgacgccgccagacacggcatcatcatgtacagccacccctaccccggcgtgcaggaccaggagcaggccaccatcagcagcctgatcgacatcctggtggccctgagcatcctgatgggctacagcgtgaccaccgccagcttcgtgacctacgtggtgagagagcaccagaccaaggccaagcagctgcagcacatcagcggcatcggcgtgacctgctactgggtgaccaacttcatctacgacatggtgttctacctggtgcccgtggccttcagcatcggcatcatcgccatcttcaagctgcccgccttctacagcgagaacaacctgggcgccgtgagcctgctgctgctgctgttcggctacgccaccttcagctggatgtacctgctggccggcctgttccacgagaccggcatggccttcatcacctacgtgtgcgtgaacctgttcttcggcatcaacagcatcgtgagcctgagcgtggtgtacttcctgagcaaggagaagcccaacgaccccaccctggagctgatcagcgagaccctgaagagaatcttcctgatcttcccccagttctgcttcggctacggcctgatcgagctgagccagcagcagagcgtgctggacttcctgaaggcctacggcgtggagtaccccaacgagaccttcgagatgaacaagctgggcgccatgttcgtggccctggtgagccagggcaccatgttcttcagcctgagactgctgatcaacgagagcctgatcaagaagctgagactgttcttcagaaagttcaacagcagccacgtgagagagaccatcgacgaggacgaggacgtgagagccgagagactgagagtggagagcggcgccgccgagttcgacctggtgcagctgtactgcctgaccaagacctaccagctgatccacaagaagatcatcgccgtgaacaacatcagcatcggcatccccgccggcgagtgcttcggcctgctgggcgtgaacggcgccggcaagaccaccatcttcaagatgctgaccggcgacatcatccccagcagcggcaacatcctgatcagaaacaagaccggcagcctgggccacgtggacagccacagcagcctggtgggctactgcccccaggaggacgccctggacgacctggtgaccgtggaggagcacctgtacttctacgccagagtgcacggcatccccgagaaggacatcaaggagaccgtgcacaagctgctgagaagactgcacctgatgcccttcaaggacagagccaccagcatgtgcagctacggcaccaagagaaagctgagcaccgccctggccctgatcggcaagcccagcatcctgctgctggacgagcccagcagcggcatggaccccaagagcaagagacacctgtggaagatcatcagcgaggaggtgcagaacaagtgcagcgtgatcctgaccagccacagcatggaggagtgcgaggccctgtgcaccagactggccatcatggtgaacggcaagttccagtgcatcggcagcctgcagcacatcaagagcagattcggcagaggcttcaccgtgaaggtgcacctgaagaacaacaaggtgaccatggagaccctgaccaagttcatgcagctgcacttccccaagacctacctgaaggaccagcacctgagcatgctggagtaccacgtgcccgtgaccgccggcggcgtggccaacatcttcgacctgctggagaccaacaagaccgccctgaacatcaccaacttcctggtgagccagaccaccctggaggaggtgttcatcaacttcgccaaggaccagaagagctacgagaccgccgacaccagcagccagggcagcaccatcagcgtggacagccaggacgaccagatggagagctag

SEQ ID NO: 73753 - DNA, 15177 bp, synthetic construct
  misc_feature 1..15177: note = Description of Artificial Sequence: Synthetic coding sequence
  source 1..15177: mol_type = other DNA
atgggccacgccggctgccagttcaaggccctgctgtggaagaactggctgtgcagactgagaaaccccgtgctgttcctggccgagttcttctggccctgcatcctgttcgtgatcctgaccgtgctgagattccaggagccccccagatacagagacatctgctacctgcagcccagagacctgcccagctgcggcgtgatccccttcgtgcagagcctgctgtgcaacaccggcagcagatgcagaaacttcagctacgagggcagcatggagcaccacttcagactgagcagattccagaccgccgccgaccccaagaaggtgaacaacctggccttcctgaaggagatccaggacctggccgaggagatccacggcatgatggacaaggccaagaacctgaagagactgtgggtggagagaagcaacacccccgacagcagctacggcagcagcttcttcaccatggacctgaacaagaccgaggaggtgatcctgaagctggagagcctgcaccagcagccccacatctgggacttcctgctgctgctgcccagactgcacaccagccacgaccacgtggaggacggcatggacgtggccgtgaacctgctgcagaccatcctgaacagcctgatcagcctggaggacctggactggctgcccctgaaccagaccttcagccaggtgagcgagctggtgctgaacgtgaccatcagcaccctgaccttcctgcagcagcacggcgtggccgtgaccgagcccgtgtaccacctgagcatgcagaacatcgtgtgggacccccagaaggtgcagtacgacctgaagagccagttcggcttcgacgacctgcacaccgagcagatcctgaacagcagcgccgagctgaaggagatccccaccgacaccagcctggagaagatggtgtgcagcgtgctgagcagcaccagcgaggacgaggccgagaagtggggccacgtgggcggctgccaccccaagtggagcgaggccaagaactacctggtgcacgccgtgagctggctgagagtgtaccagcaggtgttcgtgcagtggcagcagggcagcctgctgcagaagaccctgaccggcatgggccacagcctggaggccctgagaaaccagttcgaggaggagagcaagccctggaaggtggtggaggccctgcacaccgccctgctgctgctgaacgacagcctgagcgccgacggccccaaggacaaccacaccttccccaagatcctgcagcacctgtggaagctgcagagcctgctgcagaacctgccccagtggcccgccctgaagagattcctgcagctggacggcgccctgagaaacgccatcgcccagaacctgcacttcgtgcaggaggtgctgatctgcctggagaccagcgccaacgacttcaagtggttcgagctgaaccagctgaagctggagaaggacgtgttcttctgggagctgaagcagatgctggccaagaacgccgtgtgccccaacggcagattcagcgagaaggaggtgttcctgccccccggcaacagcagcatctggggcggcctgcagggcctgctgtgctactgcaacagcagcgagaccagcgtgctgaacaagctgctgggcagcgtggaggacgccgacagaatcctgcaggaggtgatcacctggcacaagaacatgagcgtgctgatccccgaggagtacctggactggcaggagctggagatgcagctgagcgaggccagcctgagctgcaccagactgttcctgctgctgggcgccgaccccagccccgagaacgacgtgttcagcagcgactgcaagcaccagctggtgagcaccgtgatcttccacaccctggagaagacccagttcttcctggagcaggcctactactggaaggccttcaagaagttcatcagaaagacctgcgaggtggcccagtacgtgaacatgcaggagagcttccagaacagactgctggccttccccgaggagagcccctgcttcgaggagaacatggactggaagatgatcagcgacaactacttccagttcctgaacaacctgctgaagagccccaccgccagcatcagcagagccctgaacttcaccaagcacctgctgatgatggagaagaagctgcacaccctggaggacgagcagatgaacttcctgctgagcttcgtggagttcttcgagaagctgctgctgcccaacctgttcgacagcagcatcgtgcccagcttccacagcctgcccagcctgaccgaggacatcctgaacatcagcagcctgtggaccaaccacctgaagagcctgaagagagaccccagcgccaccgacgcccagaagctgctggagttcggcaacgaggtgatctggaagatgcagaccctgggcagccactggatcagaaaggagcccaagaacctgctgagattcatcgagctgatcctgttcgagatcaaccccaagctgctggagctgtgggcctacggcatcagcaagggcaagagagccaagctggagaacttcttcaccctgctgaacttcagcgtgcccgagaacgagatcctgagcaccagcttcaacttcagccagctgttccacagcgactggcccaagagccccgccatgaacatcgacttcgtgagactgagcgaggccatcatcaccagcctgcacgagttcggcttcctggagcaggagcagatcagcgaggccctgaacaccgtgtacgccatcagaaacgccagcgacctgttcagcgccctgagcgagccccagaagcaggaggtggacaagatcctgacccacatccacctgaacgtgttccaggacaaggacagcgccctgctgctgcagatctacagcagcttctacagatacatctacgagctgctgaacatccagagcagaggcagcagcctgaccttcctgacccagatcagcaagcacatcctggacatcatcaagcagttcaacttccagaacatcagcaaggccttcgccttcctgttcaagaccgccgaggtgctgggcggcatcagcaacgtgagctactgccagcagctgctgagcatcttcaacttcctggagctgcaggcccagagcttcatgagcaccgagggccaggagctggaggtgatccacaccaccctgaccggcctgaagcagctgctgatcatcgacgaggacttcagaatcagcctgttccagtacatgagccagttcttcaacagcagcgtggaggacctgctggacaacaagtgcctgatcagcgacaacaagcacatcagcagcgtgaactacagcaccagcgaggagagcagcttcgtgttccccctggcccagatcttcagcaacctgagcgccaacgtgagcgtgttcaacaagttcatgagcatccactgcaccgtgagctggctgcagatgtggaccgagatctgggagaccatcagccagctgttcaagttcgacatgaacgtgttcaccagcctgcaccacggcttcacccagctgctggacgagctggaggacgacgtgaaggtgagcaagagctgccagggcatcctgcccacccacaacgtggccagactgatcctgaacctgttcaagaacgtgacccaggccaacgacttccacaactgggaggacttcctggacctgagagacttcctggtggccctgggcaacgccctggtgagcgtgaagaagctgaacctggagcaggtggagaagagcctgttcaccatggaggccgccctgcaccagctgaagaccttccccttcaacgagagcaccagcagagagttcctgaacagcctgctggaggtgttcatcgagttcagcagcaccagcgagtacatcgtgagaaacctggacagcatcaacgacttcctgagcaacaacctgaccaactacggcgagaagttcgagaacatcatcaccgagctgagagaggccatcgtgttcctgagaaacgtgagccacgacagagacctgttcagctgcgccgacatcttccagaacgtgaccgagtgcatcctggaggacggcttcctgtacgtgaacaccagccagagaatgctgagaatcctggacaccctgaacagcaccttcagcagcgagaacaccatcagcagcctgaagggctgcatcgtgtggctggacgtgatcaaccacctgtacctgctgagcaacagcagcttcagccagggccacctgcagaacatcctgggcaacttcagagacatcgagaacaagatgaacagcatcctgaagatcgtgacctgggtgctgaacatcaagaagcccctgtgcagcagcaacggcagccacatcaactgcgtgaacatctacctgaaggacgtgaccgacttcctgaacatcgtgctgaccaccgtgttcgagaaggagaagaagcccaagttcgagatcctgctggccctgctgaacgacagcaccaagcaggtgagaatgagcatcaacaacctgaccaccgacttcgacttcgccagccagagcaactggagatacttcaccgagctgatcctgagacccatcgagatgagcgacgagatccccaaccagttccagaacatctggctgcacctgatcaccctgggcaaggagttccagaagctggtgaagggcatctacttcaacatcctggagaacaacagcagcagcaagaccgagaacctgctgaacatcttcgccaccagccccaaggagaaggacgtgaacagcgtgggcaacagcatctaccacctggccagctacctggccttcagcctgagccacgacctgcagaacagccccaagatcatcatcagccccgagatcatgaaggccaccggcctgggcatccagctgatcagagacgtgttcaacagcctgatgcccgtggtgcaccacaccagcccccagaacgccggctacatgcaggccctgaagaaggtgaccagcgtgatgagaaccctgaagaaggccgacatcgacctgctggtggaccagctggagcaggtgagcgtgaacctgatggacttcttcaagaacatcagcagcgtgggcaccggcaacctggtggtgaacctgctggtgggcctgatggagaagttcgccgacagcagccacagctggaacgtgaaccacctgctgcagctgagcagactgttccccaaggacgtggtggacgccgtgatcgacgtgtactacgtgctgccccacgccgtgagactgctgcagggcgtgcccggcaagaacatcaccgagggcctgaaggacgtgtacagcttcaccctgctgcacggcatcaccatcagcaacatcaccaaggaggacttcgccatcgtgatcaagatcctgctggacaccatcgagctggtgagcgacaagcccgacatcatcagcgaggccctggcctgcttccccgtggtgtggtgctggaaccacaccaacagcggcttcagacagaacagcaagatcgacccctgcaacgtgcacggcctgatgagcagcagcttctacggcaaggtggccagcatcctggaccacttccacctgagcccccagggcgaggacagcccctgcagcaacgagagcagcagaatggagatcaccagaaaggtggtgtgcatcatccacgagctggtggactggaacagcatcctgctggagctgagcgaggtgttccacgtgaacatcagcctggtgaagaccgtgcagaagttctggcacaagatcctgcccttcgtgccccccagcatcaaccagaccagagacagcatcagcgagctgtgccccagcggcagcatcaagcaggtggccctgcagatcatcgagaagctgaagaacgtgaacttcaccaaggtgaccagcggcgagaacatcctggacaagctgagcagcctgaacaagatcctgaacatcaacgaggacaccgagaccagcgtgcagaacatcatcagcagcaacctggagagaaccgtgcagctgatcagcgaggactggagcctggagaagagcacccacaacctgctgagcctgttcatgatgctgcagaacgccaacgtgaccggcagcagcctggaggccctgagcagcttcatcgagaagagcgagaccccctacaacttcgaggagctgtggcccaagttccagcagatcatgaaggacctgacccaggacttcagaatcagacacctgctgagcgagatgaacaagggcatcaagagcatcaacagcatggccctgcagaagatcaccctgcagttcgcccacttcctggagatcctggacagccccagcctgaagaccctggagatcatcgaggacttcctgctggtgaccaagaactggctgcaggagtacgccaacgaggactacagcagaatgatcgagaccctgttcatccccgtgaccaacgagagcagcaccgaggacatcgccctgctggccaaggccatcgccaccttctggggcagcctgaagaacatcagcagagccggcaacttcgacgtggccttcctgacccacctgctgaaccaggagcagctgaccaacttcagcgtggtgcagctgctgttcgagaacatcctgatcaacctgatcaacaacctggccggcaacagccaggaggccgcctggaacctgaacgacaccgacctgcagatcatgaacttcatcaacctgatcctgaaccacatgcagagcgagaccagcagaaagaccgtgctgagcctgagaagcatcgtggacttcaccgagcagttcctgaagaccttcttcagcctgttcctgaaggaggacagcgagaacaagatcagcctgctgctgaagtacttccacaaggacgtgatcgccgagatgagcttcgtgcccaaggacaagatcctggagatcctgaagctggaccagttcctgaccctgatgatccaggacagactgatgaacatcttcagcagcctgaaggagaccatctaccacctgatgaagagcagcttcatcctggacaacggcgagttctacttcgacacccaccagggcctgaagttcatgcaggacctgttcaacgccctgctgagagagaccagcatgaagaacaagaccgagaacaacatcgacttcttcaccgtggtgagccagctgttcttccacgtgaacaagagcgaggacctgttcaagctgaaccaggacctgggcagcgccctgcacctggtgagagagtgcagcaccgagatggccagactgctggacaccatcctgcacagccccaacaaggacttctacgccctgtaccccaccctgcaggaggtgatcctggccaacctgaccgacctgctgttcttcatcaacaacagcttccccctgagaaacagagccaccctggagatcaccaagagactggtgggcgccatcagcagagccagcgaggagagccacgtgctgaagcccctgctggagatgagcggcaccctggtgatgctgctgaacgacagcgccgacctgagagacctggccaccagcatggacagcatcgtgaagctgctgaagctggtgaagaaggtgagcggcaagatgagcaccgtgttcaagacccacttcatcagcaacaccaaggacagcgtgaagttcttcgacaccctgtacagcatcatgcagcagagcgtgcagaacctggtgaaggagatcgccaccctgaagaagatcgaccacttcaccttcgagaagatcaacgacctgctggtgcccttcctggacctggccttcgagatgatcggcgtggagccctacatcagcagcaacagcgacatcttcagcatgagccccagcatcctgagctacatgaaccagagcaaggacttcagcgacatcctggaggagatcgccgagttcctgaccagcgtgaagatgaacctggaggacatgagaagcctggccgtggccttcaacaacgagacccagaccttcagcatggacagcgtgaacctgagagaggagatcctgggctgcctggtgcccatcaacaacatcaccaaccagatggacttcctgtaccccaaccccatcagcacccacagcggcccccaggacatcaagtgggagatcatccacgaggtgatccccttcctggacaagatcctgagccagaacagcaccgagatcggcagcttcctgaagatggtgatctgcctgaccctggaggccctgtggaagaacctgaagaaggacaactggaacgtgagcaacgtgctgatgaccttcacccagcaccccaacaacctgctgaagaccatcgagaccgtgctggaggccagcagcggcatcaagagcgactacgagggcgacctgaacaagagcctgtacttcgacacccccctgagccagaacatcacccaccaccagctggagaaggccatccacaacgtgctgagcagaatcgccctgtggagaaagggcctgctgttcaacaacagcgagtggatcaccagcaccagaaccctgttccagcccctgttcgagatcttcatcaaggccaccaccggcaagaacgtgaccagcgagaaggaggagagaaccaagaaggagatgatcgacttcccctacagcttcaagcccttcttctgcctggagaagtacctgggcggcctgttcgtgctgaccaagtactggcagcagatccccctgaccgaccagagcgtggtggagatctgcgaggtgttccagcagaccgtgaagcccagcgaggccatggagatgctgcagaaggtgaagatgatggtggtgagagtgctgaccatcgtggccgagaaccccagctggaccaaggacatcctgtgcgccaccctgagctgcaagcagaacggcatcagacacctgatcctgagcgccatccagggcgtgaccctggcccaggaccacttccaggagatcgagaagatctggagcagccccaaccagctgaactgcgagagcctgagcaagaacctgagcagcaccctggagagcttcaagagcagcctggagaacgccaccggccaggactgcaccagccagcccagactggagaccgtgcagcagcacctgtacatgctggccaagagcctggaggagacctggagcagcggcaaccccatcatgaccttcctgagcaacttcaccgtgaccgaggacgtgaagatcaaggacctgatgaagaacatcaccaagctgaccgaggagctgagaagcagcatccagatcagcaacgagaccatccacagcatcctggaggccaacatcagccacagcaaggtgctgttcagcgccctgaccgtggccctgagcggcaagtgcgaccaggagatcctgcacctgctgctgaccttccccaagggcgagaagagctggatcgccgccgaggagctgtgcagcctgcccggcagcaaggtgtacagcctgatcgtgctgctgagcagaaacctggacgtgagagccttcatctacaagaccctgatgcccagcgaggccaacggcctgctgaacagcctgctggacatcgtgagcagcctgagcgccctgctggccaaggcccagcacgtgttcgagtacctgcccgagttcctgcacaccttcaagatcaccgccctgctggagaccctggacttccagcaggtgagccagaacgtgcaggccagaagcagcgccttcggcagcttccagttcgtgatgaagatggtgtgcaaggaccaggccagcttcctgagcgacagcaacatgttcatcaacctgcccagagtgaaggagctgctggaggacgacaaggagaagttcaacatccccgaggacagcacccccttctgcctgaagctgtaccaggagatcctgcagctgcccaacggcgccctggtgtggaccttcctgaagcccatcctgcacggcaagatcctgtacacccccaacacccccgagatcaacaaggtgatccagaaggccaactacaccttctacatcgtggacaagctgaagaccctgagcgagaccctgctggagatgagcagcctgttccagagaagcggcagcggccagatgttcaaccagctgcaggaggccctgagaaacaagttcgtgagaaacttcgtggagaaccagctgcacatcgacgtggacaagctgaccgagaagctgcagacctacggcggcctgctggacgagatgttcaaccacgccggcgccggcagattcagattcctgggcagcatcctggtgaacctgagcagctgcgtggccctgaacagattccaggccctgcagagcgtggacatcctggagaccaaggcccacgagctgctgcagcagaacagcttcctggccagcatcatcttcagcaacagcctgttcgacaagaacttcagaagcgagagcgtgaagctgcccccccacgtgagctacaccatcagaaccaacgtgctgtacagcgtgagaaccgacgtggtgaagaaccccagctggaagttccacccccagaacctgcccgccgacggcttcaagtacaactacgtgttcgcccccctgcaggacatgatcgagagagccatcatcctggtgcagaccggccaggaggccctggagcccgccgcccagacccaggccgccccctacccctgccacaccagcgacctgttcctgaacaacgtgggcttcttcttccccctgatcatgatgctgacctggatggtgagcgtggccagcatggtgagaaagctggtgtacgagcaggagatccagatcgaggagtacatgagaatgatgggcgtgcaccccgtgatccacttcctggcctggttcctggagaacatggccgtgctgaccatcagcagcgccaccctggccatcgtgctgaagaccagcggcatcttcgcccacagcaacaccttcatcgtgttcctgttcctgctggacttcggcatgagcgtggtgatgctgagctacctgctgagcgccttcttcagccaggccaacaccgccgccctgtgcaccagcctggtgtacatgatcagcttcctgccctacatcgtgctgctggtgctgcacaaccagctgagcttcgtgaaccagaccttcctgtgcctgctgagcaccaccgccttcggccagggcgtgttcttcatcaccttcctggagggccaggagaccggcatccagtggaacaacatgtaccaggccctggagcagggcggcatgaccttcggctgggtgtgctggatgatcctgttcgacagcagcctgtacttcctgtgcggctggtacctgagcaacctgatccccggcaccttcggcctgagaaagccctggtacttccccttcaccgccagctactggaagagcgtgggcttcctggtggagaagagacagtacttcctgagcagcagcctgttcttcttcaacgagaacttcgacaacaagggcagcagcctgcagaacagagagggcgagctggagggcagcgcccccggcgtgaccctggtgagcgtgaccaaggagtacgagggccacaaggccgtggtgcaggacctgagcctgaccttctacagagaccagatcaccgccctgctgggcaccaacggcgccggcaagaccaccatcatcagcatgctgaccggcctgcacccccccaccagcggcaccatcatcatcaacggcaagaacctgcagaccgacctgagcagagtgagaatggagctgggcgtgtgcccccagcaggacatcctgctggacaacctgaccgtgagagagcacctgctgctgttcgccagcatcaaggccccccagtggaccaagaaggagctgcaccagcaggtgaaccagaccctgcaggacgtggacctgacccagcaccagcacaagcagaccagagccctgagcggcggcctgaagagaaagctgagcctgggcatcgccttcatgggcatgagcagaaccgtggtgctggacgagcccaccagcggcgtggacccctgcagcagacacagcctgtgggacatcctgctgaagtacagagagggcagaaccatcatcttcaccacccaccacctggacgaggccgaggccctgagcgacagagtggccgtgctgcagcacggcagactgagatgctgcggcccccccttctgcctgaaggaggcctacggccagggcctgagactgaccctgaccagacagcccagcgtgctggaggcccacgacctgaaggacatggcctgcgtgaccagcctgatcaagatctacatcccccaggccttcctgaaggacagcagcggcagcgagctgacctacaccatccccaaggacaccgacaaggcctgcctgaagggcctgttccaggccctggacgagaacctgcaccagctgcacctgaccggctacggcatcagcgacaccaccctggaggaggtgttcctgatgctgctgcaggacagcaacaagaagagccacatcgccctgggcaccgagagcgagctgcagaaccacagacccaccggccacctgagcggctactgcggcagcctggccagacccgccaccgtgcagggcgtgcagctgctgagagcccaggtggccgccatcctggccagaagactgagaagaaccctgagagccggcaagagcaccctggccgacctgctgctgcccgtgctgttcgtggccctggccatgggcctgttcatggtgagacccctggccaccgagtacccccccctgagactgacccccggccactaccagagagccgagacctacttcttcagcagcggcggcgacaacctggacctgaccagagtgctgctgagaaagttcagagaccaggacctgccctgcgccgacctgaaccccagacagaagaacagcagctgctggagaaccgaccccttcagccaccccgagttccaggacagctgcggctgcctgaagtgccccaacagaagcgccagcgccccctacctgaccaaccacctgggccacaccctgctgaacctgagcggcttcaacatggaggagtacctgctggcccccagcgagaagcccagactgggcggctggagcttcggcctgaagatccccagcgaggccggcggcgccaacggcaacatcagcaagccccccaccctggccaaggtgtggtacaaccagaagggcttccacagcctgcccagctacctgaaccacctgaacaacctgatcctgtggcagcacctgccccccaccgtggactggagacagtacggcatcaccctgtacagccacccctacggcggcgccctgctgaacaaggacaagatcctggagagcatcagacagtgcggcgtggccctgtgcatcgtgctgggcttcagcatcctgagcgccagcatcggcagcagcgtggtgagagacagagtgatcggcgccaagagactgcagcacatcagcggcctgggctacagaatgtactggttcaccaacttcctgtacgacatgctgttctacctggtgagcgtgtgcctgtgcgtggccgtgatcgtggccttccagctgaccgccttcaccttcagaaagaacctggccgccaccgccctgctgctgagcctgttcggctacgccaccctgccctggatgtacctgatgagcagaatcttcagcagcagcgacgtggccttcatcagctacgtgagcctgaacttcatcttcggcctgtgcaccatgctgatcaccatcatgcccagactgctggccatcatcagcaaggccaagaacctgcagaacatctacgacgtgctgaagtgggtgttcaccatcttcccccagttctgcctgggccagggcctggtggagctgtgctacaaccagatcaagtacgacctgacccacaacttcggcatcgacagctacgtgagccccttcgagatgaacttcctgggctggatcttcgtgcagctggccagccagggcaccgtgctgctgctgctgagagtgctgctgcactgggacctgctgagatggcccagaggccacagcaccctgcagggcaccgtgaagagcagcaaggacaccgacgtggagaaggaggagaagagagtgttcgagggcagaaccaacggcgacatcctggtgctgtacaacctgagcaagcactacagaagattcttccagaacatcatcgccgtgcaggacatcagcctgggcatccccaagggcgagtgcttcggcctgctgggcgtgaacggcgccggcaagagcaccaccttcaagatgctgaacggcgaggtgagcctgaccagcggccacgccatcatcagaacccccatgggcgacgccgtggacctgagcagcgccggcaccgccggcgtgctgatcggctactgcccccagcaggacgccctggacgagctgctgaccggctgggagcacctgtactactactgcagcctgagaggcatccccagacagtgcatccccgaggtggccggcgacctgatcagaagactgcacctggaggcccacgccgacaagcccgtggccacctacagcggcggcaccaagagaaagctgagcaccgccctggccctggtgggcaagcccgacatcctgctgctggacgagcccagcagcggcatggacccctgcagcaagagatacctgtggcagaccatcatgaaggaggtgagagagggctgcgccgccgtgctgaccagccacagcatggaggagtgcgaggccctgtgcaccagactggccatcatggtgaacggcagcttcaagtgcctgggcagcccccagcacatcaagaacagattcggcgacggctacaccgtgaaggtgtggctgtgcaaggaggccaaccagcactgcaccgtgagcgaccacctgaagctgtacttccccggcatccagttcaagggccagcacctgaacctgctggagtaccacgtgcccaagagatggggctgcctggccgacctgttcaaggtgatcgagaacaacaagaccttcctgaacatcaagcactacagcatcaaccagaccaccctggagcaggtgttcatcaacttcgccagcgagcagcagcagaccctgcagagcaccctggaccccagcaccgacagccaccacacccaccacctgcccatctag

SEQ ID NO: 73754 - DNA, 2367 bp, synthetic construct
  misc_feature 1..2367: note = Description of Artificial Sequence: Synthetic coding sequence
  source 1..2367: mol_type = other DNA
atgggcctgttcatggtgagacccctggccaccgagtacccccccctgagactgacccccggccactaccagagagccgagacctacttcttcagaaagaacagcagctgctggagaaccgaccccttcagccaccccgagttccaggacagctgcggctgcctgaagtgccccaacagaagcgccagcgccccctacctgaccaaccacctgggccacaccctgctgaacctgagcggcttcaacatggaggagtacctgctggcccccagcgagaagcccagactgggcggctggagcttcggcctgaagatccccagcgaggccggcggcgccaacggcaacatcagcaagccccccaccctggccaaggtgtggtacaaccagaagggcttccacagcctgcccagctacctgaaccacctgaacaacctgatcctgtggcagcacctgccccccaccgtggactggagacagtacggcatcaccctgtacagccacccctacggcggcgccctgctgaacaaggacaagatcctggagagcatcagacagtgcggcgtggccctgtgcatcgtgctgggcttcagcatcctgagcgccagcatcggcagcagcgtggtgagagacagagtgatcggcgccaagagactgcagcacatcagcggcctgggctacagaatgtactggttcaccaacttcctgtacgacatgctgttctacctggtgagcgtgtgcctgtgcgtggccgtgatcgtggccttccagctgaccgccttcaccttcagaaagaacctggccgccaccgccctgctgctgagcctgttcggctacgccaccctgccctggatgtacctgatgagcagaatcttcagcagcagcgacgtggccttcatcagctacgtgagcctgaacttcatcttcggcctgtgcaccatgctgatcaccatcatgcccagactgctggccatcatcagcaaggccaagaacctgcagaacatctacgacgtgctgaagtgggtgttcaccatcttcccccagttctgcctgggccagggcctggtggagctgtgctacaaccagatcaagtacgacctgacccacaacttcggcatcgacagctacgtgagccccttcgagatgaacttcctgggctggatcttcgtgcagctggccagccagggcaccgtgctgctgctgctgagagtgctgctgcactgggacctgctgagatggcccagaggccacagcaccctgcagggcaccgtgaagagcagcaaggacaccgacgtggagaaggaggagaagagagtgttcgagggcagaaccaacggcgacatcctggtgctgtacaacctgagcaagcactacagaagattcttccagaacatcatcgccgtgcaggacatcagcctgggcatccccaagggcgagtgcttcggcctgctgggcgtgaacggcgccggcaagagcaccaccttcaagatgctgaacggcgaggtgagcctgaccagcggccacgccatcatcagaacccccatgggcgacgccgtggacctgagcagcgccggcaccgccggcgtgctgatcggctactgcccccagcaggacgccctggacgagctgctgaccggctgggagcacctgtactactactgcagcctgagaggcatccccagacagtgcatccccgaggtggccggcgacctgatcagaagactgcacctggaggcccacgccgacaagcccgtggccacctacagcggcggcaccaagagaaagctgagcaccgccctggccctggtgggcaagcccgacatcctgctgctggacgagcccagcagcggcatggacccctgcagcaagagatacctgtggcagaccatcatgaaggaggtgagagagggctgcgccgccgtgctgaccagccacagcatggaggagtgcgaggccctgtgcaccagactggccatcatggtgaacggcagcttcaagtgcctgggcagcccccagcacatcaagaacagattcggcgacggctacaccgtgaaggtgtggctgtgcaaggaggccaaccagcactgcaccgtgagcgaccacctgaagctgtacttccccggcatccagttcaagggccagcacctgaacctgctggagtaccacgtgcccaagagatggggctgcctggccgacctgttcaaggtgatcgagaacaacaagaccttcctgaacatcaagcactacagcatcaaccagaccaccctggagcaggtgttcatcaacttcgccagcgagcagcagcagaccctgcagagcaccctggaccccagcaccgacagccaccacacccaccacctgcccatctag

SEQ ID NO: 73755 - DNA, 7311 bp, synthetic construct
  misc_feature 1..7311: note = Description of Artificial Sequence: Synthetic coding sequence
  source 1..7311: mol_type = other DNA
atgggcttcctgcaccagctgcagctgctgctgtggaagaacgtgaccctgaagagaagaagcccctgggtgctggccttcgagatcttcatccccctggtgctgttcttcatcctgctgggcctgagacagaagaagcccaccatcagcgtgaaggaggtggccttctacaccgccgcccccctgaccagcgccggcatcctgcccgtgatgcagagcctgtgccccgacggccagagagacgagttcggcttcctgcagtacgccaacagcaccgtgacccagctgctggagagactggacagagtggtggaggagggcaacctgttcgaccccgccagacccagcctgggcagcgagctggaggccctgagacagcacctggaggccctgagcgccggccccggcaccagcggcagccacctggacagaagcaccgtgagcagcttcagcctggacagcgtggccagaaacccccaggagctgtggagattcctgacccagaacctgagcctgcccaacagcaccgcccaggccctgctggccgccagagtggacccccccgaggtgtaccacctgctgttcggccccagcagcgccctggacagccagagcggcctgcacaagggccaggagccctggagcagactgggcggcaaccccctgttcagaatggaggagctgctgctggcccccgccctgctggagcagctgacctgcacccccggcagcggcgagctgggcagaatcctgaccgtgcccgagagccagaagggcgccctgcagggctacagagacgccgtgtgcagcggccaggccgccgccagagccagaagattcagcggcctgagcgccgagctgagaaaccagctggacgtggccaaggtgagccagcagctgggcctggacgcccccaacggcagcgacagcagcccccaggcccccccccccagaagactgcaggccctgctgggcgacctgctggacgcccagaaggtgctgcaggacgtggacgtgctgagcgccctggccctgctgctgccccagggcgcctgcaccggcagaacccccggcccccccgccagcggcgccggcggcgccgccaacggcaccggcgccggcgccgtgatgggccccaacgccaccgccgaggagggcgcccccagcgccgccgccctggccacccccgacaccctgcagggccagtgcagcgccttcgtgcagctgtgggccggcctgcagcccatcctgtgcggcaacaacagaaccatcgagcccgaggccctgagaagaggcaacatgagcagcctgggcttcaccagcaaggagcagagaaacctgggcctgctggtgcacctgatgaccagcaaccccaagatcctgtacgcccccgccggcagcgaggtggacagagtgatcctgaaggccaacgagaccttcgccttcgtgggcaacgtgacccactacgcccaggtgtggctgaacatcagcgccgagatcagaagcttcctggagcagggcagactgcagcagcacctgagatggctgcagcagtacgtggccgagctgagactgcaccccgaggccctgaacctgagcctggacgagctgccccccgccctgagacaggacaacttcagcctgcccagcggcatggccctgctgcagcagctggacaccatcgacaacgccgcctgcggctggatccagttcatgagcaaggtgagcgtggacatcttcaagggcttccacgacgaggagagcatcgtgaactacaccctgaaccaggcctaccaggacaacgtgaccgtgttcgccagcgtgatcttccagaccagaaaggacggcagcctgcccccccacgtgcactacaagatcagacagaacagcagcttcaccgagaagaccaacgagatcagaagagcctactggagacccggccccaacaccggcggcagattctacttcctgtacggcttcgtgtggatccaggacatgatggagagagccatcatcgacaccttcgtgggccacgacgtggtggagcccggcagctacgtgcagatgttcccctacccctgctacaccagagacgacttcctgttcgtgatcgagcacatgatgcccctgtgcatggtgatcagctgggtgtacagcgtggccatgaccatccagcacatcgtggccgagaaggagcacagactgaaggaggtgatgaagaccatgggcctgaacaacgccgtgcactgggtggcctggttcatcaccggcttcgtgcagctgagcatcagcgtgaccgccctgaccgccatcctgaagtacggccaggtgctgatgcacagccacgtggtgatcatctggctgttcctggccgtgtacgccgtggccaccatcatgttctgcttcctggtgagcgtgctgtacagcaaggccaagctggccagcgcctgcggcggcatcatctacttcctgagctacgtgccctacatgtacgtggccatcagagaggaggtggcccacgacaagatcaccgccttcgagaagtgcatcgccagcctgatgagcaccaccgccttcggcctgggcagcaagtacttcgccctgtacgaggtggccggcgtgggcatccagtggcacaccttcagccagagccccgtggagggcgacgacttcaacctgctgctggccgtgaccatgctgatggtggacgccgtggtgtacggcatcctgacctggtacatcgaggccgtgcaccccggcatgtacggcctgcccagaccctggtacttccccctgcagaagagctactggctgggcagcggcagaaccgaggcctgggagtggagctggccctgggccagaacccccagactgagcgtgatggaggaggaccaggcctgcgccatggagagcagaagattcgaggagaccagaggcatggaggaggagcccacccacctgcccctggtggtgtgcgtggacaagctgaccaaggtgtacaaggacgacaagaagctggccctgaacaagctgagcctgaacctgtacgagaaccaggtggtgagcttcctgggccacaacggcgccggcaagaccaccaccatgagcatcctgaccggcctgttcccccccaccagcggcagcgccaccatctacggccacgacatcagaaccgagatggacgagatcagaaagaacctgggcatgtgcccccagcacaacgtgctgttcgacagactgaccgtggaggagcacctgtggttctacagcagactgaagagcatggcccaggaggagatcagaagagagatggacaagatgatcgaggacctggagctgagcaacaagagacacagcctggtgcagaccctgagcggcggcatgaagagaaagctgagcgtggccatcgccttcgtgggcggcagcagagccatcatcctggacgagcccaccgccggcgtggacccctacgccagaagagccatctgggacctgatcctgaagtacaagcccggcagaaccatcctgctgagcacccaccacatggacgaggccgacctgctgggcgacagaatcgccatcatcagccacggcaagctgaagtgctgcggcagccccctgttcctgaagggcacctacggcgacggctacagactgaccctggtgaagagacccgccgagcccggcggcccccaggagcccggcctggccagcagcccccccggcagagcccccctgagcagctgcagcgagctgcaggtgagccagttcatcagaaagcacgtggccagctgcctgctggtgagcgacaccagcaccgagctgagctacatcctgcccagcgaggccgccaagaagggcgccttcgagagactgttccagcacctggagagaagcctggacgccctgcacctgagcagcttcggcctgatggacaccaccctggaggaggtgttcctgaaggtgagcgaggaggaccagagcctggagaacagcgaggccgacgtgaaggagagcagaaaggacgtgctgcccggcgccgagggccccgccagcggcgagggccacgccggcaacctggccagatgcagcgagctgacccagagccaggccagcctgcagagcgccagcagcgtgggcagcgccagaggcgacgagggcgccggctacaccgacgtgtacggcgactacagacccctgttcgacaacccccaggaccccgacaacgtgagcctgcaggaggtggaggccgaggccctgagcagagtgggccagggcagcagaaagctggacggcggctggctgaaggtgagacagttccacggcctgctggtgaagagattccactgcgccagaagaaacagcaaggccctgttcagccagatcctgctgcccgccttcttcgtgtgcgtggccatgaccgtggccctgagcgtgcccgagatcggcgacctgccccccctggtgctgagccccagccagtaccacaactacacccagcccagaggcaacttcatcccctacgccaacgaggagagaagagagtacagactgagactgagccccgacgccagcccccagcagctggtgagcaccttcagactgcccagcggcgtgggcgccacctgcgtgctgaagagccccgccaacggcagcctgggccccaccctgaacctgagcagcggcgagagcagactgctggccgccagattcttcgacagcatgtgcctggagagcttcacccagggcctgcccctgagcaacttcgtgccccccccccccagccccgcccccagcgacagccccgccagccccgacgaggacctgcaggcctggaacgtgagcctgccccccaccgccggccccgagatgtggaccagcgcccccagcctgcccagactggtgagagagcccgtgagatgcacctgcagcgcccagggcaccggcttcagctgccccagcagcgtgggcggccaccccccccagatgagagtggtgaccggcgacatcctgaccgacatcaccggccacaacgtgagcgagtacctgctgttcaccagcgacagattcagactgcacagatacggcgccatcaccttcggcaacgtgctgaagagcatccccgccagcttcggcaccagagccccccccatggtgagaaagatcgccgtgagaagagccgcccaggtgttctacaacaacaagggctaccacagcatgcccacctacctgaacagcctgaacaacgccatcctgagagccaacctgcccaagagcaagggcaaccccgccgcctacggcatcaccgtgaccaaccaccccatgaacaagaccagcgccagcctgagcctggactacctgctgcagggcaccgacgtggtgatcgccatcttcatcatcgtggccatgagcttcgtgcccgccagcttcgtggtgttcctggtggccgagaagagcaccaaggccaagcacctgcagttcgtgagcggctgcaaccccatcatctactggctggccaactacgtgtgggacatgctgaactacctggtgcccgccacctgctgcgtgatcatcctgttcgtgttcgacctgcccgcctacaccagccccaccaacttccccgccgtgctgagcctgttcctgctgtacggctggagcatcacccccatcatgtaccccgccagcttctggttcgaggtgcccagcagcgcctacgtgttcctgatcgtgatcaacctgttcatcggcatcaccgccaccgtggccaccttcctgctgcagctgttcgagcacgacaaggacctgaaggtggtgaacagctacctgaagagctgcttcctgatcttccccaactacaacctgggccacggcctgatggagatggcctacaacgagtacatcaacgagtactacgccaagatcggccagttcgacaagatgaagagccccttcgagtgggacatcgtgaccagaggcctggtggccatggccgtggagggcgtggtgggcttcctgctgaccatcatgtgccagtacaacttcctgagaagaccccagagaatgcccgtgagcaccaagcccgtggaggacgacgtggacgtggccagcgagagacagagagtgctgagaggcgacgccgacaacgacatggtgaagatcgagaacctgaccaaggtgtacaagagcagaaagatcggcagaatcctggccgtggacagactgtgcctgggcgtgagacccggcgagtgcttcggcctgctgggcgtgaacggcgccggcaagaccagcaccttcaagatgctgaccggcgacgagagcaccaccggcggcgaggccttcgtgaacggccacagcgtgctgaaggagctgctgcaggtgcagcagagcctgggctactgcccccagtgcgacgccctgttcgacgagctgaccgccagagagcacctgcagctgtacaccagactgagaggcatcagctggaaggacgaggccagagtggtgaagtgggccctggagaagctggagctgaccaagtacgccgacaagcccgccggcacctacagcggcggcaacaagagaaagctgagcaccgccatcgccctgatcggctaccccgccttcatcttcctggacgagcccaccaccggcatggaccccaaggccagaagattcctgtggaacctgatcctggacctgatcaagaccggcagaagcgtggtgctgaccagccacagcatggaggagtgcgaggccctgtgcaccagactggccatcatggtgaacggcagactgagatgcctgggcagcatccagcacctgaagaacagattcggcgacggctacatgatcaccgtgagaaccaagagcagccagagcgtgaaggacgtggtgagattcttcaacagaaacttccccgaggccatgctgaaggagagacaccacaccaaggtgcagtaccagctgaagagcgagcacatcagcctggcccaggtgttcagcaagatggagcaggtgagcggcgtgctgggcatcgaggactacagcgtgagccagaccaccctggacaacgtgttcgtgaacttcgccaagaagcagagcgacaacctggagcagcaggagaccgagccccccagcgccctgcagagccccctgggctgcctgctgagcctgctgagacccagaagcgcccccaccgagctgagagccctggtggccgacgagcccgaggacctggacaccgaggacgagggcctgatcagcttcgaggaggagagagcccagctgagcttcaacaccgacaccctgtgctag

SEQ ID NO: 73756 - DNA, 7311 bp, synthetic construct
  misc_feature 1..7311: note = Description of Artificial Sequence: Synthetic coding sequence
  source 1..7311: mol_type = other DNA
atgggcttcctgcaccagctgcagctgctgctgtggaagaacgtgaccctgaagagaagaagcccctgggtgctggccttcgagatcttcatccccctggtgctgttcttcatcctgctgggcctgagacagaagaagcccaccatcagcgtgaaggaggtgagcttctacaccgccgcccccctgaccagcgccggcatcctgcccgtgatgcagagcctgtgccccgacggccagagagacgagttcggcttcctgcagtacgccaacagcaccgtgacccagctgctggagagactggacagagtggtggaggagggcaacctgttcgaccccgccagacccagcctgggcagcgagctggaggccctgagacagcacctggaggccctgagcgccggccccggcaccagcggcagccacctggacagaagcaccgtgagcagcttcagcctggacagcgtggccagaaacccccaggagctgtggagattcctgacccagaacctgagcctgcccaacagcaccgcccaggccctgctggccgccagagtggacccccccgaggtgtaccacctgctgttcggccccagcagcgccctggacagccagagcggcctgcacaagggccaggagccctggagcagactgggcggcaaccccctgttcagaatggaggagctgctgctggcccccgccctgctggagcagctgacctgcacccccggcagcggcgagctgggcagaatcctgaccgtgcccgagagccagaagggcgccctgcagggctacagagacgccgtgtgcagcggccaggccgccgccagagccagaagattcagcggcctgagcgccgagctgagaaaccagctggacgtggccaaggtgagccagcagctgggcctggacgcccccaacggcagcgacagcagcccccaggcccccccccccagaagactgcaggccctgctgggcgacctgctggacgcccagaaggtgctgcaggacgtggacgtgctgagcgccctggccctgctgctgccccagggcgcctgcaccggcagaacccccggcccccccgccagcggcgccggcggcgccgccaacggcaccggcgccggcgccgtgatgggccccaacgccaccgccgaggagggcgcccccagcgccgccgccctggccacccccgacaccctgcagggccagtgcagcgccttcgtgcagctgtgggccggcctgcagcccatcctgtgcggcaacaacagaaccatcgagcccgaggccctgagaagaggcaacatgagcagcctgggcttcaccagcaaggagcagagaaacctgggcctgctggtgcacctgatgaccagcaaccccaagatcctgtacgcccccgccggcagcgaggtggacagagtgatcctgaaggccaacgagaccttcgccttcgtgggcaacgtgacccactacgcccaggtgtggctgaacatcagcgccgagatcagaagcttcctggagcagggcagactgcagcagcacctgagatggctgcagcagtacgtggccgagctgagactgcaccccgaggccctgaacctgagcctggacgagctgccccccgccctgagacaggacaacttcagcctgcccagcggcatggccctgctgcagcagctggacaccatcgacaacgccgcctgcggctggatccagttcatgagcaaggtgagcgtggacatcttcaagggcttccacgacgaggagagcatcgtgaactacaccctgaaccaggcctaccaggacaacgtgaccgtgttcgccagcgtgatcttccagaccagaaaggacggcagcctgcccccccacgtgcactacaagatcagacagaacagcagcttcaccgagaagaccaacgagatcagaagagcctactggagacccggccccaacaccggcggcagattctacttcctgtacggcttcgtgtggatccaggacatgatggagagagccatcatcgacaccttcgtgggccacgacgtggtggagcccggcagctacgtgcagatgttcccctacccctgctacaccagagacgacttcctgttcgtgatcgagcacatgatgcccctgtgcatggtgatcagctgggtgtacagcgtggccatgaccatccagcacatcgtggccgagaaggagcacagactgaaggaggtgatgaagaccatgggcctgaacaacgccgtgcactgggtggcctggttcatcaccggcttcgtgcagctgagcatcagcgtgaccgccctgaccgccatcctgaagtacggccaggtgctgatgcacagccacgtggtgatcatctggctgttcctggccgtgtacgccgtggccaccatcatgttctgcttcctggtgagcgtgctgtacagcaaggccaagctggccagcgcctgcggcggcatcatctacttcctgagctacgtgccctacatgtacgtggccatcagagaggaggtggcccacgacaagatcaccgccttcgagaagtgcatcgccagcctgatgagcaccaccgccttcggcctgggcagcaagtacttcgccctgtacgaggtggccggcgtgggcatccagtggcacaccttcagccagagccccgtggagggcgacgacttcaacctgctgctggccgtgaccatgctgatggtggacgccgtggtgtacggcatcctgacctggtacatcgaggccgtgcaccccggcatgtacggcctgcccagaccctggtacttccccctgcagaagagctactggctgggcagcggcagaaccgaggcctgggagtggagctggccctgggccagaacccccagactgagcgtgatggaggaggaccaggcctgcgccatggagagcagaagattcgaggagaccagaggcatggaggaggagcccacccacctgcccctggtggtgtgcgtggacaagctgaccaaggtgtacaaggacgacaagaagctggccctgaacaagctgagcctgaacctgtacgagaaccaggtggtgagcttcctgggccacaacggcgccggcaagaccaccaccatgagcatcctgaccggcctgttcccccccaccagcggcagcgccaccatctacggccacgacatcagaaccgagatggacgagatcagaaagaacctgggcatgtgcccccagcacaacgtgctgttcgacagactgaccgtggaggagcacctgtggttctacagcagactgaagagcatggcccaggaggagatcagaagagagatggacaagatgatcgaggacctggagctgagcaacaagagacacagcctggtgcagaccctgagcggcggcatgaagagaaagctgagcgtggccatcgccttcgtgggcggcagcagagccatcatcctggacgagcccaccgccggcgtggacccctacgccagaagagccatctgggacctgatcctgaagtacaagcccggcagaaccatcctgctgagcacccaccacatggacgaggccgacctgctgggcgacagaatcgccatcatcagccacggcaagctgaagtgctgcggcagccccctgttcctgaagggcacctacggcgacggctacagactgaccctggtgaagagacccgccgagcccggcggcccccaggagcccggcctggccagcagcccccccggcagagcccccctgagcagctgcagcgagctgcaggtgagccagttcatcagaaagcacgtggccagctgcctgctggtgagcgacaccagcaccgagctgagctacatcctgcccagcgaggccgccaagaagggcgccttcgagagactgttccagcacctggagagaagcctggacgccctgcacctgagcagcttcggcctgatggacaccaccctggaggaggtgttcctgaaggtgagcgaggaggaccagagcctggagaacagcgaggccgacgtgaaggagagcagaaaggacgtgctgcccggcgccgagggccccgccagcggcgagggccacgccggcaacctggccagatgcagcgagctgacccagagccaggccagcctgcagagcgccagcagcgtgggcagcgccagaggcgacgagggcgccggctacaccgacgtgtacggcgactacagacccctgttcgacaacccccaggaccccgacaacgtgagcctgcaggaggtggaggccgaggccctgagcagagtgggccagggcagcagaaagctggacggcggctggctgaaggtgagacagttccacggcctgctggtgaagagattccactgcgccagaagaaacagcaaggccctgttcagccagatcctgctgcccgccttcttcgtgtgcgtggccatgaccgtggccctgagcgtgcccgagatcggcgacctgccccccctggtgctgagccccagccagtaccacaactacacccagcccagaggcaacttcatcccctacgccaacgaggagagaagagagtacagactgagactgagccccgacgccagcccccagcagctggtgagcaccttcagactgcccagcggcgtgggcgccacctgcgtgctgaagagccccgccaacggcagcctgggccccaccctgaacctgagcagcggcgagagcagactgctggccgccagattcttcgacagcatgtgcctggagagcttcacccagggcctgcccctgagcaacttcgtgccccccccccccagccccgcccccagcgacagccccgccagccccgacgaggacctgcaggcctggaacgtgagcctgccccccaccgccggccccgagatgtggaccagcgcccccagcctgcccagactggtgagagagcccgtgagatgcacctgcagcgcccagggcaccggcttcagctgccccagcagcgtgggcggccaccccccccagatgagagtggtgaccggcgacatcctgaccgacatcaccggccacaacgtgagcgagtacctgctgttcaccagcgacagattcagactgcacagatacggcgccatcaccttcggcaacgtgctgaagagcatccccgccagcttcggcaccagagccccccccatggtgagaaagatcgccgtgagaagagccgcccaggtgttctacaacaacaagggctaccacagcatgcccacctacctgaacagcctgaacaacgccatcctgagagccaacctgcccaagagcaagggcaaccccgccgcctacggcatcaccgtgaccaaccaccccatgaacaagaccagcgccagcctgagcctggactacctgctgcagggcaccgacgtggtgatcgccatcttcatcatcgtggccatgagcttcgtgcccgccagcttcgtggtgttcctggtggccgagaagagcaccaaggccaagcacctgcagttcgtgagcggctgcaaccccatcatctactggctggccaactacgtgtgggacatgctgaactacctggtgcccgccacctgctgcgtgatcatcctgttcgtgttcgacctgcccgcctacaccagccccaccaacttccccgccgtgctgagcctgttcctgctgtacggctggagcatcacccccatcatgtaccccgccagcttctggttcgaggtgcccagcagcgcctacgtgttcctgatcgtgatcaacctgttcatcggcatcaccgccaccgtggccaccttcctgctgcagctgttcgagcacgacaaggacctgaaggtggtgaacagctacctgaagagctgcttcctgatcttccccaactacaacctgggccacggcctgatggagatggcctacaacgagtacatcaacgagtactacgccaagatcggccagttcgacaagatgaagagccccttcgagtgggacatcgtgaccagaggcctggtggccatggccgtggagggcgtggtgggcttcctgctgaccatcatgtgccagtacaacttcctgagaagaccccagagaatgcccgtgagcaccaagcccgtggaggacgacgtggacgtggccagcgagagacagagagtgctgagaggcgacgccgacaacgacatggtgaagatcgagaacctgaccaaggtgtacaagagcagaaagatcggcagaatcctggccgtggacagactgtgcctgggcgtgagacccggcgagtgcttcggcctgctgggcgtgaacggcgccggcaagaccagcaccttcaagatgctgaccggcgacgagagcaccaccggcggcgaggccttcgtgaacggccacagcgtgctgaaggagctgctgcaggtgcagcagagcctgggctactgcccccagtgcgacgccctgttcgacgagctgaccgccagagagcacctgcagctgtacaccagactgagaggcatcagctggaaggacgaggccagagtggtgaagtgggccctggagaagctggagctgaccaagtacgccgacaagcccgccggcacctacagcggcggcaacaagagaaagctgagcaccgccatcgccctgatcggctaccccgccttcatcttcctggacgagcccaccaccggcatggaccccaaggccagaagattcctgtggaacctgatcctggacctgatcaagaccggcagaagcgtggtgctgaccagccacagcatggaggagtgcgaggccctgtgcaccagactggccatcatggtgaacggcagactgagatgcctgggcagcatccagcacctgaagaacagattcggcgacggctacatgatcaccgtgagaaccaagagcagccagagcgtgaaggacgtggtgagattcttcaacagaaacttccccgaggccatgctgaaggagagacaccacaccaaggtgcagtaccagctgaagagcgagcacatcagcctggcccaggtgttcagcaagatggagcaggtgagcggcgtgctgggcatcgaggactacagcgtgagccagaccaccctggacaacgtgttcgtgaacttcgccaagaagcagagcgacaacctggagcagcaggagaccgagccccccagcgccctgcagagccccctgggctgcctgctgagcctgctgagacccagaagcgcccccaccgagctgagagccctggtggccgacgagcccgaggacctggacaccgaggacgagggcctgatcagcttcgaggaggagagagcccagctgagcttcaacaccgacaccctgtgctag

SEQ ID NO: 73757 - DNA, 7401 bp, synthetic construct
  misc_feature 1..7401: note = Description of Artificial Sequence: Synthetic coding sequence
  source 1..7401: mol_type = other DNA
atgggcagaaagaccagcagagtgcagcagggcccccccagaagccccgcctgcagcgcccacggcgagagaagctggggcctggagttcccccccttcagatggctgctgggcatcgccggcagaacccacctggccgccctgccccccttccagtgggtgctggccttcgagatcttcatccccctggtgctgttcttcatcctgctgggcctgagacagaagaagcccaccatcagcgtgaaggaggtggccttctacaccgccgcccccctgaccagcgccggcatcctgcccgtgatgcagagcctgtgccccgacggccagagagacgagttcggcttcctgcagtacgccaacagcaccgtgacccagctgctggagagactggacagagtggtggaggagggcaacctgttcgaccccgccagacccagcctgggcagcgagctggaggccctgagacagcacctggaggccctgagcgccggccccggcaccagcggcagccacctggacagaagcaccgtgagcagcttcagcctggacagcgtggccagaaacccccaggagctgtggagattcctgacccagaacctgagcctgcccaacagcaccgcccaggccctgctggccgccagagtggacccccccgaggtgtaccacctgctgttcggccccagcagcgccctggacagccagagcggcctgcacaagggccaggagccctggagcagactgggcggcaaccccctgttcagaatggaggagctgctgctggcccccgccctgctggagcagctgacctgcacccccggcagcggcgagctgggcagaatcctgaccgtgcccgagagccagaagggcgccctgcagggctacagagacgccgtgtgcagcggccaggccgccgccagagccagaagattcagcggcctgagcgccgagctgagaaaccagctggacgtggccaaggtgagccagcagctgggcctggacgcccccaacggcagcgacagcagcccccaggcccccccccccagaagactgcaggccctgctgggcgacctgctggacgcccagaaggtgctgcaggacgtggacgtgctgagcgccctggccctgctgctgccccagggcgcctgcaccggcagaacccccggcccccccgccagcggcgccggcggcgccgccaacggcaccggcgccggcgccgtgatgggccccaacgccaccgccgaggagggcgcccccagcgccgccgccctggccacccccgacaccctgcagggccagtgcagcgccttcgtgcagctgtgggccggcctgcagcccatcctgtgcggcaacaacagaaccatcgagcccgaggccctgagaagaggcaacatgagcagcctgggcttcaccagcaaggagcagagaaacctgggcctgctggtgcacctgatgaccagcaaccccaagatcctgtacgcccccgccggcagcgaggtggacagagtgatcctgaaggccaacgagaccttcgccttcgtgggcaacgtgacccactacgcccaggtgtggctgaacatcagcgccgagatcagaagcttcctggagcagggcagactgcagcagcacctgagatggctgcagcagtacgtggccgagctgagactgcaccccgaggccctgaacctgagcctggacgagctgccccccgccctgagacaggacaacttcagcctgcccagcggcatggccctgctgcagcagctggacaccatcgacaacgccgcctgcggctggatccagttcatgagcaaggtgagcgtggacatcttcaagggcttccacgacgaggagagcatcgtgaactacaccctgaaccaggcctaccaggacaacgtgaccgtgttcgccagcgtgatcttccagaccagaaaggacggcagcctgcccccccacgtgcactacaagatcagacagaacagcagcttcaccgagaagaccaacgagatcagaagagcctactggagacccggccccaacaccggcggcagattctacttcctgtacggcttcgtgtggatccaggacatgatggagagagccatcatcgacaccttcgtgggccacgacgtggtggagcccggcagctacgtgcagatgttcccctacccctgctacaccagagacgacttcctgttcgtgatcgagcacatgatgcccctgtgcatggtgatcagctgggtgtacagcgtggccatgaccatccagcacatcgtggccgagaaggagcacagactgaaggaggtgatgaagaccatgggcctgaacaacgccgtgcactgggtggcctggttcatcaccggcttcgtgcagctgagcatcagcgtgaccgccctgaccgccatcctgaagtacggccaggtgctgatgcacagccacgtggtgatcatctggctgttcctggccgtgtacgccgtggccaccatcatgttctgcttcctggtgagcgtgctgtacagcaaggccaagctggccagcgcctgcggcggcatcatctacttcctgagctacgtgccctacatgtacgtggccatcagagaggaggtggcccacgacaagatcaccgccttcgagaagtgcatcgccagcctgatgagcaccaccgccttcggcctgggcagcaagtacttcgccctgtacgaggtggccggcgtgggcatccagtggcacaccttcagccagagccccgtggagggcgacgacttcaacctgctgctggccgtgaccatgctgatggtggacgccgtggtgtacggcatcctgacctggtacatcgaggccgtgcaccccggcatgtacggcctgcccagaccctggtacttccccctgcagaagagctactggctgggcagcggcagaaccgaggcctgggagtggagctggccctgggccagaacccccagactgagcgtgatggaggaggaccaggcctgcgccatggagagcagaagattcgaggagaccagaggcatggaggaggagcccacccacctgcccctggtggtgtgcgtggacaagctgaccaaggtgtacaaggacgacaagaagctggccctgaacaagctgagcctgaacctgtacgagaaccaggtggtgagcttcctgggccacaacggcgccggcaagaccaccaccatgagcatcctgaccggcctgttcccccccaccagcggcagcgccaccatctacggccacgacatcagaaccgagatggacgagatcagaaagaacctgggcatgtgcccccagcacaacgtgctgttcgacagactgaccgtggaggagcacctgtggttctacagcagactgaagagcatggcccaggaggagatcagaagagagatggacaagatgatcgaggacctggagctgagcaacaagagacacagcctggtgcagaccctgagcggcggcatgaagagaaagctgagcgtggccatcgccttcgtgggcggcagcagagccatcatcctggacgagcccaccgccggcgtggacccctacgccagaagagccatctgggacctgatcctgaagtacaagcccggcagaaccatcctgctgagcacccaccacatggacgaggccgacctgctgggcgacagaatcgccatcatcagccacggcaagctgaagtgctgcggcagccccctgttcctgaagggcacctacggcgacggctacagactgaccctggtgaagagacccgccgagcccggcggcccccaggagcccggcctggccagcagcccccccggcagagcccccctgagcagctgcagcgagctgcaggtgagccagttcatcagaaagcacgtggccagctgcctgctggtgagcgacaccagcaccgagctgagctacatcctgcccagcgaggccgccaagaagggcgccttcgagagactgttccagcacctggagagaagcctggacgccctgcacctgagcagcttcggcctgatggacaccaccctggaggaggtgttcctgaaggtgagcgaggaggaccagagcctggagaacagcgaggccgacgtgaaggagagcagaaaggacgtgctgcccggcgccgagggccccgccagcggcgagggccacgccggcaacctggccagatgcagcgagctgacccagagccaggccagcctgcagagcgccagcagcgtgggcagcgccagaggcgacgagggcgccggctacaccgacgtgtacggcgactacagacccctgttcgacaacccccaggaccccgacaacgtgagcctgcaggaggtggaggccgaggccctgagcagagtgggccagggcagcagaaagctggacggcggctggctgaaggtgagacagttccacggcctgctggtgaagagattccactgcgccagaagaaacagcaaggccctgttcagccagatcctgctgcccgccttcttcgtgtgcgtggccatgaccgtggccctgagcgtgcccgagatcggcgacctgccccccctggtgctgagccccagccagtaccacaactacacccagcccagaggcaacttcatcccctacgccaacgaggagagaagagagtacagactgagactgagccccgacgccagcccccagcagctggtgagcaccttcagactgcccagcggcgtgggcgccacctgcgtgctgaagagccccgccaacggcagcctgggccccaccctgaacctgagcagcggcgagagcagactgctggccgccagattcttcgacagcatgtgcctggagagcttcacccagggcctgcccctgagcaacttcgtgccccccccccccagccccgcccccagcgacagccccgccagccccgacgaggacctgcaggcctggaacgtgagcctgccccccaccgccggccccgagatgtggaccagcgcccccagcctgcccagactggtgagagagcccgtgagatgcacctgcagcgcccagggcaccggcttcagctgccccagcagcgtgggcggccaccccccccagatgagagtggtgaccggcgacatcctgaccgacatcaccggccacaacgtgagcgagtacctgctgttcaccagcgacagattcagactgcacagatacggcgccatcaccttcggcaacgtgctgaagagcatccccgccagcttcggcaccagagccccccccatggtgagaaagatcgccgtgagaagagccgcccaggtgttctacaacaacaagggctaccacagcatgcccacctacctgaacagcctgaacaacgccatcctgagagccaacctgcccaagagcaagggcaaccccgccgcctacggcatcaccgtgaccaaccaccccatgaacaagaccagcgccagcctgagcctggactacctgctgcagggcaccgacgtggtgatcgccatcttcatcatcgtggccatgagcttcgtgcccgccagcttcgtggtgttcctggtggccgagaagagcaccaaggccaagcacctgcagttcgtgagcggctgcaaccccatcatctactggctggccaactacgtgtgggacatgctgaactacctggtgcccgccacctgctgcgtgatcatcctgttcgtgttcgacctgcccgcctacaccagccccaccaacttccccgccgtgctgagcctgttcctgctgtacggctggagcatcacccccatcatgtaccccgccagcttctggttcgaggtgcccagcagcgcctacgtgttcctgatcgtgatcaacctgttcatcggcatcaccgccaccgtggccaccttcctgctgcagctgttcgagcacgacaaggacctgaaggtggtgaacagctacctgaagagctgcttcctgatcttccccaactacaacctgggccacggcctgatggagatggcctacaacgagtacatcaacgagtactacgccaagatcggccagttcgacaagatgaagagccccttcgagtgggacatcgtgaccagaggcctggtggccatggccgtggagggcgtggtgggcttcctgctgaccatcatgtgccagtacaacttcctgagaagaccccagagaatgcccgtgagcaccaagcccgtggaggacgacgtggacgtggccagcgagagacagagagtgctgagaggcgacgccgacaacgacatggtgaagatcgagaacctgaccaaggtgtacaagagcagaaagatcggcagaatcctggccgtggacagactgtgcctgggcgtgagacccggcgagtgcttcggcctgctgggcgtgaacggcgccggcaagaccagcaccttcaagatgctgaccggcgacgagagcaccaccggcggcgaggccttcgtgaacggccacagcgtgctgaaggagctgctgcaggtgcagcagagcctgggctactgcccccagtgcgacgccctgttcgacgagctgaccgccagagagcacctgcagctgtacaccagactgagaggcatcagctggaaggacgaggccagagtggtgaagtgggccctggagaagctggagctgaccaagtacgccgacaagcccgccggcacctacagcggcggcaacaagagaaagctgagcaccgccatcgccctgatcggctaccccgccttcatcttcctggacgagcccaccaccggcatggaccccaaggccagaagattcctgtggaacctgatcctggacctgatcaagaccggcagaagcgtggtgctgaccagccacagcatggaggagtgcgaggccctgtgcaccagactggccatcatggtgaacggcagactgagatgcctgggcagcatccagcacctgaagaacagattcggcgacggctacatgatcaccgtgagaaccaagagcagccagagcgtgaaggacgtggtgagattcttcaacagaaacttccccgaggccatgctgaaggagagacaccacaccaaggtgcagtaccagctgaagagcgagcacatcagcctggcccaggtgttcagcaagatggagcaggtgagcggcgtgctgggcatcgaggactacagcgtgagccagaccaccctggacaacgtgttcgtgaacttcgccaagaagcagagcgacaacctggagcagcaggagaccgagccccccagcgccctgcagagccccctgggctgcctgctgagcctgctgagacccagaagcgcccccaccgagctgagagccctggtggccgacgagcccgaggacctggacaccgaggacgagggcctgatcagcttcgaggaggagagagcccagctgagcttcaacaccgacaccctgtgctag

SEQ ID NO: 73758 - DNA, 7308 bp, synthetic construct
  misc_feature 1..7308: note = Description of Artificial Sequence: Synthetic coding sequence
  source 1..7308: mol_type = other DNA
atgggcttcctgcaccagctgcagctgctgctgtggaagaacgtgaccctgaagagaagaagcccctgggtgctggccttcgagatcttcatccccctggtgctgttcttcatcctgctgggcctgagacagaagaagcccaccatcagcgtgaaggaggccttctacaccgccgcccccctgaccagcgccggcatcctgcccgtgatgcagagcctgtgccccgacggccagagagacgagttcggcttcctgcagtacgccaacagcaccgtgacccagctgctggagagactggacagagtggtggaggagggcaacctgttcgaccccgccagacccagcctgggcagcgagctggaggccctgagacagcacctggaggccctgagcgccggccccggcaccagcggcagccacctggacagaagcaccgtgagcagcttcagcctggacagcgtggccagaaacccccaggagctgtggagattcctgacccagaacctgagcctgcccaacagcaccgcccaggccctgctggccgccagagtggacccccccgaggtgtaccacctgctgttcggccccagcagcgccctggacagccagagcggcctgcacaagggccaggagccctggagcagactgggcggcaaccccctgttcagaatggaggagctgctgctggcccccgccctgctggagcagctgacctgcacccccggcagcggcgagctgggcagaatcctgaccgtgcccgagagccagaagggcgccctgcagggctacagagacgccgtgtgcagcggccaggccgccgccagagccagaagattcagcggcctgagcgccgagctgagaaaccagctggacgtggccaaggtgagccagcagctgggcctggacgcccccaacggcagcgacagcagcccccaggcccccccccccagaagactgcaggccctgctgggcgacctgctggacgcccagaaggtgctgcaggacgtggacgtgctgagcgccctggccctgctgctgccccagggcgcctgcaccggcagaacccccggcccccccgccagcggcgccggcggcgccgccaacggcaccggcgccggcgccgtgatgggccccaacgccaccgccgaggagggcgcccccagcgccgccgccctggccacccccgacaccctgcagggccagtgcagcgccttcgtgcagctgtgggccggcctgcagcccatcctgtgcggcaacaacagaaccatcgagcccgaggccctgagaagaggcaacatgagcagcctgggcttcaccagcaaggagcagagaaacctgggcctgctggtgcacctgatgaccagcaaccccaagatcctgtacgcccccgccggcagcgaggtggacagagtgatcctgaaggccaacgagaccttcgccttcgtgggcaacgtgacccactacgcccaggtgtggctgaacatcagcgccgagatcagaagcttcctggagcagggcagactgcagcagcacctgagatggctgcagcagtacgtggccgagctgagactgcaccccgaggccctgaacctgagcctggacgagctgccccccgccctgagacaggacaacttcagcctgcccagcggcatggccctgctgcagcagctggacaccatcgacaacgccgcctgcggctggatccagttcatgagcaaggtgagcgtggacatcttcaagggcttccacgacgaggagagcatcgtgaactacaccctgaaccaggcctaccaggacaacgtgaccgtgttcgccagcgtgatcttccagaccagaaaggacggcagcctgcccccccacgtgcactacaagatcagacagaacagcagcttcaccgagaagaccaacgagatcagaagagcctactggagacccggccccaacaccggcggcagattctacttcctgtacggcttcgtgtggatccaggacatgatggagagagccatcatcgacaccttcgtgggccacgacgtggtggagcccggcagctacgtgcagatgttcccctacccctgctacaccagagacgacttcctgttcgtgatcgagcacatgatgcccctgtgcatggtgatcagctgggtgtacagcgtggccatgaccatccagcacatcgtggccgagaaggagcacagactgaaggaggtgatgaagaccatgggcctgaacaacgccgtgcactgggtggcctggttcatcaccggcttcgtgcagctgagcatcagcgtgaccgccctgaccgccatcctgaagtacggccaggtgctgatgcacagccacgtggtgatcatctggctgttcctggccgtgtacgccgtggccaccatcatgttctgcttcctggtgagcgtgctgtacagcaaggccaagctggccagcgcctgcggcggcatcatctacttcctgagctacgtgccctacatgtacgtggccatcagagaggaggtggcccacgacaagatcaccgccttcgagaagtgcatcgccagcctgatgagcaccaccgccttcggcctgggcagcaagtacttcgccctgtacgaggtggccggcgtgggcatccagtggcacaccttcagccagagccccgtggagggcgacgacttcaacctgctgctggccgtgaccatgctgatggtggacgccgtggtgtacggcatcctgacctggtacatcgaggccgtgcaccccggcatgtacggcctgcccagaccctggtacttccccctgcagaagagctactggctgggcagcggcagaaccgaggcctgggagtggagctggccctgggccagaacccccagactgagcgtgatggaggaggaccaggcctgcgccatggagagcagaagattcgaggagaccagaggcatggaggaggagcccacccacctgcccctggtggtgtgcgtggacaagctgaccaaggtgtacaaggacgacaagaagctggccctgaacaagctgagcctgaacctgtacgagaaccaggtggtgagcttcctgggccacaacggcgccggcaagaccaccaccatgagcatcctgaccggcctgttcccccccaccagcggcagcgccaccatctacggccacgacatcagaaccgagatggacgagatcagaaagaacctgggcatgtgcccccagcacaacgtgctgttcgacagactgaccgtggaggagcacctgtggttctacagcagactgaagagcatggcccaggaggagatcagaagagagatggacaagatgatcgaggacctggagctgagcaacaagagacacagcctggtgcagaccctgagcggcggcatgaagagaaagctgagcgtggccatcgccttcgtgggcggcagcagagccatcatcctggacgagcccaccgccggcgtggacccctacgccagaagagccatctgggacctgatcctgaagtacaagcccggcagaaccatcctgctgagcacccaccacatggacgaggccgacctgctgggcgacagaatcgccatcatcagccacggcaagctgaagtgctgcggcagccccctgttcctgaagggcacctacggcgacggctacagactgaccctggtgaagagacccgccgagcccggcggcccccaggagcccggcctggccagcagcccccccggcagagcccccctgagcagctgcagcgagctgcaggtgagccagttcatcagaaagcacgtggccagctgcctgctggtgagcgacaccagcaccgagctgagctacatcctgcccagcgaggccgccaagaagggcgccttcgagagactgttccagcacctggagagaagcctggacgccctgcacctgagcagcttcggcctgatggacaccaccctggaggaggtgttcctgaaggtgagcgaggaggaccagagcctggagaacagcgaggccgacgtgaaggagagcagaaaggacgtgctgcccggcgccgagggccccgccagcggcgagggccacgccggcaacctggccagatgcagcgagctgacccagagccaggccagcctgcagagcgccagcagcgtgggcagcgccagaggcgacgagggcgccggctacaccgacgtgtacggcgactacagacccctgttcgacaacccccaggaccccgacaacgtgagcctgcaggaggtggaggccgaggccctgagcagagtgggccagggcagcagaaagctggacggcggctggctgaaggtgagacagttccacggcctgctggtgaagagattccactgcgccagaagaaacagcaaggccctgttcagccagatcctgctgcccgccttcttcgtgtgcgtggccatgaccgtggccctgagcgtgcccgagatcggcgacctgccccccctggtgctgagccccagccagtaccacaactacacccagcccagaggcaacttcatcccctacgccaacgaggagagaagagagtacagactgagactgagccccgacgccagcccccagcagctggtgagcaccttcagactgcccagcggcgtgggcgccacctgcgtgctgaagagccccgccaacggcagcctgggccccaccctgaacctgagcagcggcgagagcagactgctggccgccagattcttcgacagcatgtgcctggagagcttcacccagggcctgcccctgagcaacttcgtgccccccccccccagccccgcccccagcgacagccccgccagccccgacgaggacctgcaggcctggaacgtgagcctgccccccaccgccggccccgagatgtggaccagcgcccccagcctgcccagactggtgagagagcccgtgagatgcacctgcagcgcccagggcaccggcttcagctgccccagcagcgtgggcggccaccccccccagatgagagtggtgaccggcgacatcctgaccgacatcaccggccacaacgtgagcgagtacctgctgttcaccagcgacagattcagactgcacagatacggcgccatcaccttcggcaacgtgctgaagagcatccccgccagcttcggcaccagagccccccccatggtgagaaagatcgccgtgagaagagccgcccaggtgttctacaacaacaagggctaccacagcatgcccacctacctgaacagcctgaacaacgccatcctgagagccaacctgcccaagagcaagggcaaccccgccgcctacggcatcaccgtgaccaaccaccccatgaacaagaccagcgccagcctgagcctggactacctgctgcagggcaccgacgtggtgatcgccatcttcatcatcgtggccatgagcttcgtgcccgccagcttcgtggtgttcctggtggccgagaagagcaccaaggccaagcacctgcagttcgtgagcggctgcaaccccatcatctactggctggccaactacgtgtgggacatgctgaactacctggtgcccgccacctgctgcgtgatcatcctgttcgtgttcgacctgcccgcctacaccagccccaccaacttccccgccgtgctgagcctgttcctgctgtacggctggagcatcacccccatcatgtaccccgccagcttctggttcgaggtgcccagcagcgcctacgtgttcctgatcgtgatcaacctgttcatcggcatcaccgccaccgtggccaccttcctgctgcagctgttcgagcacgacaaggacctgaaggtggtgaacagctacctgaagagctgcttcctgatcttccccaactacaacctgggccacggcctgatggagatggcctacaacgagtacatcaacgagtactacgccaagatcggccagttcgacaagatgaagagccccttcgagtgggacatcgtgaccagaggcctggtggccatggccgtggagggcgtggtgggcttcctgctgaccatcatgtgccagtacaacttcctgagaagaccccagagaatgcccgtgagcaccaagcccgtggaggacgacgtggacgtggccagcgagagacagagagtgctgagaggcgacgccgacaacgacatggtgaagatcgagaacctgaccaaggtgtacaagagcagaaagatcggcagaatcctggccgtggacagactgtgcctgggcgtgagacccggcgagtgcttcggcctgctgggcgtgaacggcgccggcaagaccagcaccttcaagatgctgaccggcgacgagagcaccaccggcggcgaggccttcgtgaacggccacagcgtgctgaaggagctgctgcaggtgcagcagagcctgggctactgcccccagtgcgacgccctgttcgacgagctgaccgccagagagcacctgcagctgtacaccagactgagaggcatcagctggaaggacgaggccagagtggtgaagtgggccctggagaagctggagctgaccaagtacgccgacaagcccgccggcacctacagcggcggcaacaagagaaagctgagcaccgccatcgccctgatcggctaccccgccttcatcttcctggacgagcccaccaccggcatggaccccaaggccagaagattcctgtggaacctgatcctggacctgatcaagaccggcagaagcgtggtgctgaccagccacagcatggaggagtgcgaggccctgtgcaccagactggccatcatggtgaacggcagactgagatgcctgggcagcatccagcacctgaagaacagattcggcgacggctacatgatcaccgtgagaaccaagagcagccagagcgtgaaggacgtggtgagattcttcaacagaaacttccccgaggccatgctgaaggagagacaccacaccaaggtgcagtaccagctgaagagcgagcacatcagcctggcccaggtgttcagcaagatggagcaggtgagcggcgtgctgggcatcgaggactacagcgtgagccagaccaccctggacaacgtgttcgtgaacttcgccaagaagcagagcgacaacctggagcagcaggagaccgagccccccagcgccctgcagagccccctgggctgcctgctgagcctgctgagacccagaagcgcccccaccgagctgagagccctggtggccgacgagcccgaggacctggacaccgaggacgagggcctgatcagcttcgaggaggagagagcccagctgagcttcaacaccgacaccctgtgctag

SEQ ID NO: 73759 - DNA, 591 bp, synthetic construct
  misc_feature 1..591: note = Description of Artificial Sequence: Synthetic coding sequence
  source 1..591: mol_type = other DNA
atgctgaccggcgacgagagcaccaccggcggcgaggccttcgtgaacggccacagcgtgctgaaggagctgctgcaggtgcagcagagcctgggctactgcccccagtgcgacgccctgttcgacgagctgaccgccagagagcacctgcagctgtacaccagactgagaggcatcagctggaaggacgaggccagagtggtgaagtgggccctggagaagctggagctgaccaagtacgccgacaagcccgccggcacctacagcggcggcaacaagagaaagctgagcaccgccatcgccctgatcggctaccccgccttcatcttcctggacgagcccaccaccggcatggaccccaaggccagaagattcctgtggaacctgatcctggacctgatcaagaccggcagaagcgtggtgctgaccagccacagcatggaggagtgcgaggccctgtgcaccagactggccatcatggagagaagccccgccgtgcccggccagcaccccgcccccgaggagcccgtgtggagatggctgcacgaccacggcgccgaccaggagcagcccgagtgcgagggcagatag

SEQ ID NO: 73760 - DNA, 5115 bp, synthetic construct
  misc_feature 1..5115: note = Description of Artificial Sequence: Synthetic coding sequence
  source 1..5115: mol_type = other DNA
atggccgtgctgagacagctggccctgctgctgtggaagaactacaccctgcagaagagaaaggtgctggtgaccgtgctggagctgttcctgcccctgctgttcagcggcatcctgatctggctgagactgaagatccagagcgagaacgtgcccaacgccaccatctaccccggccagagcatccaggagctgcccctgttcttcaccttccccccccccggcgacacctgggagctggcctacatccccagccacagcgacgccgccaagaccgtgaccgagaccgtgagaagagccctggtgatcaacatgagagtgagaggcttccccagcgagaaggacttcgaggactacatcagatacgacaactgcagcagcagcgtgctggccgccgtggtgttcgagcaccccttcaaccacagcaaggagcccctgcccctggccgtgaagtaccacctgagattcagctacaccagaagaaactacatgtggacccagaccggcagcttcttcctgaaggagaccgagggctggcacaccaccagcctgttccccctgttccccaaccccggccccagagagcccaccagccccgacggcggcgagcccggctacatcagagagggcttcctggccgtgcagcacgccgtggacagagccatcatggagtaccacgccgacgccgccaccagacagctgttccagagactgaccgtgaccatcaagagattcccctacccccccttcatcgccgaccccttcctggtggccatccagtaccagctgcccctgctgctgctgctgagcttcacctacaccgccctgaccatcgccagagccgtggtgcaggagaaggagagaagactgaaggagtacatgagaatgatgggcctgagcagctggctgcactggagcgcctggttcctgctgttcttcctgttcctgctgatcgccgccagcttcatgaccctgctgttctgcgtgaaggtgaagcccaacgtggccgtgctgagcagaagcgaccccagcctggtgctggccttcctgctgtgcttcgccatcagcaccatcagcttcagcttcatggtgagcaccttcttcagcaaggccaacatggccgccgccttcggcggcttcctgtacttcttcacctacatcccctacttcttcgtggcccccagatacaactggatgaccctgagccagaagctgtgcagctgcctgctgagcaacgtggccatggccatgggcgcccagctgatcggcaagttcgaggccaagggcatgggcatccagtggagagacctgctgagccccgtgaacgtggacgacgacttctgcttcggccaggtgctgggcatgctgctgctggacagcgtgctgtacggcctggtgacctggtacatggaggccgtgttccccggccagttcggcgtgccccagccctggtacttcttcatcatgcccagctactggtgcggcaagcccagagccgtggccggcaaggaggaggaggacagcgaccccgagaaggccctgagaaacgagtacttcgaggccgagcccgaggacctggtggccggcatcaagatcaagcacctgagcaaggtgttcagagtgggcaacaaggacagagccgccgtgagagacctgaacctgaacctgtacgagggccagatcaccgtgctgctgggccacaacggcgccggcaagaccaccaccctgagcatgctgaccggcctgttcccccccaccagcggcagagcctacatcagcggctacgagatcagccaggacatggtgcagatcagaaagagcctgggcctgtgcccccagcacgacatcctgttcgacaacctgaccgtggccgagcacctgtacttctacgcccagctgaagggcctgagcagacagaagtgccccgaggaggtgaagcagatgctgcacatcatcggcctggaggacaagtggaacagcagaagcagattcctgagcggcggcatgagaagaaagctgagcatcggcatcgccctgatcgccggcagcaaggtgctgatcctggacgagcccaccagcggcatggacgccatcagcagaagagccatctgggacctgctgcagagacagaagagcgacagaaccatcgtgctgaccacccacttcatggacgaggccgacctgctgggcgacagaatcgccatcatggccaagggcgagctgcagtgctgcggcagcagcctgttcctgaagcagaagtacggcgccggctaccacatgaccctggtgaaggagccccactgcaaccccgaggacatcagccagctggtgcaccaccacgtgcccaacgccaccctggagagcagcgccggcgccgagctgagcttcatcctgcccagagagagcacccacagattcgagggcctgttcgccaagctggagaagaagcagaaggagctgggcatcgccagcttcggcgccagcatcaccaccatggaggaggtgttcctgagagtgggcaagctggtggacagcagcatggacatccaggccatccagctgcccgccctgcagtaccagcacgagagaagagccagcgactgggccgtggacagcaacctgtgcggcgccatggaccccagcgacggcatcggcgccctgatcgaggaggagagaaccgccgtgaagctgaacaccggcctggccctgcactgccagcagttctgggccatgttcctgaagaaggccgcctacagctggagagagtggaagatggtggccgcccaggtgctggtgcccctgacctgcgtgaccctggccctgctggccatcaactacagcagcgagctgttcgacgaccccatgctgagactgaccctgggcgagtacggcagaaccgtggtgcccttcagcgtgcccggcaccagccagctgggccagcagctgagcgagcacctgaaggacgccctgcaggccgagggccaggagcccagagaggtgctgggcgacctggaggagttcctgatcttcagagccagcgtggagggcggcggcttcaacgagagatgcctggtggccgccagcttcagagacgtgggcgagagaaccgtggtgaacgccctgttcaacaaccaggcctaccacagccccgccaccgccctggccgtggtggacaacctgctgttcaagctgctgtgcggcccccacgccagcatcgtggtgagcaacttcccccagcccagaagcgccctgcaggccgccaaggaccagttcaacgagggcagaaagggcttcgacatcgccctgaacctgctgttcgccatggccttcctggccagcaccttcagcatcctggccgtgagcgagagagccgtgcaggccaagcacgtgcagttcgtgagcggcgtgcacgtggccagcttctggctgagcgccctgctgtgggacctgatcagcttcctgatccccagcctgctgctgctggtggtgttcaaggccttcgacgtgagagccttcaccagagacggccacatggccgacaccctgctgctgctgctgctgtacggctgggccatcatccccctgatgtacctgatgaacttcttcttcctgggcgccgccaccgcctacaccagactgaccatcttcaacatcctgagcggcatcgccaccttcctgatggtgaccatcatgagaatccccgccgtgaagctggaggagctgagcaagaccctggaccacgtgttcctggtgctgcccaaccactgcctgggcatggccgtgagcagcttctacgagaactacgagaccagaagatactgcaccagcagcgaggtggccgcccactactgcaagaagtacaacatccagtaccaggagaacttctacgcctggagcgcccccggcgtgggcagattcgtggccagcatggccgccagcggctgcgcctacctgatcctgctgttcctgatcgagaccaacctgctgcagagactgagaggcatcctgtgcgccctgagaagaagaagaaccctgaccgagctgtacaccagaatgcccgtgctgcccgaggaccaggacgtggccgacgagagaaccagaatcctggcccccagccccgacagcctgctgcacacccccctgatcatcaaggagctgagcaaggtgtacgagcagagagtgcccctgctggccgtggacagactgagcctggccgtgcagaagggcgagtgcttcggcctgctgggcttcaacggcgccggcaagaccaccaccttcaagatgctgaccggcgaggagagcctgaccagcggcgacgccttcgtgggcggccacagaatcagcagcgacgtgggcaaggtgagacagagaatcggctactgcccccagttcgacgccctgctggaccacatgaccggcagagagatgctggtgatgtacgccagactgagaggcatccccgagagacacatcggcgcctgcgtggagaacaccctgagaggcctgctgctggagccccacgccaacaagctggtgagaacctacagcggcggcaacaagagaaagctgagcaccggcatcgccctgatcggcgagcccgccgtgatcttcctggacgagcccagcaccggcatggaccccgtggccagaagactgctgtgggacaccgtggccagagccagagagagcggcaaggccatcatcatcaccagccacagcatggaggagtgcgaggccctgtgcaccagactggccatcatggtgcagggccagttcaagtgcctgggcagcccccagcacctgaagagcaagttcggcagcggctacagcctgagagccaaggtgcagagcgagggccagcaggaggccctggaggagttcaaggccttcgtggacctgaccttccccggcagcgtgctggaggacgagcaccagggcatggtgcactaccacctgcccggcagagacctgagctgggccaaggtgttcggcatcctggagaaggccaaggagaagtacggcgtggacgactacagcgtgagccagatcagcctggagcaggtgttcctgagcttcgcccacctgcagccccccaccgccgaggagggcagatag

SEQ ID NO: 73761 - DNA, 5127 bp, synthetic construct
  misc_feature 1..5127: note = Description of Artificial Sequence: Synthetic coding sequence
  source 1..5127: mol_type = other DNA
accgcccccccccccagccccagcctgcccctgcaggacagagccgccaccagcgcccacctggccctgttcaccctgagcttccagagcaccttcctgctgttccccgccggctgcagcgcctacctgaacctgctgagaccccccaccagcctggccgccctgggcgtgcccttcagcaagaccatggccgtgctgagacagctggccctgctgctgtggaagaactacaccctgcagaagagaaaggtgctggtgaccgtgctggagctgttcctgcccctgctgttcagcggcatcctgatctggctgagactgaagatccagagcgagaacgtgcccaacgccaccatctaccccggccagagcatccaggagctgcccctgttcttcaccttccccccccccggcgacacctgggagctggcctacatccccagccacagcgacgccgccaagaccgtgaccgagaccgtgagaagagccctggtgatcaacatgagagtgagaggcttccccagcgagaaggacttcgaggactacatcagatacgacaactgcagcagcagcgtgctggccgccgtggtgttcgagcaccccttcaaccacagcaaggagcccctgcccctggccgtgaagtaccacctgagattcagctacaccagaagaaactacatgtggacccagaccggcagcttcttcctgaaggagaccgagggctggcacaccaccagcctgttccccctgttccccaaccccggccccagagagcccaccagccccgacggcggcgagcccggctacatcagagagggcttcctggccgtgcagcacgccgtggacagagccatcatggagtaccacgccgacgccgccaccagacagctgttccagagactgaccgtgaccatcaagagattcccctacccccccttcatcgccgaccccttcctggtggccatccagtaccagctgcccctgctgctgctgctgagcttcacctacaccgccctgaccatcgccagagccgtggtgcaggagaaggagagaagactgaaggagtacatgagaatgatgggcctgagcagctggctgcactggagcgcctggttcctgctgttcttcctgttcctgctgatcgccgccagcttcatgaccctgctgttctgcgtgaaggtgaagcccaacgtggccgtgctgagcagaagcgaccccagcctggtgctggccttcctgctgtgcttcgccatcagcaccatcagcttcagcttcatggtgagcaccttcttcagcaagggcatgggcatccagtggagagacctgctgagccccgtgaacgtggacgacgacttctgcttcggccaggtgctgggcatgctgctgctggacagcgtgctgtacggcctggtgacctggtacatggaggccgtgttccccggccagttcggcgtgccccagccctggtacttcttcatcatgcccagctactggtgcggcaagcccagagccgtggccggcaaggaggaggaggacagcgaccccgagaaggccctgagaaacgagtacttcgaggccgagcccgaggacctggtggccggcatcaagatcaagcacctgagcaaggtgttcagagtgggcaacaaggacagagccgccgtgagagacctgaacctgaacctgtacgagggccagatcaccgtgctgctgggccacaacggcgccggcaagaccaccaccctgagcatgctgaccggcctgttcccccccaccagcggcagagcctacatcagcggctacgagatcagccaggacatggtgcagatcagaaagagcctgggcctgtgcccccagcacgacatcctgttcgacaacctgaccgtggccgagcacctgtacttctacgcccagctgaagggcctgagcagacagaagtgccccgaggaggtgaagcagatgctgcacatcatcggcctggaggacaagtggaacagcagaagcagattcctgagcggcggcatgagaagaaagctgagcatcggcatcgccctgatcgccggcagcaaggtgctgatcctggacgagcccaccagcggcatggacgccatcagcagaagagccatctgggacctgctgcagagacagaagagcgacagaaccatcgtgctgaccacccacttcatggacgaggccgacctgctgggcgacagaatcgccatcatggccaagggcgagctgcagtgctgcggcagcagcctgttcctgaagcagaagtacggcgccggctaccacatgaccctggtgaaggagccccactgcaaccccgaggacatcagccagctggtgcaccaccacgtgcccaacgccaccctggagagcagcgccggcgccgagctgagcttcatcctgcccagagagagcacccacagattcgagggcctgttcgccaagctggagaagaagcagaaggagctgggcatcgccagcttcggcgccagcatcaccaccatggaggaggtgttcctgagagtgggcaagctggtggacagcagcatggacatccaggccatccagctgcccgccctgcagtaccagcacgagagaagagccagcgactgggccgtggacagcaacctgtgcggcgccatggaccccagcgacggcatcggcgccctgatcgaggaggagagaaccgccgtgaagctgaacaccggcctggccctgcactgccagcagttctgggccatgttcctgaagaaggccgcctacagctggagagagtggaagatggtggccgcccaggtgctggtgcccctgacctgcgtgaccctggccctgctggccatcaactacagcagcgagctgttcgacgaccccatgctgagactgaccctgggcgagtacggcagaaccgtggtgcccttcagcgtgcccggcaccagccagctgggccagcagctgagcgagcacctgaaggacgccctgcaggccgagggccaggagcccagagaggtgctgggcgacctggaggagttcctgatcttcagagccagcgtggagggcggcggcttcaacgagagatgcctggtggccgccagcttcagagacgtgggcgagagaaccgtggtgaacgccctgttcaacaaccaggcctaccacagccccgccaccgccctggccgtggtggacaacctgctgttcaagctgctgtgcggcccccacgccagcatcgtggtgagcaacttcccccagcccagaagcgccctgcaggccgccaaggaccagttcaacgagggcagaaagggcttcgacatcgccctgaacctgctgttcgccatggccttcctggccagcaccttcagcatcctggccgtgagcgagagagccgtgcaggccaagcacgtgcagttcgtgagcggcgtgcacgtggccagcttctggctgagcgccctgctgtgggacctgatcagcttcctgatccccagcctgctgctgctggtggtgttcaaggccttcgacgtgagagccttcaccagagacggccacatggccgacaccctgctgctgctgctgctgtacggctgggccatcatccccctgatgtacctgatgaacttcttcttcctgggcgccgccaccgcctacaccagactgaccatcttcaacatcctgagcggcatcgccaccttcctgatggtgaccatcatgagaatccccgccgtgaagctggaggagctgagcaagaccctggaccacgtgttcctggtgctgcccaaccactgcctgggcatggccgtgagcagcttctacgagaactacgagaccagaagatactgcaccagcagcgaggtggccgcccactactgcaagaagtacaacatccagtaccaggagaacttctacgcctggagcgcccccggcgtgggcagattcgtggccagcatggccgccagcggctgcgcctacctgatcctgctgttcctgatcgagaccaacctgctgcagagactgagaggcatcctgtgcgccctgagaagaagaagaaccctgaccgagctgtacaccagaatgcccgtgctgcccgaggaccaggacgtggccgacgagagaaccagaatcctggcccccagccccgacagcctgctgcacacccccctgatcatcaaggagctgagcaaggtgtacgagcagagagtgcccctgctggccgtggacagactgagcctggccgtgcagaagggcgagtgcttcggcctgctgggcttcaacggcgccggcaagaccaccaccttcaagatgctgaccggcgaggagagcctgaccagcggcgacgccttcgtgggcggccacagaatcagcagcgacgtgggcaaggtgagacagagaatcggctactgcccccagttcgacgccctgctggaccacatgaccggcagagagatgctggtgatgtacgccagactgagaggcatccccgagagacacatcggcgcctgcgtggagaacaccctgagaggcctgctgctggagccccacgccaacaagctggtgagaacctacagcggcggcaacaagagaaagctgagcaccggcatcgccctgatcggcgagcccgccgtgatcttcctggacgagcccagcaccggcatggaccccgtggccagaagactgctgtgggacaccgtggccagagccagagagagcggcaaggccatcatcatcaccagccacagcatggaggagtgcgaggccctgtgcaccagactggccatcatggtgcagggccagttcaagtgcctgggcagcccccagcacctgaagagcaagttcggcagcggctacagcctgagagccaaggtgcagagcgagggccagcaggaggccctggaggagttcaaggccttcgtggacctgaccttccccggcagcgtgctggaggacgagcaccagggcatggtgcactaccacctgcccggcagagacctgagctgggccaaggtgttcggcatcctggagaaggccaaggagaagtacggcgtggacgactacagcgtgagccagatcagcctggagcaggtgttcctgagcttcgcccacctgcagccccccaccgccgaggagggcagatag

SEQ ID NO: 73762 - DNA, 6822 bp, synthetic construct
  misc_feature 1..6822: note = Description of Artificial Sequence: Synthetic coding sequence
  source 1..6822: mol_type = other DNA
atgggcttcgtgagacagatccagctgctgctgtggaagaactggaccctgagaaagagacagaagatcagattcgtggtggagctggtgtggcccctgagcctgttcctggtgctgatctggctgagaaacgccaaccccctgtacagccaccacgagtgccacttccccaacaaggccatgcccagcgccggcatgctgccctggctgcagggcatcttctgcaacgtgaacaacccctgcttccagagccccacccccggcgagagccccggcatcgtgagcaactacaacaacagcatcctggccagagtgtacagagacttccaggagctgctgatgaacgcccccgagagccagcacctgggcagaatctggaccgagctgcacatcctgagccagttcatggacaccctgagaacccaccccgagagaatcgccggcagaggcatcagaatcagagacatcctgaaggacgaggagaccctgaccctgttcctgatcaagaacatcggcctgagcgacagcgtggtgtacctgctgatcaacagccaggtgagacccgagcagttcgcccacggcgtgcccgacctggccctgaaggacatcgcctgcagcgaggccctgctggagagattcatcatcttcagccagagaagaggcgccaagaccgtgagatacgccctgtgcagcctgagccagggcaccctgcagtggatcgaggacaccctgtacgccaacgtggacttcttcaagctgttcagagtgctgcccaccctgctggacagcagaagccagggcatcaacctgagaagctggggcggcatcctgagcgacatgagccccagaatccaggagttcatccacagacccagcatgcaggacctgctgtgggtgaccagacccctgatgcagaacggcggccccgagaccttcaccaagctgatgggcatcctgagcgacctgctgtgcggctaccccgagggcggcggcagcagagtgctgagcttcaactggtacgaggacaacaactacaaggccttcctgggcatcgacagcaccagaaaggaccccatctacagctacgacagaagaaccaccagcttctgcaacgccctgatccagagcctggagagcaaccccctgaccaagatcgcctggagagccgccaagcccctgctgatgggcaagatcctgtacacccccgacagccccgccgccagaagaatcctgaagaacgccaacagcaccttcgaggagctggagcacgtgagaaagctggtgaaggcctgggaggaggtgggcccccagatctggtacttcttcgacaacagcacccagatgaacatgatcagagacaccctgggcaaccccaccgtgaaggacttcctgaacagacagctgggcgaggagggcatcaccgccgaggccatcctgaacttcctgtacaagggccccagagagagccaggccgacgacatggccaacttcgactggagagacatcttcaacatcaccgacagaaccctgagactggtgaaccagtacctggagtgcctggtgctggacaagttcgagagctacaacgacgagacccagctgacccagagagccctgagcctgctggaggagaacatgttctgggccggcgtggtgttccccgacatgtacccctggaccagcagcctgcccccccacgtgaagtacaagatcagaatggacatcgacgtggtggagaagaccaacaagatcaaggacagatactgggacagcggccccagagccgaccccgtggaggacttcagatacatctggggcggcttcgcctacctgcaggacatggtggagcagggcatcaccagaagccaggtgcaggccgaggcccccgtgggcatctacctgcagcagatgccctacccctgcttcgtggacgacagcttcatgatcatcctgaacagatgcttccccatcttcatggtgctggcctggatctacagcgtgagcatgaccgtgaagagcatcgtgctggagaaggagctgagactgaaggagaccctgaagaaccagggcgtgagcaacgccgtgatctggtgcacctggttcctggacagcttcagcatcatgagcatgagcatcttcctgctgaccatcttcatcatgcacggcagaatcctgcactacagcgaccccttcatcctgttcctgttcctgctggccttcagcaccgccaccatcatgctgtgcttcctgctgagcaccttcttcagcaaggccagcctggccgccgcctgcagcggcgtgatctacttcaccctgtacctgccccacatcctgtgcttcgcctggcaggacagaatgaccgccgagctgaagaaggccgtgagcctgctgagccccgtggccttcggcttcggcaccgagtacctggtgagattcgaggagcagggcctgggcctgcagtggagcaacatcggcaacagccccaccgagggcgacgagttcagcttcctgctgagcatgcagatgatgctgctggacgccgccgtgtacggcctgctggcctggtacctggaccaggtgttccccggcgactacggcacccccctgccctggtacttcctgctgcaggagagctactggctgggcggcgagggctgcagcaccagagaggagagagccctggagaagaccgagcccctgaccgaggagaccgaggaccccgagcaccccgagggcatccacgacagcttcttcgagagagagcaccccggctgggtgcccggcgtgtgcgtgaagaacctggtgaagatcttcgagccctgcggcagacccgccgtggacagactgaacatcaccttctacgagaaccagatcaccgccttcctgggccacaacggcgccggcaagaccaccaccctgagcatcctgaccggcctgctgccccccaccagcggcaccgtgctggtgggcggcagagacatcgagaccagcctggacgccgtgagacagagcctgggcatgtgcccccagcacaacatcctgttccaccacctgaccgtggccgagcacatgctgttctacgcccagctgaagggcaagagccaggaggaggcccagctggagatggaggccatgctggaggacaccggcctgcaccacaagagaaacgaggaggcccaggacctgagcggcggcatgcagagaaagctgagcgtggccatcgccttcgtgggcgacgccaaggtggtgatcctggacgagcccaccagcggcgtggacccctacagcagaagaagcatctgggacctgctgctgaagtacagaagcggcagaaccatcatcatgagcacccaccacatggacgaggccgacctgctgggcgacagaatcgccatcatcgcccagggcagactgtactgcagcggcacccccctgttcctgaagaactgcttcggcaccggcctgtacctgaccctggtgagaaagatgaagaacatccagagccagagaaagggcagcgagggcacctgcagctgcagcagcaagggcttcagcaccacctgccccgcccacgtggacgacctgacccccgagcaggtgctggacggcgacgtgaacgagctgatggacgtggtgctgcaccacgtgcccgaggccaagctggtggagtgcatcggccaggagctgatcttcctgctgcccaacaagaacttcaagcacagagcctacgccagcctgttcagagagctggaggagaccctggccgacctgggcctgagcagcttcggcatcagcgacacccccctggaggagatcttcctgaaggtgaccgaggacagcgacagcggccccctgttcgccggcggcgcccagcagaagagagagaacgtgaaccccagacacccctgcctgggccccagagagaaggccggccagaccccccaggacagcaacgtgtgcagccccggcgcccccgccgcccaccccgagggccagcccccccccgagcccgagtgccccggcccccagctgaacaccggcacccagctggtgctgcagcacgtgcaggccctgctggtgaagagattccagcacaccatcagaagccacaaggacttcctggcccagatcgtgctgcccgccaccttcgtgttcctggccctgatgctgagcatcgtgatcccccccttcggcgagtaccccgccctgaccctgcacccctggatctacggccagcagtacaccttcttcagcatggacgagcccggcagcgagcagttcaccgtgctggccgacgtgctgctgaacaagcccggcttcggcaacagatgcctgaaggagggctggctgcccgagtacccctgcggcaacagcaccccctggaagacccccagcgtgagccccaacatcacccagctgttccagaagcagaagtggacccaggtgaaccccagccccagctgcagatgcagcaccagagagaagctgaccatgctgcccgagtgccccgagggcgccggcggcctgccccccccccagagaacccagagaagcaccgagatcctgcaggacctgaccgacagaaacatcagcgacttcctggtgaagacctaccccgccctgatcagaagcagcctgaagagcaagttctgggtgaacgagcagagatacggcggcatcagcatcggcggcaagctgcccgtggtgcccatcaccggcgaggccctggtgggcttcctgagcgacctgggcagaatcatgaacgtgagcggcggccccatcaccagagaggccagcaaggagatccccgacttcctgaagcacctggagaccgaggacaacatcaaggtgtggttcaacaacaagggctggcacgccctggtgagcttcctgaacgtggcccacaacgccatcctgagagccagcctgcccaaggacagaagccccgaggagtacggcatcaccgtgatcagccagcccctgaacctgaccaaggagcagctgagcgagatcaccgtgctgaccaccagcgtggacgccgtggtggccatctgcgtgatcttcagcatgagcttcgtgcccgccagcttcgtgctgtacctgatccaggagagagtgaacaagagcaagcacctgcagttcatcagcggcgtgagccccaccacctactgggtgaccaacttcctgtgggacatcatgaactacagcgtgagcgccggcctggtggtgggcatcttcatcggcttccagaagaaggcctacaccagccccgagaacctgcccgccctggtggccctgctgctgctgtacggctgggccgtgatccccatgatgtaccccgccagcttcctgttcgacgtgcccagcaccgcctacgtggccctgagctgcgccaacctgttcatcggcatcaacagcagcgccatcaccttcatcctggagctgttcgagaacaacagaaccctgctgagattcaacgccgtgctgagaaagctgctgatcgtgttcccccacttctgcctgggcagaggcctgatcgacctggccctgagccaggccgtgaccgacgtgtacgccagattcggcgaggagcacagcgccaaccccttccactgggacctgatcggcaagaacctgttcgccatggtggtggagggcgtggtgtacttcctgctgaccctgctggtgcagagacacttcttcctgagccagtggatcgccgagcccaccaaggagcccatcgtggacgaggacgacgacgtggccgaggagagacagagaatcatcaccggcggcaacaagaccgacatcctgagactgcacgagctgaccaagatctaccccggcaccagcagccccgccgtggacagactgtgcgtgggcgtgagacccggcgagtgcttcggcctgctgggcgtgaacggcgccggcaagaccaccaccttcaagatgctgaccggcgacaccaccgtgaccagcggcgacgccaccgtggccggcaagagcatcctgaccaacatcagcgaggtgcaccagaacatgggctactgcccccagttcgacgccatcgacgagctgctgaccggcagagagcacctgtacctgtacgccagactgagaggcgtgcccgccgaggagatcgagaaggtggccaactggagcatcaagagcctgggcctgaccgtgtacgccgactgcctggccggcacctacagcggcggcaacaagagaaagctgagcaccgccatcgccctgatcggctgcccccccctggtgctgctggacgagcccaccaccggcatggacccccaggccagaagaatgctgtggaacgtgatcgtgagcatcatcagagagggcagagccgtggtgctgaccagccacagcatggaggagtgcgaggccctgtgcaccagactggccatcatggtgaagggcgccttcagatgcatgggcaccatccagcacctgaagagcaagttcggcgacggctacatcgtgaccatgaagatcaagagccccaaggacgacctgctgcccgacctgaaccccgtggagcagttcttccagggcaacttccccggcagcgtgcagagagagagacactacaacatgctgcagttccaggtgagcagcagcagcctggccagaatcttccagctgctgctgagccacaaggacagcctgctgatcgaggagtacagcgtgacccagaccaccctggaccaggtgttcgtgaacttcgccaagcagcagaccgagagccacgacctgcccctgcaccccagagccgccggcgccagcagacaggcccaggactag

SEQ ID NO: 73763 - DNA, 2940 bp, synthetic construct
  misc_feature 1..2940: note = Description of Artificial Sequence: Synthetic coding sequence
  source 1..2940: mol_type = other DNA
atgggcttcgtgagacagatccagctgctgctgtggaagaactggaccctgagaaagagacagaagatcagattcgtggtggagctggtgtggcccctgagcctgttcctggtgctgatctggctgagaaacgccaaccccctgtacagccaccacgagtgccacttccccaacaaggccatgcccagcgccggcatgctgccctggctgcagggcatcttctgcaacgtgaacaacccctgcttccagagccccacccccggcgagagccccggcatcgtgagcaactacaacaacagcatcctggccagagtgtacagagacttccaggagctgctgatgaacgcccccgagagccagcacctgggcagaatctggaccgagctgcacatcctgagccagttcatggacaccctgagaacccaccccgagagaatcgccggcagaggcatcagaatcagagacatcctgaaggacgaggagaccctgaccctgttcctgatcaagaacatcggcctgagcgacagcgtggtgtacctgctgatcaacagccaggtgagacccgagcagttcgcccacggcgtgcccgacctggccctgaaggacatcgcctgcagcgaggccctgctggagagattcatcatcttcagccagagaagaggcgccaagaccgtgagatacgccctgtgcagcctgagccagggcaccctgcagtggatcgaggacaccctgtacgccaacgtggacttcttcaagctgttcagagtgctgcccaccctgctggacagcagaagccagggcatcaacctgagaagctggggcggcatcctgagcgacatgagccccagaatccaggagttcatccacagacccagcatgcaggacctgctgtgggtgaccagacccctgatgcagaacggcggccccgagaccttcaccaagctgatgggcatcctgagcgacctgctgtgcggctaccccgagggcggcggcagcagagtgctgagcttcaactggtacgaggacaacaactacaaggccttcctgggcatcgacagcaccagaaaggaccccatctacagctacgacagaagaaccaccagcttctgcaacgccctgatccagagcctggagagcaaccccctgaccaagatcgcctggagagccgccaagcccctgctgatgggcaagatcctgtacacccccgacagccccgccgccagaagaatcctgaagaacgccaacagcaccttcgaggagctggagcacgtgagaaagctggtgaaggcctgggaggaggtgggcccccagatctggtacttcttcgacaacagcacccagatgaacatgatcagagacaccctgggcaaccccaccgtgaaggacttcctgaacagacagctgggcgaggagggcatcaccgccgaggccatcctgaacttcctgtacaagggccccagagagagccaggccgacgacatggccaacttcgactggagagacatcttcaacatcaccgacagaaccctgagactggtgaaccagtacctggagtgcctggtgctggacaagttcgagagctacaacgacgagacccagctgacccagagagccctgagcctgctggaggagaacatgttctgggccggcgtggtgttccccgacatgtacccctggaccagcagcctgcccccccacgtgaagtacaagatcagaatggacatcgacgtggtggagaagaccaacaagatcaaggacagatactgggacagcggccccagagccgaccccgtggaggacttcagatacatctggggcggcttcgcctacctgcaggacatggtggagcagggcatcaccagaagccaggtgcaggccgaggcccccgtgggcatctacctgcagcagatgccctacccctgcttcgtggacgacagcttcatgatcatcctgaacagatgcttccccatcttcatggtgctggcctggatctacagcgtgagcatgaccgtgaagagcatcgtgctggagaaggagctgagactgaaggagaccctgaagaaccagggcgtgagcaacgccgtgatctggtgcacctggttcctggacagcttcagcatcatgagcatgagcatcttcctgctgaccatcttcatcatgagcctgctgagccccgtggccttcggcttcggcaccgagtacctggtgagattcgaggagcagggcctgggcctgcagtggagcaacatcggcaacagccccaccgagggcgacgagttcagcttcctgctgagcatgcagatgatgctgctggacgccgccgtgtacggcctgctggcctggtacctggaccaggtgttccccggcgactacggcacccccctgccctggtacttcctgctgcaggagagctactggctgggcggcgagggctgcagcaccagagaggagagagccctggagaagaccgagcccctgaccgaggagaccgaggaccccgagcaccccgagggcatccacgacagcttcttcgagagagagcaccccggctgggtgcccggcgtgtgcgtgaagaacctggtgaagatcttcgagccctgcggcagacccgccgtggacagactgaacatcaccttctacgagaaccagatcaccgccttcctgggccacaacggcgccggcaagaccaccaccttcagcgccggcgcccccctgagcagcaagggccccgagagacacctgctgagaggcgagcacggccccccctggttccccaaggagcagcagaccagaaccagccagggcgccgccaaccccagagacaccgtgttcaagagcttcggcgagccccaggagggcaccaccgcctgcaccccctgcgacggcatgttcagcagagccgtgcagtgcgagtggaacgtgggccccgtgcccttctag

SEQ ID NO: 73764 - DNA, 1179 bp, synthetic construct
  misc_feature 1..1179: note = Description of Artificial Sequence: Synthetic coding sequence
  source 1..1179: mol_type = other DNA
atggtggtggagggcgtggtgtacttcctgctgaccctgctggtgcagagacacttcttcctgagccagtggatcgccgagcccaccaaggagcccatcgtggacgaggacgacgacgtggccgaggagagacagagaatcatcaccggcggcaacaagaccgacatcctgagactgcacgagctgaccaagatctaccccggcaccagcagccccgccgtggacagactgtgcgtgggcgtgagacccggcgagtgcttcggcctgctgggcgtgaacggcgccggcaagaccaccaccttcaagatgctgaccggcgacaccaccgtgaccagcggcgacgccaccgtggccggcaagagcatcctgaccaacatcagcgaggtgcaccagaacatgggctactgcccccagttcgacgccatcgacgagctgctgaccggcagagagcacctgtacctgtacgccagactgagaggcgtgcccgccgaggagatcgagaaggtggccaactggagcatcaagagcctgggcctgaccgtgtacgccgactgcctggccggcacctacagcggcggcaacaagagaaagctgagcaccgccatcgccctgatcggctgcccccccctggtgctgctggacgagcccaccaccggcatggacccccaggccagaagaatgctgtggaacgtgatcgtgagcatcatcagagagggcagagccgtggtgctgaccagccacagcatggaggagtgcgaggccctgtgcaccagactggccatcatggtgaagggcgccttcagatgcatgggcaccatccagcacctgaagagcaagttcggcgacggctacatcgtgaccatgaagatcaagagccccaaggacgacctgctgcccgacctgaaccccgtggagcagttcttccagggcaacttccccggcagcgtgcagagagagagacactacaacatgctgcagttccaggtgagcagcagcagcctggccagaatcttccagctgctgctgagccacaaggacagcctgctgatcgaggagtacagcgtgacccagaccaccctggaccaggtgttcgtgaacttcgccaagcagcagaccgagagccacgacctgcccctgcaccccagagccgccggcgccagcagacaggcccaggactag

SEQ ID NO: 73765 - DNA, 1632 bp, synthetic construct
  misc_feature 1..1632: note = Description of Artificial Sequence: Synthetic coding sequence
  source 1..1632: mol_type = other DNA
atgatgatgaactacagcgtgagcgccggcctggtggtgggcatcttcatcggcttccagaagaaggcctacaccagccccgagaacctgcccgccctggtggccctgctgctgctgtacggctgggccgtgatccccatgatgtaccccgccagcttcctgttcgacgtgcccagcaccgcctacgtggccctgagctgcgccaacctgttcatcggcatcaacagcagcgccatcaccttcatcctggagctgttcgagaacaacagaaccctgctgagattcaacgccgtgctgagaaagctgctgatcgtgttcccccacttctgcctgggcagaggcctgatcgacctggccctgagccaggccgtgaccgacgtgtacgccagattcggcgaggagcacagcgccaaccccttccactgggacctgatcggcaagaacctgttcgccatggtggtggagggcgtggtgtacttcctgctgaccctgctggtgcagagacacttcttcctgagccagtggatcgccgagcccaccaaggagcccatcgtggacgaggacgacgacgtggccgaggagagacagagaatcatcaccggcggcaacaagaccgacatcctgagactgcacgagctgaccaagatctaccccggcaccagcagccccgccgtggacagactgtgcgtgggcgtgagacccggcgagtgcttcggcctgctgggcgtgaacggcgccggcaagaccaccaccttcaagatgctgaccggcgacaccaccgtgaccagcggcgacgccaccgtggccggcaagagcatcctgaccaacatcagcgaggtgcaccagaacatgggctactgcccccagttcgacgccatcgacgagctgctgaccggcagagagcacctgtacctgtacgccagactgagaggcgtgcccgccgaggagatcgagaaggtggccaactggagcatcaagagcctgggcctgaccgtgtacgccgactgcctggccggcacctacagcggcggcaacaagagaaagctgagcaccgccatcgccctgatcggctgcccccccctggtgctgctggacgagcccaccaccggcatggacccccaggccagaagaatgctgtggaacgtgatcgtgagcatcatcagagagggcagagccgtggtgctgaccagccacagcatggaggagtgcgaggccctgtgcaccagactggccatcatggtgaagggcgccttcagatgcatgggcaccatccagcacctgaagagcaagttcggcgacggctacatcgtgaccatgaagatcaagagccccaaggacgacctgctgcccgacctgaaccccgtggagcagttcttccagggcaacttccccggcagcgtgcagagagagagacactacaacatgctgcagttccaggtgagcagcagcagcctggccagaatcttccagctgctgctgagccacaaggacagcctgctgatcgaggagtacagcgtgacccagaccaccctggaccaggtgttcgtgaacttcgccaagcagcagaccgagagccacgacctgcccctgcaccccagagccgccggcgccagcagacaggcccaggactag

SEQ ID NO: 73766 - DNA, 3198 bp, synthetic construct
  misc_feature 1..3198: note = Description of Artificial Sequence: Synthetic coding sequence
  source 1..3198: mol_type = other DNA
atggacgtggtgctgcaccacgtgcccgaggccaagctggtggagtgcatcggccaggagctgatcttcctgctgcccaacaagaacttcaagcacagagcctacgccagcctgttcagagagctggaggagaccctggccgacctgggcctgagcagcttcggcatcagcgacacccccctggaggagatcttcctgaaggtgaccgaggacagcgacagcggccccctgttcgccggcggcgcccagcagaagagagagaacgtgaaccccagacacccctgcctgggccccagagagaaggccggccagaccccccaggacagcaacgtgtgcagccccggcgcccccgccgcccaccccgagggccagcccccccccgagcccgagtgccccggcccccagctgaacaccggcacccagctggtgctgcagcacgtgcaggccctgctggtgaagagattccagcacaccatcagaagccacaaggacttcctggcccagatcgtgctgcccgccaccttcgtgttcctggccctgatgctgagcatcgtgatcccccccttcggcgagtaccccgccctgaccctgcacccctggatctacggccagcagtacaccttcttcagcatggacgagcccggcagcgagcagttcaccgtgctggccgacgtgctgctgaacaagcccggcttcggcaacagatgcctgaaggagggctggctgcccgagtacccctgcggcaacagcaccccctggaagacccccagcgtgagccccaacatcacccagctgttccagaagcagaagtggacccaggtgaaccccagccccagctgcagatgcagcaccagagagaagctgaccatgctgcccgagtgccccgagggcgccggcggcctgccccccccccagagaacccagagaagcaccgagatcctgcaggacctgaccgacagaaacatcagcgacttcctggtgaagacctaccccgccctgatcagaagcagcctgaagagcaagttctgggtgaacgagcagagatacggcggcatcagcatcggcggcaagctgcccgtggtgcccatcaccggcgaggccctggtgggcttcctgagcgacctgggcagaatcatgaacgtgagcggcggccccatcaccagagaggccagcaaggagatccccgacttcctgaagcacctggagaccgaggacaacatcaaggtgtggttcaacaacaagggctggcacgccctggtgagcttcctgaacgtggcccacaacgccatcctgagagccagcctgcccaaggacagaagccccgaggagtacggcatcaccgtgatcagccagcccctgaacctgaccaaggagcagctgagcgagatcaccgtgctgaccaccagcgtggacgccgtggtggccatctgcgtgatcttcagcatgagcttcgtgcccgccagcttcgtgctgtacctgatccaggagagagtgaacaagagcaagcacctgcagttcatcagcggcgtgagccccaccacctactgggtgaccaacttcctgtgggacatcatgaactacagcgtgagcgccggcctggtggtgggcatcttcatcggcttccagaagaaggcctacaccagccccgagaacctgcccgccctggtggccctgctgctgctgtacggctgggccgtgatccccatgatgtaccccgccagcttcctgttcgacgtgcccagcaccgcctacgtggccctgagctgcgccaacctgttcatcggcatcaacagcagcgccatcaccttcatcctggagctgttcgagaacaacagaaccctgctgagattcaacgccgtgctgagaaagctgctgatcgtgttcccccacttctgcctgggcagaggcctgatcgacctggccctgagccaggccgtgaccgacgtgtacgccagattcggcgaggagcacagcgccaaccccttccactgggacctgatcggcaagaacctgttcgccatggtggtggagggcgtggtgtacttcctgctgaccctgctggtgcagagacacttcttcctgagccagtggatcgccgagcccaccaaggagcccatcgtggacgaggacgacgacgtggccgaggagagacagagaatcatcaccggcggcaacaagaccgacatcctgagactgcacgagctgaccaagatctaccccggcaccagcagccccgccgtggacagactgtgcgtgggcgtgagacccggcgagtgcttcggcctgctgggcgtgaacggcgccggcaagaccaccaccttcaagatgctgaccggcgacaccaccgtgaccagcggcgacgccaccgtggccggcaagagcatcctgaccaacatcagcgaggtgcaccagaacatgggctactgcccccagttcgacgccatcgacgagctgctgaccggcagagagcacctgtacctgtacgccagactgagaggcgtgcccgccgaggagatcgagaaggtggccaactggagcatcaagagcctgggcctgaccgtgtacgccgactgcctggccggcacctacagcggcggcaacaagagaaagctgagcaccgccatcgccctgatcggctgcccccccctggtgctgctggacgagcccaccaccggcatggacccccaggccagaagaatgctgtggaacgtgatcgtgagcatcatcagagagggcagagccgtggtgctgaccagccacagcatggaggagtgcgaggccctgtgcaccagactggccatcatggtgaagggcgccttcagatgcatgggcaccatccagcacctgaagagcaagttcggcgacggctacatcgtgaccatgaagatcaagagccccaaggacgacctgctgcccgacctgaaccccgtggagcagttcttccagggcaacttccccggcagcgtgcagagagagagacactacaacatgctgcagttccaggtgagcagcagcagcctggccagaatcttccagctgctgctgagccacaaggacagcctgctgatcgaggagtacagcgtgacccagaccaccctggaccaggtgttcgtgaacttcgccaagcagcagaccgagagccacgacctgcccctgcaccccagagccgccggcgccagcagacaggcccaggactag

SEQ ID NO: 73767 - DNA, 4929 bp, synthetic construct
  misc_feature 1..4929: note = Description of Artificial Sequence: Synthetic coding sequence
  source 1..4929: mol_type = other DNA
atgagcaccgccatcagagaggtgggcgtgtggagacagaccagaaccctgctgctgaagaactacctgatcaagtgcagaaccaagaagagcagcgtgcaggagatcctgttccccctgttcttcctgttctggctgatcctgatcagcatgatgcaccccaacaagaagtacgaggaggtgcccaacatcgagctgaaccccatggacaagttcaccctgagcaacctgatcctgggctacacccccgtgaccaacatcaccagcagcatcatgcagaaggtgagcaccgaccacctgcccgacgtgatcatcaccgaggagtacaccaacgagaaggagatgctgaccagcagcctgagcaagcccagcaacttcgtgggcgtggtgttcaaggacagcatgagctacgagctgagattcttccccgacatgatccccgtgagcagcatctacatggacagcagagccggctgcagcaagagctgcgaggccgcccagtactggagcagcggcttcaccgtgctgcaggccagcatcgacgccgccatcatccagctgaagaccaacgtgagcctgtggaaggagctggagagcaccaaggccgtgatcatgggcgagaccgccgtggtggagatcgacaccttccccagaggcgtgatcctgatctacctggtgatcgccttcagccccttcggctacttcctggccatccacatcgtggccgagaaggagaagaagatcaaggagttcctgaagatcatgggcctgcacgacaccgccttctggctgagctgggtgctgctgtacaccagcctgatcttcctgatgagcctgctgatggccgtgatcgccaccgccagcctgctgttcccccagagcagcagcatcgtgatcttcctgctgttcttcctgtacggcctgagcagcgtgttcttcgccctgatgctgacccccctgttcaagaagagcaagcacgtgggcatcgtggagttcttcgtgaccgtggccttcggcttcatcggcctgatgatcatcctgatcgagagcttccccaagagcctggtgtggctgttcagccccttctgccactgcaccttcgtgatcggcatcgcccaggtgatgcacctggaggacttcaacgagggcgccagcttcagcaacctgaccgccggcccctaccccctgatcatcaccatcatcatgctgaccctgaacagcatcttctacgtgctgctggccgtgtacctggaccaggtgatccccggcgagttcggcctgagaagaagcagcctgtacttcctgaagcccagctactggagcaagagcaagagaaactacgaggagctgagcgagggcaacgtgaacggcaacatcagcttcagcgagatcatcgagcccgtgagcagcgagttcgtgggcaaggaggccatcagaatcagcggcatccagaagacctacagaaagaagggcgagaacgtggaggccctgagaaacctgagcttcgacatctacgagggccagatcaccgccctgctgggccacagcggcaccggcaagagcaccctgatgaacatcctgtgcggcctgtgcccccccagcgacggcttcgccagcatctacggccacagagtgagcgagatcgacgagatgttcgaggccagaaagatgatcggcatctgcccccagctggacatccacttcgacgtgctgaccgtggaggagaacctgagcatcctggccagcatcaagggcatccccgccaacaacatcatccaggaggtgcagaaggtgctgctggacctggacatgcagaccatcaaggacaaccaggccaagaagctgagcggcggccagaagagaaagctgagcctgggcatcgccgtgctgggcaaccccaagatcctgctgctggacgagcccaccgccggcatggacccctgcagcagacacatcgtgtggaacctgctgaagtacagaaaggccaacagagtgaccgtgttcagcacccacttcatggacgaggccgacatcctggccgacagaaaggccgtgatcagccagggcatgctgaagtgcgtgggcagcagcatgttcctgaagagcaagtggggcatcggctacagactgagcatgtacatcgacaagtactgcgccaccgagagcctgagcagcctggtgaagcagcacatccccggcgccaccctgctgcagcagaacgaccagcagctggtgtacagcctgcccttcaaggacatggacaagttcagcggcctgttcagcgccctggacagccacagcaacctgggcgtgatcagctacggcgtgagcatgaccaccctggaggacgtgttcctgaagctggaggtggaggccgagatcgaccaggccgactacagcgtgttcacccagcagcccctggaggaggagatggacagcaagagcttcgacgagatggagcagagcctgctgatcctgagcgagaccaaggccgccctggtgagcaccatgagcctgtggaagcagcagatgtacaccatcgccaagttccacttcttcaccctgaagagagagagcaagagcgtgagaagcgtgctgctgctgctgctgatcttcttcaccgtgcagatcttcatgttcctggtgcaccacagcttcaagaacgccgtggtgcccatcaagctggtgcccgacctgtacttcctgaagcccggcgacaagccccacaagtacaagaccagcctgctgctgcagaacagcgccgacagcgacatcagcgacctgatcagcttcttcaccagccagaacatcatggtgaccatgatcaacgacagcgactacgtgagcgtggccccccacagcgccgccctgaacgtgatgcacagcgagaaggactacgtgttcgccgccgtgttcaacagcaccatggtgtacagcctgcccatcctggtgaacatcatcagcaactactacctgtaccacctgaacgtgaccgagaccatccagatctggagcacccccttcttccaggagatcaccgacatcgtgttcaagatcgagctgtacttccaggccgccctgctgggcatcatcgtgaccgccatgcccccctacttcgccatggagaacgccgagaaccacaagatcaaggcctacacccagctgaagctgagcggcctgctgcccagcgcctactggatcggccaggccgtggtggacatccccctgttcttcatcatcctgatcctgatgctgggcagcctgctggccttccactacggcctgtacttctacaccgtgaagttcctggccgtggtgttctgcctgatcggctacgtgcccagcgtgatcctgttcacctacatcgccagcttcaccttcaagaagatcctgaacaccaaggagttctggagcttcatctacagcgtggccgccctggcctgcatcgccatcaccgagatcaccttcttcatgggctacaccatcgccaccatcctgcactacgccttctgcatcatcatccccatctaccccctgctgggctgcctgatcagcttcatcaagatcagctggaagaacgtgagaaagaacgtggacacctacaacccctgggacagactgagcgtggccgtgatcagcccctacctgcagtgcgtgctgtggatcttcctgctgcagtactacgagaagaagtacggcggcagaagcatcagaaaggaccccttcttcagaaacctgagcaccaagagcaagaacagaaagctgcccgagccccccgacaacgaggacgaggacgaggacgtgaaggccgagagactgaaggtgaaggagctgatgggctgccagtgctgcgaggagaagcccagcatcatggtgagcaacctgcacaaggagtacgacgacaagaaggacttcctgctgagcagaaaggtgaagaaggtggccaccaagtacatcagcttctgcgtgaagaagggcgagatcctgggcctgctgggccccaacggcgccggcaagagcaccatcatcaacatcctggtgggcgacatcgagcccaccagcggccaggtgttcctgggcgactacagcagcgagaccagcgaggacgacgacagcctgaagtgcatgggctactgcccccagatcaaccccctgtggcccgacaccaccctgcaggagcacttcgagatctacggcgccgtgaagggcatgagcgccagcgacatgaaggaggtgatcagcagaatcacccacgccctggacctgaaggagcacctgcagaagaccgtgaagaagctgcccgccggcatcaagagaaagctgtgcttcgccctgagcatgctgggcaacccccagatcaccctgctggacgagcccagcaccggcatggaccccaaggccaagcagcacatgtggagagccatcagaaccgccttcaagaacagaaagagagccgccatcctgaccacccactacatggaggaggccgaggccgtgtgcgacagagtggccatcatggtgagcggccagctgagatgcatcggcaccgtgcagcacctgaagagcaagttcggcaagggctacttcctggagatcaagctgaaggactggatcgagaacctggaggtggacagactgcagagagagatccagtacatcttccccaacgccagcagacaggagagcttcagcagcatcctggcctacaagatccccaaggaggacgtgcagagcctgagccagagcttcttcaagctggaggaggccaagcacgccttcgccatcgaggagtacagcttcagccaggccaccctggagcaggtgttcgtggagctgaccaaggagcaggaggaggaggacaacagctgcggcaccctgaacagcaccctgtggtgggagagaacccaggaggacagagtggtgttctag

SEQ ID NO: 73768 - DNA, 4932 bp, synthetic construct
  misc_feature 1..4932: note = Description of Artificial Sequence: Synthetic coding sequence
  source 1..4932: mol_type = other DNA
atgagcaccgccatcagagaggtgggcgtgtggagacagaccagaaccctgctgctgaagaactacctgatcaagtgcagaaccaagaagagcagcgtgcaggagatcctgttccccctgttcttcctgttctggctgatcctgatcagcatgatgcaccccaacaagaagtacgaggaggtgcccaacatcgagctgaaccccatggacaagttcaccctgagcaacctgatcctgggctacacccccgtgaccaacatcaccagcagcatcatgcagaaggtgagcaccgaccacctgcccgacgtgatcatcaccgaggagtacaccaacgagaaggagatgctgaccagcagcctgagcaagcccagcaacttcgtgggcgtggtgttcaaggacagcatgagctacgagctgagattcttccccgacatgatccccgtgagcagcatctacatggacagcagagccggctgcagcaagagctgcgaggccgcccagtactggagcagcggcttcaccgtgctgcaggccagcatcgacgccgccatcatccagctgaagaccaacgtgagcctgtggaaggagctggagagcaccaaggccgtgatcatgggcgagaccgccgtggtggagatcgacaccttccccagaggcgtgatcctgatctacctggtgatcgccttcagccccttcggctacttcctggccatccacatcgtggccgagaaggagaagaagatcaaggagttcctgaagatcatgggcctgcacgacaccgccttctggctgagctgggtgctgctgtacaccagcctgatcttcctgatgagcctgctgatggccgtgatcgccaccgccagcctgctgttcccccagagcagcagcatcgtgatcttcctgctgttcttcctgtacggcctgagcagcgtgttcttcgccctgatgctgacccccctgttcaagaagagcaagcacgtgggcatcgtggagttcttcgtgaccgtggccttcggcttcatcggcctgatgatcatcctgatcgagagcttccccaagagcctggtgtggctgttcagccccttctgccactgcaccttcgtgatcggcatcgcccaggtgatgcacctggaggacttcaacgagggcgccagcttcagcaacctgaccgccggcccctaccccctgatcatcaccatcatcatgctgaccctgaacagcatcttctacgtgctgctggccgtgtacctggaccaggtgatccccggcgagttcggcctgagaagaagcagcctgtacttcctgaagcccagctactggagcaagagcaagagaaactacgaggagctgagcgagggcaacgtgaacggcaacatcagcttcagcgagatcatcgagcccgtgagcagcgagttcgtgggcaaggaggccatcagaatcagcggcatccagaagacctacagaaagaagggcgagaacgtggaggccctgagaaacctgagcttcgacatctacgagggccagatcaccgccctgctgggccacagcggcaccggcaagagcaccctgatgaacatcctgtgcggcctgtgcccccccagcgacggcttcgccagcatctacggccacagagtgagcgagatcgacgagatgttcgaggccagaaagatgatcggcatctgcccccagctggacatccacttcgacgtgctgaccgtggaggagaacctgagcatcctggccagcatcaagggcatccccgccaacaacatcatccaggaggtgcagaaggtgctgctggacctggacatgcagaccatcaaggacaaccaggccaagaagctgagcggcggccagaagagaaagctgagcctgggcatcgccgtgctgggcaaccccaagatcctgctgctggacgagcccaccgccggcatggacccctgcagcagacacatcgtgtggaacctgctgaagtacagaaaggccaacagagtgaccgtgttcagcacccacttcatggacgaggccgacatcctggccgacagaaaggccgtgatcagccagggcatgctgaagtgcgtgggcagcagcatgttcctgaagagcaagtggggcatcggctacagactgagcatgtacatcgacaagtactgcgccaccgagagcctgagcagcctggtgaagcagcacatccccggcgccaccctgctgcagcagaacgaccagcagctggtgtacagcctgcccttcaaggacatggacaagttcagcggcctgttcagcgccctggacagccacagcaacctgggcgtgatcagctacggcgtgagcatgaccaccctggaggacgtgttcctgaagctggaggtggaggccgagatcgaccaggccgactacagcgtgttcacccagcagcccctggaggaggagatggacagcaagagcttcgacgagatggagcagagcctgctgatcctgagcgagaccaaggccgccctggtgagcaccatgagcctgtggaagcagcagatgtacaccatcgccaagttccacttcttcaccctgaagagagagagcaagagcgtgagaagcgtgctgctgctgctgctgatcttcttcaccgtgcagatcttcatgttcctggtgcaccacagcttcaagaacgccgtggtgcccatcaagctggtgcccgacctgtacttcctgaagcccggcgacaagccccacaagtacaagaccagcctgctgctgcagaacagcgccgccgacagcgacatcagcgacctgatcagcttcttcaccagccagaacatcatggtgaccatgatcaacgacagcgactacgtgagcgtggccccccacagcgccgccctgaacgtgatgcacagcgagaaggactacgtgttcgccgccgtgttcaacagcaccatggtgtacagcctgcccatcctggtgaacatcatcagcaactactacctgtaccacctgaacgtgaccgagaccatccagatctggagcacccccttcttccaggagatcaccgacatcgtgttcaagatcgagctgtacttccaggccgccctgctgggcatcatcgtgaccgccatgcccccctacttcgccatggagaacgccgagaaccacaagatcaaggcctacacccagctgaagctgagcggcctgctgcccagcgcctactggatcggccaggccgtggtggacatccccctgttcttcatcatcctgatcctgatgctgggcagcctgctggccttccactacggcctgtacttctacaccgtgaagttcctggccgtggtgttctgcctgatcggctacgtgcccagcgtgatcctgttcacctacatcgccagcttcaccttcaagaagatcctgaacaccaaggagttctggagcttcatctacagcgtggccgccctggcctgcatcgccatcaccgagatcaccttcttcatgggctacaccatcgccaccatcctgcactacgccttctgcatcatcatccccatctaccccctgctgggctgcctgatcagcttcatcaagatcagctggaagaacgtgagaaagaacgtggacacctacaacccctgggacagactgagcgtggccgtgatcagcccctacctgcagtgcgtgctgtggatcttcctgctgcagtactacgagaagaagtacggcggcagaagcatcagaaaggaccccttcttcagaaacctgagcaccaagagcaagaacagaaagctgcccgagccccccgacaacgaggacgaggacgaggacgtgaaggccgagagactgaaggtgaaggagctgatgggctgccagtgctgcgaggagaagcccagcatcatggtgagcaacctgcacaaggagtacgacgacaagaaggacttcctgctgagcagaaaggtgaagaaggtggccaccaagtacatcagcttctgcgtgaagaagggcgagatcctgggcctgctgggccccaacggcgccggcaagagcaccatcatcaacatcctggtgggcgacatcgagcccaccagcggccaggtgttcctgggcgactacagcagcgagaccagcgaggacgacgacagcctgaagtgcatgggctactgcccccagatcaaccccctgtggcccgacaccaccctgcaggagcacttcgagatctacggcgccgtgaagggcatgagcgccagcgacatgaaggaggtgatcagcagaatcacccacgccctggacctgaaggagcacctgcagaagaccgtgaagaagctgcccgccggcatcaagagaaagctgtgcttcgccctgagcatgctgggcaacccccagatcaccctgctggacgagcccagcaccggcatggaccccaaggccaagcagcacatgtggagagccatcagaaccgccttcaagaacagaaagagagccgccatcctgaccacccactacatggaggaggccgaggccgtgtgcgacagagtggccatcatggtgagcggccagctgagatgcatcggcaccgtgcagcacctgaagagcaagttcggcaagggctacttcctggagatcaagctgaaggactggatcgagaacctggaggtggacagactgcagagagagatccagtacatcttccccaacgccagcagacaggagagcttcagcagcatcctggcctacaagatccccaaggaggacgtgcagagcctgagccagagcttcttcaagctggaggaggccaagcacgccttcgccatcgaggagtacagcttcagccaggccaccctggagcaggtgttcgtggagctgaccaaggagcaggaggaggaggacaacagctgcggcaccctgaacagcaccctgtggtgggagagaacccaggaggacagagtggtgttctag

SEQ ID NO: 73769 - DNA, 4854 bp, synthetic construct
  misc_feature 1..4854: note = Description of Artificial Sequence: Synthetic coding sequence
  source 1..4854: mol_type = other DNA
atgaacatgaagcagaagagcgtgtaccagcagaccaaggccctgctgtgcaagaacttcctgaagaagtggagaatgaagagagagagcctgctggagtggggcctgagcatcctgctgggcctgtgcatcgccctgttcagcagcagcatgagaaacgtgcagttccccggcatggccccccagaacctgggcagagtggacaagttcaacagcagcagcctgatggtggtgtacacccccatcagcaacctgacccagcagatcatgaacaagaccgccctggcccccctgctgaagggcaccagcgtgatcggcgcccccaacaagacccacatggacgagatcctgctggagaacctgccctacgccatgggcatcatcttcaacgagaccttcagctacaagctgatcttcttccagggctacaacagccccctgtggaaggaggacttcagcgcccactgctgggacggctacggcgagttcagctgcaccctgaccaagtactggaacagaggcttcgtggccctgcagaccgccatcaacaccgccatcatcgagatcaccaccaaccaccccgtgatggaggagctgatgagcgtgaccgccatcaccatgaagaccctgcccttcatcaccaagaacctgctgcacaacgagatgttcatcctgttcttcctgctgcacttcagccccctggtgtacttcatcagcctgaacgtgaccaaggagagaaagaagagcaagaacctgatgaagatgatgggcctgcaggacagcgccttctggctgagctggggcctgatctacgccggcttcatcttcatcatcagcatcttcgtgaccatcatcatcaccttcacccagatcatcgtgatgaccggcttcatggtgatcttcatcctgttcttcctgtacggcctgagcctggtggccctggtgttcctgatgagcgtgctgctgaagaaggccgtgctgaccaacctggtggtgttcctgctgaccctgttctggggctgcctgggcttcaccgtgttctacgagcagctgcccagcagcctggagtggatcctgaacatctgcagccccttcgccttcaccaccggcatgatccagatcatcaagctggactacaacctgaacggcgtgatcttccccgaccccagcggcgacagctacaccatgatcgccaccttcagcatgctgctgctggacggcctgatctacctgctgctggccctgtacttcgacaagatcctgccctacggcgacgagagacactacagccccctgttcttcctgaacagcagcagctgcttccagcaccagagaaccaacgccaaggtgatcgagaaggagatcgacgccgagcaccccagcgacgactacttcgagcccgtggcccccgagttccagggcaaggaggccatcagaatcagaaacgtgaagaaggagtacaagggcaagagcggcaaggtggaggccctgaagggcctgctgttcgacatctacgagggccagatcaccgccatcctgggccacagcggcgccggcaagagcagcctgctgaacatcctgaacggcctgagcgtgcccaccgagggcagcgtgaccatctacaacaagaacctgagcgagatgcaggacctggaggagatcagaaagatcaccggcgtgtgcccccagttcaacgtgcagttcgacatcctgaccgtgaaggagaacctgagcctgttcgccaagatcaagggcatccacctgaaggaggtggagcaggaggtgcagagaatcctgctggagctggacatgcagaacatccaggacaacctggccaagcacctgagcgagggccagaagagaaagctgaccttcggcatcaccatcctgggcgacccccagatcctgctgctggacgagcccaccaccggcctggaccccttcagcagagaccaggtgtggagcctgctgagagagagaagagccgaccacgtgatcctgttcagcacccagagcatggacgaggccgacatcctggccgacagaaaggtgatcatgagcaacggcagactgaagtgcgccggcagcagcatgttcctgaagagaagatggggcctgggctaccacctgagcctgcacagaaacgagatctgcaaccccgagcagatcaccagcttcatcacccaccacatccccgacgccaagctgaagaccgagaacaaggagaagctggtgtacaccctgcccctggagagaaccaacaccttccccgacctgttcagcgacctggacaagtgcagcgaccagggcgtgaccggctacgacatcagcatgagcaccctgaacgaggtgttcatgaagctggagggccagagcaccatcgagcaggacttcgagcaggtggagatgatcagagacagcgagagcctgaacgagatggagctggcccacagcagcttcagcgagatgcagaccgccgtgagcgacatgggcctgtggagaatgcaggtgttcgccatggccagactgagattcctgaagctgaagagacagaccaaggtgctgctgaccctgctgctggtgttcggcatcgccatcttccccctgatcgtggagaacatcatgtacgccatgctgaacgagaagatcgactgggagttcaagaacgagctgtacttcctgagccccggccagctgccccaggagcccagaaccagcctgctgatcatcaacaacaccgagagcaacatcgaggacttcatcaagagcctgaagcaccagaacatcctgctggaggtggacgacttcgagaacagaaacggcaccgacggcctgagctacaacggcgccatcatcgtgagcggcaagcagaaggactacagattcagcgtggtgtgcaacaccaagagactgcactgcttccccatcctgatgaacatcatcagcaacggcctgctgcagatgttcaaccacacccagcacatcagaatcgagagcagccccttccccctgagccacatcggcctgtggaccggcctgcccgacggcagcttcttcctgttcctggtgctgtgcagcatcagcccctacatcaccatgggcagcatcagcgactacaagaagaacgccaagagccagctgtggatcagcggcctgtacaccagcgcctactggtgcggccaggccctggtggacgtgagcttcttcatcctgatcctgctgctgatgtacctgatcttctacatcgagaacatgcagtacctgctgatcaccagccagatcgtgttcgccctggtgatcgtgacccccggctacgccgccagcctggtgttcttcatctacatgatcagcttcatcttcagaaagagaagaaagaacagcggcctgtggagcttctacttcttcttcgccagcaccatcatgttcagcatcaccctgatcaaccacttcgacctgagcatcctgatcaccaccatggtgctggtgcccagctacaccctgctgggcttcaagaccttcctggaggtgagagaccaggagcactacagagagttccccgaggccaacttcgagctgagcgccaccgacttcctggtgtgcttcatcccctacttccagaccctgctgttcgtgttcgtgctgagatgcatggagctgaagtgcggcaagaagagaatgagaaaggaccccgtgttcagaatcagcccccagagcagagacgccaagcccaaccccgaggagcccatcgacgaggacgaggacatccagaccgagagaatcagaaccgccaccgccctgaccaccagcatcctggacgagaagcccgtgatcatcgccagctgcctgcacaaggagtacgccggccagaagaagagctgcttcagcaagagaaagaagaagatcgccgccagaaacatcagcttctgcgtgcaggagggcgagatcctgggcctgctgggccccaacggcgccggcaagagcagcagcatcagaatgatcagcggcatcaccaagcccaccgccggcgaggtggagctgaagggctgcagcagcgtgctgggccacctgggctactgcccccaggagaacgtgctgtggcccatgctgaccctgagagagcacctggaggtgtacgccgccgtgaagggcctgagaaaggccgacgccagactggccatcgccagactggtgagcgccttcaagctgcacgagcagctgaacgtgcccgtgcagaagctgaccgccggcatcaccagaaagctgtgcttcgtgctgagcctgctgggcaacagccccgtgctgctgctggacgagcccagcaccggcatcgaccccaccggccagcagcagatgtggcaggccatccaggccgtggtgaagaacaccgagagaggcgtgctgctgaccacccacaacctggccgaggccgaggccctgtgcgacagagtggccatcatggtgagcggcagactgagatgcatcggcagcatccagcacctgaagaacaagctgggcaaggactacatcctggagctgaaggtgaaggagaccagccaggtgaccctggtgcacaccgagatcctgaagctgttcccccaggccgccggccaggagagatacagcagcctgctgacctacaagctgcccgtggccgacgtgtaccccctgagccagaccttccacaagctggaggccgtgaagcacaacttcaacctggaggagtacagcctgagccagtgcaccctggagaaggtgttcctggagctgagcaaggagcaggaggtgggcaacttcgacgaggagatcgacaccaccatgagatggaagctgctgccccacagcgacgagccctag

SEQ ID NO: 73770 - DNA, 1434 bp, synthetic construct
  misc_feature 1..1434: note = Description of Artificial Sequence: Synthetic coding sequence
  source 1..1434: mol_type = other DNA
atgttcagcatcaccctgatcaaccacttcgacctgagcatcctgatcaccaccatggtgctggtgcccagctacaccctgctgggcttcaagaccttcctggaggtgagagaccaggagcactacagagagttccccgaggccaacttcgagctgagcgccaccgacttcctggtgtgcttcatcccctacttccagaccctgctgttcgtgttcgtgctgagatgcatggagctgaagtgcggcaagaagagaatgagaaaggaccccgtgttcagaatcagcccccagagcagagacgccaagcccaaccccgaggagcccatcgacgaggacgaggacatccagaccgagagaatcagaaccgccaccgccctgaccaccagcatcctggacgagaagcccgtgatcatcgccagctgcctgcacaaggagtacgccggccagaagaagagctgcttcagcaagagaaagaagaagatcgccgccagaaacatcagcttctgcgtgcaggagggcgagatcctgggcctgctgggccccaacggcgccggcaagagcagcagcatcagaatgatcagcggcatcaccaagcccaccgccggcgaggtggagctgaagggctgcagcagcgtgctgggccacctgggctactgcccccaggagaacgtgctgtggcccatgctgaccctgagagagcacctggaggtgtacgccgccgtgaagggcctgagaaaggccgacgccagactggccatcgccagactggtgagcgccttcaagctgcacgagcagctgaacgtgcccgtgcagaagctgaccgccggcatcaccagaaagctgtgcttcgtgctgagcctgctgggcaacagccccgtgctgctgctggacgagcccagcaccggcatcgaccccaccggccagcagcagatgtggcaggccatccaggccgtggtgaagaacaccgagagaggcgtgctgctgaccacccacaacctggccgaggccgaggccctgtgcgacagagtggccatcatggtgagcggcagactgagatgcatcggcagcatccagcacctgaagaacaagctgggcaaggactacatcctggagctgaaggtgaaggagaccagccaggtgaccctggtgcacaccgagatcctgaagctgttcccccaggccgccggccaggagagatacagcagcctgctgacctacaagctgcccgtggccgacgtgtaccccctgagccagaccttccacaagctggaggccgtgaagcacaacttcaacctggaggagtacagcctgagccagtgcaccctggagaaggtgttcctggagctgagcaaggagcaggaggtgggcaacttcgacgaggagatcgacaccaccatgagatggaagctgctgccccacagcgacgagccctag

SEQ ID NO: 73771 - DNA, 6441 bp, synthetic construct
  misc_feature 1..6441: note = Description of Artificial Sequence: Synthetic coding sequence
  source 1..6441: mol_type = other DNA
atggccttctggacccagctgatgctgctgctgtggaagaacttcatgtacagaagaagacagcccgtgcagctgctggtggagctgctgtggcccctgttcctgttcttcatcctggtggccgtgagacacagccacccccccctggagcaccacgagtgccacttccccaacaagcccctgcccagcgccggcaccgtgccctggctgcagggcctgatctgcaacgtgaacaacacctgcttcccccagctgacccccggcgaggagcccggcagactgagcaacttcaacgacagcctggtgagcagactgctggccgacgccagaaccgtgctgggcggcgccagcgcccacagaaccctggccggcctgggcaagctgatcgccaccctgagagccgccagaagcaccgcccagccccagcccaccaagcagagccccctggagccccccatgctggacgtggccgagctgctgaccagcctgctgagaaccgagagcctgggcctggccctgggccaggcccaggagcccctgcacagcctgctggaggccgccgaggacctggcccaggagctgctggccctgagaagcctggtggagctgagagccctgctgcagagacccagaggcaccagcggccccctggagctgctgagcgaggccctgtgcagcgtgagaggccccagcagcaccgtgggccccagcctgaactggtacgaggccagcgacctgatggagctggtgggccaggagcccgagagcgccctgcccgacagcagcctgagccccgcctgcagcgagctgatcggcgccctggacagccaccccctgagcagactgctgtggagaagactgaagcccctgatcctgggcaagctgctgttcgcccccgacacccccttcaccagaaagctgatggcccaggtgaacagaaccttcgaggagctgaccctgctgagagacgtgagagaggtgtgggagatgctgggccccagaatcttcaccttcatgaacgacagcagcaacgtggccatgctgcagagactgctgcagatgcaggacgagggcagaagacagcccagacccggcggcagagaccacatggaggccctgagaagcttcctggaccccggcagcggcggctacagctggcaggacgcccacgccgacgtgggccacctggtgggcaccctgggcagagtgaccgagtgcctgagcctggacaagctggaggccgcccccagcgaggccgccctggtgagcagagccctgcagctgctggccgagcacagattctgggccggcgtggtgttcctgggccccgaggacagcagcgaccccaccgagcaccccacccccgacctgggccccggccacgtgagaatcaagatcagaatggacatcgacgtggtgaccagaaccaacaagatcagagacagattctgggaccccggccccgccgccgaccccctgaccgacctgagatacgtgtggggcggcttcgtgtacctgcaggacctggtggagagagccgccgtgagagtgctgagcggcgccaaccccagagccggcctgtacctgcagcagatgccctacccctgctacgtggacgacgtgttcctgagagtgctgagcagaagcctgcccctgttcctgaccctggcctggatctacagcgtgaccctgaccgtgaaggccgtggtgagagagaaggagaccagactgagagacaccatgagagccatgggcctgagcagagccgtgctgtggctgggctggttcctgagctgcctgggccccttcctgctgagcgccgccctgctggtgctggtgctgaagctgggcgacatcctgccctacagccaccccggcgtggtgttcctgttcctggccgccttcgccgtggccaccgtgacccagagcttcctgctgagcgccttcttcagcagagccaacctggccgccgcctgcggcggcctggcctacttcagcctgtacctgccctacgtgctgtgcgtggcctggagagacagactgcccgccggcggcagagtggccgccagcctgctgagccccgtggccttcggcttcggctgcgagagcctggccctgctggaggagcagggcgagggcgcccagtggcacaacgtgggcaccagacccaccgccgacgtgttcagcctggcccaggtgagcggcctgctgctgctggacgccgccctgtacggcctggccacctggtacctggaggccgtgtgccccggccagtacggcatccccgagccctggaacttccccttcagaagaagctactggtgcggccccagaccccccaagagccccgccccctgccccacccccctggaccccaaggtgctggtggaggaggccccccccggcctgagccccggcgtgagcgtgagaagcctggagaagagattccccggcagcccccagcccgccctgagaggcctgagcctggacttctaccagggccacatcaccgccttcctgggccacaacggcgccggcaagaccaccaccctgagcatcctgagcggcctgttcccccccagcggcggcagcgccttcatcctgggccacgacgtgagaagcagcatggccgccatcagaccccacctgggcgtgtgcccccagtacaacgtgctgttcgacatgctgaccgtggacgagcacgtgtggttctacggcagactgaagggcctgagcgccgccgtggtgggccccgagcaggacagactgctgcaggacgtgggcctggtgagcaagcagagcgtgcagaccagacacctgagcggcggcatgcagagaaagctgagcgtggccatcgccttcgtgggcggcagccaggtggtgatcctggacgagcccaccgccggcgtggaccccgccagcagaagaggcatctgggagctgctgctgaagtacagagagggcagaaccctgatcctgagcacccaccacctggacgaggccgagctgctgggcgacagagtggccgtggtggccggcggcagactgtgctgctgcggcagccccctgttcctgagaagacacctgggcagcggctactacctgaccctggtgaaggccagactgcccctgaccaccaacgagaaggccgacaccgacatggagggcagcgtggacaccagacaggagaagaagaacggcagccagggcagcagagtgggcaccccccagctgctggccctggtgcagcactgggtgcccggcgccagactggtggaggagctgccccacgagctggtgctggtgctgccctacaccggcgcccacgacggcagcttcgccaccctgttcagagagctggacaccagactggccgagctgagactgaccggctacggcatcagcgacaccagcctggaggagatcttcctgaaggtggtggaggagtgcgccgccgacaccgacatggaggacggcagctgcggccagcacctgtgcaccggcatcgccggcctggacgtgaccctgagactgaagatgcccccccaggagaccgccctggagaacggcgagcccgccggcagcgcccccgagaccgaccagggcagcggccccgacgccgtgggcagagtgcagggctgggccctgaccagacagcagctgcaggccctgctgctgaagagattcctgctggccagaagaagcagaagaggcctgttcgcccagatcgtgctgcccgccctgttcgtgggcctggccctggtgttcagcctgatcgtgccccccttcggccactaccccgccctgagactgagccccaccatgtacggcgcccaggtgagcttcttcagcgaggacgcccccggcgaccccggcagagccagactgctggaggccctgctgcaggaggccggcctggaggagccccccgtgcagcacagcagccacagattcagcgcccccgaggtgcccgccgaggtggccaaggtgctggccagcggcaactggacccccgagagccccagccccgcctgccagtgcagcagacccggcgccagaagactgctgcccgactgccccgccgccgccggcggccccccccccccccaggccgtgaccggcagcggcgaggtggtgcagaacctgaccggcagaaacctgagcgacttcctggtgaagacctaccccagactggtgagacagggcctgaagaccaagaagtgggtgaacgaggtgagatacggcggcttcagcctgggcggcagagaccccggcctgcccagcggccaggagctgggcagaagcgtggaggagctgtgggccctgctgagccccctgcccggcggcgccctggacagagtgctgaagaacctgaccgcctgggcccacagcctggacgcccaggacagcctgaagatctggttcaacaacaagggctggcacagcatggtggccttcgtgaacagagccagcaacgccatcctgagagcccacctgccccccggccccgccagacacgcccacagcatcaccaccctgaaccaccccctgaacctgaccaaggagcagctgagcgagggcgccctgatggccagcagcgtggacgtgctggtgagcatctgcgtggtgttcgccatgagcttcgtgcccgccagcttcaccctggtgctgatcgaggagagagtgaccagagccaagcacctgcagctgatgggcggcctgagccccaccctgtactggctgggcaacttcctgtgggacatgtgcaactacctggtgcccgcctgcatcgtggtgctgatcttcctggccttccagcagagagcctacgtggcccccgccaacctgcccgccctgctgctgctgctgctgctgtacggctggagcatcacccccctgatgtaccccgccagcttcttcttcagcgtgcccagcaccgcctacgtggtgctgacctgcatcaacctgttcatcggcatcaacggcagcatggccaccttcgtgctggagctgttcagcgaccagaagctgcaggaggtgagcagaatcctgaagcaggtgttcctgatcttcccccacttctgcctgggcagaggcctgatcgacatggtgagaaaccaggccatggccgacgccttcgagagactgggcgacagacagttccagagccccctgagatgggaggtggtgggcaagaacctgctggccatggtgatccagggccccctgttcctgctgttcaccctgctgctgcagcacagaagccagctgctgccccagcccagagtgagaagcctgcccctgctgggcgaggaggacgaggacgtggccagagagagagagagagtggtgcagggcgccacccagggcgacgtgctggtgctgagaaacctgaccaaggtgtacagaggccagagaatgcccgccgtggacagactgtgcctgggcatcccccccggcgagtgcttcggcctgctgggcgtgaacggcgccggcaagaccagcaccttcagaatggtgaccggcgacaccctggccagcagaggcgaggccgtgctggccggccacagcgtggccagagagcccagcgccgcccacctgagcatgggctactgcccccagagcgacgccatcttcgagctgctgaccggcagagagcacctggagctgctggccagactgagaggcgtgcccgaggcccaggtggcccagaccgccggcagcggcctggccagactgggcctgagctggtacgccgacagacccgccggcacctacagcggcggcaacaagagaaagctggccaccgccctggccctggtgggcgaccccgccgtggtgttcctggacgagcccaccaccggcatggaccccagcgccagaagattcctgtggaacagcctgctggccgtggtgagagagggcagaagcgtgatgctgaccagccacagcatggaggagtgcgaggccctgtgcagcagactggccatcatggtgaacggcagattcagatgcctgggcagcccccagcacctgaagggcagattcgccgccggccacaccctgaccctgagagtgcccgccgccagaagccagcccgccgccgccttcgtggccgccgagttccccggcgccgagctgagagaggcccacggcggcagactgagattccagctgccccccggcggcagatgcgccctggccagagtgttcggcgagctggccgtgcacggcgccgagcacggcgtggaggacttcagcgtgagccagaccatgctggaggaggtgttcctgtacttcagcaaggaccagggcaaggacgaggacaccgaggagcagaaggaggccggcgtgggcgtggaccccgcccccggcctgcagcaccccaagagagtgagccagttcctggacgaccccagcaccgccgagaccgtgctgtag

SEQ ID NO: 73772 - DNA, 6441 bp, synthetic construct; identical to SEQ ID NO: 73771
  misc_feature 1..6441: note = Description of Artificial Sequence: Synthetic coding sequence
  source 1..6441: mol_type = other DNA

SEQ ID NO: 73773 - DNA, 495 bp, synthetic construct
  misc_feature 1..495: note = Description of Artificial Sequence: Synthetic coding sequence
  source 1..495: mol_type = other DNA
atggccttctggacccagctgatgctgctgctgtggaagaacttcatgtacagaagaagacagcccgtgcagctgctggtggagctgctgtggcccctgttcctgttcttcatcctggtggccgtgagacacagccacccccccctggagcaccacgagtgccacttccccaacaagcccctgcccagcgccggcaccgtgccctggctgcagggcctgatctgcaacgtgaacaacacctgcttcccccagctgacccccggcgaggagcccggcagactgagcaacttcaacgacagcctggtgagcagactgctggccgacgccagaaccgtgctgggcggcgccagcgcccacagaaccctggccggcctgggcaagctgatcgccaccctgagagccgccagaagcaccgcccagccccagcccaccaagcagagccccctggagccccccatgctggacgtggccgagctgctgaccagcctgctgtag

SEQ ID NO: 73774 - DNA, 4746 bp, synthetic construct
  misc_feature 1..4746: note = Description of Artificial Sequence: Synthetic coding sequence
  source 1..4746: mol_type = other DNA
atgagaaagagaaagatcagcgtgtgccagcagacctgggccctgctgtgcaagaacttcctgaagaagtggagaatgaagagagagagcctgatggagtggctgaacagcctgctgctgctgctgtgcctgtacatctacccccacagccaccaggtgaacgacttcagcagcctgctgaccatggacctgggcagagtggacaccttcaacgagagcagattcagcgtggtgtacacccccgtgaccaacaccacccagcagatcatgaacaaggtggccagcacccccttcctggccggcaaggaggtgctgggcctgcccgacgaggagagcatcaaggagttcaccgccaactaccccgaggagatcgtgagagtgaccttcaccaacacctacagctaccacctgaagttcctgctgggccacggcatgcccgccaagaaggagcacaaggaccacaccgcccactgctacgagaccaacgaggacgtgtactgcgaggtgagcgtgttctggaaggagggcttcgtggccctgcaggccgccatcaacgccgccatcatcgagatcaccaccaaccacagcgtgatggaggagctgatgagcgtgaccggcaagaacatgaagatgcacagcttcatcggccagagcggcgtgatcaccgacctgtacctgttcagctgcatcatcagcttcagcagcttcatctactacgccagcgtgaacgtgaccagagagagaaagagaatgaaggccctgatgaccatgatgggcctgagagacagcgccttctggctgagctggggcctgctgtacgccggcttcatcttcatcatggccctgttcctggccctggtgatcagaagcacccagttcatcatcctgagcggcttcatggtggtgttcagcctgttcctgctgtacggcctgagcctggtggccctggccttcctgatgagcatcctggtgaagaagagcttcctgaccggcctggtggtgttcctgctgaccgtgttctggggctgcctgggcttcaccagcctgtacagacacctgcccgccagcctggagtggatcctgagcctgctgagccccttcgccttcatgctgggcatggcccagctgctgcacctggactacgacctgaacagcaacgccttcccccaccccagcgacggcagcaacctgatcgtggccaccaacttcatgctggccttcgacacctgcctgtacctggccctggccatctacttcgagaagatcctgcccaacgagtacggccacagaagaccccccctgttcttcctgaagagcagcttctggagccagacccagaagaccgaccacgtggccctggaggacgagatggacgccgaccccagcttccacgacagcttcgagcaggccccccccgagttccagggcaaggaggccatcagaatcagaaacgtgaccaaggagtacaagggcaagcccgacaagatcgaggccctgaaggacctggtgttcgacatctacgagggccagatcaccgccatcctgggccacagcggcgccggcaagagcaccctgctgaacatcctgagcggcctgagcgtgcccaccaagggcagcgtgaccatctacaacaacaagctgagcgagatggccgacctggagaacctgagcaagctgaccggcgtgtgcccccagagcaacgtgcagttcgacttcctgaccgtgagagagaacctgagactgttcgccaagatcaagggcatcctgccccaggaggtggacaaggagatcttcctgctggacgagcccaccgccggcctggaccccttcagcagacaccaggtgtggaacctgctgaaggagagaaagaccgacagagtgatcctgttcagcacccagttcatggacgaggccgacatcctggccgacagaaaggtgttcctgagccagggcaagctgaagtgcgccggcagcagcctgttcctgaagaagaagtggggcatcggctaccacctgagcctgcagctgaacgagatctgcgtggaggagaacatcaccagcctggtgaagcagcacatccccgacgccaagctgagcgccaagagcgagggcaagctgatctacaccctgcccctggagagaaccaacaagttccccgagctgtacaaggacctggacagctaccccgacctgggcatcgagaactacggcgtgagcatgaccaccctgaacgaggtgttcctgaagctggagggcaagagcaccatcaacgagagcgacatcgccatcctgggcgaggtgcaggccgagaaggccgacgacaccgagagactggtggagatggagcaggtgctgagcagcctgaacaagatgagaaagaccatcggcggcgtggccctgtggagacagcagatctgcgccatcgccagagtgagactgctgaagctgaagcacgagagaaaggccctgctggccctgctgctgatcctgatggccggcttctgccccctgctggtggagtacaccatggtgaagatctaccagaacagctacacctgggagctgagcccccacctgtacttcctggcccccggccagcagccccacgaccccctgacccagctgctgatcatcaacaagaccggcgccagcatcgacgacttcatccagagcgtggagcaccagaacatcgccctggaggtggacgccttcggcaccagaaacggcaccgacgaccccagctacaacggcgccatcaccgtgtgctgcaacgagaagaactacagcttcagcctggcctgcaacgccaagagactgaactgcttccccgtgctgatggacatcgtgagcaacggcctgctgggcatggtgaagcccagcgtgcacatcagaaccgagagaagcaccttcctggagaacggccaggacaaccccatcggcttcctggcctacatcatgttctggctggtgctgaccagcagctgccccccctacatcgccatgagcagcatcgacgactacaagaacagagccagaagccagctgagaatcagcggcctgagccccagcgcctactggttcggccaggccctggtggacgtgagcctgtacttcctggtgttcgtgttcatctacctgatgagctacatcagcaacttcgaggacatgctgctgaccatcatccacatcatccagatcccctgcgccgtgggctacagcttcagcctgatcttcatgacctacgtgatcagcttcatcttcagaaagggcagaaagaacagcggcatctggagcttctgcttctacgtggtgaccgtgttcagcgtggccggcttcgccttcagcatcttcgagagcgacatccccttcatcttcaccttcctgatcccccccgccaccatgatcggctgcctgttcctgagcagccacctgctgttcagcagcctgttcagcgaggagagaatggacgtgcagcccttcctggtgttcctgatccccttcctgcacttcatcatcttcctgttcaccctgagatgcctggagtggaagttcggcaagaagagcatgagaaaggaccccttcttcagaatcagccccagaagcagcgacgtgtgccagaaccccgaggagcccgagggcgaggacgaggacgtgcagatggagagagtgagaaccgccaacgccctgaacagcaccaacttcgacgagaagcccgtgatcatcgccagctgcctgagaaaggagtacgccggcaagagaaagggctgcttcagcaagagaaagaacaagatcgccaccagaaacgtgagcttctgcgtgagaaagggcgaggtgctgggcctgctgggccacaacggcgccggcaagagcaccagcatcaaggtgatcaccggcgacaccaagcccaccgccggccaggtgctgctgaagggcagcggcggcggcgacgccctggagttcctgggctactgcccccaggagaacgccctgtggcccaacctgaccgtgagacagcacctggaggtgtacgccgccgtgaagggcctgagaaagggcgacgccgaggtggccatcaccagactggtggacgccctgaagctgcaggaccagctgaagagccccgtgaagaccctgagcgagggcatcaagagaaagctgtgcttcgtgctgagcatcctgggcaaccccagcgtggtgctgctggacgagcccagcaccggcatggaccccgagggccagcagcagatgtggcaggccatcagagccaccttcagaaacaccgagagaggcgccctgctgaccacccactacatggccgaggccgaggccgtgtgcgacagagtggccatcatggtgagcggcagactgagatgcatcggcagcatccagcacctgaagagcaagttcggcaaggactacctgctggagatgaaggtgaagaacctggcccaggtggagcccctgcacgccgagatcctgagactgttcccccaggccgccagacaggagagatacagcagcctgatggtgtacaagctgcccgtggaggacgtgcagcccctggcccaggccttcttcaagctggagaaggtgaagcagagcttcgacctggaggagtacagcctgagccagagcaccctggagcaggtgttcctggagctgagcaaggagcaggagctgggcgacttcgaggaggacttcgaccccagcgtgaagtggaagctgctgccccaggaggagccctag

SEQ ID NO: 73775 - DNA, 801 bp, synthetic construct
  misc_feature 1..801: note = Description of Artificial Sequence: Synthetic coding sequence
  source 1..801: mol_type = other DNA
atgagaaagagaaagatcagcgtgtgccagcagacctgggccctgctgtgcaagaacttcctgaagaagtggagaatgaagagagagagcctgatggagtggctgaacagcctgctgctgctgctgtgcctgtacatctacccccacagccaccaggtgaacgacttcagcagcctgctgaccatggacctgggcagagtggacaccttcaacgagagcagattcagcgtggtgtacacccccgtgaccaacaccacccagcagatcatgaacaaggtggccagcacccccttcctggccggcaaggaggtgctgggcctgcccgacgaggagagcatcaaggagttcaccgccaactaccccgaggagatcgtgagagtgaccttcaccaacacctacagctaccacctgaagttcctgctgggccacggcatgcccgccaagaaggagcacaaggaccacaccgcccactgctacgagaccaacgaggacgtgtactgcgaggtgagcgtgttctggaaggagggcttcgtggccctgcaggccgccatcaacgccgccatcatcgagatcaccaccaaccacagcgtgatggaggagctgatgagcgtgaccggcaagaacatgaagatgcacagcttcatcggccagagcggcgtgatcaccgacctgtacctgttcagctgcatcatcagcttcagcagcttcatctactacgccagcgtgaacgtgaccagagagagaaagagaatgaaggccctgatgaccatgatgggcctgagagacagcgccttctggtag

SEQ ID NO: 73776 - DNA, 4866 bp, synthetic construct
  misc_feature 1..4866: note = Description of Artificial Sequence: Synthetic coding sequence
  source 1..4866: mol_type = other DNA
atgagaaagagaaagatcagcgtgtgccagcagacctgggccctgctgtgcaagaacttcctgaagaagtggagaatgaagagagagagcctgatggagtggctgaacagcctgctgctgctgctgtgcctgtacatctacccccacagccaccaggtgaacgacttcagcagcctgctgaccatggacctgggcagagtggacaccttcaacgagagcagattcagcgtggtgtacacccccgtgaccaacaccacccagcagatcatgaacaaggtggccagcacccccttcctggccggcaaggaggtgctgggcctgcccgacgaggagagcatcaaggagttcaccgccaactaccccgaggagatcgtgagagtgaccttcaccaacacctacagctaccacctgaagttcctgctgggccacggcatgcccgccaagaaggagcacaaggaccacaccgcccactgctacgagaccaacgaggacgtgtactgcgaggtgagcgtgttctggaaggagggcttcgtggccctgcaggccgccatcaacgccgccatcatcgagatcaccaccaaccacagcgtgatggaggagctgatgagcgtgaccggcaagaacatgaagatgcacagcttcatcggccagagcggcgtgatcaccgacctgtacctgttcagctgcatcatcagcttcagcagcttcatctactacgccagcgtgaacgtgaccagagagagaaagagaatgaaggccctgatgaccatgatgggcctgagagacagcgccttctggctgagctggggcctgctgtacgccggcttcatcttcatcatggccctgttcctggccctggtgatcagaagcacccagttcatcatcctgagcggcttcatggtggtgttcagcctgttcctgctgtacggcctgagcctggtggccctggccttcctgatgagcatcctggtgaagaagagcttcctgaccggcctggtggtgttcctgctgaccgtgttctggggctgcctgggcttcaccagcctgtacagacacctgcccgccagcctggagtggatcctgagcctgctgagccccttcgccttcatgctgggcatggcccagctgctgcacctggactacgacctgaacagcaacgccttcccccaccccagcgacggcagcaacctgatcgtggccaccaacttcatgctggccttcgacacctgcctgtacctggccctggccatctacttcgagaagatcctgcccaacgagtacggccacagaagaccccccctgttcttcctgaagagcagcttctggagccagacccagaagaccgaccacgtggccctggaggacgagatggacgccgaccccagcttccacgacagcttcgagcaggccccccccgagttccagggcaaggaggccatcagaatcagaaacgtgaccaaggagtacaagggcaagcccgacaagatcgaggccctgaaggacctggtgttcgacatctacgagggccagatcaccgccatcctgggccacagcggcgccggcaagagcaccctgctgaacatcctgagcggcctgagcgtgcccaccaagggcagcgtgaccatctacaacaacaagctgagcgagatggccgacctggagaacctgagcaagctgaccggcgtgtgcccccagagcaacgtgcagttcgacttcctgaccgtgagagagaacctgagactgttcgccaagatcaagggcatcctgccccaggaggtggacaaggagatccagagagtgctgctggagctggagatgaagaacatccaggacgtgctggcccagaacctgagcggcggccagaagagaaagctgaccttcggcatcgccatcctgggcgacccccagatcttcctgctggacgagcccaccgccggcctggaccccttcagcagacaccaggtgtggaacctgctgaaggagagaaagaccgacagagtgatcctgttcagcacccagttcatggacgaggccgacatcctggccgacagaaaggtgttcctgagccagggcaagctgaagtgcgccggcagcagcctgttcctgaagaagaagtggggcatcggctaccacctgagcctgcagctgaacgagatctgcgtggaggagaacatcaccagcctggtgaagcagcacatccccgacgccaagctgagcgccaagagcgagggcaagctgatctacaccctgcccctggagagaaccaacaagttccccgagctgtacaaggacctggacagctaccccgacctgggcatcgagaactacggcgtgagcatgaccaccctgaacgaggtgttcctgaagctggagggcaagagcaccatcaacgagagcgacatcgccatcctgggcgaggtgcaggccgagaaggccgacgacaccgagagactggtggagatggagcaggtgctgagcagcctgaacaagatgagaaagaccatcggcggcgtggccctgtggagacagcagatctgcgccatcgccagagtgagactgctgaagctgaagcacgagagaaaggccctgctggccctgctgctgatcctgatggccggcttctgccccctgctggtggagtacaccatggtgaagatctaccagaacagctacacctgggagctgagcccccacctgtacttcctggcccccggccagcagccccacgaccccctgacccagctgctgatcatcaacaagaccggcgccagcatcgacgacttcatccagagcgtggagcaccagaacatcgccctggaggtggacgccttcggcaccagaaacggcaccgacgaccccagctacaacggcgccatcaccgtgtgctgcaacgagaagaactacagcttcagcctggcctgcaacgccaagagactgaactgcttccccgtgctgatggacatcgtgagcaacggcctgctgggcatggtgaagcccagcgtgcacatcagaaccgagagaagcaccttcctggagaacggccaggacaaccccatcggcttcctggcctacatcatgttctggctggtgctgaccagcagctgccccccctacatcgccatgagcagcatcgacgactacaagaacagagccagaagccagctgagaatcagcggcctgagccccagcgcctactggttcggccaggccctggtggacgtgagcctgtacttcctggtgttcgtgttcatctacctgatgagctacatcagcaacttcgaggacatgctgctgaccatcatccacatcatccagatcccctgcgccgtgggctacagcttcagcctgatcttcatgacctacgtgatcagcttcatcttcagaaagggcagaaagaacagcggcatctggagcttctgcttctacgtggtgaccgtgttcagcgtggccggcttcgccttcagcatcttcgagagcgacatccccttcatcttcaccttcctgatcccccccgccaccatgatcggctgcctgttcctgagcagccacctgctgttcagcagcctgttcagcgaggagagaatggacgtgcagcccttcctggtgttcctgatccccttcctgcacttcatcatcttcctgttcaccctgagatgcctggagtggaagttcggcaagaagagcatgagaaaggaccccttcttcagaatcagccccagaagcagcgacgtgtgccagaaccccgaggagcccgagggcgaggacgaggacgtgcagatggagagagtgagaaccgccaacgccctgaacagcaccaacttcgacgagaagcccgtgatcatcgccagctgcctgagaaaggagtacgccggcaagagaaagggctgcttcagcaagagaaagaacaagatcgccaccagaaacgtgagcttctgcgtgagaaagggcgaggtgctgggcctgctgggccacaacggcgccggcaagagcaccagcatcaaggtgatcaccggcgacaccaagcccaccgccggccaggtgctgctgaagggcagcggcggcggcgacgccctggagttcctgggctactgcccccaggagaacgccctgtggcccaacctgaccgtgagacagcacctggaggtgtacgccgccgtgaagggcctgagaaagggcgacgccgaggtggccatcaccagactggtggacgccctgaagctgcaggaccagctgaagagccccgtgaagaccctgagcgagggcatcaagagaaagctgtgcttcgtgctgagcatcctgggcaaccccagcgtggtgctgctggacgagcccagcaccggcatggaccccgagggccagcagcagatgtggcaggccatcagagccaccttcagaaacaccgagagaggcgccctgctgaccacccactacatggccgaggccgaggccgtgtgcgacagagtggccatcatggtgagcggcagactgagatgcatcggcagcatccagcacctgaagagcaagttcggcaaggactacctgctggagatgaaggtgaagaacctggcccaggtggagcccctgcacgccgagatcctgagactgttcccccaggccgccagacaggagagatacagcagcctgatggtgtacaagctgcccgtggaggacgtgcagcccctggcccaggccttcttcaagctggagaaggtgaagcagagcttcgacctggaggagtacagcctgagccagagcaccctggagcaggtgttcctggagctgagcaaggagcaggagctgggcgacttcgaggaggacttcgaccccagcgtgaagtggaagctgctgccccaggaggagccctag

SEQ ID NO: 73777 - DNA, 3312 bp, synthetic construct
  misc_feature 1..3312: note = Description of Artificial Sequence: Synthetic coding sequence
  source 1..3312: mol_type = other DNA
atggacctgggcagagtggacaccttcaacgagagcagattcagcgtggtgtacacccccgtgaccaacaccacccagcagatcatgaacaaggtggccagcacccccttcctggccggcaaggaggtgctgggcctgcccgacgaggagagcatcaaggagttcaccgccaactaccccgaggagatcgtgagagtgaccttcaccaacacctacagctaccacctgaagttcctgctgggccacggcatgcccgccaagaaggagcacaaggaccacaccgcccactgctacgagaccaacgaggacgtgtactgcgaggtgagcgtgttctggaaggagggcttcgtggccctgcaggccgccatcaacgccgccatcatcgagatcaccaccaaccacagcgtgatggaggagctgatgagcgtgaccggcaagaacatgaagatgcacagcttcatcggccagagcggcgtgatcaccgacctgtacctgttcagctgcatcatcagcttcagcagcttcatctactacgccagcgtgaacgtgaccagagagagaaagagaatgaaggccctgatgaccatgatgggcctgagagacagcgccttctggctgagctggggcctgctgtacgccggcttcatcttcatcatggccctgttcctggccctggtgatcagaagcacccagttcatcatcctgagcggcttcatggtggtgttcagcctgttcctgctgtacggcctgagcctggtggccctggccttcctgatgagcatcctggtgaagaagagcttcctgaccggcctggtggtgttcctgctgaccgtgttctggggctgcctgggcttcaccagcctgtacagacacctgcccgccagcctggagtggatcctgagcctgctgagccccttcgccttcatgctgggcatggcccagctgctgcacctggactacgacctgaacagcaacgccttcccccaccccagcgacggcagcaacctgatcgtggccaccaacttcatgctggccttcgacacctgcctgtacctggccctggccatctacttcgagaagatcctgcccaacgagtacggccacagaagaccccccctgttcttcctgaagagcagcttctggagccagacccagaagaccgaccacgtggccctggaggacgagatggacgccgaccccagcttccacgacagcttcgagcaggccccccccgagttccagggcaaggaggccatcagaatcagaaacgtgaccaaggagtacaagggcaagcccgacaagatcgaggccctgaaggacctggtgttcgacatctacgagggccagatcaccgccatcctgggccacagcggcgccggcaagagcaccctgctgaacatcctgagcggcctgagcgtgcccaccaagggcagcgtgaccatctacaacaacaagctgagcgagatggccgacctggagaacctgagcaagctgaccggcgtgtgcccccagagcaacgtgcagttcgacttcctgaccgtgagagagaacctgagactgttcgccaagatcaagggcatcctgccccaggaggtggacaaggagatccagagagtgctgctggagctggagatgaagaacatccaggacgtgctggcccagaacctgagcggcggccagaagagaaagctgaccttcggcatcgccatcctgggcgacccccagatcttcctgctggacgagcccaccgccggcctggaccccttcagcagacaccaggtgtggaacctgctgaaggagagaaagaccgacagagtgatcctgttcagcacccagttcatggacgaggccgacatcctggccgacagaaaggtgttcctgagccagggcaagctgaagtgcgccggcagcagcctgttcctgaagaagaagtggggcatcggctaccacctgagcctgcagctgaacgagatctgcgtggaggagaacatcaccagcctggtgaagcagcacatccccgacgccaagctgagcgccaagagcgagggcaagctgatctacaccctgcccctggagagaaccaacaagttccccgagctgtacaaggacctggacagctaccccgacctgggcatcgagaactacggcgtgagcatgaccaccctgaacgaggtgttcctgaagctggagggcaagagcaccatcaacgagagcgacatcgccatcctgggcgaggtgcaggccgagaaggccgacgacaccgagagactggtggagatggagcaggtgctgagcagcctgaacaagatgagaaagaccatcggcggcgtggccctgtggagacagcagatctgcgccatcgccagagtgagactgctgaagctgaagcacgagagaaaggccctgctggccctgctgctgatcctgatggccggcttctgccccctgctggtggagtacaccatggtgaagatctaccagaacagctacacctgggagctgagcccccacctgtacttcctggcccccggccagcagccccacgaccccctgacccagctgctgatcatcaacaagaccggcgccagcatcgacgacttcatccagagcgtggagcaccagaacatcgccctggaggtggacgccttcggcaccagaaacggcaccgacgaccccagctacaacggcgccatcaccgtgtgctgcaacgagaagaactacagcttcagcctggcctgcaacgccaagagactgaactgcttccccgtgctgatggacatcgtgagcaacggcctgctgggcatggtgaagcccagcgtgcacatcagaaccgagagaagcaccttcctggagaacggccaggacaaccccatcggcttcctggcctacatcatgttctggctggtgctgaccagcagctgccccccctacatcgccatgagcagcatcgacgactacaagaacagagccagaagccagctgagaatcagcggcctgagccccagcgcctactggttcggccaggccctggtggacgtgagcctgtacttcctggtgttcgtgttcatctacctgatgagctacatcagcaacttcgaggacatgctgctgaccatcatccacatcatccagatcccctgcgccgtgggctacagcttcagcctgatcttcatgacctacgtgatcagcttcatcttcagaaagggcagaaagaacagcggcatctggagcttctgcttctacgtggtgagcatcttcctggtggacgtgtactgcatctacctgatctacaacagcgagctgatcctgtag

SEQ ID NO: 73778 - DNA, 471 bp, synthetic construct
  misc_feature 1..471: note = Description of Artificial Sequence: Synthetic coding sequence
  source 1..471: mol_type = other DNA
atgctgggcatggcccagctgctgcacctggactacgacctgaacagcaacgccttcccccaccccagcgacggcagcaacctgatcgtggccaccaacttcatgctggccttcgacacctgcctgtacctggccctggccatctacttcgagaagatcctgcccaacgagtacggccacagaagaccccccctgttcttcctgaagagcagcttctggagccagacccagaagaccgaccacgtggccctggaggacgagatggacgccgaccccagcttccacgacagcttcgagcaggccccccccgagttccagggcaaggaggccatcagaatcagaaacgtgaccaaggagtacaagggcaagcccgacaagatcgaggccctgaaggacctggtgttcgacatctacgagggccagatcaccgccatcctggtgaccgtggagctggagagccagcactgctag

SEQ ID NO: 73779 - DNA, 4875 bp, synthetic construct
  misc_feature 1..4875: note = Description of Artificial Sequence: Synthetic coding sequence
  source 1..4875: mol_type = other DNA
atgagcaagagaagaatgagcgtgggccagcagacctgggccctgctgtgcaagaactgcctgaagaagtggagaatgaagagacagaccctgctggagtggctgttcagcttcctgctggtgctgttcctgtacctgttcttcagcaacctgcaccaggtgcacgacaccccccagatgagcagcatggacctgggcagagtggacagcttcaacgacaccaactacgtgatcgccttcgcccccgagagcaagaccacccaggagatcatgaacaaggtggccagcgcccccttcctgaagggcagaaccatcatgggctggcccgacgagaagagcatggacgagctggacctgaactacagcatcgacgccgtgagagtgatcttcaccgacaccttcagctaccacctgaagttcagctggggccacagaatccccatgatgaaggagcacagagaccacagcgcccactgccaggccgtgaacgagaagatgaagtgcgagggcagcgagttctgggagaagggcttcgtggccttccaggccgccatcaacgccgccatcatcgagatcgccaccaaccacagcgtgatggagcagctgatgagcgtgaccggcgtgcacatgaagatcctgcccttcgtggcccagggcggcgtggccaccgacttcttcatcttcttctgcatcatcagcttcagcaccttcatctactacgtgagcgtgaacgtgacccaggagagacagtacatcaccagcctgatgaccatgatgggcctgagagagagcgccttctggctgagctggggcctgatgtacgccggcttcatcctgatcatggccaccctgatggccctgatcgtgaagagcgcccagatcgtggtgctgaccggcttcgtgatggtgttcaccctgttcctgctgtacggcctgagcctgatcaccctggccttcctgatgagcgtgctgatcaagaagcccttcctgaccggcctggtggtgttcctgctgatcgtgttctggggcatcctgggcttccccgccctgtacaccagactgcccgccttcctggagtggaccctgtgcctgctgagccccttcgccttcaccgtgggcatggcccagctgatccacctggactacgacgtgaacagcaacgcccacctggacagcagccagaacccctacctgatcatcgccaccctgttcatgctggtgttcgacaccctgctgtacctggtgctgaccctgtacttcgacaagatcctgcccgccgagtacggccacagatgcagccccctgttcttcctgaagagctgcttctggttccagcacggcagagccaaccacgtggtgctggagaacgagaccgacagcgaccccacccccaacgactgcttcgagcccgtgagccccgagttctgcggcaaggaggccatcagaatcaagaacctgaagaaggagtacgccggcaagtgcgagagagtggaggccctgaagggcgtggtgttcgacatctacgagggccagatcaccgccctgctgggccacagcggcgccggcaagaccaccctgctgaacatcctgagcggcctgagcgtgcccaccagcggcagcgtgaccgtgtacaaccacaccctgagcagaatggccgacatcgagaacatcagcaagttcaccggcttctgcccccagagcaacgtgcagttcggcttcctgaccgtgaaggagaacctgagactgttcgccaagatcaagggcatcctgccccacgaggtggagaaggaggtgcagagagtggtgcaggagctggagatggagaacatccaggacatcctggcccagaacctgagcggcggccagaacagaaagctgaccttcggcatcgccatcctgggcgacccccaggtgctgctgctggacgagcccaccgccggcctggaccccctgagcagacacagaatctggaacctgctgaaggagggcaagagcgacagagtgatcctgttcagcacccagttcatcgacgaggccgacatcctggccgacagaaaggtgttcatcagcaacggcaagctgaagtgcgccggcagcagcctgttcctgaagaagaagtggggcatcggctaccacctgagcctgcacctgaacgagagatgcgaccccgagagcatcaccagcctggtgaagcagcacatcagcgacgccaagctgaccgcccagagcgaggagaagctggtgtacatcctgcccctggagagaaccaacaagttccccgagctgtacagagacctggacagatgcagcaaccagggcatcgaggactacggcgtgagcatcaccaccctgaacgaggtgttcctgaagctggagggcaagagcaccatcgacgagagcgacatcggcatctggggccagctgcagaccgacggcgccaaggacatcggcagcctggtggagctggagcaggtgctgagcagcttccacgagaccagaaagaccatcagcggcgtggccctgtggagacagcaggtgtgcgccatcgccaaggtgagattcctgaagctgaagaaggagagaaagagcctgtggaccatcctgctgctgttcggcatcagcttcatcccccagctgctggagcacctgttctacgagagctaccagaagagctacccctgggagctgagccccaacacctacttcctgagccccggccagcagccccaggaccccctgacccacctgctggtgatcaacaagaccggcagcaccatcgacaacttcctgcacagcctgagaagacagaacatcgccatcgaggtggacgccttcggcaccagaaacggcaccgacgaccccagctacaacggcgccatcatcgtgagcggcgacgagaaggaccacagattcagcatcgcctgcaacaccaagagactgaactgcttccccgtgctgctggacgtgatcagcaacggcctgctgggcatcttcaacagcagcgagcacatccagaccgacagaagcaccttcttcgaggagcacatggactacgagtacggctacagaagcaacaccttcttctggatccccatggccgccagcttcaccccctacatcgccatgagcagcatcggcgactacaagaagaaggcccacagccagctgagaatcagcggcctgtaccccagcgcctactggttcggccaggccctggtggacgtgagcctgtacttcctgatcctgctgctgatgcagatcatggactacatcttcagccccgaggagatcatcttcatcatccagaacctgctgatccagatcctgtgcagcatcggctacgtgagcagcctggtgttcctgacctacgtgatcagcttcatcttcagaaacggcagaaagaacagcggcatctggagcttcttcttcctgatcgtggtgatcttcagcatcgtggccaccgacctgaacgagtacggcttcctgggcctgttcttcggcaccatgctgatcccccccttcaccctgatcggcagcctgttcatcttcagcgagatcagccccgacagcatggactacctgggcgccagcgagagcgagatcgtgtacctggccctgctgatcccctacctgcacttcctgatcttcctgttcatcctgagatgcctggagatgaactgcagaaagaagctgatgagaaaggaccccgtgttcagaatcagccccagaagcaacgccatcttccccaaccccgaggagcccgagggcgaggaggaggacatccagatggagagaatgagaaccgtgaacgccatggccgtgagagacttcgacgagacccccgtgatcatcgccagctgcctgagaaaggagtacgccggcaagaagaagaactgcttcagcaagagaaagaagaagatcgccaccagaaacgtgagcttctgcgtgaagaagggcgaggtgatcggcctgctgggccacaacggcgccggcaagagcaccaccatcaagatgatcaccggcgacaccaagcccaccgccggccaggtgatcctgaagggcagcggcggcggcgagcccctgggcttcctgggctactgcccccaggagaacgccctgtggcccaacctgaccgtgagacagcacctggaggtgtacgccgccgtgaagggcctgagaaagggcgacgccatgatcgccatcaccagactggtggacgccctgaagctgcaggaccagctgaaggcccccgtgaagaccctgagcgagggcatcaagagaaagctgtgcttcgtgctgagcatcctgggcaaccccagcgtggtgctgctggacgagcccagcaccggcatggaccccgagggccagcagcagatgtggcaggtgatcagagccaccttcagaaacaccgagagaggcgccctgctgaccacccactacatggccgaggccgaggccgtgtgcgacagagtggccatcatggtgagcggcagactgagatgcatcggcagcatccagcacctgaagagcaagttcggcaaggactacctgctggagatgaagctgaagaacctggcccagatggagcccctgcacgccgagatcctgagactgttcccccaggccgcccagcaggagagattcagcagcctgatggtgtacaagctgcccgtggaggacgtgagacccctgagccaggccttcttcaagctggagatcgtgaagcagagcttcgacctggaggagtacagcctgagccagagcaccctggagcaggtgttcctggagctgagcaaggagcaggagctgggcgacctggaggaggacttcgaccccagcgtgaagtggaagctgctgctgcaggaggagccctag

SEQ ID NO: 73780 - DNA, 4308 bp, synthetic construct
  misc_feature 1..4308: note = Description of Artificial Sequence: Synthetic coding sequence
  source 1..4308: mol_type = other DNA
atgagcaagagaagaatgagcgtgggccagcagacctgggccctgctgtgcaagaactgcctgaagaagtggagaatgaagagacagaccctgctggagtggctgttcagcttcctgctggtgctgttcctgtacctgttcttcagcaacctgcaccaggtgcacgacaccccccagatgagcagcatggacctgggcagagtggacagcttcaacgacaccaactacgtgatcgccttcgcccccgagagcaagaccacccaggagatcatgaacaaggtggccagcgcccccttcctgaagggcagaaccatcatgggctggcccgacgagaagagcatggacgagctggacctgaactacagcatcgacgccgtgagagtgatcttcaccgacaccttcagctaccacctgaagttcagctggggccacagaatccccatgatgaaggagcacagagaccacagcgcccactgccaggccgtgaacgagaagatgaagtgcgagggcagcgagttctgggagaagggcttcgtggccttccaggccgccatcaacgccgccatcatcgagatcgccaccaaccacagcgtgatggagcagctgatgagcgtgaccggcgtgcacatgaagatcctgcccttcgtggcccagggcggcgtggccaccgacttcttcatcttcttctgcatcatcagcttcagcaccttcatctactacgtgagcgtgaacgtgacccaggagagacagtacatcaccagcctgatgaccatgatgggcctgagagagagcgccttctggctgagctggggcctgatgtacgccggcttcatcctgatcatggccaccctgatggccctgatcgtgaagagcgcccagatcgtggtgctgaccggcttcgtgatggtgttcaccctgttcctgctgtacggcctgagcctgatcaccctggccttcctgatgagcgtgctgatcaagaagcccttcctgaccggcctggtggtgttcctgctgatcgtgttctggggcatcctgggcttccccgccctgtacaccagactgcccgccttcctggagtggaccctgtgcctgctgagccccttcgccttcaccgtgggcatggcccagctgatccacctggactacgacgtgaacagcaacgcccacctggacagcagccagaacccctacctgatcatcgccaccctgttcatgctggtgttcgacaccctgctgtacctggtgctgaccctgtacttcgacaagatcctgcccgccgagtacggccacagatgcagccccctgttcttcctgaagagctgcttctggttccagcacggcagagccaaccacgtggtgctggagaacgagaccgacagcgaccccacccccaacgactgcttcgagcccgtgagccccgagttctgcggcaaggaggccatcagaatcaagaacctgaagaaggagtacgccggcaagtgcgagagagtggaggccctgaagggcgtggtgttcgacatctacgagggccagatcaccgccctgctgggccacagcggcgccggcaagaccaccctgctgaacatcctgagcggcctgagcgtgcccaccagcggcagcgtgaccgtgtacaaccacaccctgagcagaatggccgacatcgagaacatcagcaagttcaccggcttctgcccccagagcaacgtgcagttcggcttcctgaccgtgaaggagaacctgagactgttcgccaagatcaagggcatcctgccccacgaggtggagaaggaggtgcagagagtggtgcaggagctggagatggagaacatccaggacatcctggcccagaacctgagcggcggccagaacagaaagctgaccttcggcatcgccatcctgggcgacccccaggtgctgctgctggacgagcccaccgccggcctggaccccctgagcagacacagaatctggaacctgctgaaggagggcaagagcgacagagtgatcctgttcagcacccagttcatcgacgaggccgacatcctggccgacagaaaggtgttcatcagcaacggcaagctgaagtgcgccggcagcagcctgttcctgaagaagaagtggggcatcggctaccacctgagcctgcacctgaacgagagatgcgaccccgagagcatcaccagcctggtgaagcagcacatcagcgacgccaagctgaccgcccagagcgaggagaagctggtgtacatcctgcccctggagagaaccaacaagttccccgagctgtacagagacctggacagatgcagcaaccagggcatcgaggactacggcgtgagcatcaccaccctgaacgaggtgttcctgaagctggagggcaagagcaccatcgacgagagcgacatcggcatctggggccagctgcagaccgacggcgccaaggacatcggcagcctggtggagctggagcaggtgctgagcagcttccacgagaccagaaagaccatcagcggcgtggccctgtggagacagcaggtgtgcgccatcgccaaggtgagattcctgaagctgaagaaggagagaaagagcctgtggaccatcctgctgctgttcggcatcagcttcatcccccagctgctggagcacctgttctacgagagctaccagaagagctacccctgggagctgagccccaacacctacttcctgagccccggccagcagccccaggaccccctgacccacctgctggtgatcaacaagaccggcagcaccatcgacaacttcctgcacagcctgagaagacagaacatcgccatcgaggtggacgccttcggcaccagaaacggcaccgacgaccccagctacaacggcgccatcatcgtgagcggcgacgagaaggaccacagattcagcatcgcctgcaacaccaagagactgaactgcttccccgtgctgctggacgtgatcagcaacggcctgctgggcatcttcaacagcagcgagcacatccagaccgacagaagcaccttcttcgaggagcacatggactacgagtacggctacagaagcaacaccttcttctggatccccatggccgccagcttcaccccctacatcgccatgagcagcatcggcgactacaagaagaaggcccacagccagctgagaatcagcggcctgtaccccagcgcctactggttcggccaggccctggtggacgtgagcctgtacttcctgatcctgctgctgatgcagatcatggactacatcttcagccccgaggagatcatcttcatcatccagaacctgctgatccagatcctgtgcagcatcggctacgtgagcagcctggtgttcctgacctacgtgatcagcttcatcttcagaaacggcagaaagaacagcggcatctggagcttcttcttcctgatcgtggtgatcttcagcatcgtggccaccgacctgaacgagtacggcttcctgggcctgttcttcggcaccatgctgatcccccccttcaccctgatcggcagcctgttcatcttcagcgagatcagccccgacagcatggactacctgggcgccagcgagagcgagatcgtgtacctggccctgctgatcccctacctgcacttcctgatcttcctgttcatcctgagatgcctggagatgaactgcagaaagaagctgatgagaaaggaccccgtgttcagaatcagccccagaagcaacgccatcttccccaaccccgaggagcccgagggcgaggaggaggacatccagatggagagaatgagaaccgtgaacgccatggccgtgagagacttcgacgagacccccgtgatcatcgccagctgcctgagaaaggagtacgccggcaagaagaagaactgcttcagcaagagaaagaagaagatcgccaccagaaacgtgagcttctgcgtgaagaagggcgaggtgatcggcctgctgggccacaacggcgccggcaagagcaccaccatcaagatgatcaccggcgacaccaagcccaccgccggccaggtgatcctgaagggcagcggcggcggcgagcccctgggcttcctgggctactgcccccaggagaacgccctgtggcccaacctgaccgtgagacagcacctggaggtgtacgccgccgtgaagggcctgagaaagggcgacgccatgatcgccatcaccagactggtggacgccctgaagctgcaggaccagctgaaggcccccgtgaagaccctgagcgagggcatcaagagaaaggccggcgacagcggccacctgtag

SEQ ID NO: 73781 - DNA, 3423 bp, synthetic construct
  misc_feature 1..3423: note = Description of Artificial Sequence: Synthetic coding sequence
  source 1..3423: mol_type = other DNA
atgagcgtgggccagcagacctgggccctgctgtgcaagaactgcctgaagaagtggagaatgaagagacagaccctgctggagtggctgttcagcttcctgctggtgctgttcctgtacctgttcttcagcaacctgcaccaggtgcacgacaccccccagatgagcagcatggacctgggcagagtggacagcttcaacgacaccaactacgtgatcgccttcgcccccgagagcaagaccacccaggagatcatgaacaaggtggccagcgcccccttcctgaagggcagaaccatcatgggctggcccgacgagaagagcatggacgagctggacctgaactacagcatcgacgccgtgagagtgatcttcaccgacaccttcagctaccacctgaagttcagctggggccacagaatccccatgatgaaggagcacagagaccacagcgcccactgccaggccgtgaacgagaagatgaagtgcgagggcagcgagttctgggagaagggcttcgtggccttccaggccgccatcaacgccgccatcatcgagatcgccaccaaccacagcgtgatggagcagctgatgagcgtgaccggcgtgcacatgaagatcctgcccttcgtggcccagggcggcgtggccaccgacttcttcatcttcttctgcatcatcagcttcagcaccttcatctactacgtgagcgtgaacgtgacccaggagagacagtacatcaccagcctgatgaccatgatgggcctgagagagagcgccttctggctgagctggggcctgatgtacgccggcttcatcctgatcatggccaccctgatggccctgatcgtgaagagcgcccagatcgtggtgctgaccggcttcgtgatggtgttcaccctgttcctgctgtacggcctgagcctgatcaccctggccttcctgatgagcgtgctgatcaagaagcccttcctgaccggcctggtggtgttcctgctgatcgtgttctggggcatcctgggcttccccgccctgtacaccagactgcccgccttcctggagtggaccctgtgcctgctgagccccttcgccttcaccgtgggcatggcccagctgatccacctggactacgacgtgaacagcaacgcccacctggacagcagccagaacccctacctgatcatcgccaccctgttcatgctggtgttcgacaccctgctgtacctggtgctgaccctgtacttcgacaagatcctgcccgccgagtacggccacagatgcagccccctgttcttcctgaagagctgcttctggttccagcacggcagagccaaccacgtggtgctggagaacgagaccgacagcgaccccacccccaacgactgcttcgagcccgtgagccccgagttctgcggcaaggaggccatcagaatcaagaacctgaagaaggagtacgccggcaagtgcgagagagtggaggccctgaagggcgtggtgttcgacatctacgagggccagatcaccgccctgctgggccacagcggcgccggcaagaccaccctgctgaacatcctgagcggcctgagcgtgcccaccagcggcagcgtgaccgtgtacaaccacaccctgagcagaatggccgacatcgagaacatcagcaagttcaccggcttctgcccccagagcaacgtgcagttcggcttcctgaccgtgaaggagaacctgagactgttcgccaagatcaagggcatcctgccccacgaggtggagaaggaggtgcagagagtggtgcaggagctggagatggagaacatccaggacatcctggcccagaacctgagcggcggccagaacagaaagctgaccttcggcatcgccatcctgggcgacccccaggtgctgctgctggacgagcccaccgccggcctggaccccctgagcagacacagaatctggaacctgctgaaggagggcaagagcgacagagtgatcctgttcagcacccagttcatcgacgaggccgacatcctggccgacagaaaggtgttcatcagcaacggcaagctgaagtgcgccggcagcagcctgttcctgaagaagaagtggggcatcggctaccacctgagcctgcacctgaacgagagatgcgaccccgagagcatcaccagcctggtgaagcagcacatcagcgacgccaagctgaccgcccagagcgaggagaagctggtgtacatcctgcccctggagagaaccaacaagttccccgagctgtacagagacctggacagatgcagcaaccagggcatcgaggactacggcgtgagcatcaccaccctgaacgaggtgttcctgaagctggagggcaagagcaccatcgacgagagcgacatcggcatctggggccagctgcagaccgacggcgccaaggacatcggcagcctggtggagctggagcaggtgctgagcagcttccacgagaccagaaagaccatcagcggcgtggccctgtggagacagcaggtgtgcgccatcgccaaggtgagattcctgaagctgaagaaggagagaaagagcctgtggaccatcctgctgctgttcggcatcagcttcatcccccagctgctggagcacctgttctacgagagctaccagaagagctacccctgggagctgagccccaacacctacttcctgagccccggccagcagccccaggaccccctgacccacctgctggtgatcaacaagaccggcagcaccatcgacaacttcctgcacagcctgagaagacagaacatcgccatcgaggtggacgccttcggcaccagaaacggcaccgacgaccccagctacaacggcgccatcatcgtgagcggcgacgagaaggaccacagattcagcatcgcctgcaacaccaagagactgaactgcttccccgtgctgctggacgtgatcagcaacggcctgctgggcatcttcaacagcagcgagcacatccagaccgacagaagcaccttcttcgaggagcacatggactacgagtacggctacagaagcaacaccttcttctggatccccatggccgccagcttcaccccctacatcgccatgagcagcatcggcgactacaagaagaaggcccacagccagctgagaatcagcggcctgtaccccagcgcctactggttcggccaggccctggtggacgtgagcctgtacttcctgatcctgctgctgatgcagatcatggactacatcttcagccccgaggagatcatcttcatcatccagaacctgctgatccaggtggtgatcttcagcatcgtggccaccgacctgaacgagtacggcttcctgggcctgttctggcaccacgtgaacaccagcctgcacatcgactggctgagcatccacttcttctag

SEQ ID NO: 73782 - DNA, 2217 bp, synthetic construct
  misc_feature 1..2217: note = Description of Artificial Sequence: Synthetic coding sequence
  source 1..2217: mol_type = other DNA
atgagaggcccccccgcctggcccctgagactgctggagccccccagccccgccgagcccggcagactgctgcccgtggcctgcgtgtgggccgccgccagcagagtgcccggcagcctgagccccttcaccggcctgagacccgccagactgtggggcgccggccccgccctgctgtggggcgtgggcgccgccagaagatggagaagcggctgcagaggcggcggccccggcgccagcagaggcgtgctgggcctggccagactgctgggcctgtgggccagaggccccggcagctgcagatgcggcgccttcgccggccccggcgcccccagactgcccagagccagattccccggcggccccgccgccgccgcctgggccggcgacgaggcctggagaagaggccccgccgccccccccggcgacaagggcagactgagacccgccgccgccggcctgcccgaggccagaaagctgctgggcctggcctaccccgagagaagaagactggccgccgccgtgggcttcctgaccatgagcagcgtgatcagcatgagcgcccccttcttcctgggcaagatcatcgacgtgatctacaccaaccccaccgtggactacagcgacaacctgaccagactgtgcctgggcctgagcgccgtgttcctgtgcggcgccgccgccaacgccatcagagtgtacctgatgcagaccagcggccagagaatcgtgaacagactgagaaccagcctgttcagcagcatcctgagacaggaggtggccttcttcgacaagaccagaaccggcgagctgatcaacagactgagcagcgacaccgccctgctgggcagaagcgtgaccgagaacctgagcgacggcctgagagccggcgcccaggccagcgtgggcatcagcatgatgttcttcgtgagccccaacctggccaccttcgtgctgagcgtggtgccccccgtgagcatcatcgccgtgatctacggcagatacctgagaaagctgaccaaggtgacccaggacagcctggcccaggccacccagctggccgaggagagaatcggcaacgtgagaaccgtgagagccttcggcaaggagatgaccgagatcgagaagtacgccagcaaggtggaccacgtgatgcagctggccagaaaggaggccttcgccagagccggcttcttcggcgccaccggcctgagcggcaacctgatcgtgctgagcgtgctgtacaagggcggcctgctgatgggcagcgcccacatgaccgtgggcgagctgagcagcttcctgatgtacgccttctgggtgggcatcagcatcggcggcctgagcagcttctacagcgagctgatgaagggcctgggcgccggcggcagactgtgggagctgctggagagagagcccaagctgcccttcaacgagggcgtgatcctgaacgagaagagcttccagggcgccctggagttcaagaacgtgcacttcgcctaccccgccagacccgaggtgcccatcttccaggacttcagcctgagcatccccagcggcagcgtgaccgccctggtgggccccagcggcagcggcaagagcaccgtgctgagcctgctgctgagactgtacgaccccgccagcggcaccatcagcctggacggccacgacatcagacagctgaaccccgtgtggctgagaagcaagatcggcaccgtgagccaggagcccatcctgttcagctgcagcatcgccgagaacatcgcctacggcgccgacgaccccagcagcgtgaccgccgaggagatccagagagtggccgaggtggccaacgccgtggccttcatcagaaacttcccccagggcttcaacaccgtggtgggcgagaagggcgtgctgctgagcggcggccagaagcagagaatcgccatcgccagagccctgctgaagaaccccaagatcctgctgctggacgaggccaccagcgccctggacgccgagaacgagtacctggtgcaggaggccctggacagactgatggacggcagaaccgtgctggtgatcgcccacagactgagcaccatcaagaacgccaacatggtggccgtgctggaccagggcaagatcaccgagtacggcaagcacgaggagctgctgagcaagcccaacggcatctacagaaagctgatgaacaagcagagcttcatcagcgcctag

SEQ ID NO: 73783 - DNA, 2529 bp, synthetic construct
  misc_feature 1..2529: note = Description of Artificial Sequence: Synthetic coding sequence
  source 1..2529: mol_type = other DNA
atggtgaccgtgggcaactactgcgaggccgagggccccgtgggccccgcctggatgcaggacggcctgagcccctgcttcttcttcaccctggtgcccagcaccagaatggccctgggcaccctggccctggtgctggccctgccctgcagaagaagagagagacccgccggcgccgacagcctgagctggggcgccggccccagaatcagcccctacgtgctgcagctgctgctggccaccctgcaggccgccctgcccctggccggcctggccggcagagtgggcaccgccagaggcgcccccctgcccagctacctgctgctggccagcgtgctggagagcctggccggcgcctgcggcctgtggctgctggtggtggagagaagccaggccagacagagactggccatgggcatctggatcaagttcagacacagccccggcctgctgctgctgtggaccgtggccttcgccgccgagaacctggccctggtgagctggaacagcccccagtggtggtgggccagagccgacctgggccagcaggtgcagttcagcctgtgggtgctgagatacgtggtgagcggcggcctgttcgtgctgggcctgtgggcccccggcctgagaccccagagctacaccctgcaggtgcacgaggaggaccaggacgtggagagaagccaggtgagaagcgccgcccagcagagcacctggagagacttcggcagaaagctgagactgctgagcggctacctgtggcccagaggcagccccgccctgcagctggtggtgctgatctgcctgggcctgatgggcctggagagagccctgaacgtgctggtgcccatcttctacagaaacatcgtgaacctgctgaccgagaaggccccctggaacagcctggcctggaccgtgaccagctacgtgttcctgaagttcctgcagggcggcggcaccggcagcaccggcttcgtgagcaacctgagaaccttcctgtggatcagagtgcagcagttcaccagcagaagagtggagctgctgatcttcagccacctgcacgagctgagcctgagatggcacctgggcagaagaaccggcgaggtgctgagaatcgccgacagaggcaccagcagcgtgaccggcctgctgagctacctggtgttcaacgtgatccccaccctggccgacatcatcatcggcatcatctacttcagcatgttcttcaacgcctggttcggcctgatcgtgttcctgtgcatgagcctgtacctgaccctgaccatcgtggtgaccgagtggagaaccaagttcagaagagccatgaacacccaggagaacgccaccagagccagagccgtggacagcctgctgaacttcgagaccgtgaagtactacaacgccgagagctacgaggtggagagatacagagaggccatcatcaagtaccagggcctggagtggaagagcagcgccagcctggtgctgctgaaccagacccagaacctggtgatcggcctgggcctgctggccggcagcctgctgtgcgcctacttcgtgaccgagcagaagctgcaggtgggcgactacgtgctgttcggcacctacatcatccagctgtacatgcccctgaactggttcggcacctactacagaatgatccagaccaacttcatcgacatggagaacatgttcgacctgctgaaggaggagaccgaggtgaaggacctgcccggcgccggccccctgagattccagaagggcagaatcgagttcgagaacgtgcacttcagctacgccgacggcagagagaccctgcaggacgtgagcttcaccgtgatgcccggccagaccctggccctggtgggccccagcggcgccggcaagagcaccatcctgagactgctgttcagattctacgacatcagcagcggctgcatcagaatcgacggccaggacatcagccaggtgacccaggccagcctgagaagccacatcggcgtggtgccccaggacaccgtgctgttcaacgacaccatcgccgacaacatcagatacggcagagtgaccgccggcaacgacgaggtggaggccgccgcccaggccgccggcatccacgacgccatcatggccttccccgagggctacagaacccaggtgggcgagagaggcctgaagctgagcggcggcgagaagcagagagtggccatcgccagaaccatcctgaaggcccccggcatcatcctgctggacgaggccaccagcgccctggacaccagcaacgagagagccatccaggccagcctggccaaggtgtgcgccaacagaaccaccatcgtggtggcccacagactgagcaccgtggtgaacgccgaccagatcctggtgatcaaggacggctgcatcgtggagagaggcagacacgaggccctgctgagcagaggcggcgtgtacgccgacatgtggcagctgcagcagggccaggaggagaccagcgaggacaccaagccccagaccatggagagatag

SEQ ID NO: 73784 - DNA, 636 bp, synthetic construct
  misc_feature 1..636: note = Description of Artificial Sequence: Synthetic coding sequence
  source 1..636: mol_type = other DNA
atggtgaccgtgggcaactactgcgaggccgagggccccgtgggccccgcctggatgcaggacggcctgagcccctgcttcttcttcaccctggtgcccagcaccagaatggccctgggcaccctggccctggtgctggccctgccctgcagaagaagagagagacccgccggcgccgacagcctgagctggggcgccggccccagaatcagcccctacgccctgcccggcggcccccactgccaggccatctacttctggcccccctgctggagagtgtggcccgcccccgtggcctgcggctgcctgagctggagcggcgccagacacggcagcgtgtggcagtgggccagcggcagcagcagcggcaccgccctggtgagctgcagcagcggcctgtggagactgcagctgagaacctggccctggtgcctgggcaccgcccacagcggcggcggccagggccagacctgggccagcagattcagcctggcctgcggctgctgcggcatgtggagcctggagggctgcctgagctgggtgagcggccccctggacttcgtgcccagccccatccactgcagattcatgaagagaaccaagatgtggaagggcgccagcgagctggccgactag

SEQ ID NO: 73785 - DNA, 2391 bp, synthetic construct
  misc_feature 1..2391: note = Description of Artificial Sequence: Synthetic coding sequence
  source 1..2391: mol_type = other DNA
atggtgaccgtgggcaactactgcgaggccgagggccccgtgggccccgcctggatgcaggacggcctgagcccctgcttcttcttcaccctggtgcccagcaccagaatggccctgggcaccctggccctggtgctggccctgccctgcagaagaagagagagacccgccggcgccgacagcctgagctggggcgccggccccagaatcagcccctacgtgctgcagctgctgctggccaccctgcaggccgccctgcccctggccggcctggccggcagagtgggcaccgccagaggcgcccccctgcccagctacctgctgctggccagcgtgctggagagcctggccggcgcctgcggcctgtggctgctggtggtggagagaagccaggccagacagagactggccatgggcatctggatcaagttcagacacagccccggcctgctgctgctgtggaccgtggccttcgccgccgagaacctggccctggtgagctggaacagcccccagtggtggtgggccagagccgacctgggccagcaggtgagaagcgccgcccagcagagcacctggagagacttcggcagaaagctgagactgctgagcggctacctgtggcccagaggcagccccgccctgcagctggtggtgctgatctgcctgggcctgatgggcctggagagagccctgaacgtgctggtgcccatcttctacagaaacatcgtgaacctgctgaccgagaaggccccctggaacagcctggcctggaccgtgaccagctacgtgttcctgaagttcctgcagggcggcggcaccggcagcaccggcttcgtgagcaacctgagaaccttcctgtggatcagagtgcagcagttcaccagcagaagagtggagctgctgatcttcagccacctgcacgagctgagcctgagatggcacctgggcagaagaaccggcgaggtgctgagaatcgccgacagaggcaccagcagcgtgaccggcctgctgagctacctggtgttcaacgtgatccccaccctggccgacatcatcatcggcatcatctacttcagcatgttcttcaacgcctggttcggcctgatcgtgttcctgtgcatgagcctgtacctgaccctgaccatcgtggtgaccgagtggagaaccaagttcagaagagccatgaacacccaggagaacgccaccagagccagagccgtggacagcctgctgaacttcgagaccgtgaagtactacaacgccgagagctacgaggtggagagatacagagaggccatcatcaagtaccagggcctggagtggaagagcagcgccagcctggtgctgctgaaccagacccagaacctggtgatcggcctgggcctgctggccggcagcctgctgtgcgcctacttcgtgaccgagcagaagctgcaggtgggcgactacgtgctgttcggcacctacatcatccagctgtacatgcccctgaactggttcggcacctactacagaatgatccagaccaacttcatcgacatggagaacatgttcgacctgctgaaggaggagaccgaggtgaaggacctgcccggcgccggccccctgagattccagaagggcagaatcgagttcgagaacgtgcacttcagctacgccgacggcagagagaccctgcaggacgtgagcttcaccgtgatgcccggccagaccctggccctggtgggccccagcggcgccggcaagagcaccatcctgagactgctgttcagattctacgacatcagcagcggctgcatcagaatcgacggccaggacatcagccaggtgacccaggccagcctgagaagccacatcggcgtggtgccccaggacaccgtgctgttcaacgacaccatcgccgacaacatcagatacggcagagtgaccgccggcaacgacgaggtggaggccgccgcccaggccgccggcatccacgacgccatcatggccttccccgagggctacagaacccaggtgggcgagagaggcctgaagctgagcggcggcgagaagcagagagtggccatcgccagaaccatcctgaaggcccccggcatcatcctgctggacgaggccaccagcgccctggacaccagcaacgagagagccatccaggccagcctggccaaggtgtgcgccaacagaaccaccatcgtggtggcccacagactgagcaccgtggtgaacgccgaccagatcctggtgatcaaggacggctgcatcgtggagagaggcagacacgaggccctgctgagcagaggcggcgtgtacgccgacatgtggcagctgcagcagggccaggaggagaccagcgaggacaccaagccccagaccatggagagatag

SEQ ID NO: 73786 - DNA, 2262 bp, synthetic construct
  misc_feature 1..2262: note = Description of Artificial Sequence: Synthetic coding sequence
  source 1..2262: mol_type = other DNA
atggccctgctggccatgcacagctggagatgggccgccgccgccgccgccttcgagaagagaagacacagcgccatcctgatcagacccctggtgagcgtgagcggcagcggcccccagtggagaccccaccagctgggcgccctgggcaccgccagagcctaccagcagatccccgagagcctgaagagcatcacctggcagagactgggcaagggcaacagcggccagttcctggacgccgccaaggccctgcaggtgtggcccctgatcgagaagagaacctgctggcacggccacgccggcggcggcctgcacaccgaccccaaggagggcctgaaggacgtggacaccagaaagatcatcaaggccatgctgagctacgtgtggcccaaggacagacccgacctgagagccagagtggccatcagcctgggcttcctgggcggcgccaaggccatgaacatcgtggtgcccttcatgttcaagtacgccgtggacagcctgaaccagatgagcggcaacatgctgaacctgagcgacgcccccaacaccgtggccaccatggccaccgccgtgctgatcggctacggcgtgagcagagccggcgccgccttcttcaacgaggtgagaaacgccgtgttcggcaaggtggcccagaacagcatcagaagaatcgccaagaacgtgttcctgcacctgcacaacctggacctgggcttccacctgagcagacagaccggcgccctgagcaaggccatcgacagaggcaccagaggcatcagcttcgtgctgagcgccctggtgttcaacctgctgcccatcatgttcgaggtgatgctggtgagcggcgtgctgtactacaagtgcggcgcccagttcgccctggtgaccctgggcaccctgggcacctacaccgccttcaccgtggccgtgaccagatggagaaccagattcagaatcgagatgaacaaggccgacaacgacgccggcaacgccgccatcgacagcctgctgaactacgagaccgtgaagtacttcaacaacgagagatacgaggcccagagatacgacggcttcctgaagacctacgagaccgccagcctgaagagcaccagcaccctggccatgctgaacttcggccagagcgccatcttcagcgtgggcctgaccgccatcatggtgctggccagccagggcatcgtggccggcaccctgaccgtgggcgacctggtgatggtgaacggcctgctgttccagctgagcctgcccctgaacttcctgggcaccgtgtacagagagaccagacaggccctgatcgacatgaacaccctgttcaccctgctgaaggtggacacccagatcaaggacaaggtgatggccagccccctgcagatcaccccccagaccgccaccgtggccttcgacaacgtgcacttcgagtacatcgagggccagaaggtgctgagcggcatcagcttcgaggtgcccgccggcaagaaggtggccatcgtgggcggcagcggcagcggcaagagcaccatcgtgagactgctgttcagattctacgagccccagaagggcagcatctacctggccggccagaacatccaggacgtgagcctggagagcctgagaagagccgtgggcgtggtgccccaggacgccgtgctgttccacaacaccatctactacaacctgctgtacggcaacatcagcgccagccccgaggaggtgtacgccgtggccaagctggccggcctgcacgacgccatcctgagaatgccccacggctacgacacccaggtgggcgagagaggcctgaagctgagcggcggcgagaagcagagagtggccatcgccagagccatcctgaaggacccccccgtgatcctgtacgacgaggccaccagcagcctggacagcatcaccgaggagaccatcctgggcgccatgaaggacgtggtgaagcacagaaccagcatcttcatcgcccacagactgagcaccgtggtggacgccgacgagatcatcgtgctggaccagggcaaggtggccgagagaggcacccaccacggcctgctggccaacccccacagcatctacagcgagatgtggcacacccagagcagcagagtgcagaaccacgacaaccccaagtgggaggccaagaaggagaacatcagcaaggaggaggagagaaagaagctgcaggaggagatcgtgaacagcgtgaagggctgcggcaactgcagctgctag

SEQ ID NO: 73787 - DNA, 2259 bp, synthetic construct
  misc_feature 1..2259: note = Description of Artificial Sequence: Synthetic coding sequence
  source 1..2259: mol_type = other DNA
atggccctgctggccatgcacagctggagatgggccgccgccgccgccgccttcgagaagagaagacacagcgccatcctgatcagacccctggtgagcgtgagcggcagcggcccccagtggagaccccaccagctgggcgccctgggcaccgccagagcctaccagatccccgagagcctgaagagcatcacctggcagagactgggcaagggcaacagcggccagttcctggacgccgccaaggccctgcaggtgtggcccctgatcgagaagagaacctgctggcacggccacgccggcggcggcctgcacaccgaccccaaggagggcctgaaggacgtggacaccagaaagatcatcaaggccatgctgagctacgtgtggcccaaggacagacccgacctgagagccagagtggccatcagcctgggcttcctgggcggcgccaaggccatgaacatcgtggtgcccttcatgttcaagtacgccgtggacagcctgaaccagatgagcggcaacatgctgaacctgagcgacgcccccaacaccgtggccaccatggccaccgccgtgctgatcggctacggcgtgagcagagccggcgccgccttcttcaacgaggtgagaaacgccgtgttcggcaaggtggcccagaacagcatcagaagaatcgccaagaacgtgttcctgcacctgcacaacctggacctgggcttccacctgagcagacagaccggcgccctgagcaaggccatcgacagaggcaccagaggcatcagcttcgtgctgagcgccctggtgttcaacctgctgcccatcatgttcgaggtgatgctggtgagcggcgtgctgtactacaagtgcggcgcccagttcgccctggtgaccctgggcaccctgggcacctacaccgccttcaccgtggccgtgaccagatggagaaccagattcagaatcgagatgaacaaggccgacaacgacgccggcaacgccgccatcgacagcctgctgaactacgagaccgtgaagtacttcaacaacgagagatacgaggcccagagatacgacggcttcctgaagacctacgagaccgccagcctgaagagcaccagcaccctggccatgctgaacttcggccagagcgccatcttcagcgtgggcctgaccgccatcatggtgctggccagccagggcatcgtggccggcaccctgaccgtgggcgacctggtgatggtgaacggcctgctgttccagctgagcctgcccctgaacttcctgggcaccgtgtacagagagaccagacaggccctgatcgacatgaacaccctgttcaccctgctgaaggtggacacccagatcaaggacaaggtgatggccagccccctgcagatcaccccccagaccgccaccgtggccttcgacaacgtgcacttcgagtacatcgagggccagaaggtgctgagcggcatcagcttcgaggtgcccgccggcaagaaggtggccatcgtgggcggcagcggcagcggcaagagcaccatcgtgagactgctgttcagattctacgagccccagaagggcagcatctacctggccggccagaacatccaggacgtgagcctggagagcctgagaagagccgtgggcgtggtgccccaggacgccgtgctgttccacaacaccatctactacaacctgctgtacggcaacatcagcgccagccccgaggaggtgtacgccgtggccaagctggccggcctgcacgacgccatcctgagaatgccccacggctacgacacccaggtgggcgagagaggcctgaagctgagcggcggcgagaagcagagagtggccatcgccagagccatcctgaaggacccccccgtgatcctgtacgacgaggccaccagcagcctggacagcatcaccgaggagaccatcctgggcgccatgaaggacgtggtgaagcacagaaccagcatcttcatcgcccacagactgagcaccgtggtggacgccgacgagatcatcgtgctggaccagggcaaggtggccgagagaggcacccaccacggcctgctggccaacccccacagcatctacagcgagatgtggcacacccagagcagcagagtgcagaaccacgacaaccccaagtgggaggccaagaaggagaacatcagcaaggaggaggagagaaagaagctgcaggaggagatcgtgaacagcgtgaagggctgcggcaactgcagctgctag

SEQ ID NO: 73788 - DNA, 2109 bp, synthetic construct
  misc_feature 1..2109: note = Description of Artificial Sequence: Synthetic coding sequence
  source 1..2109: mol_type = other DNA
atggccctgctggccatgcacagctggagatgggccgccgccgccgccgccttcgagaagagaagacacagcgccatcctgatcagacccctggtgagcgtgagcggcagcggcccccagtggagaccccaccagctgggcgccctgggcaccgccagagcctaccaggccctgcaggtgtggcccctgatcgagaagagaacctgctggcacggccacgccggcggcggcctgcacaccgaccccaaggagggcctgaaggacgtggacaccagaaagatcatcaaggccatgctgagctacgtgtggcccaaggacagacccgacctgagagccagagtggccatcagcctgggcttcctgggcggcgccaaggccatgaacatcgtggtgcccttcatgttcaagtacgccgtggacagcctgaaccagatgagcggcaacatgctgaacctgagcgacgcccccaacaccgtggccaccatggccaccgccgtgctgatcggctacggcgtgagcagagccggcgccgccttcttcaacgaggtgagaaacgccgtgttcggcaaggtggcccagaacagcatcagaagaatcgccaagaacgtgttcctgcacctgcacaacctggacctgggcttccacctgagcagacagaccggcgccctgagcaaggccatcgacagaggcaccagaggcatcagcttcgtgctgagcgccctggtgttcaacctgctgcccatcatgttcgaggtgatgctggtgagcggcgtgctgtactacaagtgcggcgcccagttcgccctggtgaccctgggcaccctgggcacctacaccgccttcaccgtggccgtgaccagatggagaaccagattcagaatcgagatgaacaaggccgacaacgacgccggcaacgccgccatcgacagcctgctgaactacgagaccgtgaagtacttcaacaacgagagatacgaggcccagagatacgacggcttcctgaagacctacgagaccgccagcctgaagagcaccagcaccctggccatgctgaacttcggccagagcgccatcttcagcgtgggcctgaccgccatcatggtgctggccagccagggcatcgtggccggcaccctgaccgtgggcgacctggtgatggtgaacggcctgctgttccagctgagcctgcccctgaacttcctgggcaccgtgtacagagagaccagacaggccctgatcgacatgaacaccctgttcaccctgctgaaggtggacacccagatcaaggacaaggtgatggccagccccctgcagatcaccccccagaccgccaccgtggccttcgacaacgtgcacttcgagtacatcgagggccagaaggtgctgagcggcatcagcttcgaggtgcccgccggcaagaaggtggccatcgtgggcggcagcggcagcggcaagagcaccatcgtgagactgctgttcagattctacgagccccagaagggcagcatctacctggccggccagaacatccaggacgtgagcctggagagcctgagaagagccgtgggcgtggtgccccaggacgccgtgctgttccacaacaccatctactacaacctgctgtacggcaacatcagcgccagccccgaggaggtgtacgccgtggccaagctggccggcctgcacgacgccatcctgagaatgccccacggctacgacacccaggtgggcgagagaggcctgaagctgagcggcggcgagaagcagagagtggccatcgccagagccatcctgaaggacccccccgtgatcctgtacgacgaggccaccagcagcctggacagcatcaccgaggagaccatcctgggcgccatgaaggacgtggtgaagcacagaaccagcatcttcatcgcccacagactgagcaccgtggtggacgccgacgagatcatcgtgctggaccagggcaaggtggccgagagaggcacccaccacggcctgctggccaacccccacagcatctacagcgagatgtggcacacccagagcagcagagtgcagaaccacgacaaccccaagtgggaggccaagaaggagaacatcagctag

SEQ ID NO: 73789 - DNA, 2181 bp, synthetic construct
  misc_feature 1..2181: note = Description of Artificial Sequence: Synthetic coding sequence
  source 1..2181: mol_type = other DNA
atggccctgctggccatgcacagctggagatgggccgccgccgccgccgccttcgagaagagaagacacagcgccatcctgatcagacccctggtgagcgtgagcggcagcggcccccagtggagaccccaccagctgggcgccctgggcaccgccagagcctaccaggccctgcaggtgtggcccctgatcgagaagagaacctgctggcacggccacgccggcggcggcctgcacaccgaccccaaggagggcctgaaggacgtggacaccagaaagatcatcaaggccatgctgagctacgtgtggcccaaggacagacccgacctgagagccagagtggccatcagcctgggcttcctgggcggcgccaaggccatgaacatcgtggtgcccttcatgttcaagtacgccgtggacagcctgaaccagatgagcggcaacatgctgaacctgagcgacgcccccaacaccgtggccaccatggccaccgccgtgctgatcggctacggcgtgagcagagccggcgccgccttcttcaacgaggtgagaaacgccgtgttcggcaaggtggcccagaacagcatcagaagaatcgccaagaacgtgttcctgcacctgcacaacctggacctgggcttccacctgagcagacagaccggcgccctgagcaaggccatcgacagaggcaccagaggcatcagcttcgtgctgagcgccctggtgttcaacctgctgcccatcatgttcgaggtgatgctggtgagcggcgtgctgtactacaagtgcggcgcccagttcgccctggtgaccctgggcaccctgggcacctacaccgccttcaccgtggccgtgaccagatggagaaccagattcagaatcgagatgaacaaggccgacaacgacgccggcaacgccgccatcgacagcctgctgaactacgagaccgtgaagtacttcaacaacgagagatacgaggcccagagatacgacggcttcctgaagacctacgagaccgccagcctgaagagcaccagcaccctggccatgctgaacttcggccagagcgccatcttcagcgtgggcctgaccgccatcatggtgctggccagccagggcatcgtggccggcaccctgaccgtgggcgacctggtgatggtgaacggcctgctgttccagctgagcctgcccctgaacttcctgggcaccgtgtacagagagaccagacaggccctgatcgacatgaacaccctgttcaccctgctgaaggtggacacccagatcaaggacaaggtgatggccagccccctgcagatcaccccccagaccgccaccgtggccttcgacaacgtgcacttcgagtacatcgagggccagaaggtgctgagcggcatcagcttcgaggtgcccgccggcaagaaggtggccatcgtgggcggcagcggcagcggcaagagcaccatcgtgagactgctgttcagattctacgagccccagaagggcagcatctacctggccggccagaacatccaggacgtgagcctggagagcctgagaagagccgtgggcgtggtgccccaggacgccgtgctgttccacaacaccatctactacaacctgctgtacggcaacatcagcgccagccccgaggaggtgtacgccgtggccaagctggccggcctgcacgacgccatcctgagaatgccccacggctacgacacccaggtgggcgagagaggcctgaagctgagcggcggcgagaagcagagagtggccatcgccagagccatcctgaaggacccccccgtgatcctgtacgacgaggccaccagcagcctggacagcatcaccgaggagaccatcctgggcgccatgaaggacgtggtgaagcacagaaccagcatcttcatcgcccacagactgagcaccgtggtggacgccgacgagatcatcgtgctggaccagggcaaggtggccgagagaggcacccaccacggcctgctggccaacccccacagcatctacagcgagatgtggcacacccagagcagcagagtgcagaaccacgacaaccccaagtgggaggccaagaaggagaacatcagcaaggaggaggagagaaagaagctgcaggaggagatcgtgaacagcgtgaagggctgcggcaactgcagctgctag

SEQ ID NO: 73790 - DNA, 2208 bp, synthetic construct
  misc_feature 1..2208: note = Description of Artificial Sequence: Synthetic coding sequence
  source 1..2208: mol_type = other DNA
atgctggtgcacctgttcagagtgggcatcagaggcggccccttccccggcagactgctgccccccctgagattccagaccttcagcgccgtgagaaacacctggagaaacggcaagaccggccagctgcacaaggccgagggcgagtacagcgacggctacagaagcagcagcctgctgagagccgtggcccacctgagaagccagctgtgggcccacctgcccagagcccccctggcccccagatggagccccagcgcctggtgctgggtgggcggcgccctgctgggccccatggtgctgagcaagcacccccacctgtgcctggtggccctgtgcgaggccgaggaggccccccccgccagcagcaccccccacgtggtgggcagcagattcaactggaagctgttctggcagttcctgcacccccacctgctggtgctgggcgtggccgtggtgctggccctgggcgccgccctggtgaacgtgcagatccccctgctgctgggccagctggtggaggtggtggccaagtacaccagagaccacgtgggcagcttcatgaccgagagccagaacctgagcacccacctgctgatcctgtacggcgtgcagggcctgctgaccttcggctacctggtgctgctgagccacgtgggcgagagaatggccgtggacatgagaagagccctgttcagcagcctgctgagacaggacatcaccttcttcgacgccaacaagaccggccagctggtgagcagactgaccaccgacgtgcaggagttcaagagcagcttcaagctggtgatcagccagggcctgagaagctgcacccaggtggccggctgcctggtgagcctgagcatgctgagcaccagactgaccctgctgctgatggtggccacccccgccctgatgggcgtgggcaccctgatgggcagcggcctgagaaagctgagcagacagtgccaggagcagatcgccagagccatgggcgtggccgacgaggccctgggcaacgtgagaaccgtgagagccttcgccatggagcagagagaggaggagagatacggcgccgagctggaggcctgcagatgcagagccgaggagctgggcagaggcatcgccctgttccagggcctgagcaacatcgccttcaactgcatggtgctgggcaccctgttcatcggcggcagcctggtggccggccagcagctgaccggcggcgacctgatgagcttcctggtggccagccagaccgtgcagagaagcatggccaacctgagcgtgctgttcggccaggtggtgagaggcctgagcgccggcgccagagtgttcgagtacatggccctgaacccctgcatccccctgagcggcggctgctgcgtgcccaaggagcagctgagaggcagcgtgaccttccagaacgtgtgcttcagctacccctgcagacccggcttcgaggtgctgaaggacttcaccctgaccctgccccccggcaagatcgtggccctggtgggccagagcggcggcggcaagaccaccgtggccagcctgctggagagattctacgaccccaccgccggcgtggtgatgctggacggcagagacctgagaaccctggaccccagctggctgagaggccaggtggtgggcttcatcagccaggagcccgtgctgttcggcaccaccatcatggagaacatcagattcggcaagctggaggccagcgacgaggaggtgtacaccgccgccagagaggccaacgcccacgagttcatcaccagcttccccgagggctacaacaccgtggtgggcgagagaggcaccaccctgagcggcggccagaagcagagactggccatcgccagagccctgatcaagcagcccaccgtgctgatcctggacgaggccaccagcgccctggacgccgagagcgagagagtggtgcaggaggccctggacagagccagcgccggcagaaccgtgctggtgatcgcccacagactgagcaccgtgagaggcgcccactgcatcgtggtgatggccgacggcagagtgtgggaggccggcacccacgaggagctgctgaagaagggcggcctgtacgccgagctgatcagaagacaggccctggacgcccccagaaccgccgcccccccccccaagaagcccgagggccccagaagccaccagcacaagagctag

SEQ ID NO: 73791 - DNA, 1404 bp, synthetic construct
  misc_feature 1..1404: note = Description of Artificial Sequence: Synthetic coding sequence
  source 1..1404: mol_type = other DNA
atgctggtgcacctgttcagagtgggcatcagaggcggccccttccccggcagactgctgccccccctgagattccagaccttcagcgccgtgagaagactgctgagactgcagcccagagtgagccagaaggagggcaccctgggcgtgagcgaccacgcccagagcgccctgcccaccggcggccccctgagctggccctggagatacagcgacggctacagaagcagcagcctgctgagagccgtggcccacctgagaagccagctgtgggcccacctgcccagagcccccctggcccccagatggagccccagcgcctggtgctgggtgggcggcgccctgctgggccccatggtgctgagcaagcacccccacctgtgcctggtggccctgtgcgaggccgaggaggccccccccgccagcagcaccccccacgtggtgggcagcagattcaactggaagctgttctggcagttcctgcacccccacctgctggtgctgggcgtggccgtggtgctggccctgggcgccgccctggtgaacgtgcagatccccctgctgctgggccagctggtggaggtggtggccaagtacaccagagaccacgtgggcagcttcatgaccgagagccagaacctgagcacccacctgctgatcctgtacggcgtgcagggcctgctgaccttcggctacctggtgctgctgagccacgtgggcgagagaatggccgtggacatgagaagagccctgttcagcagcctgctgagacaggacatcaccttcttcgacgccaacaagaccggccagctggtgagcagactgaccaccgacgtgcaggagttcaagagcagcttcaagctggtgatcagccagggcctgagaagctgcacccaggtggccggctgcctggtgagcctgagcatgctgagcaccagactgaccctgctgctgatggtggccacccccgccctgatgggcgtgggcaccctgatgggcagcggcctgagaaagctgagcagacagtgccaggagcagatcgccagagccatgggcgtggccgacgaggccctgggcaacgtgagaaccgtgagagccttcgccatggagcagagagaggaggagagatacggcgccgagctggaggcctgcagatgcagagccgaggagctgggcagaggcatcgccctgttccagggcctgagcaacatcgccttcaactgcatggtgctgggcaccctgttcatcggcggcagcctggtggccggccagcagctgaccggcggcgacctgatgagcttcctggtggccagccagaccgtgcagagacaggtgcacggccagcccctgtgccccgtgtgggccggcggccccggcgccgagtgcagatgccccggcctgtag

SEQ ID NO: 73792 - DNA, 2157 bp, synthetic construct
  misc_feature 1..2157: note = Description of Artificial Sequence: Synthetic coding sequence
  source 1..2157: mol_type = other DNA
atgctggtgcacctgttcagagtgggcatcagaggcggccccttccccggcagactgctgccccccctgagattccagaccttcagcgccgtgagatacagcgacggctacagaagcagcagcctgctgagagccgtggcccacctgagaagccagctgtgggcccacctgcccagagcccccctggcccccagatggagccccagcgcctggtgctgggtgggcggcgccctgctgggccccatggtgctgagcaagcacccccacctgtgcctggtggccctgtgcgaggccgaggaggccccccccgccagcagcaccccccacgtggtgggcagcagattcaactggaagctgttctggcagttcctgcacccccacctgctggtgctgggcgtggccgtggtgctggccctgggcgccgccctggtgaacgtgcagatccccctgctgctgggccagctggtggaggtggtggccaagtacaccagagaccacgtgggcagcttcatgaccgagagccagaacctgagcacccacctgctgatcctgtacggcgtgcagggcctgctgaccttcggctacctggtgctgctgagccacgtgggcgagagaatggccgtggacatgagaagagccctgttcagcagcctgctgagacaggacatcaccttcttcgacgccaacaagaccggccagctggtgagcagactgaccaccgacgtgcaggagttcaagagcagcttcaagctggtgatcagccagggcctgagaagctgcacccaggtggccggctgcctggtgagcctgagcatgctgagcaccagactgaccctgctgctgatggtggccacccccgccctgatgggcgtgggcaccctgatgggcagcggcctgagaaagctgagcagacagtgccaggagcagatcgccagagccatgggcgtggccgacgaggccctgggcaacgtgagaaccgtgagagccttcgccatggagcagagagaggaggagagatacggcgccgagctggaggcctgcagatgcagagccgaggagctgggcagaggcatcgccctgttccagggcctgagcaacatcgccttcaactgcatggtgctgggcaccctgttcatcggcggcagcctggtggccggccagcagctgaccggcggcgacctgatgagcttcctggtggccagccagaccgtgcagagaagcatggccaacctgagcgtgctgttcggccaggtggtgagaggcctgagcgccggcgccagagtgttcgagtacatggccctgaacccctgcatccccctgagcggcggctgctgcgtgcccaaggagcagctgagaggcagcgtgaccttccagaacgtgtgcttcagctacccctgcagacccggcttcgaggtgctgaaggacttcaccctgaccctgccccccggcaagatcgtggccctggtgggccagagcggcggcggcaagaccaccgtggccagcctgctggagagattctacgaccccaccgccggcgtggtgatgctggacggcagagacctgagaaccctggaccccagctggctgagaggccaggtggtgggcttcatcagccaggagcccgtgctgttcggcaccaccatcatggagaacatcagattcggcaagctggaggccagcgacgaggaggtgtacaccgccgccagagaggccaacgcccacgagttcatcaccagcttccccgagggctacaacaccgtggtgggcgagagaggcaccaccctgagcggcggccagaagcagagactggccatcgccagagccctgatcaagcagcccaccgtgctgatcctggacgaggccaccagcgccctggacgccgagagcgagagagtggtgcaggaggccctggacagagccagcgccggcagaaccgtgctggtgatcgcccacagactgagcaccgtgagaggcgcccactgcatcgtggtgatggccgacggcagagtgtgggaggccggcacccacgaggagctgctgaagaagggcggcctgtacgccgagctgatcagaagacaggccctggacgcccccagaaccgccgcccccccccccaagaagcccgagggccccagaagccaccagcacaagagctag

SEQ ID NO: 73793 - DNA, 2106 bp, synthetic construct
  misc_feature 1..2106: note = Description of Artificial Sequence: Synthetic coding sequence
  source 1..2106: mol_type = other DNA
atgctggtgcacctgttcagagtgggcatcagaggcggccccttccccggcagactgctgccccccctgagattccagaccttcagcgccgtgagatacagcgacggctacagaagcagcagcctgctgagagccgtggcccacctgagaagccagctgtgggcccacctgcccagagccctgctgggccccatggtgctgagcaagcacccccacctgtgcctggtggccctgtgcgaggccgaggaggccccccccgccagcagcaccccccacgtggtgggcagcagattcaactggaagctgttctggcagttcctgcacccccacctgctggtgctgggcgtggccgtggtgctggccctgggcgccgccctggtgaacgtgcagatccccctgctgctgggccagctggtggaggtggtggccaagtacaccagagaccacgtgggcagcttcatgaccgagagccagaacctgagcacccacctgctgatcctgtacggcgtgcagggcctgctgaccttcggctacctggtgctgctgagccacgtgggcgagagaatggccgtggacatgagaagagccctgttcagcagcctgctgagacaggacatcaccttcttcgacgccaacaagaccggccagctggtgagcagactgaccaccgacgtgcaggagttcaagagcagcttcaagctggtgatcagccagggcctgagaagctgcacccaggtggccggctgcctggtgagcctgagcatgctgagcaccagactgaccctgctgctgatggtggccacccccgccctgatgggcgtgggcaccctgatgggcagcggcctgagaaagctgagcagacagtgccaggagcagatcgccagagccatgggcgtggccgacgaggccctgggcaacgtgagaaccgtgagagccttcgccatggagcagagagaggaggagagatacggcgccgagctggaggcctgcagatgcagagccgaggagctgggcagaggcatcgccctgttccagggcctgagcaacatcgccttcaactgcatggtgctgggcaccctgttcatcggcggcagcctggtggccggccagcagctgaccggcggcgacctgatgagcttcctggtggccagccagaccgtgcagagaagcatggccaacctgagcgtgctgttcggccaggtggtgagaggcctgagcgccggcgccagagtgttcgagtacatggccctgaacccctgcatccccctgagcggcggctgctgcgtgcccaaggagcagctgagaggcagcgtgaccttccagaacgtgtgcttcagctacccctgcagacccggcttcgaggtgctgaaggacttcaccctgaccctgccccccggcaagatcgtggccctggtgggccagagcggcggcggcaagaccaccgtggccagcctgctggagagattctacgaccccaccgccggcgtggtgatgctggacggcagagacctgagaaccctggaccccagctggctgagaggccaggtggtgggcttcatcagccaggagcccgtgctgttcggcaccaccatcatggagaacatcagattcggcaagctggaggccagcgacgaggaggtgtacaccgccgccagagaggccaacgcccacgagttcatcaccagcttccccgagggctacaacaccgtggtgggcgagagaggcaccaccctgagcggcggccagaagcagagactggccatcgccagagccctgatcaagcagcccaccgtgctgatcctggacgaggccaccagcgccctggacgccgagagcgagagagtggtgcaggaggccctggacagagccagcgccggcagaaccgtgctggtgatcgcccacagactgagcaccgtgagaggcgcccactgcatcgtggtgatggccgacggcagagtgtgggaggccggcacccacgaggagctgctgaagaagggcggcctgtacgccgagctgatcagaagacaggccctggacgcccccagaaccgccgcccccccccccaagaagcccgagggccccagaagccaccagcacaagagctag

SEQ ID NO: 73794 - DNA, 1296 bp, synthetic construct
  misc_feature 1..1296: note = Description of Artificial Sequence: Synthetic coding sequence
  source 1..1296: mol_type = other DNA
atgctggtgcacctgttcagagtgggcatcagaggcggccccttccccggcagactgctgccccccctgagattccagaccttcagcgccgtgagatacagcgacggctacagaagcagcagcctgctgagagccgtggcccacctgagaagccagctgtgggcccacctgcccagagcccccctggcccccagatggagccccagcgcctggtgctgggtgggcggcgccctgctgggccccatggtgctgagcaagcacccccacctgtgcctggtggccctgtgcgaggccgaggaggccccccccgccagcagcaccccccacgtggtgggcagcagattcaactggaagctgttctggcagttcctgcacccccacctgctggtgctgggcgtggccgtggtgctggccctgggcgccgccctggtgaacgtgcagatccccctgctgctgggccagctggtggaggtggtggccaagtacaccagagaccacgtgggcagcttcatgaccgagagccagaacctgagcacccacctgctgatcctgtacggcgtgcagggcctgctgaccttcggctacctggtgctgctgagccacgtgggcgagagaatggccgtggacatgagaagagccctgttcagcagcctgctgagacaggacatcaccttcttcgacgccaacaagaccggccagctggtgagcagactgaccaccgacgtgcaggagttcaagagcagcttcaagctggtgatcagccagggcctgagaagctgcacccaggtggccggctgcctggtgagcctgagcatgctgagcaccagactgaccctgctgctgatggtggccacccccgccctgatgggcgtgggcaccctgatgggcagcggcctgagaaagctgagcagacagtgccaggagcagatcgccagagccatgggcgtggccgacgaggccctgggcaacgtgagaaccgtgagagccttcgccatggagcagagagaggaggagagatacggcgccgagctggaggcctgcagatgcagagccgaggagctgggcagaggcatcgccctgttccagggcctgagcaacatcgccttcaactgcatggtgctgggcaccctgttcatcggcggcagcctggtggccggccagcagctgaccggcggcgacctgatgagcttcctggtggccagccagaccgtgcagagcttcctgagagtggccccctgccccaacagcctgcccctgcaggccgtgaccttccacgcctggaaggaccacccctag

SEQ ID NO: 73795 - DNA, 2082 bp, synthetic construct
  misc_feature 1..2082: note = Description of Artificial Sequence: Synthetic coding sequence
  source 1..2082: mol_type = other DNA
atgctggtgcacctgttcagagtgggcatcagaggcggccccttccccggcagactgctgccccccctgagattccagaccttcagcgccgtgagatacagcgacggctacagaagcagcagcctgctgagagccgtggcccacctgagaagccagctgtgggcccacctgcccagagcccccctggcccccagatggagccccagcgcctggtgctgggtgggcggcgccctgctgggccccatggtgctgagcaagcacccccacctgtgcctggtggccctgtgcgaggccgaggaggccccccccgccagcagcaccccccacgtggtgggcagcagattcaactggaagctgttctggcagttcctgcacccccacctgctggtgctgggcgtggccgtggtgctggccctgggcgccgccctggtgaacgtgcagatccccctgctgctgggccagctggtggaggtggtggccaagtacaccagagaccacgtgggcagcttcatgaccgagagccagaacctgagcacccacctgctgatcctgtacggcgtgcagggcctgctgaccttcggctacctggtgctgctgagccacgtgggcgagagaatggccgtggacatgagaagagccctgttcagcagcctgctgagacaggacatcaccttcttcgacgccaacaagaccggccagctggtgagcagactgaccaccgacgtgcaggagttcaagagcagcttcaagctggtgatcagccagggcctgagaagctgcacccaggtggccggctgcctggtgagcctgagcatgctgagcaccagactgaccctgctgctgatggtggccacccccgccctgatgggcgtgggcaccctgatgggcagcggcctgagaaagctgagcagacagtgccaggagcagatcgccagagccatgggcgtggccgacgaggccctgggcaacgtgagaaccgtgagagccttcgccatggagcagagagaggaggagagatacggcgccgagctggaggcctgcagatgcagagccgaggagctgggcagaggcatcgccctgttccagggcctgagcaacatcgccttcaactgcatggtgctgggcaccctgttcatcggcggcagcctggtggccggccagcagctgaccggcggcgacctgatgagcttcctggtggccagccagaccgtgcagagaagcatggccaacctgagcgtgctgttcggccaggtggtgagaggcctgagcgccggcgccagagtgttcgagtacatggccctgaacccctgcatccccctgagcggcggctgctgcgtgcccaaggagcagctgagaggcagcgtgaccttccagaacgtgtgcttcagctacccctgcagacccggcttcgaggtgctgaaggacttcaccctgaccctgccccccggcaagatcgtggccctggtgggccagagcggcggcggcaagaccaccgtggccagcctgctggagagattctacgaccccaccgccggcgtggtgatgctggacggcagagacctgagaaccctggaccccagctggctgagaggccaggtggtgggcttcatcagccaggagcccgtgctgttcggcaccaccatcatggagaacatcagattcggcaagctggaggccagcgacgaggaggtgtacaccgccgccagagaggccaacgcccacgagttcatcaccagcttccccgagggctacaacaccgtggtgggcgagagaggcaccaccctgagcggcggccagaagcagagactggccatcgccagagccctgatcaagcagcccaccgtgctgatcctggacgaggccaccagcgccctggacgccgagagcgagagagtggtgcaggaggccctggacagagccagcgccggcagaaccgtgctggccggcacccacgaggagctgctgaagaagggcggcctgtacgccgagctgatcagaagacaggccctggacgcccccagaaccgccgcccccccccccaagaagcccgagggccccagaagccaccagcacaagagctag

SEQ ID NO: 73796 - DNA, 1893 bp, synthetic construct
  misc_feature 1..1893: note = Description of Artificial Sequence: Synthetic coding sequence
  source 1..1893: mol_type = other DNA
atgagagtgaagctgctgctgcccgccgcccccgtgctgcccagacagcacgccggcgccttcatcagcggcagagacagcggctggcccatccccagacaggccgccaccgccccccccctgcccgacatcctgagctgccagctggccctgggcgccgccctggtgaacgtgcagatccccctgctgctgggccagctggtggaggtggtggccaagtacaccagagaccacgtgggcagcttcatgaccgagagccagaacctgagcacccacctgctgatcctgtacggcgtgcagggcctgctgaccttcggctacctggtgctgctgagccacgtgggcgagagaatggccgtggacatgagaagagccctgttcagcagcctgctgagacaggacatcaccttcttcgacgccaacaagaccggccagctggtgagcagactgaccaccgacgtgcaggagttcaagagcagcttcaagctggtgatcagccagggcctgagaagctgcacccaggtggccggctgcctggtgagcctgagcatgctgagcaccagactgaccctgctgctgatggtggccacccccgccctgatgggcgtgggcaccctgatgggcagcggcctgagaaagctgagcagacagtgccaggagcagatcgccagagccatgggcgtggccgacgaggccctgggcaacgtgagaaccgtgagagccttcgccatggagcagagagaggaggagagatacggcgccgagctggaggcctgcagatgcagagccgaggagctgggcagaggcatcgccctgttccagggcctgagcaacatcgccttcaactgcatggtgctgggcaccctgttcatcggcggcagcctggtggccggccagcagctgaccggcggcgacctgatgagcttcctggtggccagccagaccgtgcagagaagcatggccaacctgagcgtgctgttcggccaggtggtgagaggcctgagcgccggcgccagagtgttcgagtacatggccctgaacccctgcatccccctgagcggcggctgctgcgtgcccaaggagcagctgagaggcagcgtgaccttccagaacgtgtgcttcagctacccctgcagacccggcttcgaggtgctgaaggacttcaccctgaccctgccccccggcaagatcgtggccctggtgggccagagcggcggcggcaagaccaccgtggccagcctgctggagagattctacgaccccaccgccggcgtggtgatgctggacggcagagacctgagaaccctggaccccagctggctgagaggccaggtggtgggcttcatcagccaggagcccgtgctgttcggcaccaccatcatggagaacatcagattcggcaagctggaggccagcgacgaggaggtgtacaccgccgccagagaggccaacgcccacgagttcatcaccagcttccccgagggctacaacaccgtggtgggcgagagaggcaccaccctgagcggcggccagaagcagagactggccatcgccagagccctgatcaagcagcccaccgtgctgatcctggacgaggccaccagcgccctggacgccgagagcgagagagtggtgcaggaggccctggacagagccagcgccggcagaaccgtgctggtgatcgcccacagactgagcaccgtgagaggcgcccactgcatcgtggtgatggccgacggcagagtgtgggaggccggcacccacgaggagctgctgaagaagggcggcctgtacgccgagctgatcagaagacaggccctggacgcccccagaaccgccgcccccccccccaagaagcccgagggccccagaagccaccagcacaagagctag

SEQ ID NO: 73797 - DNA, 2301 bp, synthetic construct
  misc_feature 1..2301: note = Description of Artificial Sequence: Synthetic coding sequence
  source 1..2301: mol_type = other DNA
atgagactgtggaaggccgtggtggtgaccctggccttcatgagcgtggacatctgcgtgaccaccgccatctacgtgttcagccacctggacagaagcctgctggaggacatcagacacttcaacatcttcgacagcgtgctggacctgtgggccgcctgcctgtacagaagctgcctgctgctgggcgccaccatcggcgtggccaagaacagcgccctgggccccagaagactgagagccagctggctggtgatcaccctggtgtgcctgttcgtgggcatctacgccatggtgaagctgctgctgttcagcgaggtgagaagacccatcagagacccctggttctgggccctgttcgtgtggacctacatcagcctgggcgccagcttcctgctgtggtggctgctgagcaccgtgagacccggcacccaggccctggagcccggcgccgccaccgaggccgagggcttccccggcagcggcagacccccccccgagcaggccagcggcgccaccctgcagaagctgctgagctacaccaagcccgacgtggccttcctggtggccgccagcttcttcctgatcgtggccgccctgggcgagaccttcctgccctactacaccggcagagccatcgacggcatcgtgatccagaagagcatggaccagttcagcaccgccgtggtgatcgtgtgcctgctggccatcggcagcagcttcgccgccggcatcagaggcggcatcttcaccctgatcttcgccagactgaacatcagactgagaaactgcctgttcagaagcctggtgagccaggagaccagcttcttcgacgagaacagaaccggcgacctgatcagcagactgaccagcgacaccaccatggtgagcgacctggtgagccagaacatcaacgtgttcctgagaaacaccgtgaaggtgaccggcgtggtggtgttcatgttcagcctgagctggcagctgagcctggtgaccttcatgggcttccccatcatcatgatggtgagcaacatctacggcaagtactacaagagactgagcaaggaggtgcagaacgccctggccagagccagcaacaccgccgaggagaccatcagcgccatgaagaccgtgagaagcttcgccaacgaggaggaggaggccgaggtgtacctgagaaagctgcagcaggtgtacaagctgaacagaaaggaggccgccgcctacatgtactacgtgtggggcagcggcctgaccctgctggtggtgcaggtgagcatcctgtactacggcggccacctggtgatcagcggccagatgaccagcggcaacctgatcgccttcatcatctacgagttcgtgctgggcgactgcatggagagcgtgggcagcgtgtacagcggcctgatgcagggcgtgggcgccgccgagaaggtgttcgagttcatcgacagacagcccaccatggtgcacgacggcagcctggcccccgaccacctggagggcagagtggacttcgagaacgtgaccttcacctacagaaccagaccccacacccaggtgctgcagaacgtgagcttcagcctgagccccggcaaggtgaccgccctggtgggccccagcggcagcggcaagagcagctgcgtgaacatcctggagaacttctaccccctggagggcggcagagtgctgctggacggcaagcccatcagcgcctacgaccacaagtacctgcacagagtgatcagcctggtgagccaggagcccgtgctgttcgccagaagcatcaccgacaacatcagctacggcctgcccaccgtgcccttcgagatggtggtggaggccgcccagaaggccaacgcccacggcttcatcatggagctgcaggacggctacagcaccgagaccggcgagaagggcgcccagctgagcggcggccagaagcagagagtggccatggccagagccctggtgagaaacccccccgtgctgatcctggacgaggccaccagcgccctggacgccgagagcgagtacctgatccagcaggccatccacggcaacctgcagaagcacaccgtgctgatcatcgcccacagactgagcaccgtggagcacgcccacctgatcgtggtgctggacaagggcagagtggtgcagcagggcacccaccagcagctgctggcccagggcggcctgtacgccaagctggtgcagagacagatgctgggcctgcagcccgccgccgacttcaccgccggccacaacgagcccgtggccaacggcagccacaaggcctag

SEQ ID NO: 73798 - DNA, 2172 bp, synthetic construct
  misc_feature 1..2172: note = Description of Artificial Sequence: Synthetic coding sequence
  source 1..2172: mol_type = other DNA
atgagactgtggaaggccgtggtggtgaccctggccttcatgagcgtggacatctgcgtgaccaccgccatctacgtgttcagccacctggacagaagcctgctggaggacatcagacacttcaacatcttcgacagcgtgctggacctgtgggccgcctgcctgtacagaagctgcctgctgctgggcgccaccatcggcgtggccaagaacagcgccctgggccccagaagactgagagccagctggctggtgatcaccctggtgtgcctgttcgtgggcatctacgccatggtgaagctgctgctgttcagcgaggtgagaagacccatcagagacccctggttctgggccctgttcgtgtggacctacatcagcctgggcgccagcttcctgctgtggtggctgctgagcaccgtgagacccggcacccaggccctggagcccggcgccgccaccgaggccgagggcttccccggcagcggcagacccccccccgagcaggccagcggcgccaccctgcagaagctgctgagctacaccaagcccgacgtggccttcctggtggccgccagcttcttcctgatcgtggccgccctgggcgagaccttcctgccctactacaccggcagagccatcgacggcatcgtgatccagaagagcatggaccagttcagcaccgccgtggtgatcgtgtgcctgctggccatcggcagcagcttcgccgccggcatcagaggcggcatcttcaccctgatcttcgccagactgaacatcagactgagaaactgcctgttcagaagcctggtgagccaggagaccagcttcttcgacgagaacagaaccggcgacctgatcagcagactgaccagcgacaccaccatggtgagcgacctggtgagccagaacatcaacgtgttcctgagaaacaccgtgaaggtgaccggcgtggtggtgttcatgttcagcctgagctggcagctgagcctggtgaccttcatgggcttccccatcatcatgatggtgagcaacatctacggcaagtactacaagagactgagcaaggaggtgcagaacgccctggccagagccagcaacaccgccgaggagaccatcagcgccatgaagaccgtgagaagcttcgccaacgaggaggaggaggccgaggtgtacctgagaaagctgcagcaggtgtacaagctgaacagaaaggaggccgccgcctacatgtactacgtgtggggcagcggcagcgtgggcagcgtgtacagcggcctgatgcagggcgtgggcgccgccgagaaggtgttcgagttcatcgacagacagcccaccatggtgcacgacggcagcctggcccccgaccacctggagggcagagtggacttcgagaacgtgaccttcacctacagaaccagaccccacacccaggtgctgcagaacgtgagcttcagcctgagccccggcaaggtgaccgccctggtgggccccagcggcagcggcaagagcagctgcgtgaacatcctggagaacttctaccccctggagggcggcagagtgctgctggacggcaagcccatcagcgcctacgaccacaagtacctgcacagagtgatcagcctggtgagccaggagcccgtgctgttcgccagaagcatcaccgacaacatcagctacggcctgcccaccgtgcccttcgagatggtggtggaggccgcccagaaggccaacgcccacggcttcatcatggagctgcaggacggctacagcaccgagaccggcgagaagggcgcccagctgagcggcggccagaagcagagagtggccatggccagagccctggtgagaaacccccccgtgctgatcctggacgaggccaccagcgccctggacgccgagagcgagtacctgatccagcaggccatccacggcaacctgcagaagcacaccgtgctgatcatcgcccacagactgagcaccgtggagcacgcccacctgatcgtggtgctggacaagggcagagtggtgcagcagggcacccaccagcagctgctggcccagggcggcctgtacgccaagctggtgcagagacagatgctgggcctgcagcccgccgccgacttcaccgccggccacaacgagcccgtggccaacggcagccacaaggcctag

SEQ ID NO: 73799 - DNA, 2301 bp, synthetic construct; identical to SEQ ID NO: 73797
  misc_feature 1..2301: note = Description of Artificial Sequence: Synthetic coding sequence
  source 1..2301: mol_type = other DNA

SEQ ID NO: 73800 - DNA, 2310 bp, synthetic construct
  misc_feature 1..2310: note = Description of Artificial Sequence: Synthetic coding sequence
  source 1..2310: mol_type = other DNA
atgagactgtggaaggccgtggtggtgaccctggccttcatgagcgtggacatctgcgtgaccaccgccatctacgtgttcagccacctggacagaagcctgctggaggacatcagacacttcaacatcttcgacagcgtgctggacctgtgggccgcctgcctgtacagaagctgcctgctgctgggcgccaccatcggcgtggccaagaacagcgccctgggccccagaagactgagagccagctggctggtgatcaccctggtgtgcctgttcgtgggcatctacgccatggtgaagctgctgctgttcagcgaggtgagaagacccatcagagacccctggttctgggccctgttcgtgtggacctacatcagcctgggcgccagcttcctgctgtggtggctgctgagcaccgtgagacccggcacccaggccctggagcccggcgccgccaccgaggccgagggcttccccggcagcggcagacccccccccgagcaggccagcggcgccaccctgcagaagctgctgagctacaccaagcccgacgtggccttcctggtggccgccagcttcttcctgatcgtggccgccctgggcgagaccttcctgccctactacaccggcagagccatcgacggcatcgtgatccagaagagcatggaccagttcagcaccgccgtggtgatcgtgtgcctgctggccatcggcagcagcttcgccgccggcatcagaggcggcatcttcaccctgatcttcgccagactgaacatcagactgagaaactgcctgttcagaagcctggtgagccaggagaccagcttcttcgacgagaacagaaccggcgacctgatcagcagactgaccagcgacaccaccatggtgagcgacctggtgagccagaacatcaacgtgttcctgagaaacaccgtgaaggtgaccggcgtggtggtgttcatgttcagcctgagctggcagctgagcctggtgaccttcatgggcttccccatcatcatgatggtgagcaacatctacggcaagtactacaagagactgagcaaggaggtgcagaacgccctggccagagccagcaacaccgccgaggagaccatcagcgccatgaagaccgtgagaagcttcgccaacgaggaggaggaggccgaggtgtacctgagaaagctgcagcaggtgtacaagctgaacagaaaggaggccgccgcctacatgtactacgtgtggggcagcggcctgaccctgctggtggtgcaggtgagcatcctgtactacggcggccacctggtgatcagcggccagatgaccagcggcaacctgatcgccttcatcatctacgagttcgtgctgggcgactgcatggagagcgtgggcagcgtgtacagcggcctgatgcagggcgtgggcgccgccgagaaggtgttcgagttcatcgacagacagcccaccatggtgcacgacggcagcctggcccccgaccacctggagggcagagtggacttcgagaacgtgaccttcacctacagaaccagaccccacacccaggtgctgcagaacgtgagcttcagcctgagccccggcaaggtgaccgccctggtgggccccagcggcagcggcaagagcagctgcgtgaacatcctggagaacttctaccccctggagggcggcagagtgctgctggacggcaagcccatcagcgcctacgaccacaagtacctgcacagagtgatcagcctggtgagccaggagcccgtgctgttcgccagaagcatcaccgacaacatcagctacggcctgcccaccgtgcccttcgagatggtggtggaggccgcccagaaggccaacgcccacggcttcatcatggagctgcaggacggctacagcaccgagaccggcgagaagggcgcccagctgagcggcggccagaagcagagagtggccatggccagagccctggtgagaaacccccccgtgctgatcctggacgaggccaccagcgccctggacgccgagagcgagtacctgagcccccagatccagcaggccatccacggcaacctgcagaagcacaccgtgctgatcatcgcccacagactgagcaccgtggagcacgcccacctgatcgtggtgctggacaagggcagagtggtgcagcagggcacccaccagcagctgctggcccagggcggcctgtacgccaagctggtgcagagacagatgctgggcctgcagcccgccgccgacttcaccgccggccacaacgagcccgtggccaacggcagccacaaggcctag

SEQ ID NO: 73801 - DNA, 2112 bp, synthetic construct
  misc_feature 1..2112: note = Description of Artificial Sequence: Synthetic coding sequence
  source 1..2112: mol_type = other DNA
atgagactgtggaaggccgtggtggtgaccctggccttcatgagcgtggacatctgcgtgaccaccgccatctacgtgttcagccacctggacagaagcctgctggaggacatcagacacttcaacatcttcgacagcgtgctggacctgtgggccgcctgcctgtacagaagctgcctgctgctgggcgccaccatcggcgtggccaagaacagcgccctgggccccagaagactgagagccagctggctggtgatcaccctggtgtgcctgttcgtgggcatctacgccatggtgaagctgctgctgttcagcgaggtgagaagacccatcagagacccctggttctgggccctgttcgtgtggacctacatcagcctgggcgccagcttcctgctgtggtggctgctgagcaccgtgagacccggcacccaggccctggagcccggcgccgccaccgaggccgagggcttccccggcagcggcagacccccccccgagcaggccagcggcgccaccctgcagaagctgctgagctacaccaagcccgacgtggccttcctggtggccgccagcttcttcctgatcgtggccgccctgggcgagaccttcctgccctactacaccggcagagccatcgacggcatcgtgatccagaagagcatggaccagttcagcaccgccgtggtgatcgtgtgcctgctggccatcggcagcagcttcgccgccggcatcagaggcggcatcttcaccctgatcttcgccagactgaacatcagactgagaaactgcctgttcagaagcctggtgagccaggagaccagcttcttcgacgagaacagaaccggcgacctgatcagcagactgaccagcgacaccaccatggtgagcgacctggtgagccagaacatcaacgtgttcctgagaaacaccgtgaaggtgaccggcgtggtggtgttcatgttcagcctgagctggcagctgagcctggtgaccttcatgggcttccccatcatcatgatggtgagcaacatctacggcaagtactacaagagactgagcaaggaggtgcagaacgccctggccagagccagcaacaccgccgaggagaccatcagcgccatgaagaccgtgagaagcttcgccaacgaggaggaggaggccgaggtgtacctgagaaagctgcagcaggtgtacaagctgaacagaaaggaggccgccgcctacatgtactacgtgtggggcagcggcctgaccctgctggtggtgcaggtgagcatcctgtactacggcggccacctggtgatcagcggccagatgaccagcggcaacctgatcgccttcatcatctacgagttcgtgctgggcgactgcatggagaacgtgagcttcagcctgagccccggcaaggtgaccgccctggtgggccccagcggcagcggcaagagcagctgcgtgaacatcctggagaacttctaccccctggagggcggcagagtgctgctggacggcaagcccatcagcgcctacgaccacaagtacctgcacagagtgatcagcctggtgagccaggagcccgtgctgttcgccagaagcatcaccgacaacatcagctacggcctgcccaccgtgcccttcgagatggtggtggaggccgcccagaaggccaacgcccacggcttcatcatggagctgcaggacggctacagcaccgagaccggcgagaagggcgcccagctgagcggcggccagaagcagagagtggccatggccagagccctggtgagaaacccccccgtgctgatcctggacgaggccaccagcgccctggacgccgagagcgagtacctgatccagcaggccatccacggcaacctgcagaagcacaccgtgctgatcatcgcccacagactgagcaccgtggagcacgcccacctgatcgtggtgctggacaagggcagagtggtgcagcagggcacccaccagcagctgctggcccagggcggcctgtacgccaagctggtgcagagacagatgctgggcctgcagcccgccgccgacttcaccgccggccacaacgagcccgtggccaacggcagccacaaggcctag

SEQ ID NO: 73802 - DNA, 2301 bp, synthetic construct; identical to SEQ ID NO: 73797
  misc_feature 1..2301: note = Description of Artificial Sequence: Synthetic coding sequence
  source 1..2301: mol_type = other DNA

SEQ ID NO: 73803 - DNA, 4395 bp, synthetic construct
  misc_feature 1..4395: note = Description of Artificial Sequence: Synthetic coding sequence
  source 1..4395: mol_type = other DNA
atgtgcctgctggtgttccccctggtgcccagaagccccgactacatcctgccctgcagccccggctggagactgagactggccgccagcttcctgctgagcgtgttccccctgctggacctgctgcccgtggccctgccccccggcgccggccccggccccatcggcctggaggtgctggccggctgcgtggccgccgtggcctggatcagccacagcctggccctgtgggtgctggcccacagcccccacggccacagcagaggccccctggccctggccctggtggccctgctgcccgcccccgccctggtgctgaccgtgctgtggcactgccagagaggcaccctgctgccccccctgctgcccggccccatggccagactgtgcctgctgatcctgcagctggccgccctgctggcctacgccctgggctgggccgcccccggcggccccagagagccctgggcccaggagcccctgctgcccgaggaccaggagcccgaggtggccgaggacggcgagagctggctgagcagattcagctacgcctggctggcccccctgctggccagaggcgcctgcggcgagctgagacagccccaggacatctgcagactgccccacagactgcagcccacctacctggccagagtgttccaggcccactggcaggagggcgccagactgtggagagccctgtacggcgccttcggcagatgctacctggccctgggcctgctgaagctggtgggcaccatgctgggcttcagcggccccctgctgctgagcctgctggtgggcttcctggaggagggccaggagcccctgagccacggcctgctgtacgccctgggcctggccggcggcgccgtgctgggcgccgtgctgcagaaccagtacggctacgaggtgtacaaggtgaccctgcaggccagaggcgccgtgctgaacatcctgtactgcaaggccctgcagctgggccccagcagaccccccaccggcgaggccctgaacctgctgggcaccgacagcgagagactgctgaacttcgccggcagcttccacgaggcctggggcctgcccctgcagctggccatcaccctgtacctgctgtaccagcaggtgggcgtggccttcgtgggcggcctgatcctggccctgctgctggtgcccgtgaacaaggtgatcgccaccagaatcatggccagcaaccaggagatgctgcagcacaaggacgccagagtgaagctggtgaccgagctgctgagcggcatcagagtgatcaagttctgcggctgggagcaggccctgggcgccagagtggaggcctgcagagccagagagctgggcagactgagagtgatcaagtacctggacgccgcctgcgtgtacctgtgggccgccctgcccgtggtgatcagcatcgtgatcttcatcacctacgtgctgatgggccaccagctgaccgccaccaaggtgttcaccgccctggccctggtgagaatgctgatcctgcccctgaacaacttcccctgggtgatcaacggcctgctggaggccaaggtgagcctggacagaatccagctgttcctggacctgcccaaccacaacccccaggcctactacagccccgactgcggcagactgggcgcccagatcaagtggctgctgtgcagcgacccccccgccgagcccagcaccgtgctggagctgcacggcgccctgttcagctgggaccccgtgggcaccagcctggagaccttcatcagccacctggaggtgaagaagggcatgctggtgggcatcgtgggcaaggtgggctgcggcaagagcagcctgctggccgccatcgccggcgagctgcacagactgagaggccacgtggccgtgagaggcctgagcaagggcttcggcctggccacccaggagccctggatccagttcgccaccatcagagacaacatcctgttcggcaagaccttcgacgcccagctgtacaaggaggtgctggaggcctgcgccctgaacgacgacctgagcatcctgcccgccggcgaccagaccgaggtgggcgagaagggcgtgaccctgagcggcggccagagagccagaatcgccctggccagagccgtgtaccaggagaaggagctgtacctgctggacgaccccctggccgccgtggacgccgacgtggccaaccacctgctgcacagatgcatcctgggcatgctgagctacaccaccagactgctgtgcacccacagaaccgagtacctggagagagccgacgccgtgctgctgatggaggccggcagactgatcagagccggcccccccagcgagatcctgcccctggtgcaggccgtgcccaaggcctgggccgagaacggccaggagagcgacagcgccaccgcccagagcgtgcagaaccccgagaagaccaaggagggcctggaggaggagcagagcaccagcggcagactgctgcaggaggagagcaagaaggagggcgccgtggccctgcacgtgtaccaggcctactggaaggccgtgggccagggcctggccctggccatcctgttcagcctgctgctgatgcaggccaccagaaacgccgccgactggtggctgagccactggatcagccagctgaaggccgagaacagcagccaggaggcccagcccagcaccagccccgccagcatgggcctgttcagcccccagctgctgctgttcagccccggcaacctgtacatccccgtgttccccctgcccaaggccgcccccaacggcagcagcgacatcagattctacctgaccgtgtacgccaccatcgccggcgtgaacagcctgtgcaccctgctgagagccgtgctgttcgccgccggcaccctgcaggccgccgccaccctgcacagaagactgctgcacagagtgctgatggcccccgtgaccttcttcaacgccacccccaccggcagaatcctgaacagattcagcagcgacgtggcctgcgccgacgacagcctgcccttcatcctgaacatcctgctggccaacgccgccggcctgctgggcctgctggccgtgctgggcagcggcctgccctggctgctgctgctgctgccccccctgagcatcatgtactaccacgtgcagagacactacagagccagcagcagagagctgagaagactgggcagcctgaccctgagccccctgtacagccacctggccgacaccctggccggcctgagcgtgctgagagccaccggcgccacctacagattcgaggaggagaacctgagactgctggagctgaaccagagatgccagttcgccaccagcgccaccatgcagtggctggacatcagactgcagctgatgggcgccgccgtggtgagcgccatcgccggcatcgccctggtgcagcaccagcagggcctggccaaccccggcctggtgggcctgagcctgagctacgccctgagcctgaccggcctgctgagcggcctggtgagcagcttcacccagaccgaggccatgctggtgagcgtggagagactggaggagtacacctgcgacctgccccaggagccccagggccagcccctgcagctgggcaccggctggctgacccagggcggcgtggagttccaggacgtggtgctggcctacagacccggcctgcccaacgccctggacggcgtgaccttctgcgtgcagcccggcgagaagctgggcatcgtgggcagaaccggcagcggcaagagcagcctgctgctggtgctgttcagactgctggagcccagcagcggcagagtgctgctggacggcgtggacaccagccagctggagctggcccagctgagaagccagctggccatcatcccccaggagcccttcctgttcagcggcaccgtgagagagaacctggacccccagggcctgcacaaggacagagccctgtggcaggccctgaagcagtgccacctgagcgaggtgatcaccagcatgggcggcctggacggcgagctgggcgagggcggcagaagcctgagcctgggccagagacagctgctgtgcctggccagagccctgctgaccgacgccaagatcctgtgcatcgacgaggccaccgccagcgtggaccagaagaccgaccagctgctgcagcagaccatctgcaagagattcgccaacaagaccgtgctgaccatcgcccacagactgaacaccatcctgaacagcgacagagtgctggtgctgcaggccggcagagtggtggagctggacagccccgccaccctgagaaaccagccccacagcctgttccagcagctgctgcagagcagccagcagggcgtgcccgccagcctgggcggcccctag

SEQ ID NO: 73804 - DNA, 4479 bp, synthetic construct
  misc_feature 1..4479: note = Description of Artificial Sequence: Synthetic coding sequence
  source 1..4479: mol_type = other DNA
atggagagactgctggcccagctgtgcggcagcagcgccgcctggcccctgcccctgtgggagggcgacaccaccggccactgcttcacccagctggtgctgagcgccctgccccacgccctgctggccgtgctgagcgcctgctacctgggcacccccagaagccccgactacatcctgccctgcagccccggctggagactgagactggccgccagcttcctgctgagcgtgttccccctgctggacctgctgcccgtggccctgccccccggcgccggccccggccccatcggcctggaggtgctggccggctgcgtggccgccgtggcctggatcagccacagcctggccctgtgggtgctggcccacagcccccacggccacagcagaggccccctggccctggccctggtggccctgctgcccgcccccgccctggtgctgaccgtgctgtggcactgccagagaggcaccctgctgccccccctgctgcccggccccatggccagactgtgcctgctgatcctgcagctggccgccctgctggcctacgccctgggctgggccgcccccggcggccccagagagccctgggcccaggagcccctgctgcccgaggaccaggagcccgaggtggccgaggacggcgagagctggctgagcagattcagctacgcctggctggcccccctgctggccagaggcgcctgcggcgagctgagacagccccaggacatctgcagactgccccacagactgcagcccacctacctggccagagtgttccaggcccactggcaggagggcgccagactgtggagagccctgtacggcgccttcggcagatgctacctggccctgggcctgctgaagctggtgggcaccatgctgggcttcagcggccccctgctgctgagcctgctggtgggcttcctggaggagggccaggagcccctgagccacggcctgctgtacgccctgggcctggccggcggcgccgtgctgggcgccgtgctgcagaaccagtacggctacgaggtgtacaaggtgaccctgcaggccagaggcgccgtgctgaacatcctgtactgcaaggccctgcagctgggccccagcagaccccccaccggcgaggccctgaacctgctgggcaccgacagcgagagactgctgaacttcgccggcagcttccacgaggcctggggcctgcccctgcagctggccatcaccctgtacctgctgtaccagcaggtgggcgtggccttcgtgggcggcctgatcctggccctgctgctggtgcccgtgaacaaggtgatcgccaccagaatcatggccagcaaccaggagatgctgcagcacaaggacgccagagtgaagctggtgaccgagctgctgagcggcatcagagtgatcaagttctgcggctgggagcaggccctgggcgccagagtggaggcctgcagagccagagagctgggcagactgagagtgatcaagtacctggacgccgcctgcgtgtacctgtgggccgccctgcccgtggtgatcagcatcgtgatcttcatcacctacgtgctgatgggccaccagctgaccgccaccaaggtgttcaccgccctggccctggtgagaatgctgatcctgcccctgaacaacttcccctgggtgatcaacggcctgctggaggccaaggtgagcctggacagaatccagctgttcctggacctgcccaaccacaacccccaggcctactacagccccgacccccccgccgagcccagcaccgtgctggagctgcacggcgccctgttcagctgggaccccgtgggcaccagcctggagaccttcatcagccacctggaggtgaagaagggcatgctggtgggcatcgtgggcaaggtgggctgcggcaagagcagcctgctggccgccatcgccggcgagctgcacagactgagaggccacgtggccgtgagaggcctgagcaagggcttcggcctggccacccaggagccctggatccagttcgccaccatcagagacaacatcctgttcggcaagaccttcgacgcccagctgtacaaggaggtgctggaggcctgcgccctgaacgacgacctgagcatcctgcccgccggcgaccagaccgaggtgggcgagaagggcgtgaccctgagcggcggccagagagccagaatcgccctggccagagccgtgtaccaggagaaggagctgtacctgctggacgaccccctggccgccgtggacgccgacgtggccaaccacctgctgcacagatgcatcctgggcatgctgagctacaccaccagactgctgtgcacccacagaaccgagtacctggagagagccgacgccgtgctgctgatggaggccggcagactgatcagagccggcccccccagcgagatcctgcccctggtgcaggccgtgcccaaggcctgggccgagaacggccaggagagcgacagcgccaccgcccagagcgtgcagaaccccgagaagaccaaggagggcctggaggaggagcagagcaccagcggcagactgctgcaggaggagagcaagaaggagggcgccgtggccctgcacgtgtaccaggcctactggaaggccgtgggccagggcctggccctggccatcctgttcagcctgctgctgatgcaggccaccagaaacgccgccgactggtggctgagccactggatcagccagctgaaggccgagaacagcagccaggaggcccagcccagcaccagccccgccagcatgggcctgttcagcccccagctgctgctgttcagccccggcaacctgtacatccccgtgttccccctgcccaaggccgcccccaacggcagcagcgacatcagattctacctgaccgtgtacgccaccatcgccggcgtgaacagcctgtgcaccctgctgagagccgtgctgttcgccgccggcaccctgcaggccgccgccaccctgcacagaagactgctgcacagagtgctgatggcccccgtgaccttcttcaacgccacccccaccggcagaatcctgaacagattcagcagcgacgtggcctgcgccgacgacagcctgcccttcatcctgaacatcctgctggccaacgccgccggcctgctgggcctgctggccgtgctgggcagcggcctgccctggctgctgctgctgctgccccccctgagcatcatgtactaccacgtgcagagacactacagagccagcagcagagagctgagaagactgggcagcctgaccctgagccccctgtacagccacctggccgacaccctggccggcctgagcgtgctgagagccaccggcgccacctacagattcgaggaggagaacctgagactgctggagctgaaccagagatgccagttcgccaccagcgccaccatgcagtggctggacatcagactgcagctgatgggcgccgccgtggtgagcgccatcgccggcatcgccctggtgcagcaccagcagggcctggccaaccccggcctggtgggcctgagcctgagctacgccctgagcctgaccggcctgctgagcggcctggtgagcagcttcacccagaccgaggccatgctggtgagcgtggagagactggaggagtacacctgcgacctgccccaggagccccagggccagcccctgcagctgggcaccggctggctgacccagggcggcgtggagttccaggacgtggtgctggcctacagacccggcctgcccaacgccctggacggcgtgaccttctgcgtgcagcccggcgagaagctgggcatcgtgggcagaaccggcagcggcaagagcagcctgctgctggtgctgttcagactgctggagcccagcagcggcagagtgctgctggacggcgtggacaccagccagctggagctggcccagctgagaagccagctggccatcatcccccaggagcccttcctgttcagcggcaccgtgagagagaacctggacccccagggcctgcacaaggacagagccctgtggcaggccctgaagcagtgccacctgagcgaggtgatcaccagcatgggcggcctggacggcgagctgggcgagggcggcagaagcctgagcctgggccagagacagctgctgtgcctggccagagccctgctgaccgacgccaagatcctgtgcatcgacgaggccaccgccagcgtggaccagaagaccgaccagctgctgcagcagaccatctgcaagagattcgccaacaagaccgtgctgaccatcgcccacagactgaacaccatcctgaacagcgacagagtgctggtgctgcaggccggcagagtggtggagctggacagccccgccaccctgagaaaccagccccacagcctgttccagcagctgctgcagagcagccagcagggcgtgcccgccagcctgggcggcccctag

SEQ ID NO: 73805 - DNA, 4035 bp, synthetic construct
  misc_feature 1..4035: note = Description of Artificial Sequence: Synthetic coding sequence
  source 1..4035: mol_type = other DNA
atgaccagaaagagaacctactgggtgcccaacagcagcggcggcctggtgaacagaggcatcgacatcggcgacgacatggtgagcggcctgatctacaagacctacaccctgcaggacggcccctggagccagcaggagagaaaccccgaggcccccggcagagccgccgtgcccccctggggcaagtacgacgccgccctgagaaccatgatccccttcagacccaagcccagattccccgccccccagcccctggacaacgccggcctgttcagctacctgaccgtgagctggctgacccccctgatgatccagagcctgagaagcagactggacgagaacaccatcccccccctgagcgtgcacgacgccagcgacaagaacgtgcagagactgcacagactgtgggaggaggaggtgagcagaagaggcatcgagaaggccagcgtgctgctggtgatgctgagattccagagaaccagactgatcttcgacgccctgctgggcatctgcttctgcatcgccagcgtgctgggccccatcctgatcatccccaagatcctggagtacagcgaggagcagctgggcaacgtggtgcacggcgtgggcctgtgcttcgccctgttcctgagcgagtgcgtgaagagcctgagcttcagcagcagctggatcatcaaccagagaaccgccatcagattcagagccgccgtgagcagcttcgccttcgagaagctgatccagttcaagagcgtgatccacatcaccagcggcgaggccatcagcttcttcaccggcgacgtgaactacctgttcgagggcgtgtgctacggccccctggtgctgatcacctgcgccagcctggtgatctgcagcatcagcagctacttcatcatcggctacaccgccttcatcgccatcctgtgctacctgctggtgttccccctggccgtgttcatgaccagaatggccgtgaaggcccagcaccacaccagcgaggtgagcgaccagagaatcagagtgaccagcgaggtgctgacctgcatcaagctgatcaagatgtacacctgggagaagcccttcgccaagatcatcgaggacctgagaagaaaggagagaaagctgctggagaagtgcggcctggtgcagagcctgaccagcatcaccctgttcatcatccccaccgtggccaccgccgtgtgggtgctgatccacaccagcctgaagctgaagctgaccgccagcatggccttcagcatgctggccagcctgaacctgctgagactgagcgtgttcttcgtgcccatcgccgtgaagggcctgaccaacagcaagagcgccgtgatgagattcaagaagttcttcctgcaggagagccccgtgttctacgtgcagaccctgcaggaccccagcaaggccctggtgttcgaggaggccaccctgagctggcagcagacctgccccggcatcgtgaacggcgccctggagctggagagaaacggccacgccagcgagggcatgaccagacccagagacgccctgggccccgaggaggagggcaacagcctgggccccgagctgcacaagatcaacctggtggtgagcaagggcatgatgctgggcgtgtgcggcaacaccggcagcggcaagagcagcctgctgagcgccatcctggaggagatgcacctgctggagggcagcgtgggcgtgcagggcagcctggcctacgtgccccagcaggcctggatcgtgagcggcaacatcagagagaacatcctgatgggcggcgcctacgacaaggccagatacctgcaggtgctgcactgctgcagcctgaacagagacctggagctgctgcccttcggcgacatgaccgagatcggcgagagaggcctgaacctgagcggcggccagaagcagagaatcagcctggccagagccgtgtacagcgacagacagatctacctgctggacgaccccctgagcgccgtggacgcccacgtgggcaagcacatcttcgaggagtgcatcaagaagaccctgagaggcaagaccgtggtgctggtgacccaccagctgcagtacctggagttctgcggccagatcatcctgctggagaacggcaagatctgcgagaacggcacccacagcgagctgatgcagaagaagggcaagtacgcccagctgatccagaagatgcacaaggaggccaccagcgacatgctgcaggacaccgccaagatcgccgagaagcccaaggtggagagccaggccctggccaccagcctggaggagagcctgaacggcaacgccgtgcccgagcaccagctgacccaggaggaggagatggaggagggcagcctgagctggagagtgtaccaccactacatccaggccgccggcggctacatggtgagctgcatcatcttcttcttcgtggtgctgatcgtgttcctgaccatcttcagcttctggtggctgagctactggctggagcagggcagcggcaccaacagcagcagagagagcaacggcaccatggccgacctgggcaacatcgccgacaacccccagctgagcttctaccagctggtgtacggcctgaacgccctgctgctgatctgcgtgggcgtgtgcagcagcggcatcttcaccaaggtgaccagaaaggccagcaccgccctgcacaacaagctgttcaacaaggtgttcagatgccccatgagcttcttcgacaccatccccatcggcagactgctgaactgcttcgccggcgacctggagcagctggaccagctgctgcccatcttcagcgagcagttcctggtgctgagcctgatggtgatcgccgtgctgctgatcgtgagcgtgctgagcccctacatcctgctgatgggcgccatcatcatggtgatctgcttcatctactacatgatgttcaagaaggccatcggcgtgttcaagagactggagaactacagcagaagccccctgttcagccacatcctgaacagcctgcagggcctgagcagcatccacgtgtacggcaagaccgaggacttcatcagccagttcaagagactgaccgacgcccagaacaactacctgctgctgttcctgagcagcaccagatggatggccctgagactggagatcatgaccaacctggtgaccctggccgtggccctgttcgtggccttcggcatcagcagcaccccctacagcttcaaggtgatggccgtgaacatcgtgctgcagctggccagcagcttccaggccaccgccagaatcggcctggagaccgaggcccagttcaccgccgtggagagaatcctgcagtacatgaagatgtgcgtgagcgaggcccccctgcacatggagggcaccagctgcccccagggctggccccagcacggcgagatcatcttccaggactaccacatgaagtacagagacaacacccccaccgtgctgcacggcatcaacctgaccatcagaggccacgaggtggtgggcatcgtgggcagaaccggcagcggcaagagcagcctgggcatggccctgttcagactggtggagcccatggccggcagaatcctgatcgacggcgtggacatctgcagcatcggcctggaggacctgagaagcaagctgagcgtgatcccccaggaccccgtgctgctgagcggcaccatcagattcaacctggaccccttcgacagacacaccgaccagcagatctgggacgccctggagagaaccttcctgaccaaggccatcatcctgatcgacgaggccaccgccagcatcgacatggagaccgacaccctgatccagagaaccatcagagaggccttccagggctgcaccgtgctggtgatcgcccacagagtgaccaccgtgctgaactgcgaccacatcctggtgatgggcaacggcaaggtggtggagttcgacagacccgaggtgctgagaaagaagcccggcagcctgttcgccgccctgatggccaccgccaccagcagcctgagatag

SEQ ID NO: 73806 - DNA, 4149 bp, synthetic construct
  misc_feature 1..4149: note = Description of Artificial Sequence: Synthetic coding sequence
  source 1..4149: mol_type = other DNA
atgaccagaaagagaacctactgggtgcccaacagcagcggcggcctggtgaacagaggcatcgacatcggcgacgacatggtgagcggcctgatctacaagacctacaccctgcaggacggcccctggagccagcaggagagaaaccccgaggcccccggcagagccgccgtgcccccctggggcaagtacgacgccgccctgagaaccatgatccccttcagacccaagcccagattccccgccccccagcccctggacaacgccggcctgttcagctacctgaccgtgagctggctgacccccctgatgatccagagcctgagaagcagactggacgagaacaccatcccccccctgagcgtgcacgacgccagcgacaagaacgtgcagagactgcacagactgtgggaggaggaggtgagcagaagaggcatcgagaaggccagcgtgctgctggtgatgctgagattccagagaaccagactgatcttcgacgccctgctgggcatctgcttctgcatcgccagcgtgctgggccccatcctgatcatccccaagatcctggagtacagcgaggagcagctgggcaacgtggtgcacggcgtgggcctgtgcttcgccctgttcctgagcgagtgcgtgaagagcctgagcttcagcagcagctggatcatcaaccagagaaccgccatcagattcagagccgccgtgagcagcttcgccttcgagaagctgatccagttcaagagcgtgatccacatcaccagcggcgaggccatcagcttcttcaccggcgacgtgaactacctgttcgagggcgtgtgctacggccccctggtgctgatcacctgcgccagcctggtgatctgcagcatcagcagctacttcatcatcggctacaccgccttcatcgccatcctgtgctacctgctggtgttccccctggccgtgttcatgaccagaatggccgtgaaggcccagcaccacaccagcgaggtgagcgaccagagaatcagagtgaccagcgaggtgctgacctgcatcaagctgatcaagatgtacacctgggagaagcccttcgccaagatcatcgaggacctgagaagaaaggagagaaagctgctggagaagtgcggcctggtgcagagcctgaccagcatcaccctgttcatcatccccaccgtggccaccgccgtgtgggtgctgatccacaccagcctgaagctgaagctgaccgccagcatggccttcagcatgctggccagcctgaacctgctgagactgagcgtgttcttcgtgcccatcgccgtgaagggcctgaccaacagcaagagcgccgtgatgagattcaagaagttcttcctgcaggagagccccgtgttctacgtgcagaccctgcaggaccccagcaaggccctggtgttcgaggaggccaccctgagctggcagcagacctgccccggcatcgtgaacggcgccctggagctggagagaaacggccacgccagcgagggcatgaccagacccagagacgccctgggccccgaggaggagggcaacagcctgggccccgagctgcacaagatcaacctggtggtgagcaagggcatgatgctgggcgtgtgcggcaacaccggcagcggcaagagcagcctgctgagcgccatcctggaggagatgcacctgctggagggcagcgtgggcgtgcagggcagcctggcctacgtgccccagcaggcctggatcgtgagcggcaacatcagagagaacatcctgatgggcggcgcctacgacaaggccagatacctgcaggtgctgcactgctgcagcctgaacagagacctggagctgctgcccttcggcgacatgaccgagatcggcgagagaggcctgaacctgagcggcggccagaagcagagaatcagcctggccagagccgtgtacagcgacagacagatctacctgctggacgaccccctgagcgccgtggacgcccacgtgggcaagcacatcttcgaggagtgcatcaagaagaccctgagaggcaagaccgtggtgctggtgacccaccagctgcagtacctggagttctgcggccagatcatcctgctggagaacggcaagatctgcgagaacggcacccacagcgagctgatgcagaagaagggcaagtacgcccagctgatccagaagatgcacaaggaggccaccagcgacatgctgcaggacaccgccaagatcgccgagaagcccaaggtggagagccaggccctggccaccagcctggaggagagcctgaacggcaacgccgtgcccgagcaccagctgacccaggaggaggagatggaggagggcagcctgagctggagagtgtaccaccactacatccaggccgccggcggctacatggtgagctgcatcatcttcttcttcgtggtgctgatcgtgttcctgaccatcttcagcttctggtggctgagctactggctggagcagggcagcggcaccaacagcagcagagagagcaacggcaccatggccgacctgggcaacatcgccgacaacccccagctgagcttctaccagctggtgtacggcctgaacgccctgctgctgatctgcgtgggcgtgtgcagcagcggcatcttcaccaaggtgaccagaaaggccagcaccgccctgcacaacaagctgttcaacaaggtgttcagatgccccatgagcttcttcgacaccatccccatcggcagactgctgaactgcttcgccggcgacctggagcagctggaccagctgctgcccatcttcagcgagcagttcctggtgctgagcctgatggtgatcgccgtgctgctgatcgtgagcgtgctgagcccctacatcctgctgatgggcgccatcatcatggtgatctgcttcatctactacatgatgttcaagaaggccatcggcgtgttcaagagactggagaactacagcagaagccccctgttcagccacatcctgaacagcctgcagggcctgagcagcatccacgtgtacggcaagaccgaggacttcatcagccagttcaagagactgaccgacgcccagaacaactacctgctgctgttcctgagcagcaccagatggatggccctgagactggagatcatgaccaacctggtgaccctggccgtggccctgttcgtggccttcggcatcagcagcaccccctacagcttcaaggtgatggccgtgaacatcgtgctgcagctggccagcagcttccaggccaccgccagaatcggcctggagaccgaggcccagttcaccgccgtggagagaatcctgcagtacatgaagatgtgcgtgagcgaggcccccctgcacatggagggcaccagctgcccccagggctggccccagcacggcgagatcatcttccaggactaccacatgaagtacagagacaacacccccaccgtgctgcacggcatcaacctgaccatcagaggccacgaggtggtgggcatcgtgggcagaaccggcagcggcaagagcagcctgggcatggccctgttcagactggtggagcccatggccggcagaatcctgatcgacggcgtggacatctgcagcatcggcctggaggacctgagaagcaagctgagcgtgatcccccaggaccccgtgctgctgagcggcaccatcagattcaacctggaccccttcgacagacacaccgaccagcagatctgggacgccctggagagaaccttcctgaccaaggccatcagcaagttccccaagaagctgcacaccgacgtggtggagaacggcggcaacttcagcgtgggcgagagacagctgctgtgcatcgccagagccgtgctgagaaacagcaagatcatcctgatcgacgaggccaccgccagcatcgacatggagaccgacaccctgatccagagaaccatcagagaggccttccagggctgcaccgtgctggtgatcgcccacagagtgaccaccgtgctgaactgcgaccacatcctggtgatgggcaacggcaaggtggtggagttcgacagacccgaggtgctgagaaagaagcccggcagcctgttcgccgccctgatggccaccgccaccagcagcctgagatag

SEQ ID NO: 73807 - DNA, 4149 bp, synthetic construct; identical to SEQ ID NO: 73806
  misc_feature 1..4149: note = Description of Artificial Sequence: Synthetic coding sequence
  source 1..4149: mol_type = other DNA

SEQ ID NO: 73808 - DNA, 4149 bp, synthetic construct; identical to SEQ ID NO: 73806
  misc_feature 1..4149: note = Description of Artificial Sequence: Synthetic coding sequence
  source 1..4149: mol_type = other DNA

SEQ ID NO: 73809 - DNA, 2268 bp, synthetic construct
  misc_feature 1..2268: note = Description of Artificial Sequence: Synthetic coding sequence
  source 1..2268: mol_type = other DNA
atgaccagaaagagaacctactgggtgcccaacagcagcggcggcctggtgaacagaggcatcgacatcggcgacgacatggtgagcggcctgatctacaagacctacaccctgcaggacggcccctggagccagcaggagagaaaccccgaggcccccggcagagccgccgtgcccccctggggcaagtacgacgccgccctgagaaccatgatccccttcagacccaagcccagattccccgccccccagcccctggacaacgccggcctgttcagctacctgaccgtgagctggctgacccccctgatgatccagagcctgagaagcagactggacgagaacaccatcccccccctgagcgtgcacgacgccagcgacaagaacgtgcagagactgcacagactgtgggaggaggaggtgagcagaagaggcatcgagaaggccagcgtgctgctggtgatgctgagattccagagaaccagactgatcttcgacgccctgctgggcatctgcttctgcatcgccagcgtgctgggccccatcctgatcatccccaagatcctggagtacagcgaggagcagctgggcaacgtggtgcacggcgtgggcctgtgcttcgccctgttcctgagcgagtgcgtgaagagcctgagcttcagcagcagctggatcatcaaccagagaaccgccatcagattcagagccgccgtgagcagcttcgccttcgagaagctgatccagttcaagagcgtgatccacatcaccagcggcgaggccatcagcttcttcaccggcgacgtgaactacctgttcgagggcgtgtgctacggccccctggtgctgatcacctgcgccagcctggtgatctgcagcatcagcagctacttcatcatcggctacaccgccttcatcgccatcctgtgctacctgctggtgttccccctggccgtgttcatgaccagaatggccgtgaaggcccagcaccacaccagcgaggtgagcgaccagagaatcagagtgaccagcgaggtgctgacctgcatcaagctgatcaagatgtacacctgggagaagcccttcgccaagatcatcgaggacctgagaagaaaggagagaaagctgctggagaagtgcggcctggtgcagagcctgaccagcatcaccctgttcatcatccccaccgtggccaccgccgtgtgggtgctgatccacaccagcctgaagctgaagctgaccgccagcatggccttcagcatgctggccagcctgaacctgctgagactgagcgtgttcttcgtgcccatcgccgtgaagggcctgaccaacagcaagagcgccgtgatgagattcaagaagttcttcctgcaggagagccccgtgttctacgtgcagaccctgcaggaccccagcaaggccctggtgttcgaggaggccaccctgagctggcagcagacctgccccggcatcgtgaacggcgccctggagctggagagaaacggccacgccagcgagggcatgaccagacccagagacgccctgggccccgaggaggagggcaacagcctgggccccgagctgcacaagatcaacctggtggtgagcaagggcatgatgctgggcgtgtgcggcaacaccggcagcggcaagagcagcctgctgagcgccatcctggaggagatgcacctgctggagggcagcgtgggcgtgcagggcagcctggcctacgtgccccagcaggcctggatcgtgagcggcaacatcagagagaacatcctgatgggcggcgcctacgacaaggccagatacctgcaggtgctgcactgctgcagcctgaacagagacctggagctgctgcccttcggcgacatgaccgagatcggcgagagaggcctgaacctgagcggcggccagaagcagagaatcagcctggccagagccgtgtacagcgacagacagatctacctgctggacgaccccctgagcgccgtggacgcccacgtgggcaagcacatcttcgaggagtgcatcaagaagaccctgagaggcaagaccgtggtgctggtgacccaccagctgcagtacctggagttctgcggccagatcatcctgctggagaacggcaagatctgcgagaacggcacccacagcgagctgatgcagaagaagggcaagtacgcccagctgatccagaagatgcacaaggaggccaccagctgcagaagcatcagcagccacagaagaagaagatggaagaaggccccctag

SEQ ID NO: 73810 - DNA, 4080 bp, synthetic construct
  misc_feature 1..4080: note = Description of Artificial Sequence: Synthetic coding sequence
  source 1..4080: mol_type = other DNA
atggtgggcgagggcccctacctgatcagcgacctggaccagagaggcagaagaagaagcttcgccgagagatacgaccccagcctgaagaccatgatccccgtgagaccctgcgccagactggcccccaaccccgtggacgacgccggcctgctgagcttcgccaccttcagctggctgacccccgtgatggtgaagggctacagacagagactgaccgtggacaccctgccccccctgagcacctacgacagcagcgacaccaacgccaagagattcagagtgctgtgggacgaggaggtggccagagtgggccccgagaaggccagcctgagccacgtggtgtggaagttccagagaaccagagtgctgatggacatcgtggccaacatcctgtgcatcatcatggccgccatcggccccgtgatcctgatccaccagatcctgcagcagaccgagagaaccagcggcaaggtgtgggtgggcatcggcctgtgcatcgccctgttcgccaccgagttcaccaaggtgttcttctgggccctggcctgggccatcaactacagaaccgccatcagactgaaggtggccctgagcaccctggtgttcgagaacctggtgagcttcaagaccctgacccacatcagcgtgggcgaggtgctgaacatcctgagcagcgacagctacagcctgttcgaggccgccctgttctgccccctgcccgccaccatccccatcctgatggtgttctgcgccgcctacgccttcttcatcctgggccccaccgccctgatcggcatcagcgtgtacgtgatcttcatccccgtgcagatgttcatggccaagctgaacagcgccttcagaagaagcgccatcctggtgaccgacaagagagtgcagaccatgaacgagttcctgacctgcatcagactgatcaagatgtacgcctgggagaagagcttcaccaacaccatccaggacatcagaagaagagagagaaagctgctggagaaggccggcttcgtgcagagcggcaacagcgccctggcccccatcgtgagcaccatcgccatcgtgctgaccctgagctgccacatcctgctgagaagaaagctgaccgcccccgtggccttcagcgtgatcgccatgttcaacgtgatgaagttcagcatcgccatcctgcccttcagcatcaaggccatggccgaggccaacgtgagcctgagaagaatgaagaagatcctgatcgacaagagcccccccagctacatcacccagcccgaggaccccgacaccgtgctgctgctggccaacgccaccctgacctgggagcacgaggccagcagaaagagcacccccaagaagctgcagaaccagaagagacacctgtgcaagaagcagagaagcgaggcctacagcgagagaagcccccccgccaagggcgccaccggccccgaggagcagagcgacagcctgaagagcgtgctgcacagcatcagcttcgtggtgagaaagggcaagatcctgggcatctgcggcaacgtgggcagcggcaagagcagcctgctggccgccctgctgggccagatgcagctgcagaagggcgtggtggccgtgaacggcaccctggcctacgtgagccagcaggcctggatcttccacggcaacgtgagagagaacatcctgttcggcgagaagtacgaccaccagagataccagcacaccgtgagagtgtgcggcctgcagaaggacctgagcaacctgccctacggcgacctgaccgagatcggcgagagaggcctgaacctgagcggcggccagagacagagaatcagcctggccagagccgtgtacagcgacagacagctgtacctgctggacgaccccctgagcgccgtggacgcccacgtgggcaagcacgtgttcgaggagtgcatcaagaagaccctgagaggcaagaccgtggtgctggtgacccaccagctgcagttcctggagagctgcgacgaggtgatcctgctggaggacggcgagatctgcgagaagggcacccacaaggagctgatggaggagagaggcagatacgccaagctgatccacaacctgagaggcctgcagttcaaggaccccgagcacctgtacaacgccgccatggtggaggccttcaaggagagccccgccgagagagaggaggacgccggcatcatcgtgctggcccccggcaacgagaaggacgagggcaaggagagcgagaccggcagcgagttcgtggacaccaaggtgcccgagcaccagctgatccagaccgagagcccccaggagggcaccgtgacctggaagacctaccacacctacatcaaggccagcggcggctacctgctgagcctgttcaccgtgttcctgttcctgctgatgatcggcagcgccgccttcagcaactggtggctgggcctgtggctggacaagggcagcagaatgacctgcggcccccagggcaacagaaccatgtgcgaggtgggcgccgtgctggccgacatcggccagcacgtgtaccagtgggtgtacaccgccagcatggtgttcatgctggtgttcggcgtgaccaagggcttcgtgttcaccaagaccaccctgatggccagcagcagcctgcacgacaccgtgttcgacaagatcctgaagagccccatgagcttcttcgacaccacccccaccggcagactgatgaacagattcagcaaggacatggacgagctggacgtgagactgcccttccacgccgagaacttcctgcagcagttcttcatggtggtgttcatcctggtgatcctggccgccgtgttccccgccgtgctgctggtggtggccagcctggccgtgggcttcttcatcctgctgagaatcttccacagaggcgtgcaggagctgaagaaggtggagaacgtgagcagaagcccctggttcacccacatcaccagcagcatgcagggcctgggcatcatccacgcctacggcaagaaggagagctgcatcacctaccacctgctgtacttcaactgcgccctgagatggttcgccctgagaatggacgtgctgatgaacatcctgaccttcaccgtggccctgctggtgaccctgagcttcagcagcatcagcaccagcagcaagggcctgagcctgagctacatcatccagctgagcggcctgctgcaggtgtgcgtgagaaccggcaccgagacccaggccaagttcaccagcgtggagctgctgagagagtacatcagcacctgcgtgcccgagtgcacccaccccctgaaggtgggcacctgccccaaggactggcccagcagaggcgagatcaccttcagagactaccagatgagatacagagacaacacccccctggtgctggacagcctgaacctgaacatccagagcggccagaccgtgggcatcgtgggcagaaccggcagcggcaagagcagcctgggcatggccctgttcagactggtggagcccgccagcggcaccatcttcatcgacgaggtggacatctgcatcctgagcctggaggacctgagaaccaagctgaccgtgatcccccaggaccccgtgctgttcgtgggcaccgtgagatacaacctggaccccttcgagagccacaccgacgagatgctgtggcaggtgctggagagaaccttcatgagagacaccatcatgaagctgcccgagaagctgcaggccgaggtgaccgagaacggcgagaacttcagcgtgggcgagagacagctgctgtgcgtggccagagccctgctgagaaacagcaagatcatcctgctggacgaggccaccgccagcatggacagcaagaccgacaccctggtgcagaacaccatcaaggacgccttcaagggctgcaccgtgctgaccatcgcccacagactgaacaccgtgctgaactgcgaccacgtgctggtgatggagaacggcaaggtgatcgagttcgacaagcccgaggtgctggccgagaagcccgacagcgccttcgccatgctgctggccgccgaggtgagactgtag

SEQ ID NO: 73811 - DNA, 1902 bp, synthetic construct
  misc_feature 1..1902: note = Description of Artificial Sequence: Synthetic coding sequence
  source 1..1902: mol_type = other DNA
atggtgggcgagggcccctacctgatcagcgacctggaccagagaggcagaagaagaagcttcgccgagagatacgaccccagcctgaagaccatgatccccgtgagaccctgcgccagactggcccccaaccccgtggacgacgccggcctgctgagcttcgccaccttcagctggctgacccccgtgatggtgaagggctacagacagagactgaccgtggacaccctgccccccctgagcacctacgacagcagcgacaccaacgccaagagattcagagtgctgtgggacgaggaggtggccagagtgggccccgagaaggccagcctgagccacgtggtgtggaagttccagagaaccagagtgctgatggacatcgtggccaacatcctgtgcatcatcatggccgccatcggccccaccgtgctgatccaccagatcctgcagcagaccgagagaaccagcggcaaggtgtgggtgggcatcggcctgtgcatcgccctgttcgccaccgagttcaccaaggtgttcttctgggccctggcctgggccatcaactacagaaccgccatcagactgaaggtggccctgagcaccctggtgttcgagaacctggtgagcttcaagaccctgacccacatcagcgtgggcgaggtgctgaacatcctgagcagcgacagctacagcctgttcgaggccgccctgttctgccccctgcccgccaccatccccatcctgatggtgttctgcgccgcctacgccttcttcatcctgggccccaccgccctgatcggcatcagcgtgtacgtgatcttcatccccgtgcagatgttcatggccaagctgaacagcgccttcagaagaagcgccatcctggtgaccgacaagagagtgcagaccatgaacgagttcctgacctgcatcagactgatcaagatgtacgcctgggagaagagcttcaccaacaccatccaggacatcagaagaagagagagaaagctgctggagaaggccggcttcgtgcagagcggcaacagcgccctggcccccatcgtgagcaccatcgccatcgtgctgaccctgagctgccacatcctgctgagaagaaagctgaccgcccccgtggccttcagcgtgatcgccatgttcaacgtgatgaagttcagcatcgccatcctgcccttcagcatcaaggccatggccgaggccaacgtgagcctgagaagaatgaagaagatcctgatcgacaagagcccccccagctacatcacccagcccgaggaccccgacaccgtgctgctgctggccaacgccaccctgacctgggagcacgaggccagcagaaagagcacccccaagaagctgcagaaccagaagagacacctgtgcaagaagcagagaagcgaggcctacagcgagagaagcccccccgccaagggcgccaccggccccgaggagcagagcgacagcctgaagagcgtgctgcacagcatcagcttcgtggtgagaaagggcaagatcctgggcatctgcggcaacgtgggcagcggcaagagcagcctgctggccgccctgctgggccagatgcagctgcagaagggcgtggtggccgtgaacggcaccctggcctacgtgagccagcaggcctggatcttccacggcaacgtgagagagaacatcctgttcggcgagaagtacgaccaccagagactgggcagcggcgccagcaccagcctgggcggcagaggcagaggcctggcctggcccgccctgagcacccccaccgtgagcagcacctgctggaccaccccctgcagaccctggacccccacctggggcagcaccagcctgagaagcgccctgagaagaagaagcggcgagagacagagcagctggtag

SEQ ID NO: 73812 - DNA, 2808 bp, synthetic construct
  misc_feature 1..2808: note = Description of Artificial Sequence: Synthetic coding sequence
  source 1..2808: mol_type = other DNA
atggtgggcgagggcccctacctgatcagcgacctggaccagagaggcagaagaagaagcttcgccgagagatacgaccccagcctgaagaccatgatccccgtgagaccctgcgccagactggcccccaaccccgtggacgacgccggcctgctgagcttcgccaccttcagctggctgacccccgtgatggtgaagggctacagacagagactgaccgtggacaccctgccccccctgagcacctacgacagcagcgacaccaacgccaagagattcagagtgctgtgggacgaggaggtggccagagtgggccccgagaaggccagcctgagccacgtggtgtggaagttccagagaaccagagtgctgatggacatcgtggccaacatcctgtgcatcatcatggccgccatcggccccaccgtgctgatccaccagatcctgcagcagaccgagagaaccagcggcaaggtgtgggtgggcatcggcctgtgcatcgccctgttcgccaccgagttcaccaaggtgttcttctgggccctggcctgggccatcaactacagaaccgccatcagactgaaggtggccctgagcaccctggtgttcgagaacctggtgagcttcaagaccctgacccacatcagcgtgggcgaggtgctgaacatcctgagcagcgacagctacagcctgttcgaggccgccctgttctgccccctgcccgccaccatccccatcctgatggtgttctgcgccgcctacgccttcttcatcctgggccccaccgccctgatcggcatcagcgtgtacgtgatcttcatccccgtgcagatgttcatggccaagctgaacagcgccttcagaagaagcgccatcctggtgaccgacaagagagtgcagaccatgaacgagttcctgacctgcatcagactgatcaagatgtacgcctgggagaagagcttcaccaacaccatccaggacatcagaagaagagagagaaagctgctggagaaggccggcttcgtgcagagcggcaacagcgccctggcccccatcgtgagcaccatcgccatcgtgctgaccctgagctgccacatcctgctgagaagaaagctgaccgcccccgtggccttcagcgtgatcgccatgttcaacgtgatgaagttcagcatcgccatcctgcccttcagcatcaaggccatggccgaggccaacgtgagcctgagaagaatgaagaagatcctgatcgacaagagcccccccagctacatcacccagcccgaggaccccgacaccgtgctgctgctggccaacgccaccctgacctgggagcacgaggccagcagaaagagcacccccaagaagctgcagaaccagaagagacacctgtgcaagaagcagagaagcgaggcctacagcgagagaagcccccccgccaagggcgccaccggccccgaggagcagagcgacagcctgaagagcgtgctgcacagcatcagcttcgtggtgagaaagggcaagatcctgggcatctgcggcaacgtgggcagcggcaagagcagcctgctggccgccctgctgggccagatgcagctgcagaagggcgtggtggccgtgaacggcaccctggcctacgtgagccagcaggcctggatcttccacggcaacgtgagagagaacatcctgttcggcgagaagtacgaccaccagagataccagcacaccgtgagagtgtgcggcctgcagaaggacctgagcaacctgccctacggcgacctgaccgagatcggcgagagaggcctgaacctgagcggcggccagagacagagaatcagcctggccagagccgtgtacagcgacagacagctgtacctgctggacgaccccctgagcgccgtggacgcccacgtgggcaagcacgtgttcgaggagtgcatcaagaagaccctgagaggcaagaccgtggtgctggtgacccaccagctgcagttcctggagagctgcgacgaggtgatcctgctggaggacggcgagatctgcgagaagggcacccacaaggagctgatggaggagagaggcagatacgccaagctgatccacaacctgagaggcctgcagttcaaggaccccgagcacctgtacaacgccgccatggtggaggccttcaaggagagccccgccgagagagaggaggacgccgtgctggcccccggcaacgagaaggacgagggcaaggagagcgagaccggcagcgagttcgtggacaccaaggtgcccgagcaccagctgatccagaccgagagcccccaggagggcaccgtgacctggaagacctaccacacctacatcaaggccagcggcggctacctgctgagcctgttcaccgtgttcctgttcctgctgatgatcggcagcgccgccttcagcaactggtggctgggcctgtggctggacaagggcagcagaatgacctgcggcccccagggcaacagaaccatgtgcgaggtgggcgccgtgctggccgacatcggccagcacgtgtaccagtgggtgtacaccgccagcatggtgttcatgctggtgttcggcgtgaccaagggcttcgtgttcaccaagaccaccctgatggccagcagcagcctgcacgacaccgtgttcgacaagcacttcccccagagaagccccggcgcccaggagggcggcgagtgccagcccgtgaccctggtgcacccccaccacctgctgcacgccggccccggccaccacagcagactgtggcaggagggcgagctgcaccacctggtgtag

SEQ ID NO: 73813 - DNA, 2793 bp, synthetic construct
  misc_feature 1..2793: note = Description of Artificial Sequence: Synthetic coding sequence
  source 1..2793: mol_type = other DNA
atggtgggcgagggcccctacctgatcagcgacctggaccagagaggcagaagaagaagcttcgccgagagatacgaccccagcctgaagaccatgatccccgtgagaccctgcgccagactggcccccaaccccgtggacgacgccggcctgctgagcttcgccaccttcagctggctgacccccgtgatggtgaagggctacagacagagactgaccgtggacaccctgccccccctgagcacctacgacagcagcgacaccaacgccaagagattcagagtgctgtgggacgaggaggtggccagagtgggccccgagaaggccagcctgagccacgtggtgtggaagttccagagaaccagagtgctgatggacatcgtggccaacatcctgtgcatcatcatggccgccatcggccccaccgtgctgatccaccagatcctgcagcagaccgagagaaccagcggcaaggtgtgggtgggcatcggcctgtgcatcgccctgttcgccaccgagttcaccaaggtgttcttctgggccctggcctgggccatcaactacagaaccgccatcagactgaaggtggccctgagcaccctggtgttcgagaacctggtgagcttcaagaccctgacccacatcagcgtgggcgagatgttcatggccaagctgaacagcgccttcagaagaagcgccatcctggtgaccgacaagagagtgcagaccatgaacgagttcctgacctgcatcagactgatcaagatgtacgcctgggagaagagcttcaccaacaccatccaggacatcagaagaagagagagaaagctgctggagaaggccggcttcgtgcagagcggcaacagcgccctggcccccatcgtgagcaccatcgccatcgtgctgaccctgagctgccacatcctgctgagaagaaagctgaccgcccccgtggccttcagcgtgatcgccatgttcaacgtgatgaagttcagcatcgccatcctgcccttcagcatcaaggccatggccgaggccaacgtgagcctgagaagaatgaagaagatcctgatcgacaagagcccccccagctacatcacccagcccgaggaccccgacaccgtgctgctgctggccaacgccaccctgacctgggagcacgaggccagcagaaagagcacccccaagaagctgcagaaccagaagagacacctgtgcaagaagcagagaagcgaggcctacagcgagagaagcccccccgccaagggcgccaccggccccgaggagcagagcgacagcctgaagagcgtgctgcacagcatcagcttcgtggtgagaaagggcaagatcctgggcatctgcggcaacgtgggcagcggcaagagcagcctgctggccgccctgctgggccagatgcagctgcagaagggcgtggtggccgtgaacggcaccctggcctacgtgagccagcaggcctggatcttccacggcaacgtgagagagaacatcctgttcggcgagaagtacgaccaccagagataccagcacaccgtgagagtgtgcggcctgcagaaggacctgagcaacctgccctacggcgacctgaccgagatcggcgagagaggcctgaacctgagcggcggccagagacagagaatcagcctggccagagccgtgtacagcgacagacagctgtacctgctggacgaccccctgagcgccgtggacgcccacgtgggcaagcacgtgttcgaggagtgcatcaagaagaccctgagaggcaagaccgtggtgctggtgacccaccagctgcagttcctggagagctgcgacgaggtgatcctgctggaggacggcgagatctgcgagaagggcacccacaaggagctgatggaggagagaggcagatacgccaagctgatccacaacctgagaggcctgcagttcaaggaccccgagcacctgtacaacgccgccatggtggaggccttcaaggagagccccgccgagagagaggaggacgccggcatcatcgtgcccgagcaccagctgatccagaccgagagcccccaggagggcaccgtgacctggaagacctaccacacctacatcaaggccagcggcggctacctgctgagcctgttcaccgtgttcctgttcctgctgatgatcggcagcgccgccttcagcaactggtggctgggcctgtggctggacaagggcagcagaatgacctgcggcccccagggcaacagaaccatgtgcgaggtgggcgccgtgctggccgacatcggccagcacgtgtaccagtgggtgtacaccgccagcatggtgttcatgctggtgttcggcgtgaccaagggcttcgtgttcaccaagaccaccctgatggccagcagcagcctgcacgacaccgtgttcgacaagatcctgaagagccccatgagcttcttcgacaccacccccaccggcagactgatgaacagattcagcaaggacatggacgagctggacgtgagactgcccttccacgccgagaacttcctgcagcagttcttcatggtggtgttcatcctggtgatcctggccgccgtgttccccgccgtgctgctggtggtggccagcctggccgtgggcttcttcatcctgctgagaatcttccacagaggcgtgcaggagctgaagaaggtggagaacgtgagcagaagcccctggttcacccacatcaccagcagcatgcagggcctgggcatcatccacgcctacggcaagaaggagagctgcatcacctag

SEQ ID NO: 73814 - DNA, 321 bp, synthetic construct
  misc_feature 1..321: note = Description of Artificial Sequence: Synthetic coding sequence
  source 1..321: mol_type = other DNA
atggtgggcgagggcccctacctgatcagcgacctggaccagagaggcagaagaagaagcttcgccgagagatacgaccccagcctgaagaccatgatccccgtgagaccctgcgccagactggcccccaaccccgtggacgacgccggcctgctgagcttcgccaccttcagctggctgacccccgtgatggtgaagggctacagacagagactgaccgtggacaccctgccccccctgagcacctacgacagcagcgacaccaacgccaagagattcagagtgctgtgggacgaggaggtggccagagtgggcccctag

SEQ ID NO: 73815 - DNA, 858 bp, synthetic construct
  misc_feature 1..858: note = Description of Artificial Sequence: Synthetic coding sequence
  source 1..858: mol_type = other DNA
atggtgggcgagggcccctacctgatcagcgacctggaccagagaggcagaagaagaagcttcgccgagagatacgaccccagcctgaagaccatgatccccgtgagaccctgcgccagactggcccccaaccccgtggacgacgccggcctgctgagcttcgccaccttcagctggctgacccccgtgatggtgaagggctacagacagagactgaccgtggacaccctgccccccctgagcacctacgacagcagcgacaccaacgccaagagattcagagtgctgtgggacgaggaggtggccagagtgggccccgagaaggccagcctgagccacgtggtgtggaagttccagagaaccagagtgctgatggacatcgtggccaacatcctgtgcatcatcatggccgccatcggccccaccgtgctgatccaccagatcctgcagcagaccgagagaaccagcggcaaggtgtgggtgggcatcggcctgtgcatcgccctgttcgccaccgagttcaccaaggtgttcttctgggccctggcctgggccatcaactacagaaccgccatcagactgaaggtggccctgagcaccctggtgttcgagaacctggtgagcttcaagaccctgacccacatcagcgtgggcgaggtgctgaacatcctgagcagcgacagctacagcctgttcgaggccgccctgttctgccccctgcccgccaccatccccatcctgatggtgttctgcgccgcctacgccttcttcatcctgggccccaccgccctgatcggcatcagcgtgtgcctgtggcccagcagcatccagctgagcgagggccagcagttctggtag

SEQ ID NO: 73816 - DNA, 882 bp, synthetic construct
  misc_feature 1..882: note = Description of Artificial Sequence: Synthetic coding sequence
  source 1..882: mol_type = other DNA
atgctggagaagttctgcaacagcaccttctggaacagcagcttcctggacagccccgaggccgacctgcccctgtgcttcgagcagaccgtgctggtgtggatccccctgggctacctgtggctgctggccccctggcagctgctgcacgtgtacaagagcagaaccaagagaagcagcaccaccaagctgtacctggccaagcaggtgttcgtgggcttcctgctgatcctggccgccatcgagctggccctggtgctgaccgaggacagcggccaggccaccgtgcccgccgtgagatacaccaaccccagcctgtacctgggcacctggctgctggtgctgctgatccagtacagcagacagtggtgcgtgcagaagaacagctggttcctgagcctgttctggatcctgagcatcctgtgcggcaccttccagttccagaccctgatcagaaccctgctgcagggcgacaacagcaacctggcctacagctgcctgttcttcatcagctacggcttccagatcctgatcctgatcttcagcgccttcagcgagaacaacgagagcagcaacaaccccagcagcatcgccagcttcctgagcagcatcacctacagctggtacgacagcatcatcctgaagggctacaagagacccctgaccctggaggacgtgtgggaggtggacgaggagatgaagaccaagaccctggtgagcaagttcgagacccacatgaagagagagctgcagaaggccagaagagccctgcagagaagacaggagaagagcagccagcagaacagcggcgccagactgcccggcctgaacaagaaccagagccagagccaggacgccctggtgctggtgaccttcccctag

SEQ ID NO: 73817 - DNA, 4638 bp, synthetic construct
  misc_feature 1..4638: note = Description of Artificial Sequence: Synthetic coding sequence
  source 1..4638: mol_type = other DNA
atgctggagaagttctgcaacagcaccttctggaacagcagcttcctggacagccccgaggccgacctgcccctgtgcttcgagcagaccgtgctggtgtggatccccctgggctacctgtggctgctggccccctggcagctgctgcacgtgtacaagagcagaaccaagagaagcagcaccaccaagctgtacctggccaagcaggtgttcgtgggcttcctgctgatcctggccgccatcgagctggccctggtgctgaccgaggacagcggccaggccaccgtgcccgccgtgagatacaccaaccccagcctgtacctgggcacctggctgctggtgctgctgatccagtacagcagacagtggtgcgtgcagaagaacagctggttcctgagcctgttctggatcctgagcatcctgtgcggcaccttccagttccagaccctgatcagaaccctgctgcagggcgacaacagcaacctggcctacagctgcctgttcttcatcagctacggcttccagatcctgatcctgatcttcagcgccttcagcgagaacaacgagagcagcaacaaccccagcagcatcgccagcttcctgagcagcatcacctacagctggtacgacagcatcatcctgaagggctacaagagacccctgaccctggaggacgtgtgggaggtggacgaggagatgaagaccaagaccctggtgagcaagttcgagacccacatgaagagagagctgcagaaggccagaagagccctgcagagaagacaggagaagagcagccagcagaacagcggcgccagactgcccggcctgaacaagaaccagagccagagccaggacgccctggtgctggaggacgtggagaagaagaagaagaagagcggcaccaagaaggacgtgcccaagagctggctgatgaaggccctgttcaagaccttctacatggtgctgctgaagagcttcctgctgaagctggtgaacgacatcttcaccttcgtgagcccccagctgctgaagctgctgatcagcttcgccagcgacagagacacctacctgtggatcggctacctgtgcgccatcctgctgttcaccgccgccctgatccagagcttctgcctgcagtgctacttccagctgtgcttcaagctgggcgtgaaggtgagaaccgccatcatggccagcgtgtacaagaaggccctgaccctgagcaacctggccagaaaggagtacaccgtgggcgagaccgtgaacctgatgagcgtggacgcccagaagctgatggacgtgaccaacttcatgcacatgctgtggagcagcgtgctgcagatcgtgctgagcatcttcttcctgtggagagagctgggccccagcgtgctggccggcgtgggcgtgatggtgctggtgatccccatcaacgccatcctgagcaccaagagcaagaccatccaggtgaagaacatgaagaacaaggacaagagactgaagatcatgaacgagatcctgagcggcatcaagatcctgaagtacttcgcctgggagcccagcttcagagaccaggtgcagaacctgagaaagaaggagctgaagaacctgctggccttcagccagctgcagtgcgtggtgatcttcgtgttccagctgacccccgtgctggtgagcgtggtgaccttcagcgtgtacgtgctggtggacagcaacaacatcctggacgcccagaaggccttcaccagcatcaccctgttcaacatcctgagattccccctgagcatgctgcccatgatgatcagcagcatgctgcaggccagcgtgagcaccgagagactggagaagtacctgggcggcgacgacctggacaccagcgccatcagacacgactgcaacttcgacaaggccatgcagttcagcgaggccagcttcacctgggagcacgacagcgaggccaccgtgagagacgtgaacctggacatcatggccggccagctggtggccgtgatcggccccgtgggcagcggcaagagcagcctgatcagcgccatgctgggcgagatggagaacgtgcacggccacatcaccatcaagggcaccaccgcctacgtgccccagcagagctggatccagaacggcaccatcaaggacaacatcctgttcggcaccgagttcaacgagaagagataccagcaggtgctggaggcctgcgccctgctgcccgacctggagatgctgcccggcggcgacctggccgagatcggcgagaagggcatcaacctgagcggcggccagaagcagagaatcagcctggccagagccacctaccagaacctggacatctacctgctggacgaccccctgagcgccgtggacgcccacgtgggcaagcacatcttcaacaaggtgctgggccccaacggcctgctgaagggcaagaccagactgctggtgacccacagcatgcacttcctgccccaggtggacgagatcgtggtgctgggcaacggcaccatcgtggagaagggcagctacagcgccctgctggccaagaagggcgagttcgccaagaacctgaagaccttcctgagacacaccggccccgaggaggaggccaccgtgcacgacggcagcgaggaggaggacgacgactacggcctgatcagcagcgtggaggagatccccgaggacgccgccagcatcaccatgagaagagagaacagcttcagaagaaccctgagcagaagcagcagaagcaacggcagacacctgaagagcctgagaaacagcctgaagaccagaaacgtgaacagcctgaaggaggacgaggagctggtgaagggccagaagctgatcaagaaggagttcatcgagaccggcaaggtgaagttcagcatctacctggagtacctgcaggccatcggcctgttcagcatcttcttcatcatcctggccttcgtgatgaacagcgtggccttcatcggcagcaacctgtggctgagcgcctggaccagcgacagcaagatcttcaacagcaccgactaccccgccagccagagagacatgagagtgggcgtgtacggcgccctgggcctggcccagggcatcttcgtgttcatcgcccacttctggagcgccttcggcttcgtgcacgccagcaacatcctgcacaagcagctgctgaacaacatcctgagagcccccatgagattcttcgacaccacccccaccggcagaatcgtgaacagattcgccggcgacatcagcaccgtggacgacaccctgccccagagcctgagaagctggatcacctgcttcctgggcatcatcagcaccctggtgatgatctgcatggccacccccgtgttcaccatcatcgtgatccccctgggcatcatctacgtgagcgtgcagatgttctacgtgagcaccagcagacagctgagaagactggacagcgtgaccagaagccccatctacagccacttcagcgagaccgtgagcggcctgcccgtgatcagagccttcgagcaccagcagagattcctgaagcacaacgaggtgagaatcgacaccaaccagaagtgcgtgttcagctggatcaccagcaacagatggctggccatcagactggagctggtgggcaacctgaccgtgttcttcagcgccctgatgatggtgatctacagagacaccctgagcggcgacaccgtgggcttcgtgctgagcaacgccctgaacatcacccagaccctgaactggctggtgagaatgaccagcgagatcgagaccaacatcgtggccgtggagagaatcaccgagtacaccaaggtggagaacgaggccccctgggtgaccgacaagagacccccccccgactggcccagcaagggcaagatccagttcaacaactaccaggtgagatacagacccgagctggacctggtgctgagaggcatcacctgcgacatcggcagcatggagaagatcggcgtggtgggcagaaccggcgccggcaagagcagcctgaccaactgcctgttcagaatcctggaggccgccggcggccagatcatcatcgacggcgtggacatcgccagcatcggcctgcacgacctgagagagaagctgaccatcatcccccaggaccccatcctgttcagcggcagcctgagaatgaacctggaccccttcaacaactacagcgacgaggagatctggaaggccctggagctggcccacctgaagagcttcgtggccagcctgcagctgggcctgagccacgaggtgaccgaggccggcggcaacctgagcatcggccagagacagctgctgtgcctgggcagagccctgctgagaaagagcaagatcctggtgctggacgaggccaccgccgccgtggacctggagaccgacaacctgatccagaccaccatccagaacgagttcgcccactgcaccgtgatcaccatcgcccacagactgcacaccatcatggacagcgacaaggtgatggtgctggacaacggcaagatcatcgagtgcggcagccccgaggagctgctgcagatccccggccccttctacttcatggccaaggaggccggcatcgagaacgtgaacagcaccaagttctag

SEQ ID NO: 73818 - DNA, 4584 bp, synthetic construct
  misc_feature 1..4584: note = Description of Artificial Sequence: Synthetic coding sequence
  source 1..4584: mol_type = other DNA
atggacgccctgtgcggcagcggcgagctgggcagcaagttctgggacagcaacctgagcgtgcacaccgagaaccccgacctgaccccctgcttccagaacagcctgctggcctgggtgccctgcatctacctgtgggtggccctgccctgctacctgctgtacctgagacaccactgcagaggctacatcatcctgagccacctgagcaagctgaagatggtgctgggcgtgctgctgtggtgcgtgagctgggccgacctgttctacagcttccacggcctggtgcacggcagagcccccgcccccgtgttcttcgtgacccccctggtggtgggcgtgaccatgctgctggccaccctgctgatccagtacgagagactgcagggcgtgcagagcagcggcgtgctgatcatcttctggttcctgtgcgtggtgtgcgccatcgtgcccttcagaagcaagatcctgctggccaaggccgagggcgagatcagcgaccccttcagattcaccaccttctacatccacttcgccctggtgctgagcgccctgatcctggcctgcttcagagagaagccccccttcttcagcgccaagaacgtggaccccaacccctaccccgagaccagcgccggcttcctgagcagactgttcttctggtggttcaccaagatggccatctacggctacagacaccccctggaggagaaggacctgtggagcctgaaggaggaggacagaagccagatggtggtgcagcagctgctggaggcctggagaaagcaggagaagcagaccgccagacacaaggccagcgccgcccccggcaagaacgccagcggcgaggacgaggtgctgctgggcgccagacccagacccagaaagcccagcttcctgaaggccctgctggccaccttcggcagcagcttcctgatcagcgcctgcttcaagctgatccaggacctgctgagcttcatcaacccccagctgctgagcatcctgatcagattcatcagcaaccccatggcccccagctggtggggcttcctggtggccggcctgatgttcctgtgcagcatgatgcagagcctgatcctgcagcactactaccactacatcttcgtgaccggcgtgaagttcagaaccggcatcatgggcgtgatctacagaaaggccctggtgatcaccaacagcgtgaagagagccagcaccgtgggcgagatcgtgaacctgatgagcgtggacgcccagagattcatggacctggcccccttcctgaacctgctgtggagcgcccccctgcagatcatcctggccatctacttcctgtggcagaacctgggccccagcgtgctggccggcgtggccttcatggtgctgctgatccccctgaacggcgccgtggccgtgaagatgagagccttccaggtgaagcagatgaagctgaaggacagcagaatcaagctgatgagcgagatcctgaacggcatcaaggtgctgaagctgtacgcctgggagcccagcttcctgaagcaggtggagggcatcagacagggcgagctgcagctgctgagaaccgccgcctacctgcacaccaccaccaccttcacctggatgtgcagccccttcctggtgaccctgatcaccctgtgggtgtacgtgtacgtggaccccaacaacgtgctggacgccgagaaggccttcgtgagcgtgagcctgttcaacatcctgagactgcccctgaacatgctgccccagctgatcagcaacctgacccaggccagcgtgagcctgaagagaatccagcagttcctgagccaggaggagctggacccccagagcgtggagagaaagaccatcagccccggctacgccatcaccatccacagcggcaccttcacctgggcccaggacctgccccccaccctgcacagcctggacatccaggtgcccaagggcgccctggtggccgtggtgggccccgtgggctgcggcaagagcagcctggtgagcgccctgctgggcgagatggagaagctggagggcaaggtgcacatgaagggcagcgtggcctacgtgccccagcaggcctggatccagaactgcaccctgcaggagaacgtgctgttcggcaaggccctgaaccccaagagataccagcagaccctggaggcctgcgccctgctggccgacctggagatgctgcccggcggcgaccagaccgagatcggcgagaagggcatcaacctgagcggcggccagagacagagagtgagcctggccagagccgtgtacagcgacgccgacatcttcctgctggacgaccccctgagcgccgtggacagccacgtggccaagcacatcttcgaccacgtgatcggccccgagggcgtgctggccggcaagaccagagtgctggtgacccacggcatcagcttcctgccccagaccgacttcatcatcgtgctggccgacggccaggtgagcgagatgggcccctaccccgccctgctgcagagaaacggcagcttcgccaacttcctgtgcaactacgcccccgacgaggaccagggccacctggaggacagctggaccgccctggagggcgccgaggacaaggaggccctgctgatcgaggacaccctgagcaaccacaccgacctgaccgacaacgaccccgtgacctacgtggtgcagaagcagttcatgagacagctgagcgccctgagcagcgacggcgagggccagggcagacccgtgcccagaagacacctgggccccagcgagaaggtgcaggtgaccgaggccaaggccgacggcgccctgacccaggaggagaaggccgccatcggcaccgtggagctgagcgtgttctgggactacgccaaggccgtgggcctgtgcaccaccctggccatctgcctgctgtacgtgggccagagcgccgccgccatcggcgccaacgtgtggctgagcgcctggaccaacgacgccatggccgacagcagacagaacaacaccagcctgagactgggcgtgtacgccgccctgggcatcctgcagggcttcctggtgatgctggccgccatggccatggccgccggcggcatccaggccgccagagtgctgcaccaggccctgctgcacaacaagatcagaagcccccagagcttcttcgacaccacccccagcggcagaatcctgaactgcttcagcaaggacatctacgtggtggacgaggtgctggcccccgtgatcctgatgctgctgaacagcttcttcaacgccatcagcaccctggtggtgatcatggccagcacccccctgttcaccgtggtgatcctgcccctggccgtgctgtacaccctggtgcagagattctacgccgccaccagcagacagctgaagagactggagagcgtgagcagaagccccatctacagccacttcagcgagaccgtgaccggcgccagcgtgatcagagcctacaacagaagcagagacttcgagatcatcagcgacaccaaggtggacgccaaccagagaagctgctacccctacatcatcagcaacagatggctgagcatcggcgtggagttcgtgggcaactgcgtggtgctgttcgccgccctgttcgccgtgatcggcagaagcagcctgaaccccggcctggtgggcctgagcgtgagctacagcctgcaggtgaccttcgccctgaactggatgatcagaatgatgagcgacctggagagcaacatcgtggccgtggagagagtgaaggagtacagcaagaccgagaccgaggccccctgggtggtggagggcagcagaccccccgagggctggccccccagaggcgaggtggagttcagaaactacagcgtgagatacagacccggcctggacctggtgctgagagacctgagcctgcacgtgcacggcggcgagaaggtgggcatcgtgggcagaaccggcgccggcaagagcagcatgaccctgtgcctgttcagaatcctggaggccgccaagggcgagatcagaatcgacggcctgaacgtggccgacatcggcctgcacgacctgagaagccagctgaccatcatcccccaggaccccatcctgttcagcggcaccctgagaatgaacctggaccccttcggcagctacagcgaggaggacatctggtgggccctggagctgagccacctgcacaccttcgtgagcagccagcccgccggcctggacttccagtgcagcgagggcggcgagaacctgagcgtgggccagagacagctggtgtgcctggccagagccctgctgagaaagagcagaatcctggtgctggacgaggccaccgccgccatcgacctggagaccgacaacctgatccaggccaccatcagaacccagttcgacacctgcaccgtgctgaccatcgcccacagactgaacaccatcatggactacaccagagtgctggtgctggacaagggcgtggtggccgagttcgacagccccgccaacctgatcgccgccagaggcatcttctacggcatggccagagacgccggcctggcctag

SEQ ID NO: 73819 - DNA, 1719 bp, synthetic construct
  misc_feature 1..1719: note = Description of Artificial Sequence: Synthetic coding sequence
  source 1..1719: mol_type = other DNA
atggacgccctgtgcggcagcggcgagctgggcagcaagttctgggacagcaacctgagcgtgcacaccgagaaccccgacctgaccccctgcttccagaacagcctgctggcctgggtgccctgcatctacctgtgggtggccctgccctgctacctgctgtacctgagacaccactgcagaggctacatcatcctgagccacctgagcaagctgaagatggtgctgggcgtgctgctgtggtgcgtgagctgggccgacctgttctacagcttccacggcctggtgcacggcagagcccccgcccccgtgttcttcgtgacccccctggtggtgggcgtgaccatgctgctggccaccctgctgatccagtacgagagactgcagggcgtgcagagcagcggcgtgctgatcatcttctggttcctgtgcgtggtgtgcgccatcgtgcccttcagaagcaagatcctgctggccaaggccgagggcgagatcagcgaccccttcagattcaccaccttctacatccacttcgccctggtgctgagcgccctgatcctggcctgcttcagagagaagccccccttcttcagcgccaagaacgtggaccccaacccctaccccgagaccagcgccggcttcctgagcagactgttcttctggtggttcaccaagatggccatctacggctacagacaccccctggaggagaaggacctgtggagcctgaaggaggaggacagaagccagatggtggtgcagcagctgctggaggcctggagaaagcaggagaagcagaccgccagacacaaggccagcgccgcccccggcaagaacgccagcggcgaggacgaggtgctgctgggcgccagacccagacccagaaagcccagcttcctgaaggccctgctggccaccttcggcagcagcttcctgatcagcgcctgcttcaagctgatccaggacctgctgagcttcatcaacccccagctgctgagcatcctgatcagattcatcagcaaccccatggcccccagctggtggggcttcctggtggccggcctgatgttcctgtgcagcatgatgcagagcctgatcctgcagcactactaccactacatcttcgtgaccggcgtgaagttcagaaccggcatcatgggcgtgatctacagaaaggccctggtgatcaccaacagcgtgaagagagccagcaccgtgggcgagatcgtgaacctgatgagcgtggacgcccagagattcatggacctggcccccttcctgaacctgctgtggagcgcccccctgcagatcatcctggccatctacttcctgtggcagaacctgggccccagcgtgctggccggcgtggccttcatggtgctgctgatccccctgaacggcgccgtggccgtgaagatgagagccttccaggtgaagcagatgaagctgaaggacagcagaatcaagctgatgagcgagatcctgaacggcatcaaggtgctgaagctgtacgcctgggagcccagcttcctgaagcaggtggagggcatcagacagggcgagctgcagctgctgagaaccgccgcctacctgcacaccaccaccaccttcacctggatgtgcagccccttcctggtgagactgggcaccggcctgggcccctgcctgcagggcagcggctgccccggcatggccagagcccactggaccctgccctag

SEQ ID NO: 73820 - DNA, 3717 bp, synthetic construct
  misc_feature 1..3717: note = Description of Artificial Sequence: Synthetic coding sequence
  source 1..3717: mol_type = other DNA
atggacgccctgtgcggcagcggcgagctgggcagcaagttctgggacagcaacctgagcgtgcacaccgagaaccccgacctgaccccctgcttccagaacagcctgctggcctgggtgccctgcatctacctgtgggtggccctgccctgctacctgctgtacctgagacaccactgcagaggctacatcatcctgagccacctgagcaagctgaagatggtgctgggcgtgctgctgtggtgcgtgagctgggccgacctgttctacagcttccacggcctggtgcacggcagagcccccgcccccgtgttcttcgtgacccccctggtggtgggcgtgaccatgctgctggccaccctgctgatccagtacgagagactgcagggcgtgcagagcagcggcgtgctgatcatcttctggttcctgtgcgtggtgtgcgccatcgtgcccttcagaagcaagatcctgctggccaaggccgagggcgagatcagcgaccccttcagattcaccaccttctacatccacttcgccctggtgctgagcgccctgatcctggcctgcttcagagagaagccccccttcttcagcgccaagaacgtggaccccaacccctaccccgagaccagcgccggcttcctgagcagactgttcttctggtggttcaccaagatggccatctacggctacagacaccccctggaggagaaggacctgtggagcctgaaggaggaggacagaagccagatggtggtgcagcagctgctggaggcctggagaaagcaggagaagcagaccgccagacacaaggccagcgccgcccccggcaagaacgccagcggcgaggacgaggtgctgctgggcgccagacccagacccagaaagcccagcttcctgaaggccctgctggccaccttcggcagcagcttcctgatcagcgcctgcttcaagctgatccaggacctgctgagcttcatcaacccccagctgctgagcatcctgatcagattcatcagcaaccccatggcccccagctggtggggcttcctggtggccggcctgatgttcctgtgcagcatgatgcagagcctgatcctgcagcactactaccactacatcttcgtgaccggcgtgaagttcagaaccggcatcatgggcgtgatctacagaaaggccctggtgatcaccaacagcgtgaagagagccagcaccgtgggcgagatcgtgaacctgatgagcgtggacgcccagagattcatggacctggcccccttcctgaacctgctgtggagcgcccccctgcagatcatcctggccatctacttcctgtggcagaacctgggccccagcgtgctggccggcgtggccttcatggtgctgctgatccccctgaacggcgccgtggccgtgaagatgagagccttccaggtgaagcagatgaagctgaaggacagcagaatcaagctgatgagcgagatcctgaacggcatcaaggtgctgaagctgtacgcctgggagcccagcttcctgaagcaggtggagggcatcagacagggcgagctgcagctgctgagaaccgccgcctacctgcacaccaccaccaccttcacctggatgtgcagccccttcctggtgaccctgatcaccctgtgggtgtacgtgtacgtggaccccaacaacgtgctggacgccgagaaggccttcgtgagcgtgagcctgttcaacatcctgagactgcccctgaacatgctgccccagctgatcagcaacctgacccaggccagcgtgagcctgaagagaatccagcagttcctgagccaggaggagctggacccccagagcgtggagagaaagaccatcagccccggctacgccatcaccatccacagcggcaccttcacctgggcccaggacctgccccccaccctgcacagcctggacatccaggtgcccaagggcgccctggtggccgtggtgggccccgtgggctgcggcaagagcagcctggtgagcgccctgctgggcgagatggagaagctggagggcaaggtgcacatgaagggcagcgtggcctacgtgccccagcaggcctggatccagaactgcaccctgcaggagaacgtgctgttcggcaaggccctgaaccccaagagataccagcagaccctggaggcctgcgccctgctggccgacctggagatgctgcccggcggcgaccagaccgagatcggcgagaagggcatcaacctgagcggcggccagagacagagagtgagcctggccagagccgtgtacagcgacgccgacatcttcctgctggacgaccccctgagcgccgtggacagccacgtggccaagcacatcttcgaccacgtgatcggccccgagggcgtgctggccggcaagaccagagtgctggtgacccacggcatcagcttcctgccccagaccgacttcatcatcgtgctggccgacggccaggtgagcgagatgggcccctaccccgccctgctgcagagaaacggcagcttcgccaacttcctgtgcaactacgcccccgacgaggaccagggccacctggaggacagctggaccgccctggagggcgccgaggacaaggaggccctgctgatcgaggacaccctgagcaaccacaccgacctgaccgacaacgaccccgtgacctacgtggtgcagaagcagttcatgagacagctgagcgccctgagcagcgacggcgagggccagggcagacccgtgcccagaagacacctgggccccagcgagaaggtgcaggtgaccgaggccaaggccgacggcgccctgacccaggaggagaaggccgccatcggcaccgtggagctgagcgtgttctgggactacgccaaggccgtgggcctgtgcaccaccctggccatctgcctgctgtacgtgggccagagcgccgccgccatcggcgccaacgtgtggctgagcgcctggaccaacgacgccatggccgacagcagacagaacaacaccagcctgagactgggcgtgtacgccgccctgggcatcctgcagggcttcctggtgatgctggccgccatggccatggccgccggcggcatccaggccgccagagtgctgcaccaggccctgctgcacaacaagatcagaagcccccagagcttcttcgacaccacccccagcggcagaatcctgaactgcttcagcaaggacatctacgtggtggacgaggtgctggcccccgtgatcctgatgctgctgaacagcttcttcaacgccatcagcaccctggtggtgatcatggccagcacccccctgttcaccgtggtgatcctgcccctggccgtgctgtacaccctggtgcagagattctacgccgccaccagcagacagctgaagagactggagagcgtgagcagaagccccatctacagccacttcagcgagaccgtgaccggcgccagcgtgatcagagcctacaacagaagcagagacttcgagatcatcagcgacaccaaggtggacgccaaccagagaagctgctacccctacatcatcagcaacagaagcgaggccgccagcctggccccctgcagcagcagaaacagccagcaggccctgtggtgcagcggcagcctgagcctgctgagccccaagcagaagaccggccccgccctgcccctgccccacttcctgctgatctag

SEQ ID NO: 73821 - DNA, 3978 bp, synthetic construct
  misc_feature 1..3978: note = Description of Artificial Sequence: Synthetic coding sequence
  source 1..3978: mol_type = other DNA
atgctgcccgtgtaccaggaggtgaagcccaaccccctgcaggacgccaacctgtgcagcagagtgttcttctggtggctgaaccccctgttcaagatcggccacaagagaagactggaggaggacgacatgtacagcgtgctgcccgaggacagaagccagcacctgggcgaggagctgcagggcttctgggacaaggaggtgctgagagccgagaacgacgcccagaagcccagcctgaccagagccatcatcaagtgctactggaagagctacctggtgctgggcatcttcaccctgatcgaggagagcgccaaggtgatccagcccatcttcctgggcaagatcatcaactacttcgagaactacgaccccatggacagcgtggccctgaacaccgcctacgcctacgccaccgtgctgaccttctgcaccctgatcctggccatcctgcaccacctgtacttctaccacgtgcagtgcgccggcatgagactgagagtggccatgtgccacatgatctacagaaaggccctgagactgagcaacatggccatgggcaagaccaccaccggccagatcgtgaacctgctgagcaacgacgtgaacaagttcgaccaggtgaccgtgttcctgcacttcctgtgggccggccccctgcaggccatcgccgtgaccgccctgctgtggatggagatcggcatcagctgcctggccggcatggccgtgctgatcatcctgctgcccctgcagagctgcttcggcaagctgttcagcagcctgagaagcaagaccgccaccttcaccgacgccagaatcagaaccatgaacgaggtgatcaccggcatcagaatcatcaagatgtacgcctgggagaagagcttcagcaacctgatcaccaacctgagaaagaaggagatcagcaagatcctgagaagcagctgcctgagaggcatgaacctggccagcttcttcagcgccagcaagatcatcgtgttcgtgaccttcaccacctacgtgctgctgggcagcgtgatcaccgccagcagagtgttcgtggccgtgaccctgtacggcgccgtgagactgaccgtgaccctgttcttccccagcgccatcgagagagtgagcgaggccatcgtgagcatcagaagaatccagaccttcctgctgctggacgagatcagccagagaaacagacagctgcccagcgacggcaagaagatggtgcacgtgcaggacttcaccgccttctgggacaaggccagcgagacccccaccctgcagggcctgagcttcaccgtgagacccggcgagctgctggccgtggtgggccccgtgggcgccggcaagagcagcctgctgagcgccgtgctgggcgagctggcccccagccacggcctggtgagcgtgcacggcagaatcgcctacgtgagccagcagccctgggtgttcagcggcaccctgagaagcaacatcctgttcggcaagaagtacgagaaggagagatacgagaaggtgatcaaggcctgcgccctgaagaaggacctgcagctgctggaggacggcgacctgaccgtgatcggcgacagaggcaccaccctgagcggcggccagaaggccagagtgaacctggccagagccgtgtaccaggacgccgacatctacctgctggacgaccccctgagcgccgtggacgccgaggtgagcagacacctgttcgagctgtgcatctgccagatcctgcacgagaagatcaccatcctggtgacccaccagctgcagtacctgaaggccgccagccagatcctgatcctgaaggacggcaagatggtgcagaagggcacctacaccgagttcctgaagagcggcatcgacttcggcagcctgctgaagaaggacaacgaggagagcgagcagccccccgtgcccggcacccccaccctgagaaacagaaccttcagcgagagcagcgtgtggagccagcagagcagcagacccagcctgaaggacggcgccctggagagccaggacaccgagaacgtgcccgtgaccctgagcgaggagaacagaagcgagggcaaggtgggcttccaggcctacaagaactacttcagagccggcgcccactggatcgtgttcatcttcctgatcctgctgaacaccgccgcccaggtggcctacgtgctgcaggactggtggctgagctactgggccaacaagcagagcatgctgaacgtgaccgtgaacggcggcggcaacgtgaccgagaagctggacctgaactggtacctgggcatctacagcggcctgaccgtggccaccgtgctgttcggcatcgccagaagcctgctggtgttctacgtgctggtgaacagcagccagaccctgcacaacaagatgttcgagagcatcctgaaggcccccgtgctgttcttcgacagaaaccccatcggcagaatcctgaacagattcagcaaggacatcggccacctggacgacctgctgcccctgaccttcctggacttcatccagaccctgctgcaggtggtgggcgtggtgagcgtggccgtggccgtgatcccctggatcgccatccccctggtgcccctgggcatcatcttcatcttcctgagaagatacttcctggagaccagcagagacgtgaagagactggagagcaccaccagaagccccgtgttcagccacctgagcagcagcctgcagggcctgtggaccatcagagcctacaaggccgaggagagatgccaggagctgttcgacgcccaccaggacctgcacagcgaggcctggttcctgttcctgaccaccagcagatggttcgccgtgagactggacgccatctgcgccatgttcgtgatcatcgtggccttcggcagcctgatcctggccaagaccctggacgccggccaggtgggcctggccctgagctacgccctgaccctgatgggcatgttccagtggtgcgtgagacagagcgccgaggtggagaacatgatgatcagcgtggagagagtgatcgagtacaccgacctggagaaggaggccccctgggagtaccagaagagacccccccccgcctggccccacgagggcgtgatcatcttcgacaacgtgaacttcatgtacagccccggcggccccctggtgctgaagcacctgaccgccctgatcaagagccaggagaaggtgggcatcgtgggcagaaccggcgccggcaagagcagcctgatcagcgccctgttcagactgagcgagcccgagggcaagatctggatcgacaagatcctgaccaccgagatcggcctgcacgacctgagaaagaagatgagcatcatcccccaggagcccgtgctgttcaccggcaccatgagaaagaacctggaccccttcaacgagcacaccgacgaggagctgtggaacgccctgcaggaggtgcagctgaaggagaccatcgaggacctgcccggcaagatggacaccgagctggccgagagcggcagcaacttcagcgtgggccagagacagctggtgtgcctggccagagccatcctgagaaagaaccagatcctgatcatcgacgaggccaccgccaacgtggaccccagaaccgacgagctgatccagaagaagatcagagagaagttcgcccactgcaccgtgctgaccatcgcccacagactgaacaccatcatcgacagcgacaagatcatggtgctggacagcggcagactgaaggagtacgacgagccctacgtgctgctgcagaacaaggagagcctgttctacaagatggtgcagcagctgggcaaggccgaggccgccgccctgaccgagaccgccaagcaggtgtacttcaagagaaactacccccacatcggccacaccgaccacatggtgaccaacaccagcaacggccagcccagcaccctgaccatcttcgagaccgccctgtag

SEQ ID NO: 73822 - DNA, 3837 bp, synthetic construct
  misc_feature 1..3837: note = Description of Artificial Sequence: Synthetic coding sequence
  source 1..3837: mol_type = other DNA
atgctgcccgtgtaccaggaggtgaagcccaaccccctgcaggacgccaacctgtgcagcagagtgttcttctggtggctgaaccccctgttcaagatcggccacaagagaagactggaggaggacgacatgtacagcgtgctgcccgaggacagaagccagcacctgggcgaggagctgcagggcttctgggacaaggaggtgctgagagccgagaacgacgcccagaagcccagcctgaccagagccatcatcaagtgctactggaagagctacctggtgctgggcatcttcaccctgatcgaggagagcgccaaggtgatccagcccatcttcctgggcaagatcatcaactacttcgagaactacgaccccatggacagcgtggccctgaacaccgcctacgcctacgccaccgtgctgaccttctgcaccctgatcctggccatcctgcaccacctgtacttctaccacgtgcagtgcgccggcatgagactgagagtggccatgtgccacatgatctacagaaaggccctgagactgagcaacatggccatgggcaagaccaccaccggccagatcgtgaacctgctgagcaacgacgtgaacaagttcgaccaggtgaccgtgttcctgcacttcctgtgggccggccccctgcaggccatcgccgtgaccgccctgctgtggatggagatcggcatcagctgcctggccggcatggccgtgctgatcatcctgctgcccctgcagagctgcttcggcaagctgttcagcagcctgagaagcaagaccgccaccttcaccgacgccagaatcagaaccatgaacgaggtgatcaccggcatcagaatcatcaagatgtacgcctgggagaagagcttcagcaacctgatcaccaacctgagaaagaaggagatcagcaagatcctgagaagcagctgcctgagaggcatgaacctggccagcttcttcagcgccagcaagatcatcgtgttcgtgaccttcaccacctacgtgctgctgggcagcgtgatcaccgccagcagagtgttcgtggccgtgaccctgtacggcgccgtgagactgaccgtgaccctgttcttccccagcgccatcgagagagtgagcgaggccatcgtgagcatcagaagaatccagaccttcctgctgctggacgagatcagccagagaaacagacagctgcccagcgacggcaagaagatggtgcacgtgcaggacttcaccgccttctgggacaaggccagcgagacccccaccctgcagggcctgagcttcaccgtgagacccggcgagctgctggccgtggtgggccccgtgggcgccggcaagagcagcctgctgagcgccgtgctgggcgagctggcccccagccacggcctggtgagcgtgcacggcagaatcgcctacgtgagccagcagccctgggtgttcagcggcaccctgagaagcaacatcctgttcggcaagaagtacgagaaggagagatacgagaaggtgatcaaggcctgcgccctgaagaaggacctgcagctgctggaggacggcgacctgaccgtgatcggcgacagaggcaccaccctgagcggcggccagaaggccagagtgaacctggccagagccgtgtaccaggacgccgacatctacctgctggacgaccccctgagcgccgtggacgccgaggtgagcagacacctgttcgagctgtgcatctgccagatcctgcacgagaagatcaccatcctggtgacccaccagctgcagtacctgaaggccgccagccagatcctgatcctgaaggacggcaagatggtgcagaagggcacctacaccgagttcctgaagagcggcatcgacttcggcagcctgctgaagaaggacaacgaggagagcgagcagccccccgtgcccggcacccccaccctgagaaacagaaccttcagcgagagcagcgtgtggagccagcagagcagcagacccagcctgaaggacggcgccctggagagccaggacgtggcctacgtgctgcaggactggtggctgagctactgggccaacaagcagagcatgctgaacgtgaccgtgaacggcggcggcaacgtgaccgagaagctggacctgaactggtacctgggcatctacagcggcctgaccgtggccaccgtgctgttcggcatcgccagaagcctgctggtgttctacgtgctggtgaacagcagccagaccctgcacaacaagatgttcgagagcatcctgaaggcccccgtgctgttcttcgacagaaaccccatcggcagaatcctgaacagattcagcaaggacatcggccacctggacgacctgctgcccctgaccttcctggacttcatccagaccctgctgcaggtggtgggcgtggtgagcgtggccgtggccgtgatcccctggatcgccatccccctggtgcccctgggcatcatcttcatcttcctgagaagatacttcctggagaccagcagagacgtgaagagactggagagcaccaccagaagccccgtgttcagccacctgagcagcagcctgcagggcctgtggaccatcagagcctacaaggccgaggagagatgccaggagctgttcgacgcccaccaggacctgcacagcgaggcctggttcctgttcctgaccaccagcagatggttcgccgtgagactggacgccatctgcgccatgttcgtgatcatcgtggccttcggcagcctgatcctggccaagaccctggacgccggccaggtgggcctggccctgagctacgccctgaccctgatgggcatgttccagtggtgcgtgagacagagcgccgaggtggagaacatgatgatcagcgtggagagagtgatcgagtacaccgacctggagaaggaggccccctgggagtaccagaagagacccccccccgcctggccccacgagggcgtgatcatcttcgacaacgtgaacttcatgtacagccccggcggccccctggtgctgaagcacctgaccgccctgatcaagagccaggagaaggtgggcatcgtgggcagaaccggcgccggcaagagcagcctgatcagcgccctgttcagactgagcgagcccgagggcaagatctggatcgacaagatcctgaccaccgagatcggcctgcacgacctgagaaagaagatgagcatcatcccccaggagcccgtgctgttcaccggcaccatgagaaagaacctggaccccttcaacgagcacaccgacgaggagctgtggaacgccctgcaggaggtgcagctgaaggagaccatcgaggacctgcccggcaagatggacaccgagctggccgagagcggcagcaacttcagcgtgggccagagacagctggtgtgcctggccagagccatcctgagaaagaaccagatcctgatcatcgacgaggccaccgccaacgtggaccccagaaccgacgagctgatccagaagaagatcagagagaagttcgcccactgcaccgtgctgaccatcgcccacagactgaacaccatcatcgacagcgacaagatcatggtgctggacagcggcagactgaaggagtacgacgagccctacgtgctgctgcagaacaaggagagcctgttctacaagatggtgcagcagctgggcaaggccgaggccgccgccctgaccgagaccgccaagcaggtgtacttcaagagaaactacccccacatcggccacaccgaccacatggtgaccaacaccagcaacggccagcccagcaccctgaccatcttcgagaccgccctgtag

SEQ ID NO: 73823 - DNA, 2580 bp, synthetic construct
  misc_feature 1..2580: note = Description of Artificial Sequence: Synthetic coding sequence
  source 1..2580: mol_type = other DNA
atgctgcccgtgtaccaggaggtgaagcccaaccccctgcaggacgccaacctgtgcagcagagtgttcttctggtggctgaaccccctgttcaagatcggccacaagagaagactggaggaggacgacatgtacagcgtgctgcccgaggacagaagccagcacctgggcgaggagctgcagggcttctgggacaaggaggtgctgagagccgagaacgacgcccagaagcccagcctgaccagagccatcatcaagtgctactggaagagctacctggtgctgggcatcttcaccctgatcgaggagagcgccaaggtgatccagcccatcttcctgggcaagatcatcaactacttcgagaactacgaccccatggacagcgtggccctgaacaccgcctacgcctacgccaccgtgctgaccttctgcaccctgatcctggccatcctgcaccacctgtacttctaccacgtgcagtgcgccggcatgagactgagagtggccatgtgccacatgatctacagaaaggccctgagactgagcaacatggccatgggcaagaccaccaccggccagatcgtgaacctgctgagcaacgacgtgaacaagttcgaccaggtgaccgtgttcctgcacttcctgtgggccggccccctgcaggccatcgccgtgaccgccctgctgtggatggagatcggcatcagctgcctggccggcatggccgtgctgatcatcctgctgcccctgcagagctgcttcggcaagctgttcagcagcctgagaagcaagaccgccaccttcaccgacgccagaatcagaaccatgaacgaggtgatcaccggcatcagaatcatcaagatgtacgcctgggagaagagcttcagcaacctgatcaccaacctgagaaagaaggagatcagcaagatcctgagaagcagctgcctgagaggcatgaacctggccagcttcttcagcgccagcaagatcatcgtgttcgtgaccttcaccacctacgtgctgctgggcagcgtgatcaccgccagcagagtgttcgtggccgtgaccctgtacggcgccgtgagactgaccgtgaccctgttcttccccagcgccatcgagagagtgagcgaggccatcgtgagcatcagaagaatccagaccttcctgctgctggacgagatcagccagagaaacagacagctgcccagcgacggcaagaagatggtgcacgtgcaggacttcaccgccttctgggacaaggccagcgagacccccaccctgcagggcctgagcttcaccgtgagacccggcgagctgctggccgtggtgggccccgtgggcgccggcaagagcagcctgctgagcgccgtgctgggcgagctggcccccagccacggcctggtgagcgtgcacggcagaatcgcctacgtgagccagcagccctgggtgttcagcggcaccctgagaagcaacatcctgttcggcaagaagtacgagaaggagagatacgagaaggtgatcaaggcctgcgccctgaagaaggacctgcagctgctggaggacggcgacctgaccgtgatcggcgacagaggcaccaccctgagcggcggccagaaggccagagtgaacctggccagagccgtgtaccaggacgccgacatctacctgctggacgaccccctgagcgccgtggacgccgaggtgagcagacacctgttcgagctgtgcatctgccagatcctgcacgagaagatcaccatcctggtgacccaccagctgcagtacctgaaggccgccagccagatcctgatcctgaaggacggcaagatggtgcagaagggcacctacaccgagttcctgaagagcggcatcgacttcggcagcctgctgaagaaggacaacgaggagagcgagcagccccccgtgcccggcacccccaccctgagaaacagaaccttcagcgagagcagcgtgtggagccagcagagcagcagacccagcctgaaggacggcgccctggagagccaggacaccgagaacgtgcccgtgaccctgagcgaggagaacagaagcgagggcaaggtgggcttccaggcctacaagaactacttcagagccggcgcccactggatcgtgttcatcttcctgatcctgctgaacaccgccgcccaggtggcctacgtgctgcaggactggtggctgagctactgggccaacaagcagagcatgctgaacgtgaccgtgaacggcggcggcaacgtgaccgagaagctggacctgaactggtacctgggcatctacagcggcctgaccgtggccaccgtgctgttcggcatcgccagaagcctgctggtgttctacgtgctggtgaacagcagccagaccctgcacaacaagatgttcgagagcatcctgaaggcccccgtgctgttcttcgacagaaaccccatcggcagaatcctgaacagattcagcaaggacatcggccacctggacgacctgctgcccctgaccttcctggacttcatccagagatgggacctggccgtgctgagctggctggtgagcaacagctag

SEQ ID NO: 73824 - DNA, 2355 bp, synthetic construct
  misc_feature 1..2355: note = Description of Artificial Sequence: Synthetic coding sequence
  source 1..2355: mol_type = other DNA
atgctgcccgtgtaccaggaggtgaagcccaaccccctgcaggacgccaacctgtgcagcagagtgttcttctggtggctgaaccccctgttcaagatcggccacaagagaagactggaggaggacgacatgtacagcgtgctgcccgaggacagaagccagcacctgggcgaggagctgcagggcttctgggacaaggaggtgctgagagccgagaacgacgcccagaagcccagcctgaccagagccatcatcaagtgctactggaagagctacctggtgctgggcatcttcaccctgatcgaggccctgagactgagcaacatggccatgggcaagaccaccaccggccagatcgtgaacctgctgagcaacgacgtgaacaagttcgaccaggtgaccgtgttcctgcacttcctgtgggccggccccctgcaggccatcgccgtgaccgccctgctgtggatggagatcggcatcagctgcctggccggcatggccgtgctgatcatcctgctgcccctgcagagctgcttcggcaagctgttcagcagcctgagaagcaagaccgccaccttcaccgacgccagaatcagaaccatgaacgaggtgatcaccggcatcagaatcatcaagatgtacgcctgggagaagagcttcagcaacctgatcaccaacctgagaaagaaggagatcagcaagatcctgagaagcagctgcctgagaggcatgaacctggccagcttcttcagcgccagcaagatcatcgtgttcgtgaccttcaccacctacgtgctgctgggcagcgtgatcaccgccagcagagtgttcgtggccgtgaccctgtacggcgccgtgagactgaccgtgaccctgttcttccccagcgccatcgagagagtgagcgaggccatcgtgagcatcagaagaatccagaccttcctgctgctggacgagatcagccagagaaacagacagctgcccagcgacggcaagaagatggtgcacgtgcaggacttcaccgccttctgggacaaggccagcgagacccccaccctgcagggcctgagcttcaccgtgagacccggcgagctgctggccgtggtgggccccgtgggcgccggcaagagcagcctgctgagcgccgtgctgggcgagctggcccccagccacggcctggtgagcgtgcacggcagaatcgcctacgtgagccagcagccctgggtgttcagcggcaccctgagaagcaacatcctgttcggcaagaagtacgagaaggagagatacgagaaggtgatcaaggcctgcgccctgaagaaggacctgcagctgctggaggacggcgacctgaccgtgatcggcgacagaggcaccaccctgagcggcggccagaaggccagagtgaacctggccagagccgtgtaccaggacgccgacatctacctgctggacgaccccctgagcgccgtggacgccgaggtgagcagacacctgttcgagctgtgcatctgccagatcctgcacgagaagatcaccatcctggtgacccaccagctgcagtacctgaaggccgccagccagatcctgatcctgaaggacggcaagatggtgcagaagggcacctacaccgagttcctgaagagcggcatcgacttcggcagcctgctgaagaaggacaacgaggagagcgagcagccccccgtgcccggcacccccaccctgagaaacagaaccttcagcgagagcagcgtgtggagccagcagagcagcagacccagcctgaaggacggcgccctggagagccaggacaccgagaacgtgcccgtgaccctgagcgaggagaacagaagcgagggcaaggtgggcttccaggcctacaagaactacttcagagccggcgcccactggatcgtgttcatcttcctgatcctgctgaacaccgccgcccaggtggcctacgtgctgcaggactggtggctgagctactgggccaacaagcagagcatgctgaacgtgaccgtgaacggcggcggcaacgtgaccgagaagctggacctgaactggtacctgggcatctacagcggcctgaccgtggccaccgtgctgttcggcatcgccagaagcctgctggtgttctacgtgctggtgaacagcagccagaccctgcacaacaagatgttcgagagcatcctgaaggcccccgtgctgttcttcgacagaaaccccatcggcagaatcctgaacagattcagcaaggacatcggccacctggacgacctgctgcccctgaccttcctggacttcatccagagatgggacctggccgtgctgagctggctggtgagcaacagctag

SEQ ID NO: 73825 - DNA, 75 bp, synthetic construct
  misc_feature 1..75: note = Description of Artificial Sequence: Synthetic coding sequence
  source 1..75: mol_type = other DNA
atgctgcccgtgtaccaggaggtgaagcccaaccccctgcaggacgccaacctgtgcagcagagtgttcttctag

SEQ ID NO: 73826 - DNA, 4185 bp, synthetic construct
  misc_feature 1..4185: note = Description of Artificial Sequence: Synthetic coding sequence
  source 1..4185: mol_type = other DNA
atgaaggacatcgacatcggcaaggagtacatcatccccagccccggctacagaagcgtgagagagagaaccagcaccagcggcacccacagagacagagaggacagcaagttcagaagaaccagacccctggagtgccaggacgccctggagaccgccgccagagccgagggcctgagcctggacgccagcatgcacagccagctgagaatcctggacgaggagcaccccaagggcaagtaccaccacggcctgagcgccctgaagcccatcagaaccaccagcaagcaccagcaccccgtggacaacgccggcctgttcagctgcatgaccttcagctggctgagcagcctggccagagtggcccacaagaagggcgagctgagcatggaggacgtgtggagcctgagcaagcacgagagcagcgacgtgaactgcagaagactggagagactgtggcaggaggagctgaacgaggtgggccccgacgccgccagcctgagaagagtggtgtggatcttctgcagaaccagactgatcctgagcatcgtgtgcctgatgatcacccagctggccggcttcagcggccccgccttcatggtgaagcacctgctggagtacacccaggccaccgagagcaacctgcagtacagcctgctgctggtgctgggcctgctgctgaccgagatcgtgagaagctggagcctggccctgacctgggccctgaactacagaaccggcgtgagactgagaggcgccatcctgaccatggccttcaagaagatcctgaagctgaagaacatcaaggagaagagcctgggcgagctgatcaacatctgcagcaacgacggccagagaatgttcgaggccgccgccgtgggcagcctgctggccggcggccccgtggtggccatcctgggcatgatctacaacgtgatcatcctgggccccaccggcttcctgggcagcgccgtgttcatcctgttctaccccgccatgatgttcgccagcagactgaccgcctacttcagaagaaagtgcgtggccgccaccgacgagagagtgcagaagatgaacgaggtgctgacctacatcaagttcatcaagatgtacgcctgggtgaaggccttcagccagagcgtgcagaagatcagagaggaggagagaagaatcctggagaaggccggctacttccagagcatcaccgtgggcgtggcccccatcgtggtggtgatcgccagcgtggtgaccttcagcgtgcacatgaccctgggcttcgacctgaccgccgcccaggccttcaccgtggtgaccgtgttcaacagcatgaccttcgccctgaaggtgacccccttcagcgtgaagagcctgagcgaggccagcgtggccgtggacagattcaagagcctgttcctgatggaggaggtgcacatgatcaagaacaagcccgccagcccccacatcaagatcgagatgaagaacgccaccctggcctgggacagcagccacagcagcatccagaacagccccaagctgacccccaagatgaagaaggacaagagagccagcagaggcaagaaggagaaggtgagacagctgcagagaaccgagcaccaggccgtgctggccgagcagaagggccacctgctgctggacagcgacgagagacccagccccgaggaggaggagggcaagcacatccacctgggccacctgagactgcagagaaccctgcacagcatcgacctggagatccaggagggcaagctggtgggcatctgcggcagcgtgggcagcggcaagaccagcctgatcagcgccatcctgggccagatgaccctgctggagggcagcatcgccatcagcggcaccttcgcctacgtggcccagcaggcctggatcctgaacgccaccctgagagacaacatcctgttcggcaaggagtacgacgaggagagatacaacagcgtgctgaacagctgctgcctgagacccgacctggccatcctgcccagcagcgacctgaccgagatcggcgagagaggcgccaacctgagcggcggccagagacagagaatcagcctggccagagccctgtacagcgacagaagcatctacatcctggacgaccccctgagcgccctggacgcccacgtgggcaaccacatcttcaacagcgccatcagaaagcacctgaagagcaagaccgtgctgttcgtgacccaccagctgcagtacctggtggactgcgacgaggtgatcttcatgaaggagggctgcatcaccgagagaggcacccacgaggagctgatgaacctgaacggcgactacgccaccatcttcaacaacctgctgctgggcgagaccccccccgtggagatcaacagcaagaaggagaccagcggcagccagaagaagagccaggacaagggccccaagaccggcagcgtgaagaaggagaaggccgtgaagcccgaggagggccagctggtgcagctggaggagaagggccagggcagcgtgccctggagcgtgtacggcgtgtacatccaggccgccggcggccccctggccttcctggtgatcatggccctgttcatgctgaacgtgggcagcaccgccttcagcacctggtggctgagctactggatcaagcagggcagcggcaacaccaccgtgaccagaggcaacgagaccagcgtgagcgacagcatgaaggacaacccccacatgcagtactacgccagcatctacgccctgagcatggccgtgatgctgatcctgaaggccatcagaggcgtggtgttcgtgaagggcaccctgagagccagcagcagactgcacgacgagctgttcagaagaatcctgagaagccccatgaagttcttcgacaccacccccaccggcagaatcctgaacagattcagcaaggacatggacgaggtggacgtgagactgcccttccaggccgagatgttcatccagaacgtgatcctggtgttcttctgcgtgggcatgatcgccggcgtgttcccctggttcctggtggccgtgggccccctggtgatcctgttcagcgtgctgcacatcgtgagcagataccaggagctgctggacgacaaccaggcccccttcttcctgttcacctgcgccatgagatggctggccgtgagactggacctgatcagcatcgccctgatcaccaccaccggcctgatgatcgtgctgatgcacggccagatcccccccgcctacgccggcctggccatcagctacgccgtgcagctgaccggcctgttccagttcaccgtgagactggccagcgagaccgaggccagattcaccagcgtggagagaatcaaccactacatcaagaccctgagcctggaggcccccgccagaatcaagaacaaggcccccagccccgactggccccaggagggcgaggtgaccttcgagaacgccgagatgagatacagagagaacctgcccctggtgctgaagaaggtgagcttcaccatcaagcccaaggagaagatcggcatcgtgggcagaaccggcagcggcaagagcagcctgggcatggccctgttcagactggtggagctgagcggcggctgcatcaagatcgacggcgtgagaatcagcgacatcggcctggccgacctgagaagcaagctgagcatcatcccccaggagcccgtgctgttcagcggcaccgtgagaagcaacctggaccccttcaaccagtacaccgaggaccagatctgggacgccctggagagaacccacatgaaggagtgcatcgcccagctgcccctgaagctggagagcgaggtgatggagaacggcgacaacttcagcgtgggcgagagacagctgctgtgcatcgccagagccctgctgagacactgcaagatcctgatcctggacgaggccaccgccgccatggacaccgagaccgacctgctgatccaggagaccatcagagaggccttcgccgactgcaccatgctgaccatcgcccacagactgcacaccgtgctgggcagcgacagaatcatggtgctggcccagggccaggtggtggagttcgacacccccagcgtgctgctgagcaacgacagcagcagattctacgccatgttcgccgccgccgagaacaaggtggccgtgaagggctag

SEQ ID NO: 73827 - DNA, 4314 bp, synthetic construct
  misc_feature 1..4314: note = Description of Artificial Sequence: Synthetic coding sequence
  source 1..4314: mol_type = other DNA
atgaaggacatcgacatcggcaaggagtacatcatccccagccccggctacagaagcgtgagagagagaaccagcaccagcggcacccacagagacagagaggacagcaagttcagaagaaccagacccctggagtgccaggacgccctggagaccgccgccagagccgagggcctgagcctggacgccagcatgcacagccagctgagaatcctggacgaggagcaccccaagggcaagtaccaccacggcctgagcgccctgaagcccatcagaaccaccagcaagcaccagcaccccgtggacaacgccggcctgttcagctgcatgaccttcagctggctgagcagcctggccagagtggcccacaagaagggcgagctgagcatggaggacgtgtggagcctgagcaagcacgagagcagcgacgtgaactgcagaagactggagagactgtggcaggaggagctgaacgaggtgggccccgacgccgccagcctgagaagagtggtgtggatcttctgcagaaccagactgatcctgagcatcgtgtgcctgatgatcacccagctggccggcttcagcggccccgccttcatggtgaagcacctgctggagtacacccaggccaccgagagcaacctgcagtacagcctgctgctggtgctgggcctgctgctgaccgagatcgtgagaagctggagcctggccctgacctgggccctgaactacagaaccggcgtgagactgagaggcgccatcctgaccatggccttcaagaagatcctgaagctgaagaacatcaaggagaagagcctgggcgagctgatcaacatctgcagcaacgacggccagagaatgttcgaggccgccgccgtgggcagcctgctggccggcggccccgtggtggccatcctgggcatgatctacaacgtgatcatcctgggccccaccggcttcctgggcagcgccgtgttcatcctgttctaccccgccatgatgttcgccagcagactgaccgcctacttcagaagaaagtgcgtggccgccaccgacgagagagtgcagaagatgaacgaggtgctgacctacatcaagttcatcaagatgtacgcctgggtgaaggccttcagccagagcgtgcagaagatcagagaggaggagagaagaatcctggagaaggccggctacttccagagcatcaccgtgggcgtggcccccatcgtggtggtgatcgccagcgtggtgaccttcagcgtgcacatgaccctgggcttcgacctgaccgccgcccaggccttcaccgtggtgaccgtgttcaacagcatgaccttcgccctgaaggtgacccccttcagcgtgaagagcctgagcgaggccagcgtggccgtggacagattcaagagcctgttcctgatggaggaggtgcacatgatcaagaacaagcccgccagcccccacatcaagatcgagatgaagaacgccaccctggcctgggacagcagccacagcagcatccagaacagccccaagctgacccccaagatgaagaaggacaagagagccagcagaggcaagaaggagaaggtgagacagctgcagagaaccgagcaccaggccgtgctggccgagcagaagggccacctgctgctggacagcgacgagagacccagccccgaggaggaggagggcaagcacatccacctgggccacctgagactgcagagaaccctgcacagcatcgacctggagatccaggagggcaagctggtgggcatctgcggcagcgtgggcagcggcaagaccagcctgatcagcgccatcctgggccagatgaccctgctggagggcagcatcgccatcagcggcaccttcgcctacgtggcccagcaggcctggatcctgaacgccaccctgagagacaacatcctgttcggcaaggagtacgacgaggagagatacaacagcgtgctgaacagctgctgcctgagacccgacctggccatcctgcccagcagcgacctgaccgagatcggcgagagaggcgccaacctgagcggcggccagagacagagaatcagcctggccagagccctgtacagcgacagaagcatctacatcctggacgaccccctgagcgccctggacgcccacgtgggcaaccacatcttcaacagcgccatcagaaagcacctgaagagcaagaccgtgctgttcgtgacccaccagctgcagtacctggtggactgcgacgaggtgatcttcatgaaggagggctgcatcaccgagagaggcacccacgaggagctgatgaacctgaacggcgactacgccaccatcttcaacaacctgctgctgggcgagaccccccccgtggagatcaacagcaagaaggagaccagcggcagccagaagaagagccaggacaagggccccaagaccggcagcgtgaagaaggagaaggccgtgaagcccgaggagggccagctggtgcagctggaggagaagggccagggcagcgtgccctggagcgtgtacggcgtgtacatccaggccgccggcggccccctggccttcctggtgatcatggccctgttcatgctgaacgtgggcagcaccgccttcagcacctggtggctgagctactggatcaagcagggcagcggcaacaccaccgtgaccagaggcaacgagaccagcgtgagcgacagcatgaaggacaacccccacatgcagtactacgccagcatctacgccctgagcatggccgtgatgctgatcctgaaggccatcagaggcgtggtgttcgtgaagggcaccctgagagccagcagcagactgcacgacgagctgttcagaagaatcctgagaagccccatgaagttcttcgacaccacccccaccggcagaatcctgaacagattcagcaaggacatggacgaggtggacgtgagactgcccttccaggccgagatgttcatccagaacgtgatcctggtgttcttctgcgtgggcatgatcgccggcgtgttcccctggttcctggtggccgtgggccccctggtgatcctgttcagcgtgctgcacatcgtgagcagagtgctgatcagagagctgaagagactggacaacatcacccagagccccttcctgagccacatcaccagcagcatccagggcctggccaccatccacgcctacaacaagggccaggagttcctgcacagataccaggagctgctggacgacaaccaggcccccttcttcctgttcacctgcgccatgagatggctggccgtgagactggacctgatcagcatcgccctgatcaccaccaccggcctgatgatcgtgctgatgcacggccagatcccccccgcctacgccggcctggccatcagctacgccgtgcagctgaccggcctgttccagttcaccgtgagactggccagcgagaccgaggccagattcaccagcgtggagagaatcaaccactacatcaagaccctgagcctggaggcccccgccagaatcaagaacaaggcccccagccccgactggccccaggagggcgaggtgaccttcgagaacgccgagatgagatacagagagaacctgcccctggtgctgaagaaggtgagcttcaccatcaagcccaaggagaagatcggcatcgtgggcagaaccggcagcggcaagagcagcctgggcatggccctgttcagactggtggagctgagcggcggctgcatcaagatcgacggcgtgagaatcagcgacatcggcctggccgacctgagaagcaagctgagcatcatcccccaggagcccgtgctgttcagcggcaccgtgagaagcaacctggaccccttcaaccagtacaccgaggaccagatctgggacgccctggagagaacccacatgaaggagtgcatcgcccagctgcccctgaagctggagagcgaggtgatggagaacggcgacaacttcagcgtgggcgagagacagctgctgtgcatcgccagagccctgctgagacactgcaagatcctgatcctggacgaggccaccgccgccatggacaccgagaccgacctgctgatccaggagaccatcagagaggccttcgccgactgcaccatgctgaccatcgcccacagactgcacaccgtgctgggcagcgacagaatcatggtgctggcccagggccaggtggtggagttcgacacccccagcgtgctgctgagcaacgacagcagcagattctacgccatgttcgccgccgccgagaacaaggtggccgtgaagggctag

SEQ ID NO: 73828 - DNA, 627 bp, synthetic construct
  misc_feature 1..627: note = Description of Artificial Sequence: Synthetic coding sequence
  source 1..627: mol_type = other DNA
atgaaggacatcgacatcggcaaggagtacatcatccccagccccggctacagaagcgtgagagagagaaccagcaccagcggcacccacagagacagagaggacagcaagttcagaagaaccagacccctggagtgccaggacgccctggagaccgccgccagagccgagggcctgagcctggacgccagcatgcacagccagctgagaatcctggacgaggagcaccccaagggcaagtaccaccacggcctgagcgccctgaagcccatcagaaccaccagcaagcaccagcaccccgtggacaacgccggcctgttcagctgcatgaccttcagctggctgagcagcctggccagagtggcccacaagaagggcgagctgagcatggaggacgtgtggagcctgagcaagcacgagagcagcgacgtgaactgcagaagactggagagactgtggcaggaggagctgaacgaggtgggccccgacgccgccagcctgagaagagtggtgtggatcttctgcagaaccagactgatcctgagcatcgtgtgcctgatgatcacccagctggccggcttcagcggccccaacttccaggacggctgcatcctgagaagcgagtag

SEQ ID NO: 73829 - DNA, 2511 bp, synthetic construct
  misc_feature 1..2511: note = Description of Artificial Sequence: Synthetic coding sequence
  source 1..2511: mol_type = other DNA
atgcacagccagctgagaatcctggacgaggagcaccccaagggcaagtaccaccacggcctgagcgccctgaagcccatcagaaccaccagcaagcaccagcaccccgtggacaacgccggcctgttcagctgcatgaccttcagctggctgagcagcctggccagagtggcccacaagaagggcgagctgagcatggaggacgtgtggagcctgagcaagcacgagagcagcgacgtgaactgcagaagactggagagactgtggcaggaggagctgaacgaggtgggccccgacgccgccagcctgagaagagtggtgtggatcttctgcagaaccagactgatcctgagcatcgtgtgcctgatgatcacccagctggccggcttcagcggccccgccttcatggtgaagcacctgctggagtacacccaggccaccgagagcaacctgcagtacagcctgctgctggtgctgggcctgctgctgaccgagatcgtgagaagctggagcctggccctgacctgggccctgaactacagaaccggcgtgagactgagaggcgccatcctgaccatggccttcaagaagatcctgaagctgaagaacatcaaggagaagagcctgggcgagctgatcaacatctgcagcaacgacggccagagaatgttcgaggccgccgccgtgggcagcctgctggccggcggccccgtggtggccatcctgggcatgatctacaacgtgatcatcctgggccccaccggcttcctgggcagcgccgtgttcatcctgttctaccccgccatgatgttcgccagcagactgaccgcctacttcagaagaaagtgcgtggccgccaccgacgagagagtgcagaagatgaacgaggtgctgacctacatcaagttcatcaagatgtacgcctgggtgaaggccttcagccagagcgtgcagaagatcagagaggaggagagaagaatcctggagaaggccggctacttccagagcatcaccgtgggcgtggcccccatcgtggtggtgatcgccagcgtggtgaccttcagcgtgcacatgaccctgggcttcgacctgaccgccgcccaggccttcaccgtggtgaccgtgttcaacagcatgaccttcgccctgaaggtgacccccttcagcgtgaagagcctgagcgaggccagcgtggccgtggacagattcaagagcctgttcctgatggaggaggtgcacatgatcaagaacaagcccgccagcccccacatcaagatcgagatgaagaacgccaccctggcctgggacagcagccacagcagcatccagaacagccccaagctgacccccaagatgaagaaggacaagagagccagcagaggcaagaaggagaaggtgagacagctgcagagaaccgagcaccaggccgtgctggccgagcagaagggccacctgctgctggacagcgacgagagacccagccccgaggaggaggagggcaagcacatccacctgggccacctgagactgcagagaaccctgcacagcatcgacctggagatccaggagggcaagctggtgggcatctgcggcagcgtgggcagcggcaagaccagcctgatcagcgccatcctgggccagatgaccctgctggagggcagcatcgccatcagcggcaccttcgcctacgtggcccagcaggcctggatcctgaacgccaccctgagagacaacatcctgttcggcaaggagtacgacgaggagagatacaacagcgtgctgaacagctgctgcctgagacccgacctggccatcctgcccagcagcgacctgaccgagatcggcgagagaggcgccaacctgagcggcggccagagacagagaatcagcctggccagagccctgtacagcgacagaagcatctacatcctggacgaccccctgagcgccctggacgcccacgtgggcaaccacatcttcaacagcgccatcagaaagcacctgaagagcaagaccgtgctgttcgtgacccaccagctgcagtacctggtggactgcgacgaggtgatcttcatgaaggagggctgcatcaccgagagaggcacccacgaggagctgatgaacctgaacggcgactacgccaccatcttcaacaacctgctgctgggcgagaccccccccgtggagatcaacagcaagaaggagaccagcggcagccagaagaagagccaggacaagggccccaagaccggcagcgtgaagaaggagaaggccgtgaagcccgaggagggccagctggtgcagctggaggagaagggccagggcagcgtgccctggagcgtgtacggccaccccggctgctggggccccctgggcatccccggctactacggccccttccacgccgagtgcagacagcacagactgcagcacctggtggtggagctgctggaccaggccagaaagagagagcaccactgcgacagcagagagagagacctgggcgagtag

SEQ ID NO: 73830 - DNA, 678 bp, synthetic construct
  misc_feature 1..678: note = Description of Artificial Sequence: Synthetic coding sequence
  source 1..678: mol_type = other DNA
atgaaggacatcgacatcggcaaggagtacatcatccccagccccggctacagaagcgtgagagagagaaccagcaccagcggcacccacagagacagagaggacagcaagttcagaagaaccagacccctggagtgccaggacgccctggagaccgccgccagagccgagggcctgagcctggacgccagcatgcacagccagctgagaatcctggacgaggagcaccccaagggcaagtaccaccacggcctgagcgccctgaagcccatcagaaccaccagcaagcaccagcaccccgtggacaacgccggcctgttcagctgcatgaccttcagctggctgagcagcctggccagagtggcccacaagaagggcgagctgagcatggaggacgtgtggagcctgagcaagcacgagagcagcgacgtgaactgcagaagactggagagactgtggcaggaggagctgaacgaggtgggccccgacgccgccagcctgagaagagtggtgtggatcttctgcagaaccagactgatcctgagcatcgtgtgcctgatgatcacccagctggccggcttcagcggcccccccagcttcggcgactgcagcatcagcgccgaggtgtgcggcaacagactgcactgcaccgccatcctgctgagctgcttcacctag

SEQ ID NO: 73831 - DNA, 696 bp, synthetic construct
  misc_feature 1..696: note = Description of Artificial Sequence: Synthetic coding sequence
  source 1..696: mol_type = other DNA
atgaaggacatcgacatcggcaaggagtacatcatccccagccccggctacagaagcgtgagagagagaaccagcaccagcggcacccacagagacagagaggacagcaagttcagaagaaccagacccctggagtgccaggacgccctggagaccgccgccagagccgagggcctgagcctggacgccagcatgcacagccagctgagaatcctggacgaggagcaccccaagggcaagtaccaccacggcctgagcgccctgaagcccatcagaaccaccagcaagcaccagcaccccgtggacaacgccggcctgttcagctgcatgaccttcagctggctgagcagcctggccagagtggcccacaagaagggcgagctgagcatggaggacgtgtggagcctgagcaagcacgagagcagcgacgtgaactgcagaagactggagagactgtggcaggaggagctgaacgaggtgggccccgacgccgccagcctgagaagagtggtgtggatcttctgcagaaccagactgatcctgagcatcgtgtgcctgatgatcacccagctggccggcttcagcggccccgtgagcagcaaccaccccttcagacagagccccggcgccagacccagacccgccctgaccctgctgttctgctgcagaggctgcgcccagctgtgggccagatag

SEQ ID NO: 73832 - DNA, 444 bp, synthetic construct
  misc_feature 1..444: note = Description of Artificial Sequence: Synthetic coding sequence
  source 1..444: mol_type = other DNA
atgaaggacatcgacatcggcaaggagtacatcatccccagccccggctacagaagcgtgagagagagaaccagcaccagcggcacccacagagacagagaggacagcaagttcagaagaaccagacccctggagtgccaggacgccctggagaccgccgccagagccgagggcctgagcctggacgccagcatgcacagccagctgagaatcctggacgaggagcaccccaagggcaagtaccaccacggcctgagcgccctgaagcccatcagaaccaccagcaagcaccagcaccccgtggacaacgccggcctgttcagctgcatgaccttcagctggctgagcagcctggccagagtggcccacaagaagggcgagctgagcatggaggacgtgtggagcctgagcaagcacgagagcagcgacgtgaactgcagatag

SEQ ID NO: 73833 - DNA, 639 bp, synthetic construct
  misc_feature 1..639: note = Description of Artificial Sequence: Synthetic coding sequence
  source 1..639: mol_type = other DNA
atgaaggacatcgacatcggcaaggagtacatcatccccagccccggctacagaagcgtgagagagagaaccagcaccagcggcacccacagagacagagaggacagcaagttcagaagaaccagacccctggagtgccaggacgccctggagaccgccgccagagccgagggcctgagcctggacgccagcatgcacagccagctgagaatcctggacgaggagcaccccaagggcaagtaccaccacggcctgagcgccctgaagcccatcagaaccaccagcaagcaccagcaccccgtggacaacgccggcctgttcagctgcatgaccttcagctggctgagcagcctggccagagtggcccacaagaagggcgagctgagcatggaggacgtgtggagcctgagcaagcacgagagcagcgacgtgaactgcagaagactggagagactgtggcaggaggagctgaacgaggtgggccccgacgccgccagcctgagaagagtggtgtggatcttctgcagaaccagactgatcctgagcatcgtgtgcctgatgatcacccagctggccggcttcagcggccccctggcctggtgctgccaggacctggacctgggcggcgtgagcctgtag

SEQ ID NO: 73834 - DNA, 1530 bp, synthetic construct
  misc_feature 1..1530: note = Description of Artificial Sequence: Synthetic coding sequence
  source 1..1530: mol_type = other DNA
atgcagagctggagcagagtgtactgcagcctggccaagagaggccacttcaacagaatcagccacggcctgcagggcctgagcgccgtgcccctgagaacctacgccgaccagcccatcgacgccgacgtgaccgtgatcggcagcggccccggcggctacgtggccgccatcaaggccgcccagctgggcttcaagaccgtgtgcatcgagaagaacgagaccctgggcggcacctgcctgaacgtgggctgcatccccagcaaggccctgctgaacaacagccactactaccacatggcccacggcaaggacttcgccagcagaggcatcgagatgagcgaggtgagactgaacctggacaagatgatggagcagaagagcaccgccgtgaaggccctgaccggcggcatcgcccacctgttcaagcagaacaaggtggtgcacgtgaacggctacggcaagatcaccggcaagaaccaggtgaccgccaccaaggccgacggcggcacccaggtgatcgacaccaagaacatcctgatcgccaccggcagcgaggtgacccccttccccggcatcaccatcgacgaggacaccatcgtgagcagcaccggcgccctgagcctgaagaaggtgcccgagaagatggtggtgatcggcgccggcgtgatcggcgtggagctgggcagcgtgtggcagagactgggcgccgacgtgaccgccgtggagttcctgggccacgtgggcggcgtgggcatcgacatggagatcagcaagaacttccagagaatcctgcagaagcagggcttcaagttcaagctgaacaccaaggtgaccggcgccaccaagaagagcgacggcaagatcgacgtgagcatcgaggccgccagcggcggcaaggccgaggtgatcacctgcgacgtgctgctggtgtgcatcggcagaagacccttcaccaagaacctgggcctggaggagctgggcatcgagctggaccccagaggcagaatccccgtgaacaccagattccagaccaagatccccaacatctacgccatcggcgacgtggtggccggccccatgctggcccacaaggccgaggacgagggcatcatctgcgtggagggcatggccggcggcgccgtgcacatcgactacaactgcgtgcccagcgtgatctacacccaccccgaggtggcctgggtgggcaagagcgaggagcagctgaaggaggagggcatcgagtacaaggtgggcaagttccccttcgccgccaacagcagagccaagaccaacgccgacaccgacggcatggtgaagatcctgggccagaagagcaccgacagagtgctgggcgcccacatcctgggccccggcgccggcgagatggtgaacgaggccgccctggccctggagtacggcgccagctgcgaggacatcgccagagtgtgccacgcccaccccaccctgagcgaggccttcagagaggccaacctggccgccagcttcggcaagagcatcaacttctag

SEQ ID NO: 73835 - DNA, 4512 bp, synthetic construct
  misc_feature 1..4512: note = Description of Artificial Sequence: Synthetic coding sequence
  source 1..4512: mol_type = other DNA
atggccgcccccgccgagccctgcgccggccagggcgtgtggaaccagaccgagcccgagcccgccgccaccagcctgctgagcctgtgcttcctgagaaccgccggcgtgtgggtgccccccatgtacctgtgggtgctgggccccatctacctgctgttcatccaccaccacggcagaggctacctgagaatgagccccctgttcaaggccaagatggtgctgggcttcgccctgatcgtgctgtgcaccagcagcgtggccgtggccctgtggaagatccagcagggcacccccgaggcccccgagttcctgatccaccccaccgtgtggctgaccaccatgagcttcgccgtgttcctgatccacaccgagagaaagaagggcgtgcagagcagcggcgtgctgttcggctactggctgctgtgcttcgtgctgcccgccaccaacgccgcccagcaggccagcggcgccggcttccagagcgaccccgtgagacacctgagcacctacctgtgcctgagcctggtggtggcccagttcgtgctgagctgcctggccgaccagccccccttcttccccgaggacccccagcagagcaacccctgccccgagaccggcgccgccttccccagcaaggccaccttctggtgggtgagcggcctggtgtggagaggctacagaagacccctgagacccaaggacctgtggagcctgggcagagagaacagcagcgaggagctggtgagcagactggagaaggagtggatgagaaacagaagcgccgccagaagacacaacaaggccatcgccttcaagagaaagggcggcagcggcatgaaggcccccgagaccgagcccttcctgagacaggagggcagccagtggagacccctgctgaaggccatctggcaggtgttccacagcaccttcctgctgggcaccctgagcctgatcatcagcgacgtgttcagattcaccgtgcccaagctgctgagcctgttcctggagttcatcggcgaccccaagccccccgcctggaagggctacctgctggccgtgctgatgttcctgagcgcctgcctgcagaccctgttcgagcagcagaacatgtacagactgaaggtgctgcagatgagactgagaagcgccatcaccggcctggtgtacagaaaggtgctggccctgagcagcggcagcagaaaggccagcgccgtgggcgacgtggtgaacctggtgagcgtggacgtgcagagactgaccgagagcgtgctgtacctgaacggcctgtggctgcccctggtgtggatcgtggtgtgcttcgtgtacctgtggcagctgctgggccccagcgccctgaccgccatcgccgtgttcctgagcctgctgcccctgaacttcttcatcagcaagaagagaaaccaccaccaggaggagcagatgagacagaaggacagcagagccagactgaccagcagcatcctgagaaacagcaagaccatcaagttccacggctgggagggcgccttcctggacagagtgctgggcatcagaggccaggagctgggcgccctgagaaccagcggcctgctgttcagcgtgagcctggtgagcttccaggtgagcaccttcctggtggccctggtggtgttcgccgtgcacaccctggtggccgagaacgccatgaacgccgagaaggccttcgtgaccctgaccgtgctgaacatcctgaacaaggcccaggccttcctgcccttcagcatccacagcctggtgcaggccagagtgagcttcgacagactggtgaccttcctgtgcctggaggaggtggaccccggcgtggtggacagcagcagcagcggcagcgccgccggcaaggactgcatcaccatccacagcgccaccttcgcctggagccaggagagccccccctgcctgcacagaatcaacctgaccgtgccccagggctgcctgctggccgtggtgggccccgtgggcgccggcaagagcagcctgctgagcgccctgctgggcgagctgagcaaggtggagggcttcgtgagcatcgagggcgccgtggcctacgtgccccaggaggcctgggtgcagaacaccagcgtggtggagaacgtgtgcttcggccaggagctggaccccccctggctggagagagtgctggaggcctgcgccctgcagcccgacgtggacagcttccccgagggcatccacaccagcatcggcgagcagggcatgaacctgagcggcggccagaagcagagactgagcctggccagagccgtgtacagaaaggccgccgtgtacctgctggacgaccccctggccgccctggacgcccacgtgggccagcacgtgttcaaccaggtgatcggccccggcggcctgctgcagggcaccaccagaatcctggtgacccacgccctgcacatcctgccccaggccgactggatcatcgtgctggccaacggcgccatcgccgagatgggcagctaccaggagctgctgcagagaaagggcgccctgatgtgcctgctggaccaggccagacagcccggcgacagaggcgagggcgagaccgagcccggcaccagcaccaaggaccccagaggcaccagcgccggcagaagacccgagctgagaagagagagaagcatcaagagcgtgcccgagaaggacagaaccaccagcgaggcccagaccgaggtgcccctggacgaccccgacagagccggctggcccgccggcaaggacagcatccagtacggcagagtgaaggccaccgtgcacctggcctacctgagagccgtgggcacccccctgtgcctgtacgccctgttcctgttcctgtgccagcaggtggccagcttctgcagaggctactggctgagcctgtgggccgacgaccccgccgtgggcggccagcagacccaggccgccctgagaggcggcatcttcggcctgctgggctgcctgcaggccatcggcctgttcgccagcatggccgccgtgctgctgggcggcgccagagccagcagactgctgttccagagactgctgtgggacgtggtgagaagccccatcagcttcttcgagagaacccccatcggccacctgctgaacagattcagcaaggagaccgacaccgtggacgtggacatccccgacaagctgagaagcctgctgatgtacgccttcggcctgctggaggtgagcctggtggtggccgtggccacccccctggccaccgtggccatcctgcccctgttcctgctgtacgccggcttccagagcctgtacgtggtgagcagctgccagctgagaagactggagagcgccagctacagcagcgtgtgcagccacatggccgagaccttccagggcagcaccgtggtgagagccttcagaacccaggcccccttcgtggcccagaacaacgccagagtggacgagagccagagaatcagcttccccagactggtggccgacagatggctggccgccaacgtggagctgctgggcaacggcctggtgttcgccgccgccacctgcgccgtgctgagcaaggcccacctgagcgccggcctggtgggcttcagcgtgagcgccgccctgcaggtgacccagaccctgcagtgggtggtgagaaactggaccgacctggagaacagcatcgtgagcgtggagagaatgcaggactacgcctggacccccaaggaggccccctggagactgcccacctgcgccgcccagcccccctggccccagggcggccagatcgagttcagagacttcggcctgagatacagacccgagctgcccctggccgtgcagggcgtgagcttcaagatccacgccggcgagaaggtgggcatcgtgggcagaaccggcgccggcaagagcagcctggccagcggcctgctgagactgcaggaggccgccgagggcggcatctggatcgacggcgtgcccatcgcccacgtgggcctgcacaccctgagaagcagaatcagcatcatcccccaggaccccatcctgttccccggcagcctgagaatgaacctggacctgctgcaggagcacagcgacgaggccatctgggccgccctggagaccgtgcagctgaaggccctggtggccagcctgcccggccagctgcagtacaagtgcgccgacagaggcgaggacctgagcgtgggccagaagcagctgctgtgcctggccagagccctgctgagaaagacccagatcctgatcctggacgaggccaccgccgccgtggaccccggcaccgagctgcagatgcaggccatgctgggcagctggttcgcccagtgcaccgtgctgctgatcgcccacagactgagaagcgtgatggactgcgccagagtgctggtgatggacaagggccaggtggccgagagcggcagccccgcccagctgctggcccagaagggcctgttctacagactggcccaggagagcggcctggtgtag

SEQ ID NO: 73836 - DNA, 2616 bp, synthetic construct
  misc_feature 1..2616: note = Description of Artificial Sequence: Synthetic coding sequence
  source 1..2616: mol_type = other DNA
atggccgcccccgccgagccctgcgccggccagggcgtgtggaaccagaccgagcccgagcccgccgccaccagcctgctgagcctgtgcttcctgagaaccgccggcgtgtgggtgccccccatgtacctgtgggtgctgggccccatctacctgctgttcatccaccaccacggcagaggctacctgagaatgagccccctgttcaaggccaagatggtgctgggcttcgccctgatcgtgctgtgcaccagcagcgtggccgtggccctgtggaagatccagcagggcacccccgaggcccccgagttcctgatccaccccaccgtgtggctgaccaccatgagcttcgccgtgttcctgatccacaccgagagaaagaagggcgtgcagagcagcggcgtgctgttcggctactggctgctgtgcttcgtgctgcccgccaccaacgccgcccagcaggccagcggcgccggcttccagagcgaccccgtgagacacctgagcacctacctgtgcctgagcctggtggtggcccagttcgtgctgagctgcctggccgaccagccccccttcttccccgaggacccccagcagagcaacccctgccccgagaccggcgccgccttccccagcaaggccaccttctggtgggtgagcggcctggtgtggagaggctacagaagacccctgagacccaaggacctgtggagcctgggcagagagaacagcagcgaggagctggtgagcagactggagaaggagtggatgagaaacagaagcgccgccagaagacacaacaaggccatcgccttcaagagaaagggcggcagcggcatgaaggcccccgagaccgagcccttcctgagacaggagggcagccagtggagacccctgctgaaggccatctggcaggtgttccacagcaccttcctgctgggcaccctgagcctgatcatcagcgacgtgttcagattcaccgtgcccaagctgctgagcctgttcctggagttcatcggcgaccccaagccccccgcctggaagggctacctgctggccgtgctgatgttcctgagcgcctgcctgcagaccctgttcgagcagcagaacatgtacagactgaaggtgctgcagatgagactgagaagcgccatcaccggcctggtgtacagaaaggtgctggccctgagcagcggcagcagaaaggccagcgccgtgggcgacgtggtgaacctggtgagcgtggacgtgcagagactgaccgagagcgtgctgtacctgaacggcctgtggctgcccctggtgtggatcgtggtgtgcttcgtgtacctgtggcagctgctgggccccagcgccctgaccgccatcgccgtgttcctgagcctgctgcccctgaacttcttcatcagcaagaagagaaaccaccaccaggaggagcagatgagacagaaggacagcagagccagactgaccagcagcatcctgagaaacagcaagaccatcaagttccacggctgggagggcgccttcctggacagagtgctgggcatcagaggccaggagctgggcgccctgagaaccagcggcctgctgttcagcgtgagcctggtgagcttccaggtgagcaccttcctggtggccctggtggtgttcgccgtgcacaccctggtggccgagaacgccatgaacgccgagaaggccttcgtgaccctgaccgtgctgaacatcctgaacaaggcccaggccttcctgcccttcagcatccacagcctggtgcaggccagagtgagcttcgacagactggtgaccttcctgtgcctggaggaggtggaccccggcgtggtggacagcagcagcagcggcagcgccgccggcaaggactgcatcaccatccacagcgccaccttcgcctggagccaggagagccccccctgcctgcacagaatcaacctgaccgtgccccagggctgcctgctggccgtggtgggccccgtgggcgccggcaagagcagcctgctgagcgccctgctgggcgagctgagcaaggtggagggcttcgtgagcatcgagggcgccgtggcctacgtgccccaggaggcctgggtgcagaacaccagcgtggtggagaacgtgtgcttcggccaggagctggaccccccctggctggagagagtgctggaggcctgcgccctgcagcccgacgtggacagcttccccgagggcatccacaccagcatcggcgagcagggcatgaacctgagcggcggccagaagcagagactgagcctggccagagccgtgtacagaaaggccgccgtgtacctgctggacgaccccctggccgccctggacgcccacgtgggccagcacgtgttcaaccaggtgatcggccccggcggcctgctgcagggcaccaagcagaacctgggccccgcccccagaacccccgaggcccccctgcaggccggcggccccagcctggacgccagaggccccagcagccagagcctgagaagaaccgtgcccctgcagaagcccagacagagattcctgtggatgaccctgaccggccaggacggccagcaggagagaaccgccagcaacaccgccggctag

SEQ ID NO: 73837 - DNA, 2019 bp, synthetic construct
  misc_feature 1..2019: note = Description of Artificial Sequence: Synthetic coding sequence
  source 1..2019: mol_type = other DNA
atggccgcccccgccgagccctgcgccggccagggcgtgtggaaccagaccgagcccgagcccgccgccaccagcctgctgagcctgtgcttcctgagaaccgccggcgtgtgggtgccccccatgtacctgtgggtgctgggccccatctacctgctgttcatccaccaccacggcagaggctacctgagaatgagccccctgttcaaggccaagatggtggccgccatccccggcagcctggagcccggcaacgtgctgggcttcgccctgatcgtgctgtgcaccagcagcgtggccgtggccctgtggaagatccagcagggcacccccgaggcccccgagttcctgatccaccccaccgtgtggctgaccaccatgagcttcgccgtgttcctgatccacaccgagagaaagaagggcgtgcagagcagcggcgtgctgttcggctactggctgctgtgcttcgtgctgcccgccaccaacgccgcccagcaggccagcggcgccggcttccagagcgaccccgtgagacacctgagcacctacctgtgcctgagcctggtggtggcccagttcgtgctgagctgcctggccgaccagccccccttcttccccgaggacccccagcagagcaacccctgccccgagaccggcgccgccttccccagcaaggccaccttctggtgggtgagcggcctggtgtggagaggctacagaagacccctgagacccaaggacctgtggagcctgggcagagagaacagcagcgaggagctggtgagcagactggagaaggagtggatgagaaacagaagcgccgccagaagacacaacaaggccatcgccttcaagagaaagggcggcagcggcatgaaggcccccgagaccgagcccttcctgagacaggagggcagccagtggagacccctgctgaaggccatctggcaggtgttccacagcaccttcctgctgggcaccctgagcctgatcatcagcgacgtgttcagattcaccgtgcccaagctgctgagcctgttcctggagttcatcggcgaccccaagccccccgcctggaagggctacctgctggccgtgctgatgttcctgagcgcctgcctgcagaccctgttcgagcagcagaacatgtacagactgaaggtgctgcagatgagactgagaagcgccatcaccggcctggtgtacagaaaggtgctggccctgagcagcggcagcagaaaggccagcgccgtgggcgacgtggtgaacctggtgagcgtggacgtgcagagactgaccgagagcgtgctgtacctgaacggcctgtggctgcccctggtgtggatcgtggtgtgcttcgtgtacctgtggcagctgctgggccccagcgccctgaccgccatcgccgtgttcctgagcctgctgcccctgaacttcttcatcagcaagaagagaaaccaccaccaggaggagcagatgagacagaaggacagcagagccagactgaccagcagcatcctgagaaacagcaagaccatcaagttccacggctgggagggcgccttcctggacagagtgctgggcatcagaggccaggagctgggcgccctgagaaccagcggcctgctgttcagcgtgagcctggtgagcttccaggtgagcaccttcctggtggccctggtggtgttcgccgtgcacaccctggtggccgagaacgccatgaacgccgagaaggccttcgtgaccctgaccgtgctgaacatcctgaacaaggcccaggccttcctgcccttcagcatccacagcctggtgcaggccagagtgagcttcgacagactggtgaccttcctgtgcctggaggaggtggaccccggcgtggtggacagcagcagcagcggcagcgccgccggcaaggactgcatcaccatccacagcgccaccttcgcctggagccaggagagccccccctgcctgcacagagtgctgctgtaccacgccggctggagcgccatggcctag

SEQ ID NO: 73838 - DNA, 4650 bp, synthetic construct
  misc_feature 1..4650: note = Description of Artificial Sequence: Synthetic coding sequence
  source 1..4650: mol_type = other DNA
atgagcctgagcttctgcggcaacaacatcagcagctacaacatcaacgacggcgtgctgcagaacagctgcttcgtggacgccctgaacctggtgccccacgtgttcctgctgttcatcaccttccccatcctgttcatcggctggggcagccagagcagcaaggtgcagatccaccacaacacctggctgcacttccccggccacaacctgagatggatcctgaccttcgccctgctgttcgtgcacgtgtgcgagatcgccgagggcatcgtgagcgacagcagaagagagagcagacacctgcacctgttcatgcccgccgtgatgggcttcgtggccaccaccaccagcatcgtgtactaccacaacatcgagaccagcaacttccccaagctgctgctggccctgttcctgtactgggtgatggccttcatcaccaagaccatcaagctggtgaagtactgccagagcggcctggacatcagcaacctgagattctgcatcaccggcatgatggtgatcctgaacggcctgctgatggccgtggagatcaacgtgatcagagtgagaagatacgtgttcttcatgaacccccagaaggtgaagccccccgaggacctgcaggacctgggcgtgagattcctgcagcccttcgtgaacctgctgagcaaggccacctactggtggatgaacaccctgatcatcagcgcccacaagaagcccatcgacctgaaggccatcggcaagctgcccatcgccatgagagccgtgaccaactacgtgtgcctgaaggacgcctacgaggagcagaagaagaaggtggccgaccaccccaacagaacccccagcatctggctggccatgtacagagccttcggcagacccatcctgctgagcagcaccttcagatacctggccgacctgctgggcttcgccggccccctgtgcatcagcggcatcgtgcagagagtgaacgagacccagaacggcaccaacaacaccaccggcatcagcgagaccctgagcagcaaggagttcctggagaacgcctacgtgctggccgtgctgctgttcctggccctgatcctgcagagaaccttcctgcaggccagctactacgtgaccatcgagaccggcatcaacctgagaggcgccctgctggccatgatctacaacaagatcctgagactgagcaccagcaacctgagcatgggcgagatgaccctgggccagatcaacaacctggtggccatcgagaccaaccagctgatgtggttcctgttcctgtgccccaacctgtgggccatgcccgtgcagatcatcatgggcgtgatcctgctgtacaacctgctgggcagcagcgccctggtgggcgccgccgtgatcgtgctgctggcccccatccagtacttcatcgccaccaagctggccgaggcccagaagagcaccctggactacagcaccgagagactgaagaagaccaacgagatcctgaagggcatcaagctgctgaagctgtacgcctgggagcacatcttctgcaagagcgtggaggagaccagaatgaaggagctgagcagcctgaagaccttcgccctgtacaccagcctgagcatcttcatgaacgccgccatccccatcgccgccgtgctggccaccttcgtgacccacgcctacgccagcggcaacaacctgaagcccgccgaggccttcgccagcctgagcctgttccacatcctggtgacccccctgttcctgctgagcaccgtggtgagattcgccgtgaaggccatcatcagcgtgcagaagctgaacgagttcctgctgagcgacgagatcggcgacgacagctggagaaccggcgagagcagcctgcccttcgagagctgcaagaagcacaccggcgtgcagcccaagaccatcaacagaaagcagcccggcagataccacctggacagctacgagcagagcaccagaagactgagacccgccgagaccgaggacatcgccatcaaggtgaccaacggctacttcagctggggcagcggcctggccaccctgagcaacatcgacatcagaatccccaccggccagctgaccatgatcgtgggccaggtgggctgcggcaagagcagcctgctgctggccatcctgggcgagatgcagaccctggagggcaaggtgcactggagcaacgtgaacgagagcgagcccagcttcgaggccaccagaagcagaaacagatacagcgtggcctacgccgcccagaagccctggctgctgaacgccaccgtggaggagaacatcaccttcggcagccccttcaacaagcagagatacaaggccgtgaccgacgcctgcagcctgcagcccgacatcgacctgctgcccttcggcgaccagaccgagatcggcgagagaggcatcaacctgagcggcggccagagacagagaatctgcgtggccagagccctgtaccagaacaccaacatcgtgttcctggacgaccccttcagcgccctggacatccacctgagcgaccacctgatgcaggagggcatcctgaagttcctgcaggacgacaagagaaccctggtgctggtgacccacaagctgcagtacctgacccacgccgactggatcatcgccatgaaggacggcagcgtgctgagagagggcaccctgaaggacatccagaccaaggacgtggagctgtacgagcactggaagaccctgatgaacagacaggaccaggagctggagaaggacatggaggccgaccagaccaccctggagagaaagaccctgagaagagccatgtacagcagagaggccaaggcccagatggaggacgaggacgaggaggaggaggaggaggaggacgaggacgacaacatgagcaccgtgatgagactgagaaccaagatgccctggaagacctgctggagatacctgaccagcggcggcttcttcctgctgatcctgatgatcttcagcaagctgctgaagcacagcgtgatcgtggccatcgactactggctggccacctggaccagcgagtacagcatcaacaacaccggcaaggccgaccagacctactacgtggccggcttcagcatcctgtgcggcgccggcatcttcctgtgcctggtgaccagcctgaccgtggagtggatgggcctgaccgccgccaagaacctgcaccacaacctgctgaacaagatcatcctgggccccatcagattcttcgacaccacccccctgggcctgatcctgaacagattcagcgccgacaccaacatcatcgaccagcacatcccccccaccctggagagcctgaccagaagcaccctgctgtgcctgagcgccatcggcatgatcagctacgccacccccgtgttcctggtggccctgctgcccctgggcgtggccttctacttcatccagaagtacttcagagtggccagcaaggacctgcaggagctggacgacagcacccagctgcccctgctgtgccacttcagcgagaccgccgagggcctgaccaccatcagagccttcagacacgagaccagattcaagcagagaatgctggagctgaccgacaccaacaacatcgcctacctgttcctgagcgccgccaacagatggctggaggtgagaaccgactacctgggcgcctgcatcgtgctgaccgccagcatcgccagcatcagcggcagcagcaacagcggcctggtgggcctgggcctgctgtacgccctgaccatcaccaactacctgaactgggtggtgagaaacctggccgacctggaggtgcagatgggcgccgtgaagaaggtgaacagcttcctgaccatggagagcgagaactacgagggcaccatggaccccagccaggtgcccgagcactggccccaggagggcgagatcaagatccacgacctgtgcgtgagatacgagaacaacctgaagcccgtgctgaagcacgtgaaggcctacatcaagcccggccagaaggtgggcatctgcggcagaaccggcagcggcaagagcagcctgagcctggccttcttcagaatggtggacatcttcgacggcaagatcgtgatcgacggcatcgacatcagcaagctgcccctgcacaccctgagaagcagactgagcatcatcctgcaggaccccatcctgttcagcggcagcatcagattcaacctggaccccgagtgcaagtgcaccgacgacagactgtgggaggccctggagatcgcccagctgaagaacatggtgaagagcctgcccggcggcctggacgccgtggtgaccgagggcggcgagaacttcagcgtgggccagagacagctgttctgcctggccagagccttcgtgagaaagagcagcatcctgatcatggacgaggccaccgccagcatcgacatggccaccgagaacatcctgcagaaggtggtgatgaccgccttcgccgacagaaccgtggtgaccatcgcccacagagtgcacaccatcctgaccgccgacctggtgatcgtgatgaagagaggcaacatcctggagtacgacacccccgagagcctgctggcccaggagaacggcgtgttcgccagcttcgtgagagccgacatgtag

SEQ ID NO: 73839 - DNA, 4650 bp, synthetic construct
  misc_feature 1..4650: note = Description of Artificial Sequence: Synthetic coding sequence
  source 1..4650: mol_type = other DNA
atgagcctgagcttctgcggcaacaacatcagcagctacaacatcaacgacggcgtgctgcagaacagctgcttcgtggacgccctgaacctggtgccccacgtgttcctgctgttcatcaccttccccatcctgttcatcggctggggcagccagagcagcaaggtgcagatccaccacaacacctggctgcacttccccggccacaacctgagatggatcctgaccttcgccctgctgttcgtgcacgtgtgcgagatcgccgagggcatcgtgagcgacagcagaagagagagcagacacctgcacctgttcatgcccgccgtgatgggcttcgtggccaccaccaccagcatcgtgtactaccacaacatcgagaccagcaacttccccaagctgctgctggccctgttcctgtactgggtgatggccttcatcaccaagaccatcaagctggtgaagtactgccagagcggcctggacatcagcaacctgagattctgcatcaccggcatgatggtgatcctgaacggcctgctgatggccgtggagatcaacgtgatcagagtgagaagatacgtgttcttcatgaacccccagaaggtgaagccccccgaggacctgcaggacctgggcgtgagattcctgcagcccttcgtgaacctgctgagcaaggccacctactggtggatgaacaccctgatcatcagcgcccacaagaagcccatcgacctgaaggccatcggcaagctgcccatcgccatgagagccgtgaccaactacgtgtgcctgaaggacgcctacgaggagcagaagaagaaggtggccgaccaccccaacagaacccccagcatctggctggccatgtacagagccttcggcagacccatcctgctgagcagcaccttcagatacctggccgacctgctgggcttcgccggccccctgtgcatcagcggcatcgtgcagagagtgaacgagacccagaacggcaccaacaacaccaccggcatcagcgagaccctgagcagcaaggagttcctggagaacgcctacgtgctggccgtgctgctgttcctggccctgatcctgcagagaaccttcctgcaggccagctactacgtgaccatcgagaccggcatcaacctgagaggcgccctgctggccatgatctacaacaagatcctgagactgagcaccagcaacctgagcatgggcgagatgaccctgggccagatcaacaacctggtggccatcgagaccaaccagctgatgtggttcctgttcctgtgccccaacctgtgggccatgcccgtgcagatcatcatgggcgtgatcctgctgtacaacctgctgggcagcagcgccctggtgggcgccgccgtgatcgtgctgctggcccccatccagtacttcatcgccaccaagctggccgaggcccagaagagcaccctggactacagcaccgagagactgaagaagaccaacgagatcctgaagggcatcaagctgctgaagctgtacgcctgggagcacatcttctgcaagagcgtggaggagaccagaatgaaggagctgagcagcctgaagaccttcgccctgtacaccagcctgagcatcttcatgaacgccgccatccccatcgccgccgtgctggccaccttcgtgacccacgcctacgccagcggcaacaacctgaagcccgccgaggccttcgccagcctgagcctgttccacatcctggtgacccccctgttcctgctgagcaccgtggtgagattcgccgtgaaggccatcatcagcgtgcagaagctgaacgagttcctgctgagcgacgagatcggcgacgacagctggagaaccggcgagagcagcctgcccttcgagagctgcaagaagcacaccggcgtgcagcccaagaccatcaacagaaagcagcccggcagataccacctggacagctacgagcagagcaccagaagactgagacccgccgagaccgaggacatcgccatcaaggtgaccaacggctacttcagctggggcagcggcctggccaccctgagcaacatcgacatcagaatccccaccggccagctgaccatgatcgtgggccaggtgggctgcggcaagagcagcctgctgctggccatcctgggcgagatgcagaccctggagggcaaggtgcactggagcaacgtgaacgagagcgagcccagcttcgaggccaccagaagcagaaacagatacagcgtggcctacgccgcccagaagccctggctgctgaacgccaccgtggaggagaacatcaccttcggcagccccttcaacaagcagagatacaaggccgtgaccgacgcctgcagcctgcagcccgacatcgacctgctgcccttcggcgaccagaccgagatcggcgagagaggcatcaacctgagcggcggccagagacagagaatctgcgtggccagagccctgtaccagaacaccaacatcgtgttcctggacgaccccttcagcgccctggacatccacctgagcgaccacctgatgcaggagggcatcctgaagttcctgcaggacgacaagagaaccctggtgctggtgacccacaagctgcagtacctgacccacgccgactggatcatcgccatgaaggacggcagcgtgctgagagagggcaccctgaaggacatccagaccaaggacgtggagctgtacgagcactggaagaccctgatgaacagacaggaccaggagctggagaaggacatggaggccgaccagaccaccctggagagaaagaccctgagaagagccatgtacagcagagaggccaaggcccagatggaggacgaggacgaggaggaggaggaggaggaggacgaggacgacaacatgagcaccgtgatgagactgagaaccaagatgccctggaagacctgctggagatacctgaccagcggcggcttcttcctgctgatcctgatgatcttcagcaagctgctgaagcacagcgtgatcgtggccatcgactactggctggccacctggaccagcgagtacagcatcaacaacaccggcaaggccgaccagacctactacgtggccggcttcagcatcctgtgcggcgccggcatcttcctgtgcctggtgaccagcctgaccgtggagtggatgggcctgaccgccgccaagaacctgcaccacaacctgctgaacaagatcatcctgggccccatcagattcttcgacaccacccccctgggcctgatcctgaacagattcagcgccgacaccaacatcatcgaccagcacatcccccccaccctggagagcctgaccagaagcaccctgctgtgcctgagcgccatcggcatgatcagctacgccacccccgtgttcctggtggccctgctgcccctgggcgtggccttctacttcatccagaagtacttcagagtggccagcaaggacctgcaggagctggacgacagcacccagctgcccctgctgtgccacttcagcgagaccgccgagggcctgaccaccatcagagccttcagacacgagaccagattcaagcagagaatgctggagctgaccgacaccaacaacatcgcctacctgttcctgagcgccgccaacagatggctggaggtgagaaccgactacctgggcgcctgcatcgtgctgaccgccagcatcgccagcatcagcggcagcagcaacagcggcctggtgggcctgggcctgctgtacgccctgaccatcaccaactacctgaactgggtggtgagaaacctggccgacctggaggtgcagatgggcgccgtgaagaaggtgaacagcttcctgaccatggagagcgagaactacgagggcaccatggaccccagccaggtgcccgagcactggccccaggagggcgagatcaagatccacgacctgtgcgtgagatacgagaacaacctgaagcccgtgctgaagcacgtgaaggcctacatcaagcccggccagaaggtgggcatctgcggcagaaccggcagcggcaagagcagcctgagcctggccttcttcagaatggtggacatcttcgacggcaagatcgtgatcgacggcatcgacatcagcaagctgcccctgcacaccctgagaagcagactgagcatcatcctgcaggaccccatcctgttcagcggcagcatcagattcaacctggaccccgagtgcaagtgcaccgacgacagactgtgggaggccctggagatcgcccagctgaagaacatggtgaagagcctgcccggcggcctggacgccgtggtgaccgagggcggcgagaacttcagcgtgggccagagacagctgttctgcctggccagagccttcgtgagaaagagcagcatcctgatcatggacgaggccaccgccagcatcgacatggccaccgagaacatcctgcagaaggtggtgatgaccgccttcgccgacagaaccgtggtgaccatcgcccacagagtgagcagcatcatggacgccggcctggtgctggtgttcagcgagggcatcctggtggagtgcgacaccgtgcccaacctgctggcccacaagaacggcctgttcagcaccctggtgatgaccaacaagtag

SEQ ID NO: 73840 - DNA, 450 bp, synthetic construct
  misc_feature 1..450: note = Description of Artificial Sequence: Synthetic coding sequence
  source 1..450: mol_type = other DNA
atgagcctgagcttctgcggcaacaacatcagcagctacaacatcaacgacggcgtgctgcagaacagctgcttcgtggacgccctgaacctggtgccccacgtgttcctgctgttcatcaccttccccatcctgttcatcggctggggcagccagagcagcaaggtgcagatccaccacaacacctggctgcacttccccggccacaacctgagatggatcctgaccttcgccctgctgttcgtgcacgtgtgcgagatcgccgagggcatcgtgagcgacagcagaagagagagcagacacctgcacctgttcatgcccgccgtgatgggcttcgtggccaccaccaccagcatcgtgtactaccacaacatcgagaccagcaacttccccaagctgctgctgggcttcagccaccacgagagcaagagctgctaccagcacagctag

SEQ ID NO: 73841 - DNA, 4542 bp, synthetic construct
  misc_feature 1..4542: note = Description of Artificial Sequence: Synthetic coding sequence
  source 1..4542: mol_type = other DNA
atgagcctgagcttctgcggcaacaacatcagcagctacaacatcaacgacggcgtgctgcagaacagctgcttcgtggacgccctgaacctggtgccccacgtgttcctgctgttcatcaccttccccatcctgttcatcggctggggcagccagagcagcaaggtgcagatccaccacaacacctggctgcacttccccggccacaacctgagatggatcctgaccttcgccctgctgttcgtgcacgtgtgcgagatcgccgagggcatcgtgagcgacagcagaagagagagcagacacctgcacctgttcatgcccgccgtgatgggcttcgtggccaccaccaccagcatcgtgtactaccacaacatcgagaccagcaacttccccaagctgctgctggccctgttcctgtactgggtgatggccttcatcaccaagaccatcaagctggtgaagtactgccagagcggcctggacatcagcaacctgagattctgcatcaccggcatgatggtgatcctgaacggcctgctgatggccgtggagatcaacgtgatcagagtgagaagatacgtgttcttcatgaacccccagaaggtgaagccccccgaggacctgcaggacctgggcgtgagattcctgcagcccttcgtgaacctgctgagcaaggccacctactggtggatgaacaccctgatcatcagcgcccacaagaagcccatcgacctgaaggccatcggcaagctgcccatcgccatgagagccgtgaccaactacgtgtgcctgaaggacgcctacgaggagcagaagaagaaggtggccgaccaccccaacagaacccccagcatctggctggccatgtacagagccttcggcagacccatcctgctgagcagcaccttcagatacctggccgacctgctgggcttcgccggccccctgtgcatcagcggcatcgtgcagagagtgaacgagacccagaacggcaccaacaacaccaccggcatcagcgagaccctgagcagcaaggagttcctggagaacgcctacgtgctggccgtgctgctgttcctggccctgatcctgcagagaaccttcctgcaggccagctactacgtgaccatcgagaccggcatcaacctgagaggcgccctgctggccatgatctacaacaagatcctgagactgagcaccagcaacctgagcatgggcgagatgaccctgggccagatcaacaacctggtggccatcgagaccaaccagctgatgtggttcctgttcctgtgccccaacctgtgggccatgcccgtgcagatcatcatgggcgtgatcctgctgtacaacctgctgggcagcagcgccctggtgggcgccgccgtgatcgtgctgctggcccccatccagtacttcatcgccaccaagctggccgaggcccagaagagcaccctggactacagcaccgagagactgaagaagaccaacgagatcctgaagggcatcaagctgctgaagctgtacgcctgggagcacatcttctgcaagagcgtggaggagaccagaatgaaggagctgagcagcctgaagaccttcgccctgtacaccagcctgagcatcttcatgaacgccgccatccccatcgccgccgtgctggccaccttcgtgacccacgcctacgccagcggcaacaacctgaagcccgccgaggccttcgccagcctgagcctgttccacatcctggtgacccccctgttcctgctgagcaccgtggtgagattcgccgtgaaggccatcatcagcgtgcagaagctgaacgagttcctgctgagcgacgagatcggcgacgacagctggagaaccggcgagagcagcctgcccttcgagagctgcaagaagcacaccggcgtggtgaccaacggctacttcagctggggcagcggcctggccaccctgagcaacatcgacatcagaatccccaccggccagctgaccatgatcgtgggccaggtgggctgcggcaagagcagcctgctgctggccatcctgggcgagatgcagaccctggagggcaaggtgcactggagcaacgtgaacgagagcgagcccagcttcgaggccaccagaagcagaaacagatacagcgtggcctacgccgcccagaagccctggctgctgaacgccaccgtggaggagaacatcaccttcggcagccccttcaacaagcagagatacaaggccgtgaccgacgcctgcagcctgcagcccgacatcgacctgctgcccttcggcgaccagaccgagatcggcgagagaggcatcaacctgagcggcggccagagacagagaatctgcgtggccagagccctgtaccagaacaccaacatcgtgttcctggacgaccccttcagcgccctggacatccacctgagcgaccacctgatgcaggagggcatcctgaagttcctgcaggacgacaagagaaccctggtgctggtgacccacaagctgcagtacctgacccacgccgactggatcatcgccatgaaggacggcagcgtgctgagagagggcaccctgaaggacatccagaccaaggacgtggagctgtacgagcactggaagaccctgatgaacagacaggaccaggagctggagaaggacatggaggccgaccagaccaccctggagagaaagaccctgagaagagccatgtacagcagagaggccaaggcccagatggaggacgaggacgaggaggaggaggaggaggaggacgaggacgacaacatgagcaccgtgatgagactgagaaccaagatgccctggaagacctgctggagatacctgaccagcggcggcttcttcctgctgatcctgatgatcttcagcaagctgctgaagcacagcgtgatcgtggccatcgactactggctggccacctggaccagcgagtacagcatcaacaacaccggcaaggccgaccagacctactacgtggccggcttcagcatcctgtgcggcgccggcatcttcctgtgcctggtgaccagcctgaccgtggagtggatgggcctgaccgccgccaagaacctgcaccacaacctgctgaacaagatcatcctgggccccatcagattcttcgacaccacccccctgggcctgatcctgaacagattcagcgccgacaccaacatcatcgaccagcacatcccccccaccctggagagcctgaccagaagcaccctgctgtgcctgagcgccatcggcatgatcagctacgccacccccgtgttcctggtggccctgctgcccctgggcgtggccttctacttcatccagaagtacttcagagtggccagcaaggacctgcaggagctggacgacagcacccagctgcccctgctgtgccacttcagcgagaccgccgagggcctgaccaccatcagagccttcagacacgagaccagattcaagcagagaatgctggagctgaccgacaccaacaacatcgcctacctgttcctgagcgccgccaacagatggctggaggtgagaaccgactacctgggcgcctgcatcgtgctgaccgccagcatcgccagcatcagcggcagcagcaacagcggcctggtgggcctgggcctgctgtacgccctgaccatcaccaactacctgaactgggtggtgagaaacctggccgacctggaggtgcagatgggcgccgtgaagaaggtgaacagcttcctgaccatggagagcgagaactacgagggcaccatggaccccagccaggtgcccgagcactggccccaggagggcgagatcaagatccacgacctgtgcgtgagatacgagaacaacctgaagcccgtgctgaagcacgtgaaggcctacatcaagcccggccagaaggtgggcatctgcggcagaaccggcagcggcaagagcagcctgagcctggccttcttcagaatggtggacatcttcgacggcaagatcgtgatcgacggcatcgacatcagcaagctgcccctgcacaccctgagaagcagactgagcatcatcctgcaggaccccatcctgttcagcggcagcatcagattcaacctggaccccgagtgcaagtgcaccgacgacagactgtgggaggccctggagatcgcccagctgaagaacatggtgaagagcctgcccggcggcctggacgccgtggtgaccgagggcggcgagaacttcagcgtgggccagagacagctgttctgcctggccagagccttcgtgagaaagagcagcatcctgatcatggacgaggccaccgccagcatcgacatggccaccgagaacatcctgcagaaggtggtgatgaccgccttcgccgacagaaccgtggtgaccatcgcccacagagtgagcagcatcatggacgccggcctggtgctggtgttcagcgagggcatcctggtggagtgcgacaccgtgcccaacctgctggcccacaagaacggcctgttcagcaccctggtgatgaccaacaagtag

SEQ ID NO: 73842 - DNA, 1386 bp, synthetic construct
  misc_feature 1..1386: note = Description of Artificial Sequence: Synthetic coding sequence
  source 1..1386: mol_type = other DNA
atgcagagagtgaacatgatcatggccgagagccccggcctgatcaccatctgcctgctgggctacctgctgagcgccgagtgcaccgtgttcctggaccacgagaacgccaacaagatcctgaacagacccaagagatacaacagcggcaagctggaggagttcgtgcagggcaacctggagagagagtgcatggaggagaagtgcagcttcgaggaggccagagaggtgttcgagaacaccgagagaaccaccgagttctggaagcagtacgtggacggcgaccagtgcgagagcaacccctgcctgaacggcggcagctgcaaggacgacatcaacagctacgagtgctggtgccccttcggcttcgagggcaagaactgcgagctggacgtgacctgcaacatcaagaacggcagatgcgagcagttctgcaagaacagcgccgacaacaaggtggtgtgcagctgcaccgagggctacagactggccgagaaccagaagagctgcgagcccgccgtgcccttcccctgcggcagagtgagcgtgagccagaccagcaagctgaccagagccgagaccgtgttccccgacgtggactacgtgaacagcaccgaggccgagaccatcctggacaacatcacccagagcacccagagcttcaacgacttcaccagagtggtgggcggcgaggacgccaagcccggccagttcccctggcaggtggtgctgaacggcaaggtggacgccttctgcggcggcagcatcgtgaacgagaagtggatcgtgaccgccgcccactgcgtggagaccggcgtgaagatcaccgtggtggccggcgagcacaacatcgaggagaccgagcacaccgagcagaagagaaacgtgatcagaatcatcccccaccacaactacaacgccgccatcaacaagtacaaccacgacatcgccctgctggagctggacgagcccctggtgctgaacagctacgtgacccccatctgcatcgccgacaaggagtacaccaacatcttcctgaagttcggcagcggctacgtgagcggctggggcagagtgttccacaagggcagaagcgccctggtgctgcagtacctgagagtgcccctggtggacagagccacctgcctgagaagcaccaagttcaccatctacaacaacatgttctgcgccggcttccacgagggcggcagagacagctgccagggcgacagcggcggcccccacgtgaccgaggtggagggcaccagcttcctgaccggcatcatcagctggggcgaggagtgcgccatgaagggcaagtacggcatctacaccaaggtgagcagatacgtgaactggatcaaggagaagaccaagctgacctag

SEQ ID NO: 73843 - DNA, 684 bp, synthetic construct
  misc_feature 1..684: note = Description of Artificial Sequence: Synthetic coding sequence
  source 1..684: mol_type = other DNA
atggacggcagactgagaaaccccgaccagagcctgaccgaggacgtggtggccttcgccgccagcgtggcccacctgtacagcaacctgaccaagcccctgctggacgtggccgtgaccagctacaccctgctgagagccgccagaagcagaggcgccggcaccgcctggcccagcgccatcgccggcctggtggtgttcctgaccgccaacgtgctgagagccttcagccccaagttcggcgagctggtggccgaggaggccagaagaaagggcgagctgagatacatgcacagcagagtggtggccaacagcgaggagatcgccttctacggcggccacgaggtggagctggccctgctgcagagaagctaccaggacctggccagccagatcaacctgatcctgctggagagactgtggtacgtgatgctggagcagttcctgatgaagtacgtgtggagcgccagcggcctgctgatggtggccgtgcccatcatcaccgccaccggctacagcgagagcggcgagacccagggcagcaagagaatccaggccagaggcctgagccccatccccctgggcgccgagctgaccagagcccagctgagccagcccgccgcccacttctgctgcagaggccacagaggccccgccgccagcctggacgccttcagaggctag

SEQ ID NO: 73844 - DNA, 672 bp, synthetic construct
  misc_feature 1..672: note = Description of Artificial Sequence: Synthetic coding sequence
  source 1..672: mol_type = other DNA
tgactgttcagcaccgtggccgcccccttctacctgcccgccagcagcgtgggcggcttccacctgttcatcgtggccagcaccgacgccgaggccgtgaagaaggccgccctggagaagaaggaggaggagctggtgagcgagagaaccgaggccttcaccatcgccagaaacctgctgaccgccgccgccgacgccatcgagagaatcatgagcagctacaaggaggtgaccgagctggccggctacaccgccagagtgcacgagatgttccaggtgttcgaggacgtgcagagatgccacttcaagagacccagagagctggaggacgcccaggccggcagcggcaccatcggcagaagcggcgtgagagtggagggccccctgaagatcagaggccaggtggtggacgtggagcagggcatcatctgcgagaacatccccatcgtgacccccagcggcgaggtggtggtggccagcctgaacatcagagtggaggagggcatgcacctgctgatcaccggccccaacggctgcggcaagagcagcctgttcagaatcctgggcggcctgtggcccacctacggcggcgtgctgtacaagccccccccccagagaatgttctacatcccccagagaccctacatgagcgtgggcagcctgagagactag

SEQ ID NO: 73845 - DNA, 2223 bp, synthetic construct
  misc_feature 1..2223: note = Description of Artificial Sequence: Synthetic coding sequence
  source 1..2223: mol_type = other DNA
atgacccacatgctgaacgccgccgccgacagagtgaagtggaccagaagcagcgccgccaagagagccgcctgcctggtggccgccgcctacgccctgaagaccctgtaccccatcatcggcaagagactgaagcagagcggccacggcaagaagaaggccgccgcctaccccgccgccgagaacaccgagatcctgcactgcaccgagaccatctgcgagaagcccagccccggcgtgaacgccgacttcttcaagcagctgctggagctgagaaagatcctgttccccaagctggtgaccaccgagaccggctggctgtgcctgcacagcgtggccctgatcagcagaaccttcctgagcatctacgtggccggcctggacggcaagatcgtgaagagcatcgtggagaagaagcccagaaccttcatcatcaagctgatcaagtggctgatgatcgccatccccgccaccttcgtgaacagcgccatcagatacctggagtgcaagctggccctggccttcagaaccagactggtggaccacgcctacgagacctacttcaccaaccagacctactacaaggtgatcaacatggacggcagactggccaaccccgaccagagcctgaccgaggacatcatgatgttcagccagagcgtggcccacctgtacagcaacctgaccaagcccatcctggacgtgatgctgaccagctacaccctgatccagaccgccaccagcagaggcgccagccccatcggccccaccctgctggccggcctggtggtgtacgccaccgccaaggtgctgaaggcctgcagccccaagttcggcaagctggtggccgaggaggcccacagaaagggctacctgagatacgtgcacagcagaatcatcgccaacgtggaggagatcgccttctacagaggccacaaggtggagatgaagcagctgcagaagagctacaaggccctggccgaccagatgaacctgatcctgagcaagagactgtggtacatcatgatcgagcagttcctgatgaagtacgtgtggagcagcagcggcctgatcatggtggccatccccatcatcaccgccaccggcttcgccgacggcgaggacggccagaagcaggtgatggtgagcgagagaaccgaggccttcaccaccgccagaaacctgctggccagcggcgccgacgccatcgagagaatcatgagcagctacaaggaggtgaccgagctggccggctacaccgccagagtgtacaacatgttctgggtgttcgacgaggtgaagagaggcatctacaagagaaccgccgtgatccaggagagcgagagccacagcaagaacggcgccaaggtggagctgcccctgagcgacaccctggccatcaagggcaaggtgatcgacgtggaccacggcatcatctgcgagaacgtgcccatcatcacccccgccggcgaggtggtggccagcagactgaacttcaaggtggaggagggcatgcacctgctgatcaccggccccaacggctgcggcaagagcagcctgttcagaatcctgagcggcctgtggcccgtgtacgagggcgtgctgtacaagccccccccccagcacatgttctacatcccccagagaccctacatgagcctgggcagcctgagagaccaggtgatctaccccgacagcgtggacgacatgcacgacaagggctacaccgaccaggacctggagagaatcctgcacaacgtgcacctgtaccacatcgtgcagagagagggcggctgggacgccgtgatggactggaaggacgtgctgagcggcggcgagaagcagagaatgggcatggccagaatgttctaccacaagcccaagtacgccctgctggacgagtgcaccagcgccgtgagcatcgacgtggagggcaagatcttccaggccgccaagggcgccggcatcagcctgctgagcatcacccacagacccagcctgtggaagtaccacacccacctgctgcagttcgacggcgagggcggctggagattcgagcagctggacaccgccatcagactgaccctgagcgaggagaagcagaagctggagagccagctggccggcatccccaagatgcagcagagactgaacgagctgtgcaagatcctgggcgaggacagcgtgctgaagaccatcaagaacgaggacgagaccagctag

SEQ ID NO: 73846 - DNA, 711 bp, synthetic construct
  misc_feature 1..711: note = Description of Artificial Sequence: Synthetic coding sequence
  source 1..711: mol_type = other DNA
atggccgccttcagcaagtacctgaccgccagaaacagcagcctggccggcgccgccttcctgctgctgtgcctgctgcacaagagaagaagagccctgggcctgcacggcaagaagagcggcaagccccccctgcagaacaacgagaaggagggcaagaaggagagagccgtggtggacaaggtgttcttcagcagactgatccagatcctgaagatcatggtgcccagaaccttctgcaaggagaccggctacctggtgctgatcgccgtgatgctggtgagcagaacctactgcgacgtgtggatgatccagaacggcaccctgatcgagagcggcatcatcggcagaagcagaaaggacttcaagagatacctgctgaacttcatcgccgccatgcccctgatcagcctggtgaacaacttcctgaagtacggcctgaacgagctgaagctgtgcttcagagtgagactgaccaagtacctgtacgaggagtacctgcaggccttcacctactacaagatgggcaacctggacaacagaatcgccaaccccgaccagctgctgacccaggacgtggagaagttctgcaacagcgtggtggacctgtacagcaacctgagcaagcccttcctggacatcgtgctgtacatcttcaagctgaccagcgccatcggcgcccaggtgctgggcaagatcctgtggcactag

SEQ ID NO: 73847 - DNA, 1980 bp, synthetic construct
  misc_feature 1..1980: note = Description of Artificial Sequence: Synthetic coding sequence
  source 1..1980: mol_type = other DNA
atggccgccttcagcaagtacctgaccgccagaaacagcagcctggccggcgccgccttcctgctgctgtgcctgctgcacaagagaagaagagccctgggcctgcacggcaagaagagcggcaagccccccctgcagaacaacgagaaggagggcaagaaggagagagccgtggtggacaaggtgttcttcagcagactgatccagatcctgaagatcatggtgcccagaaccttctgcaaggagaccggctacctggtgctgatcgccgtgatgctggtgagcagaacctactgcgacgtgtggatgatccagaacggcaccctgatcgagagcggcatcatcggcagaagcagaaaggacttcaagagatacctgctgaacttcatcgccgccatgcccctgatcagcctggtgaacaacttcctgaagtacggcctgaacgagctgaagctgtgcttcagagtgagactgaccaagtacctgtacgaggagtacctgcaggccttcacctactacaagatgggcaacctggacaacagaatcgccaaccccgaccagctgctgacccaggacgtggagaagttctgcaacagcgtggtggacctgtacagcaacctgagcaagcccttcctggacatcgtgctgtacatcttcaagctgaccagcgccatcggcgcccagggccccgccagcatgatggcctacctggtggtgagcggcctgttcctgaccagactgagaagacccatcggcaagatgaccatcaccgagcagaagtacgagggcgagtacagatacgtgaacagcagactgatcaccaacagcgaggagatcgccttctacaacggcaacaagagagagaagcagaccgtgcacagcgtgttcagaaagctggtggagcacctgcacaacttcatcctgttcagattcagcatgggcttcatcgacagcatcatcgccaagtacctggccaccgtggtgggctacctggtggtgagcagacccttcctggacctgagccaccccagacacctgaagagcacccacagcgagctgctggaggactactaccagagcggcagaatgctgctgagaatgagccaggccctgggcagaatcgtgctggccggcagagagatgaccagactggccggcttcaccgccagaatcaccgagctgatgcaggtgctgaaggacctgaaccacggcaagtacgagagaaccatggtgagccagcaggagaagggcatcgagggcgtgcaggtgatccccctgatccccggcgccggcgagatcatcatcgccgacaacatcatcaagttcgaccacgtgcccctggccacccccaacggcgacgtgctgatcagagacctgaacttcgaggtgagaagcggcgccaacgtgctgatctgcggccccaacggctgcggcaagagcagcctgttcagagtgctgggcgagctgtggcccctgttcggcggcagactgaccaagcccgagagaggcaagctgttctacgtgccccagagaccctacatgaccctgggcaccctgagagaccaggtgatctaccccgacggcagagaggaccagaagagaaagggcatcagcgacctggtgctgaaggagtacctggacaacgtgcagctgggccacatcctggagagagagggcggctgggacagcgtgcaggactggatggacgtgctgagcggcggcgagaagcagagaatggccatggccagactgttctaccacaagccccagttcgccatcctggacgagtgcaccagcgccgtgagcgtggacgtggagggctacatctacagccactgcagaaaggtgggcatcaccctgttcaccgtgagccacagaaagagcctgtggaagcaccacgagtactacctgcacatggacggcagaggcaactacgagttcaagcagatcaccgaggacaccgtggagttcggcagctag

SEQ ID NO: 73848 - DNA, 1650 bp, synthetic construct
  misc_feature 1..1650: note = Description of Artificial Sequence: Synthetic coding sequence
  source 1..1650: mol_type = other DNA
atggccgccttcagcaagtacctgaccgccagaaacagcagcctggccggcgccgccttcctgctgctgtgcctgctgcacaagagaagaagagccctgggcctgcacggcaagaagagcggcaagccccccctgcagaacaacgagaaggagggcaagaaggagagagccgtggtggacaaggtgttcttcagcagactgatccagatcctgaagatcatggtgcccagaaccttctgcaaggagaccggctacctggtgctgatcgccgtgatgctggtgagcagaacctactgcgacgtgtggatgatccagaacggcaccctgatcgagagcggcatcatcggcagaagcagaaaggacttcaagagatacctgctgaacttcatcgccgccatgcccctgatcagcctggtgaacaacttcctgaagtacggcctgaacgagctgaagctgtgcttcagagtgagactgaccaagtacctgtacgaggagtacctgcaggccttcacctactacaagatgggcaacctggacaacagaatcgccaaccccgaccagctgctgacccaggacgtggagaagttctgcaacagcgtggtggacctgtacagcaacctgagcaagcccttcctggacatcgtgctgtacatcttcaagctgaccagcgccatcggcgcccagggccccgccagcatgatggcctacctggtggtgagcggcctgttcctgaccagactgagaagacccatcggcaagatgaccatcaccgagcagaagtacgagggcgagtacagatacgtgaacagcagactgatcaccaacagcttcaccgccagaatcaccgagctgatgcaggtgctgaaggacctgaaccacggcaagtacgagagaaccatggtgagccagcaggagaagggcatcgagggcgtgcaggtgatccccctgatccccggcgccggcgagatcatcatcgccgacaacatcatcaagttcgaccacgtgcccctggccacccccaacggcgacgtgctgatcagagacctgaacttcgaggtgagaagcggcgccaacgtgctgatctgcggccccaacggctgcggcaagagcagcctgttcagagtgctgggcgagctgtggcccctgttcggcggcagactgaccaagcccgagagaggcaagctgttctacgtgccccagagaccctacatgaccctgggcaccctgagagaccaggtgatctaccccgacggcagagaggaccagaagagaaagggcatcagcgacctggtgctgaaggagtacctggacaacgtgcagctgggccacatcctggagagagagggcggctgggacagcgtgcaggactggatggacgtgctgagcggcggcgagaagcagagaatggccatggccagactgttctaccacaagccccagttcgccatcctggacgagtgcaccagcgccgtgagcgtggacgtggagggctacatctacagccactgcagaaaggtgggcatcaccctgttcaccgtgagccacagaaagagcctgtggaagcaccacgagtactacctgcacatggacggcagaggcaactacgagttcaagcagatcaccgaggacaccgtggagttcggcagctag

SEQ ID NO: 73849 - DNA, 2052 bp, synthetic construct
  misc_feature 1..2052: note = Description of Artificial Sequence: Synthetic coding sequence
  source 1..2052: mol_type = other DNA
atggccgccttcagcaagtacctgaccgccagaaacagcagcctggccggcgccgccttcctgctgctgtgcctgctgcacaagagaagaagagccctgggcctgcacggctacttcatggagacctggagagagaagagcgacgaggtgatgggcgagctgaccgaccacgtgacccactgcaagaagagcggcaagccccccctgcagaacaacgagaaggagggcaagaaggagagagccgtggtggacaaggtgttcttcagcagactgatccagatcctgaagatcatggtgcccagaaccttctgcaaggagaccggctacctggtgctgatcgccgtgatgctggtgagcagaacctactgcgacgtgtggatgatccagaacggcaccctgatcgagagcggcatcatcggcagaagcagaaaggacttcaagagatacctgctgaacttcatcgccgccatgcccctgatcagcctggtgaacaacttcctgaagtacggcctgaacgagctgaagctgtgcttcagagtgagactgaccaagtacctgtacgaggagtacctgcaggccttcacctactacaagatgggcaacctggacaacagaatcgccaaccccgaccagctgctgacccaggacgtggagaagttctgcaacagcgtggtggacctgtacagcaacctgagcaagcccttcctggacatcgtgctgtacatcttcaagctgaccagcgccatcggcgcccagggccccgccagcatgatggcctacctggtggtgagcggcctgttcctgaccagactgagaagacccatcggcaagatgaccatcaccgagcagaagtacgagggcgagtacagatacgtgaacagcagactgatcaccaacagcgaggagatcgccttctacaacggcaacaagagagagaagcagaccgtgcacagcgtgttcagaaagctggtggagcacctgcacaacttcatcctgttcagattcagcatgggcttcatcgacagcatcatcgccaagtacctggccaccgtggtgggctacctggtggtgagcagacccttcctggacctgagccaccccagacacctgaagagcacccacagcgagctgctggaggactactaccagagcggcagaatgctgctgagaatgagccaggccctgggcagaatcgtgctggccggcagagagatgaccagactggccggcttcaccgccagaatcaccgagctgatgcaggtgctgaaggacctgaaccacggcaagtacgagagaaccatggtgagccagcaggagaagggcatcgagggcgtgcaggtgatccccctgatccccggcgccggcgagatcatcatcgccgacaacatcatcaagttcgaccacgtgcccctggccacccccaacggcgacgtgctgatcagagacctgaacttcgaggtgagaagcggcgccaacgtgctgatctgcggccccaacggctgcggcaagagcagcctgttcagagtgctgggcgagctgtggcccctgttcggcggcagactgaccaagcccgagagaggcaagctgttctacgtgccccagagaccctacatgaccctgggcaccctgagagaccaggtgatctaccccgacggcagagaggaccagaagagaaagggcatcagcgacctggtgctgaaggagtacctggacaacgtgcagctgggccacatcctggagagagagggcggctgggacagcgtgcaggactggatggacgtgctgagcggcggcgagaagcagagaatggccatggccagactgttctaccacaagccccagttcgccatcctggacgagtgcaccagcgccgtgagcgtggacgtggagggctacatctacagccactgcagaaaggtgggcatcaccctgttcaccgtgagccacagaaagagcctgtggaagcaccacgagtactacctgcacatggacggcagaggcaactacgagttcaagcagatcaccgaggacaccgtggagttcggcagctag

SEQ ID NO: 73850 - DNA, 1761 bp, synthetic construct
  misc_feature 1..1761: note = Description of Artificial Sequence: Synthetic coding sequence
  source 1..1761: mol_type = other DNA
atggtgcccagaaccttctgcaaggagaccggctacctggtgctgatcgccgtgatgctggtgagcagaacctactgcgacgtgtggatgatccagaacggcaccctgatcgagagcggcatcatcggcagaagcagaaaggacttcaagagatacctgctgaacttcatcgccgccatgcccctgatcagcctggtgaacaacttcctgaagtacggcctgaacgagctgaagctgtgcttcagagtgagactgaccaagtacctgtacgaggagtacctgcaggccttcacctactacaagatgggcaacctggacaacagaatcgccaaccccgaccagctgctgacccaggacgtggagaagttctgcaacagcgtggtggacctgtacagcaacctgagcaagcccttcctggacatcgtgctgtacatcttcaagctgaccagcgccatcggcgcccagggccccgccagcatgatggcctacctggtggtgagcggcctgttcctgaccagactgagaagacccatcggcaagatgaccatcaccgagcagaagtacgagggcgagtacagatacgtgaacagcagactgatcaccaacagcgaggagatcgccttctacaacggcaacaagagagagaagcagaccgtgcacagcgtgttcagaaagctggtggagcacctgcacaacttcatcctgttcagattcagcatgggcttcatcgacagcatcatcgccaagtacctggccaccgtggtgggctacctggtggtgagcagacccttcctggacctgagccaccccagacacctgaagagcacccacagcgagctgctggaggactactaccagagcggcagaatgctgctgagaatgagccaggccctgggcagaatcgtgctggccggcagagagatgaccagactggccggcttcaccgccagaatcaccgagctgatgcaggtgctgaaggacctgaaccacggcaagtacgagagaaccatggtgagccagcaggagaagggcatcgagggcgtgcaggtgatccccctgatccccggcgccggcgagatcatcatcgccgacaacatcatcaagttcgaccacgtgcccctggccacccccaacggcgacgtgctgatcagagacctgaacttcgaggtgagaagcggcgccaacgtgctgatctgcggccccaacggctgcggcaagagcagcctgttcagagtgctgggcgagctgtggcccctgttcggcggcagactgaccaagcccgagagaggcaagctgttctacgtgccccagagaccctacatgaccctgggcaccctgagagaccaggtgatctaccccgacggcagagaggaccagaagagaaagggcatcagcgacctggtgctgaaggagtacctggacaacgtgcagctgggccacatcctggagagagagggcggctgggacagcgtgcaggactggatggacgtgctgagcggcggcgagaagcagagaatggccatggccagactgttctaccacaagccccagttcgccatcctggacgagtgcaccagcgccgtgagcgtggacgtggagggctacatctacagccactgcagaaaggtgggcatcaccctgttcaccgtgagccacagaaagagcctgtggaagcaccacgagtactacctgcacatggacggcagaggcaactacgagttcaagcagatcaccgaggacaccgtggagttcggcagctag

SEQ ID NO: 73851 - DNA, 1467 bp, synthetic construct
  misc_feature 1..1467: note = Description of Artificial Sequence: Synthetic coding sequence
  source 1..1467: mol_type = other DNA
atgctgatcgtgctgaacagcaccctgaagagcttcgaccagttcacctgcaacctgctgtacgtgagctggagaaaggacctgaccgagcacctgcacagactgtacttcagaggcagagcctactacaccctgaacgtgctgagagacgacatcgacaaccccgaccagagaatcagccaggacgtggagagattctgcagacagctgagcagcatggccagcaagctgatcatcagccccttcaccctggtgtactacacctaccagtgcttccagagcaccggctggctgggccccgtgagcatcttcggctacttcatcctgggcaccgtggtgaacaagaccctgatgggccccatcgtgatgaagctggtgcaccaggagaagctggagggcgacttcagagccggccacgtggagcacatgagaaccgacagaagactgcagagactgctgcagacccagagagagctgatgagcaaggagctgtggctgtacatcggcatcaacaccttcgactacctgggcagcatcctgagctacgtggtgatcgccatccccatcttcagcggcgtgtacggcgacctgagccccgccgagctgagcaccctggtgagcaagaacgccttcgtgtgcatctacctgatcagctgcttcacccagctgatcgacctgagcaccaccctgagcgacgtggccggctacacccacagaatcggccagctgagagagaccctgctggacatgagcctgaagagccaggactgcgagatcctgggcgagagcgagtggggcctggacaccccccccggctggcccgccgccgagcccgccgacaccgccttcctgctggagagagtgagcatcagcgcccccagcagcgacaagcccctgatcaaggacctgagcctgaagatcagcgagggccagagcctgctgatcaccggcaacaccggcaccggcaagaccagcctgctgagagtgctgggcggcctgtggaccagcaccagaggcagcgtgcagatgctgaccgacttcggcccccacggcgtgctgttcctgccccagaagcccttcttcaccgacggcaccctgagagagcaggtgatctaccccctgaaggaggtgtaccccgacagcggcagcgccgacgacgagagaatcctgagattcctggagctggccggcctgagcaacctggtggccagaaccgagggcctggaccagcaggtggactggaactggtacgacgtgctgagccccggcgagatgcagagactgagcttcgccagactgttctacctgcagcccaagtacgccgtgctggacgaggccaccagcgccctgaccgaggaggtggagagcgagctgtacagaatcggccagcagctgggcatgaccttcatcagcgtgggccacagacagagcctggagaaggtgcccgtgctgaccagaatggcctag

SEQ ID NO: 73852 - DNA, 1821 bp, synthetic construct
  misc_feature 1..1821: note = Description of Artificial Sequence: Synthetic coding sequence
  source 1..1821: mol_type = other DNA
atggccgtggccggccccgcccccggcgccggcgccagacccagactggacctgcagttcctgcagagattcctgcagatcctgaaggtgctgttccccagctggagcagccagaacgccctgatgttcctgaccctgctgtgcctgaccctgctggagcagttcgtgatctaccaggtgggcctgatccccagccagtactacggcgtgctgggcaacaaggacctggagggcttcaagaccctgaccttcctggccgtgatgctgatcgtgctgaacagcaccctgaagagcttcgaccagttcacctgcaacctgctgtacgtgagctggagaaaggacctgaccgagcacctgcacagactgtacttcagaggcagagcctactacaccctgaacgtgctgagagacgacatcgacaaccccgaccagagaatcagccaggacgtggagagattctgcagacagctgagcagcatggccagcaagctgatcatcagccccttcaccctggtgtactacacctaccagtgcttccagagcaccggctggctgggccccgtgagcatcttcggctacttcatcctgggcaccgtggtgaacaagaccctgatgggccccatcgtgatgaagctggtgcaccaggagaagctggagggcgacttcagattcaagcacatgcagatcagagtgaacgccgagcccgccgccttctacagagccggccacgtggagcacatgagaaccgacagaagactgcagagactgctgcagacccagagagagctgatgagcaaggagctgtggctgtacatcggcatcaacaccttcgactacctgggcagcatcctgagctacgtggtgatcgccatccccatcttcagcggcgtgtacggcgacctgagccccgccgagctgagcaccctggtgagcaagaacgccttcgtgtgcatctacctgatcagctgcttcacccagctgatcgacctgagcaccaccctgagcgacgtggccggctacacccacagaatcggccagctgagagagaccctgctggacatgagcctgaagagccaggactgcgagatcctgggcgagagcgagtggggcctggacaccccccccggctggcccgccgccgagcccgccgacaccgccttcctgctggagagagtgagcatcagcgcccccagcagcgacaagcccctgatcaaggacctgagcctgaagatcagcgagggccagagcctgctgatcaccggcaacaccggcaccggcaagaccagcctgctgagagtgctgggcggcctgtggaccagcaccagaggcagcgtgcagatgctgaccgacttcggcccccacggcgtgctgttcctgccccagaagcccttcttcaccgacggcaccctgagagagcaggtgatctaccccctgaaggaggtgtaccccgacagcggcagcgccgacgacgagagaatcctgagattcctggagctggccggcctgagcaacctggtggccagaaccgagggcctggaccagcaggtggactggaactggtacgacgtgctgagccccggcgagatgcagagactgagcttcgccagactgttctacctgcagcccaagtacgccgtgctggacgaggccaccagcgccctgaccgaggaggtggagagcgagctgtacagaatcggccagcagctgggcatgaccttcatcagcgtgggccacagacagagcctggagaagttccacagcctggtgctgaagctgtgcggcggcggcagatgggagctgatgagaatcaaggtggagtag

SEQ ID NO: 73853 - DNA, 297 bp, synthetic construct
  misc_feature 1..297: note = Description of Artificial Sequence: Synthetic coding sequence
  source 1..297: mol_type = other DNA
atgagaagcctgctgctgagcaccgtgggcatcaacaccttcgactacctgggcagcatcctgagctacgtggtgatcgccatccccatcttcagcggcgtgtacggcgacctgagccccgccgagctgagcaccctggtgagcaagaacgccttcgtgtgcatctacctgatcagctgcttcacccagctgatcgacctgagcaccaccctgagcgacgtggccggctacacccacagaatcggccagctgagagagaccctgctggacatgagcctgaagagccaggactgctag

SEQ ID NO: 73854 - DNA, 1800 bp, synthetic construct
  misc_feature 1..1800: note = Description of Artificial Sequence: Synthetic coding sequence
  source 1..1800: mol_type = other DNA
atggccgacaagctgaccagaatcgccatcgtgaaccacgacaagtgcaagcccaagaagtgcagacaggagtgcaagaagagctgccccgtggtgagaatgggcaagctgtgcatcgaggtgaccccccagagcaagatcgcctggatcagcgagaccctgtgcatcggctgcggcatctgcatcaagaagtgccccttcggcgccctgagcatcgtgaacctgcccagcaacctggagaaggagaccacccacagatactgcgccaacgccttcaagctgcacagactgcccatccccagacccggcgaggtgctgggcctggtgggcaccaacggcatcggcaagagcaccgccctgaagatcctggccggcaagcagaagcccaacctgggcaagtacgacgacccccccgactggcaggagatcctgacctacttcagaggcagcgagctgcagaactacttcaccaagatcctggaggacgacctgaaggccatcatcaagccccagtacgtggaccagatccccaaggccgccaagggcaccgtgggcagcatcctggacagaaaggacgagaccaagacccaggccatcgtgtgccagcagctggacctgacccacctgaaggagagaaacgtggaggacctgagcggcggcgagctgcagagattcgcctgcgccgtggtgtgcatccagaaggccgacatcttcatgttcgacgagcccagcagctacctggacgtgaagcagagactgaaggccgccatcaccatcagaagcctgatcaaccccgacagatacatcatcgtggtggagcacgacctgagcgtgctggactacctgagcgacttcatctgctgcctgtacggcgtgcccagcgcctacggcgtggtgaccatgcccttcagcgtgagagagggcatcaacatcttcctggacggctacgtgcccaccgagaacctgagattcagagacgccagcctggtgttcaaggtggccgagaccgccaacgaggaggaggtgaagaagatgtgcatgtacaagtaccccggcatgaagaagaagatgggcgagttcgagctggccatcgtggccggcgagttcaccgacagcgagatcatggtgatgctgggcgagaacggcaccggcaagaccaccttcatcagaatgctggccggcagactgaagcccgacgagggcggcgaggtgcccgtgctgaacgtgagctacaagccccagaagatcagccccaagagcaccggcagcgtgagacagctgctgcacgagaagatcagagacgcctacacccacccccagttcgtgaccgacgtgatgaagcccctgcagatcgagaacatcatcgaccaggaggtgcagaccctgagcggcggcgagctgcagagagtggccctggccctgtgcctgggcaagcccgccgacgtgtacctgatcgacgagcccagcgcctacctggacagcgagcagagactgatggccgccagagtggtgaagagattcatcctgcacgccaagaagaccgccttcgtggtggagcacgacttcatcatggccacctacctggccgacagagtgatcgtgttcgacggcgtgcccagcaagaacaccgtggccaacagcccccagaccctgctggccggcatgaacaagttcctgagccagctggagatcaccttcagaagagaccccaacaactacagacccagaatcaacaagctgaacagcatcaaggacgtggagcagaagaagagcggcaactacttcttcctggacgactag

SEQ ID NO: 73855 - DNA, 633 bp, synthetic construct
  misc_feature 1..633: note = Description of Artificial Sequence: Synthetic coding sequence
  source 1..633: mol_type = other DNA
atggccgacaagctgaccagaatcgccatcgtgaaccacgacaagtgcaagcccaagaagtgcagacaggagtgcaagaagagctgccccgtggtgagaatgggcaagctgtgcatcgaggtgaccccccagagcaagatcgcctggatcagcgagaccctgtgcatcggctgcggcatctgcatcaagaagtgccccttcggcgccctgagcatcgtgaacctgcccagcaacctggagaaggagaccacccacagatactgcgccaacgccttcaagctgcacagactgcccatccccagacccggcgaggtgctgggcctggtgggcaccaacggcatcggcaagagcaccgccctgaagatcctggccggcaagcagaagcccaacctgggcaagtacgacgacccccccgactggcaggagatcctgacctacttcagaggcagcgagctgcagaactacttcaccaagatcctggaggacgacctgaaggccatcatcaagccccagtacgtggaccagatccccaaggccgccaagggcaccgtgggcagcatcctggacagaaaggacgagaccaagacccaggccatcgtgtgccagcagctggacctgacccacctgaagtag

SEQ ID NO: 73856 - DNA, 2538 bp, synthetic construct
  misc_feature 1..2538: note = Description of Artificial Sequence: Synthetic coding sequence
  source 1..2538: mol_type = other DNA
atgcccaaggcccccaagcagcagccccccgagcccgagtggatcggcgacggcgagagcaccagccccagcgacaaggtggtgaagaagggcaagaaggacaagaagatcaagaagaccttcttcgaggagctggccgtggaggacaagcaggccggcgaggaggagaaggtgctgaaggagaaggagcagcagcagcagcagcagcagcagcagcagaagaagaagagagacaccagaaagggcagaagaaagaaggacgtggacgacgacggcgaggagaaggagctgatggagagactgaagaagctgagcgtgcccaccagcgacgaggaggacgaggtgcccgcccccaagcccagaggcggcaagaagaccaagggcggcaacgtgttcgccgccctgatccaggaccagagcgaggaggaggaggaggaggagaagcacccccccaagcccgccaagcccgagaagaacagaatcaacaaggccgtgagcgaggagcagcagcccgccctgaagggcaagaagggcaaggaggagaagagcaagggcaaggccaagccccagaacaagttcgccgccctggacaacgaggaggaggacaaggaggaggagatcatcaaggagaaggagccccccaagcagggcaaggagaaggccaagaaggccgagcagggcagcgaggaggagggcgagggcgaggaggaggaggaggagggcggcgagagcaaggccgacgacccctacgcccacctgagcaagaaggagaagaagaagctgaagaagcagatggagtacgagagacaggtggccagcctgaaggccgccaacgccgccgagaacgacttcagcgtgagccaggccgagatgagcagcagacaggccatgctggagaacgccagcgacatcaagctggagaagttcagcatcagcgcccacggcaaggagctgttcgtgaacgccgacctgtacatcgtggccggcagaagatacggcctggtgggccccaacggcaagggcaagaccaccctgctgaagcacatcgccaacagagccctgagcatcccccccaacatcgacgtgctgctgtgcgagcaggaggtggtggccgacgagacccccgccgtgcaggccgtgctgagagccgacaccaagagactgaagctgctggaggaggagagaagactgcagggccagctggagcagggcgacgacaccgccgccgagagactggagaaggtgtacgaggagctgagagccaccggcgccgccgccgccgaggccaaggccagaagaatcctggccggcctgggcttcgaccccgagatgcagaacagacccacccagaagttcagcggcggctggagaatgagagtgagcctggccagagccctgttcatggagcccaccctgctgatgctggacgagcccaccaaccacctggacctgaacgccgtgatctggctgaacaactacctgcagggctggagaaagaccctgctgatcgtgagccacgaccagggcttcctggacgacgtgtgcaccgacatcatccacctggacgcccagagactgcactactacagaggcaactacatgaccttcaagaagatgtaccagcagaagcagaaggagctgctgaagcagtacgagaagcaggagaagaagctgaaggagctgaaggccggcggcaagagcaccaagcaggccgagaagcagaccaaggaggccctgaccagaaagcagcagaagtgcagaagaaagaaccaggacgaggagagccaggaggcccccgagctgctgaagagacccaaggagtacaccgtgagattcaccttccccgaccccccccccctgagcccccccgtgctgggcctgcacggcgtgaccttcggctaccagggccagaagcccctgttcaagaacctggacttcggcatcgacatggacagcagaatctgcatcgtgggccccaacggcgtgggcaagagcaccctgctgctgctgctgaccggcaagctgacccccacccacggcgagatgagaaagaaccacagactgaagatcggcttcttcaaccagcagtacgccgagcagctgagaatggaggagacccccaccgagtacctgcagagaggcttcaacctgccctaccaggacgccagaaagtgcctgggcagattcggcctggagagccacgcccacaccatccagatctgcaagctgagcggcggccagaaggccagagtggtgttcgccgagctggcctgcagagagcccgacgtgctgatcctggacgagcccaccaacaacctggacatcgagagcatcgacgccctgggcgaggccatcaacgagtacaagggcgccgtgatcgtggtgagccacgacgccagactgatcaccgagaccaactgccagctgtgggtggtggaggagcagagcgtgagccagatcgacggcgacttcgaggactacaagagagaggtgctggaggccctgggcgaggtgatggtgagcagacccagagagtag

SEQ ID NO: 73857 - DNA, 2424 bp, synthetic construct
  misc_feature 1..2424: note = Description of Artificial Sequence: Synthetic coding sequence
  source 1..2424: mol_type = other DNA
atgcccaaggcccccaagcagcagccccccgagcccgagtggatcggcgacggcgagagcaccagccccagcgacaaggtggtgaagaagggcaagaaggacaagaagatcaagaagaccttcttcgaggagctggccgtggaggacaagcaggccggcgaggaggagaaggtgctgaaggagaaggagcagcagcagcagcagcagcagcagcagcagaagaagaagagagacaccagaaagggcagaagaaagaaggacgtggacgacgacggcgaggagaaggagctgatggagagactgaagaagctgagcgtgcccaccagcgacgaggaggacgaggtgcccgcccccaagcccagaggcggcaagaagaccaagggcggcaacgtgttcgccgccctgatccaggaccagagcgaggaggaggaggaggaggagaagcacccccccaagcccgccaagcccgagaagaacagaatcaacaaggccgtgagcgaggagcagcagcccgccctgaagggcaagaagggcaaggaggagaagagcaagggcaaggccaagccccagaacaagttcgccgccctggacaacgaggaggaggacaaggaggaggagatcatcaaggagaaggagccccccaagcagggcaaggagaaggccaagaaggccgagcagatggagtacgagagacaggtggccagcctgaaggccgccaacgccgccgagaacgacttcagcgtgagccaggccgagatgagcagcagacaggccatgctggagaacgccagcgacatcaagctggagaagttcagcatcagcgcccacggcaaggagctgttcgtgaacgccgacctgtacatcgtggccggcagaagatacggcctggtgggccccaacggcaagggcaagaccaccctgctgaagcacatcgccaacagagccctgagcatcccccccaacatcgacgtgctgctgtgcgagcaggaggtggtggccgacgagacccccgccgtgcaggccgtgctgagagccgacaccaagagactgaagctgctggaggaggagagaagactgcagggccagctggagcagggcgacgacaccgccgccgagagactggagaaggtgtacgaggagctgagagccaccggcgccgccgccgccgaggccaaggccagaagaatcctggccggcctgggcttcgaccccgagatgcagaacagacccacccagaagttcagcggcggctggagaatgagagtgagcctggccagagccctgttcatggagcccaccctgctgatgctggacgagcccaccaaccacctggacctgaacgccgtgatctggctgaacaactacctgcagggctggagaaagaccctgctgatcgtgagccacgaccagggcttcctggacgacgtgtgcaccgacatcatccacctggacgcccagagactgcactactacagaggcaactacatgaccttcaagaagatgtaccagcagaagcagaaggagctgctgaagcagtacgagaagcaggagaagaagctgaaggagctgaaggccggcggcaagagcaccaagcaggccgagaagcagaccaaggaggccctgaccagaaagcagcagaagtgcagaagaaagaaccaggacgaggagagccaggaggcccccgagctgctgaagagacccaaggagtacaccgtgagattcaccttccccgaccccccccccctgagcccccccgtgctgggcctgcacggcgtgaccttcggctaccagggccagaagcccctgttcaagaacctggacttcggcatcgacatggacagcagaatctgcatcgtgggccccaacggcgtgggcaagagcaccctgctgctgctgctgaccggcaagctgacccccacccacggcgagatgagaaagaaccacagactgaagatcggcttcttcaaccagcagtacgccgagcagctgagaatggaggagacccccaccgagtacctgcagagaggcttcaacctgccctaccaggacgccagaaagtgcctgggcagattcggcctggagagccacgcccacaccatccagatctgcaagctgagcggcggccagaaggccagagtggtgttcgccgagctggcctgcagagagcccgacgtgctgatcctggacgagcccaccaacaacctggacatcgagagcatcgacgccctgggcgaggccatcaacgagtacaagggcgccgtgatcgtggtgagccacgacgccagactgatcaccgagaccaactgccagctgtgggtggtggaggagcagagcgtgagccagatcgacggcgacttcgaggactacaagagagaggtgctggaggccctgggcgaggtgatggtgagcagacccagagagtag

SEQ ID NO: 73858 - DNA, 2424 bp, synthetic construct; identical to SEQ ID NO: 73857
  misc_feature 1..2424: note = Description of Artificial Sequence: Synthetic coding sequence
  source 1..2424: mol_type = other DNA

SEQ ID NO: 73859 - DNA, 2538 bp, synthetic construct; identical to SEQ ID NO: 73856
  misc_feature 1..2538: note = Description of Artificial Sequence: Synthetic coding sequence
  source 1..2538: mol_type = other DNA

SEQ ID NO: 73860 - DNA, 717 bp, synthetic construct
  misc_feature 1..717: note = Description of Artificial Sequence: Synthetic coding sequence
  source 1..717: mol_type = other DNA
atgcccaaggcccccaagcagcagccccccgagcccgagtggatcggcgacggcgagagcaccagccccagcgacaaggtggtgaagaagggcaagaaggacaagaagatcaagaagaccttcttcgaggagctggccgtggaggacaagcaggccggcgaggaggagaaggtgctgaaggagaaggagcagcagcagcagcagcagcagcagcagcagaagaagaagagagacaccagaaagggcagaagaaagaaggacgtggacgacgacggcgaggagaaggagctgatggagagactgaagaagctgagcagaggcttcaacctgccctaccaggacgccagaaagtgcctgggcagattcggcctggagagccacgcccacaccatccagatctgcaagctgagcggcggccagaaggccagagtggtgttcgccgagctggcctgcagagagcccgacgtgctgatcctggacgagcccaccaacaacctggacatcgagagcatcgacgccctgggcgaggccatcaacgagtacaagggcgccgtgatcgtggtgagccacgacgccagactgatcaccgagaccaactgccagctgtgggtggtggaggagcagagcgtgagccagatcgacggcgacttcgaggactacaagagagaggtgctggaggccctgggcgaggtgatggtgagcagacccagagagtag

SEQ ID NO: 73861 - DNA, 2424 bp, synthetic construct; identical to SEQ ID NO: 73857
  misc_feature 1..2424: note = Description of Artificial Sequence: Synthetic coding sequence
  source 1..2424: mol_type = other DNA

SEQ ID NO: 73862 - DNA, 717 bp, synthetic construct; identical to SEQ ID NO: 73860
  misc_feature 1..717: note = Description of Artificial Sequence: Synthetic coding sequence
  source 1..717: mol_type = other DNA

SEQ ID NO: 73863 - DNA, 1023 bp, synthetic construct
  misc_feature 1..1023: note = Description of Artificial Sequence: Synthetic coding sequence
  source 1..1023: mol_type = other DNA
atgcccaaggcccccaagcagcagccccccgagcccgagtggatcggcgacggcgagagcaccagccccagcgacaaggtggtgaagaagggcaagaaggacaagaagatcaagaagaccttcttcgaggagctggccgtggaggacaagcaggccggcgaggaggagaaggtgctgaaggagaaggagcagcagcagcagcagcagcagcagcagcagcagaagaagaagagagacaccagaaagggcagaagaaagaaggacgtggacgacgacggcgaggagaaggagctgatggagagactgaagaagctgagcgtgcccaccagcgacgaggaggacgaggtgcccgcccccaagcccagaggcggcaagaagaccaagggcggcaacgtgttcgccgccctgatccaggaccagagcgaggaggaggaggaggaggagaagcacccccccaagcccgccaagcccgagaagaacagaatcaacaaggccgtgagcgaggagcagcagcccgccctgaagggcaagaagggcaaggaggagaagagcaagggcaaggccaagccccagaacaagttcgccgccctggacaacgaggaggaggacaaggaggaggagatcatcaaggagaaggagccccccaagcagggcaaggagaaggccaagaaggccgagcagggcagcgaggaggagggcgagggcgaggaggaggaggaggagggcggcgagagcaaggccgacgacccctacgcccacctgagcaagaaggagaagaagaagctgaagaagcagatggagtacgagagacaggtggccagcctgaaggccgccaacgccgccgagaacgacttcagcgtgagccaggccgagatgagcagcagacaggccatgctggagaacgccagcgacatcaagctggagaagttcagcatcagcgcccacggcaaggagctgttcgtgaacgccgacctgtacatcgtggccggcagaagatacggcctggtgggccccaacggctag

SEQ ID NO: 73864 - DNA, 2538 bp, synthetic construct; identical to SEQ ID NO: 73856
  misc_feature 1..2538: note = Description of Artificial Sequence: Synthetic coding sequence
  source 1..2538: mol_type = other DNA

SEQ ID NO: 73865 - DNA, 2424 bp, synthetic construct; identical to SEQ ID NO: 73857
  misc_feature 1..2424: note = Description of Artificial Sequence: Synthetic coding sequence
  source 1..2424: mol_type = other DNA

SEQ ID NO: 73866 - DNA, 2424 bp, synthetic construct; identical to SEQ ID NO: 73857
  misc_feature 1..2424: note = Description of Artificial Sequence: Synthetic coding sequence
  source 1..2424: mol_type = other DNA

SEQ ID NO: 73867 - DNA, 717 bp, synthetic construct; identical to SEQ ID NO: 73860
  misc_feature 1..717: note = Description of Artificial Sequence: Synthetic coding sequence
  source 1..717: mol_type = other DNA

SEQ ID NO: 73868 - DNA, 1023 bp, synthetic construct; identical to SEQ ID NO: 73863
  misc_feature 1..1023: note = Description of Artificial Sequence: Synthetic coding sequence
  source 1..1023: mol_type = other DNA

SEQ ID NO: 73869 - DNA, 2538 bp, synthetic construct; identical to SEQ ID NO: 73856
  misc_feature 1..2538: note = Description of Artificial Sequence: Synthetic coding sequence
  source 1..2538: mol_type = other DNA

SEQ ID NO: 73870 - DNA, 1023 bp, synthetic construct; identical to SEQ ID NO: 73863
  misc_feature 1..1023: note = Description of Artificial Sequence: Synthetic coding sequence
  source 1..1023: mol_type = other DNA

SEQ ID NO: 73871 - DNA, 2538 bp, synthetic construct; identical to SEQ ID NO: 73856
  misc_feature 1..2538: note = Description of Artificial Sequence: Synthetic coding sequence
  source 1..2538: mol_type = other DNA

SEQ ID NO: 73872 - DNA, 1023 bp, synthetic construct; identical to SEQ ID NO: 73863
  misc_feature 1..1023: note = Description of Artificial Sequence: Synthetic coding sequence
  source 1..1023: mol_type = other DNA

SEQ ID NO: 73873 - DNA, 1023 bp, synthetic construct; identical to SEQ ID NO: 73863
  misc_feature 1..1023: note = Description of Artificial Sequence: Synthetic coding sequence
  source 1..1023: mol_type = other DNA

SEQ ID NO: 73874 - DNA, 1023 bp, synthetic construct; identical to SEQ ID NO: 73863
  misc_feature 1..1023: note = Description of Artificial Sequence: Synthetic coding sequence
  source 1..1023: mol_type = other DNA

SEQ ID NO: 73875 - DNA, 1023 bp, synthetic construct; identical to SEQ ID NO: 73863
  misc_feature 1..1023: note = Description of Artificial Sequence: Synthetic coding sequence
  source 1..1023: mol_type = other DNA

SEQ ID NO: 73876 - DNA, 2424 bp, synthetic construct; identical to SEQ ID NO: 73857
  misc_feature 1..2424: note = Description of Artificial Sequence: Synthetic coding sequence
  source 1..2424: mol_type = other DNA

SEQ ID NO: 73877 - DNA, 2424 bp, synthetic construct; identical to SEQ ID NO: 73857
  misc_feature 1..2424: note = Description of Artificial Sequence: Synthetic coding sequence
  source 1..2424: mol_type = other DNA

SEQ ID NO: 73878 - DNA, 717 bp, synthetic construct; identical to SEQ ID NO: 73860
  misc_feature 1..717: note = Description of Artificial Sequence: Synthetic coding sequence
  source 1..717: mol_type = other DNA

SEQ ID NO: 73879 - DNA, 1602 bp, synthetic construct
  misc_feature 1..1602: note = Description of Artificial Sequence: Synthetic coding sequence
  source 1..1602: mol_type = other DNA
atgcccaaggcccccaagcagcagccccccgagcccgagtggatcggcgacggcgagagcaccagccccagcgacaaggtggtgaagaagggcaagaaggacaagaagatcaagaagaccttcttcgaggagctggccgtggaggacaagcaggccggcgaggaggagaaggtgctgaaggagaaggagcagcagcagcagcagcagcagcagcagcagcagaagaagaagagagacaccagaaagggcagaagaaagaaggacgtggacgacgacggcgaggagaaggagctgatggagagactgaagaagctgagcgtgcccaccagcgacgaggaggacgaggtgcccgcccccaagcccagaggcggcaagaagaccaagggcggcaacgtgttcgccgccctgatccaggaccagagcgaggaggaggaggaggaggagaagcacccccccaagcccgccaagcccgagaagaacagaatcaacaaggccgtgagcgaggagcagcagcccgccctgaagggcaagaagggcaaggaggagaagagcaagggcaaggccaagccccagaacaagttcgccgccctggacaacgaggaggaggacaaggaggaggagatcatcaaggagaaggagccccccaagcagggcaaggagaaggccaagaaggccgagcagggcagcgaggaggagggcgagggcgaggaggaggaggaggagggcggcgagagcaaggccgacgacccctacgcccacctgagcaagaaggagaagaagaagctgaagaagcagatggagtacgagagacaggtggccagcctgaaggccgccaacgccgccgagaacgacttcagcgtgagccaggccgagatgagcagcagacaggccatgctggagaacgccagcgacatcaagctggagaagttcagcatcagcgcccacggcaaggagctgttcgtgaacgccgacctgtacatcgtggccggcagaagatacggcctggtgggccccaacggcaagggcaagaccaccctgctgaagcacatcgccaacagagccctgagcatcccccccaacatcgacgtgctgctgtgcgagcaggaggtggtggccgacgagacccccgccgtgcaggccgtgctgagagacgacaccgccgccgagagactggagaaggtgtacgaggagctgagagccaccggcgccgccgccgccgaggccaaggccagaagaatcctggccggcctgggcttcgaccccgagatgcagaacagacccacccagaagttcagcggcggctggagaatgagagtgagcctggccagagccctgttcatggagcccaccctgctgatgctggacgagcccaccaacaacctggacatcgagagcatcgacgccctgggcgaggccatcaacgagtacaagggcgccgtgatcgtggtgagccacgacgccagactgatcaccgagaccaactgccagctgtgggtggtggaggagcagagcgtgagccagatcgacggcgacttcgaggactacaagagagaggtgctggaggccctgggcgaggtgatggtgagcagacccagagagtag

SEQ ID NO: 73880 - DNA, 717 bp, synthetic construct; identical to SEQ ID NO: 73860
  misc_feature 1..717: note = Description of Artificial Sequence: Synthetic coding sequence
  source 1..717: mol_type = other DNA

SEQ ID NO: 73881 - DNA, 2538 bp, synthetic construct; identical to SEQ ID NO: 73856
  misc_feature 1..2538: note = Description of Artificial Sequence: Synthetic coding sequence
  source 1..2538: mol_type = other DNA

SEQ ID NO: 73882 - DNA, 2538 bp, synthetic construct; identical to SEQ ID NO: 73856
  misc_feature 1..2538: note = Description of Artificial Sequence: Synthetic coding sequence
  source 1..2538: mol_type = other DNA

SEQ ID NO: 73883 - DNA, 717 bp, synthetic construct; identical to SEQ ID NO: 73860
  misc_feature 1..717: note = Description of Artificial Sequence: Synthetic coding sequence
  source 1..717: mol_type = other DNA

SEQ ID NO: 73884 - DNA, 1602 bp, synthetic construct; identical to SEQ ID NO: 73879
  misc_feature 1..1602: note = Description of Artificial Sequence: Synthetic coding sequence
  source 1..1602: mol_type = other DNA

SEQ ID NO: 73885 - DNA, 1599 bp, synthetic construct
  misc_feature 1..1599: note = Description of Artificial Sequence: Synthetic coding sequence
  source 1..1599: mol_type = other DNA
atgcccaaggcccccaagcagcagccccccgagcccgagtggatcggcgacggcgagagcaccagccccagcgacaaggtggtgaagaagggcaagaaggacaagaagatcaagaagaccttcttcgaggagctggccgtggaggacaagcaggccggcgaggaggagaaggtgctgaaggagaaggagcagcagcagcagcagcagcagcagcagcagaagaagaagagagacaccagaaagggcagaagaaagaaggacgtggacgacgacggcgaggagaaggagctgatggagagactgaagaagctgagcgtgcccaccagcgacgaggaggacgaggtgcccgcccccaagcccagaggcggcaagaagaccaagggcggcaacgtgttcgccgccctgatccaggaccagagcgaggaggaggaggaggaggagaagcacccccccaagcccgccaagcccgagaagaacagaatcaacaaggccgtgagcgaggagcagcagcccgccctgaagggcaagaagggcaaggaggagaagagcaagggcaaggccaagccccagaacaagttcgccgccctggacaacgaggaggaggacaaggaggaggagatcatcaaggagaaggagccccccaagcagggcaaggagaaggccaagaaggccgagcagggcagcgaggaggagggcgagggcgaggaggaggaggaggagggcggcgagagcaaggccgacgacccctacgcccacctgagcaagaaggagaagaagaagctgaagaagcagatggagtacgagagacaggtggccagcctgaaggccgccaacgccgccgagaacgacttcagcgtgagccaggccgagatgagcagcagacaggccatgctggagaacgccagcgacatcaagctggagaagttcagcatcagcgcccacggcaaggagctgttcgtgaacgccgacctgtacatcgtggccggcagaagatacggcctggtgggccccaacggcaagggcaagaccaccctgctgaagcacatcgccaacagagccctgagcatcccccccaacatcgacgtgctgctgtgcgagcaggaggtggtggccgacgagacccccgccgtgcaggccgtgctgagagacgacaccgccgccgagagactggagaaggtgtacgaggagctgagagccaccggcgccgccgccgccgaggccaaggccagaagaatcctggccggcctgggcttcgaccccgagatgcagaacagacccacccagaagttcagcggcggctggagaatgagagtgagcctggccagagccctgttcatggagcccaccctgctgatgctggacgagcccaccaacaacctggacatcgagagcatcgacgccctgggcgaggccatcaacgagtacaagggcgccgtgatcgtggtgagccacgacgccagactgatcaccgagaccaactgccagctgtgggtggtggaggagcagagcgtgagccagatcgacggcgacttcgaggactacaagagagaggtgctggaggccctgggcgaggtgatggtgagcagacccagagagtag

SEQ ID NO: 73886 - DNA, 1599 bp, synthetic construct; identical to SEQ ID NO: 73885
  misc_feature 1..1599: note = Description of Artificial Sequence: Synthetic coding sequence
  source 1..1599: mol_type = other DNA

SEQ ID NO: 73887 - DNA, 1599 bp, synthetic construct; identical to SEQ ID NO: 73885
  misc_feature 1..1599: note = Description of Artificial Sequence: Synthetic coding sequence
  source 1..1599: mol_type = other DNA

SEQ ID NO: 73888 - DNA, 1599 bp, synthetic construct; identical to SEQ ID NO: 73885
  misc_feature 1..1599: note = Description of Artificial Sequence: Synthetic coding sequence
  source 1..1599: mol_type = other DNA

SEQ ID NO: 73889 - DNA, 1602 bp, synthetic construct; identical to SEQ ID NO: 73879
  misc_feature 1..1602: note = Description of Artificial Sequence: Synthetic coding sequence
  source 1..1602: mol_type = other DNA

SEQ ID NO: 73890 - DNA, 1515 bp, synthetic construct
  misc_feature 1..1515: note = Description of Artificial Sequence: Synthetic coding sequence
  source 1..1515: mol_type = other DNA
atggacctgatccccaacttcgccatggagacctgggtgctggtggccaccagcctggtgctgctgtacatctacggcacccacagccacaagctgttcaagaagctgggcatccccggccccacccccctgcccttcctgggcaccatcctgttctacctgagaggcctgtggaacttcgacagagagtgcaacgagaagtacggcgagatgtggggcctgtacgagggccagcagcccatgctggtgatcatggaccccgacatgatcaagaccgtgctggtgaaggagtgctacagcgtgttcaccaaccagatgcccctgggccccatgggcttcctgaagagcgccctgagcttcgccgaggacgaggagtggaagagaatcagaaccctgctgagccccgccttcaccagcgtgaagttcaaggagatggtgcccatcatcagccagtgcggcgacatgctggtgagaagcctgagacaggaggccgagaacagcaagagcatcaacctgaaggacttcttcggcgcctacaccatggacgtgatcaccggcaccctgttcggcgtgaacctggacagcctgaacaacccccaggaccccttcctgaagaacatgaagaagctgctgaagctggacttcctggaccccttcctgctgctgatcagcctgttccccttcctgacccccgtgttcgaggccctgaacatcggcctgttccccaaggacgtgacccacttcctgaagaacagcatcgagagaatgaaggagagcagactgaaggacaagcagaagcacagagtggacttcttccagcagatgatcgacagccagaacagcaaggagaccaagagccacaaggccctgagcgacctggagctggtggcccagagcatcatcatcatcttcgccgcctacgacaccaccagcaccaccctgcccttcatcatgtacgagctggccacccaccccgacgtgcagcagaagctgcaggaggagatcgacgccgtgctgcccaacaaggcccccgtgacctacgacgccctggtgcagatggagtacctggacatggtggtgaacgagaccctgagactgttccccgtggtgagcagagtgaccagagtgtgcaagaaggacatcgagatcaacggcgtgttcatccccaagggcctggccgtgatggtgcccatctacgccctgcaccacgaccccaagtactggaccgagcccgagaagttctgccccgagagcagattcagcaagaagaacaaggacagcatcgacctgtacagatacatccccttcggcgccggccccagaaactgcatcggcatgagattcgccctgaccaacatcaagctggccgtgatcagagccctgcagaacttcagcttcaagccctgcaaggagacccagatccccctgaagctggacaacctgcccatcctgcagcccgagaagcccatcgtgctgaaggtgcacctgagagacggcatcaccagcggcccctag

SEQ ID NO: 73891 - DNA, 1872 bp, synthetic construct
  misc_feature 1..1872: note = Description of Artificial Sequence: Synthetic coding sequence
  source 1..1872: mol_type = other DNA
atgcccagcgacctggccaagaagaaggccgccaagaagaaggaggccgccaaggccagacagagacccagaaagggccacgaggagaacggcgacgtggtgaccgagccccaggtggccgagaagaacgaggccaacggcagagagaccaccgaggtggacctgctgaccaaggagctggaggacttcgagatgaagaaggccgccgccagagccgtgaccggcgtgctggccagccaccccaacagcaccgacgtgcacatcatcaacctgagcctgaccttccacggccaggagctgctgagcgacaccaagctggagctgaacagcggcagaagatacggcctgatcggcctgaacggcatcggcaagagcatgctgctgagcgccatcggcaagagagaggtgcccatccccgagcacatcgacatctaccacctgaccagagagatgccccccagcgacaagacccccctgcactgcgtgatggaggtggacaccgagagagccatgctggagaaggaggccgagagactggcccacgaggacgccgagtgcgagaagctgatggagctgtacgagagactggaggagctggacgccgacaaggccgagatgagagccagcagaatcctgcacggcctgggcttcacccccgccatgcagagaaagaagctgaaggacttcagcggcggctggagaatgagagtggccctggccagagccctgttcatcagacccttcatgctgctgctggacgagcccaccaaccacctggacctggacgcctgcgtgtggctggaggaggagctgaagaccttcaagagaatcctggtgctggtgagccacagccaggacttcctgaacggcgtgtgcaccaacatcatccacatgcacaacaagaagctgaagtactacaccggcaactacgaccagtacgtgaagaccagactggagctggaggagaaccagatgaagagattccactgggagcaggaccagatcgcccacatgaagaactacatcgccagattcggccacggcagcgccaagctggccagacaggcccagagcaaggagaagaccctgcagaagatgatggccagcggcctgaccgagagagtggtgagcgacaagaccctgagcttctacttccccccctgcggcaagatccccccccccgtgatcatggtgcagaacgtgagcttcaagtacaccaaggacggcccctgcatctacaacaacctggagttcggcatcgacctggacaccagagtggccctggtgggccccaacggcgccggcaagagcaccctgctgaagctgctgaccggcgagctgctgcccaccgacggcatgatcagaaagcacagccacgtgaagatcggcagataccaccagcacctgcaggagcagctggacctggacctgagccccctggagtacatgatgaagtgctaccccgagatcaaggagaaggaggagatgagaaagatcatcggcagatacggcctgaccggcaagcagcaggtgagccccatcagaaacctgagcgacggccagaagtgcagagtgtgcctggcctggctggcctggcagaacccccacatgctgttcctggacgagcccaccaaccacctggacatcgagaccatcgacgccctggccgacgccatcaacgagttcgagggcggcatgatgctggtgagccacgacttcagactgatccagcaggtggcccaggagatctgggtgtgcgagaagcagaccatcaccaagtggcccggcgacatcctggcctacaaggagcacctgaagagcaagctggtggacgaggagccccagctgaccaagagaacccacaacgtgtag

SEQ ID NO: 73892 - DNA, 723 bp, synthetic construct
  misc_feature 1..723: note = Description of Artificial Sequence: Synthetic coding sequence
  source 1..723: mol_type = other DNA
atgcccagcgacctggccaagaagaaggccgccaagaagaaggaggccgccaaggccagacagagacccagaaagggccacgaggagaacggcgacgtggtgaccgagccccaggtggccgagaagaacgaggccaacggcagagagaccaccgaggtggacctgctgaccaaggagctggaggacttcgagatgaagaaggccgccgccagagccgtgaccggcgtgctggccagccaccccaacagcaccgacgtgcacatcatcaacctgagcctgaccttccacggccaggagctgctgagcgacaccaagctggagctgaacagcggcagaagatacggcctgatcggcctgaacggcatcggcaagagcatgctgctgagcgccatcggcaagagagaggtgcccatccccgagcacatcgacatctaccacctgaccagagagatgccccccagcgacaagacccccctgcactgcgtgatggaggtggacaccgagagagccatgctggagaaggaggccgagagactggcccacgaggacgccgagtgcgagaagctgatggagctgtacgagagactggaggagctggacgccgacaaggccgagatgagagccagcagaatcctgcacggcctgggcttcacccccgccatgcagagaaagaagctgaaggacttcagcggcggctggagaatgagagtggccctggcctag

SEQ ID NO: 73893 - DNA, 867 bp, synthetic construct
  misc_feature 1..867: note = Description of Artificial Sequence: Synthetic coding sequence
  source 1..867: mol_type = other DNA
atgcccagcgacctggccaagaagaaggccgccaagaagaaggaggccgccaaggccagacagagacccagaaagggccacgaggagaacggcgacgtggtgaccgagccccaggtggccgagaagaacgaggccaacggcagagagaccaccgaggtggacctgctgaccaaggagctggaggacttcgagatgaagaaggccgccgccagagccgtgaccggcgtgctggccagccaccccaacagcaccgacgtgcacatcatcaacctgagcctgaccttccacggccaggagctgctgagcgacaccaagctggagctgaacagcggcagaagatacggcctgatcggcctgaacggcatcggcaagagcatgctgctgagcgccatcggcaagagagaggtgcccatccccgagcacatcgacatctaccacctgaccagagagatgccccccagcgacaagacccccctgcactgcgtgatggaggtggacaccgagagagccatgctggagaaggaggccgagagactggcccacgaggacgccgagtgcgagaagctgatggagctgtacgagagactggaggagctggacgccgacaaggccgagatgagagccagcagaatcctgcacggcctgggcttcacccccgccatgcagagaaagaagctgaaggacttcagcggcggctggagaatgagagtggccctggccagagccctgttcatcagacccttcatgctgctgctggacgagcccaccaaccacctggacctggacgcctgcgtgtggctggaggaggagctgaagaccttcaagagaatcctggtgctggtgagccacagccaggacttcctgtag

SEQ ID NO: 73894 - DNA, 2361 bp, synthetic construct
  misc_feature 1..2361: note = Description of Artificial Sequence: Synthetic coding sequence
  source 1..2361: mol_type = other DNA
atggtgagaagaggctggagcgtgtgcaccgccatcctgctggccagactgtggtgcctggtgcccacccacaccttcctgagcgagtaccccgaggccgccgagtacccccaccccggctgggtgtactggctgcagatggccgtggcccccggccacctgagagcctgggtgatgagaaacaacgtgaccaccaacatccccagcgccttcagcggcaccctgacccacgaggagaaggccgtgctgaccgtgttcaccggcaccgccaccgccgtgcacgtgcaggtggccgccctggccagcgccaagctggagagcagcgtgttcgtgaccgactgcgtgagctgcaagatcgagaacgtgtgcgacagcgccctgcagggcaagagagtgcccatgagcggcctgcagggcagcagcatcgtgatcatgccccccagcaacagacccctgaaggccagcgccgccagctgcacctggagcgtgcaggtgcagggcggcccccaccacctgggcgtggtggccatcagcggcaaggtgctgagcgccgcccacggcgccggcagagcctacggctggggcttccccggcgaccccatggaggagggctacaagaccctgctgaagggcatcagcggcaagttcaacagcggcgagctggtggccatcatgggccccagcggcgccggcaagagcaccctgatgaacatcctggccggctacagagagaccggcatgaagggcgccgtgctgatcaacggcctgcccagagacctgagatgcttcagaaaggtgagctgctacatcatgcaggacgacatgctgctgccccacctgaccgtgcaggaggccatgatggtgagcgcccacctgaagctgcaggagaaggacgagggcagaagagagatggtgaaggagatcctgaccgccctgggcctgctgagctgcgccaacaccagaaccggcagcctgagcggcggccagagaaagagactggccatcgccctggagctggtgaacaacccccccgtgatgttcttcgacgagcccaccagcggcctggacagcgccagctgcttccaggtggtgagcctgatgaagggcctggcccagggcggcagaagcatcatctgcaccatccaccagcccagcgccaagctgttcgagctgttcgaccagctgtacgtgctgagccagggccagtgcgtgtacagaggcaaggtgtgcaacctggtgccctacctgagagacctgggcctgaactgccccacctaccacaaccccgccgacttcgtgatggaggtggccagcggcgagtacggcgaccagaacagcagactggtgagagccgtgagagagggcatgtgcgacagcgaccacaagagagacctgggcggcgacgccgaggtgaaccccttcctgtggcacagacccagcgaggaggtgaagcagaccaagagactgaagggcctgagaaaggacagcagcagcatggagggctgccacagcttcagcgccagctgcctgacccagttctgcatcctgttcaagagaaccttcctgagcatcatgagagacagcgtgctgacccacctgagaatcaccagccacatcggcatcggcctgctgatcggcctgctgtacctgggcatcggcaacgaggccaagaaggtgctgagcaacagcggcttcctgttcttcagcatgctgttcctgatgttcgccgccctgatgcccaccgtgctgaccttccccctggagatgggcgtgttcctgagagagcacctgaactactggtacagcctgaaggcctactacctggccaagaccatggccgacgtgcccttccagatcatgttccccgtggcctactgcagcatcgtgtactggatgaccagccagcccagcgacgccgtgagattcgtgctgttcgccgccctgggcaccatgaccagcctggtggcccagagcctgggcctgctgatcggcgccgccagcaccagcctgcaggtggccaccttcgtgggccccgtgaccgccatccccgtgctgctgttcagcggcttcttcgtgagcttcgacaccatccccacctacctgcagtggatgagctacatcagctacgtgagatacggcttcgagggcgtgatcctgagcatctacggcctggacagagaggacctgcactgcgacatcgacgagacctgccacttccagaagagcgaggccatcctgagagagctggacgtggagaacgccaagctgtacctggacttcatcgtgctgggcatcttcttcatcagcctgagactgatcgcctacttcgtgctgagatacaagatcagagccgagagatag

SEQ ID NO: 73895 - DNA, 2034 bp, synthetic construct
  misc_feature 1..2034: note = Description of Artificial Sequence: Synthetic coding sequence
  source 1..2034: mol_type = other DNA
atgagaatcagcctgcccagagcccccgagagagacggcggcgtgagcgccagcagcctgctggacaccgtgaccaacgccagcagctacagcgccgagatgaccgagcccaagagcgtgtgcgtgagcgtggacgaggtggtgagcagcaacatggaggccaccgagaccgacctgctgaacggccacctgaagaaggtggacaacaacctgaccgaggcccagagattcagcagcctgcccagaagagccgccgtgaacatcgagttcagagacctgagctacagcgtgcccgagggcccctggtggagaaagaagggctacaagaccctgctgaagggcatcagcggcaagttcaacagcggcgagctggtggccatcatgggccccagcggcgccggcaagagcaccctgatgaacatcctggccggctacagagagaccggcatgaagggcgccgtgctgatcaacggcctgcccagagacctgagatgcttcagaaaggtgagctgctacatcatgcaggacgacatgctgctgccccacctgaccgtgcaggaggccatgatggtgagcgcccacctgaagctgcaggagaaggacgagggcagaagagagatggtgaaggagatcctgaccgccctgggcctgctgagctgcgccaacaccagaaccggcagcctgagcggcggccagagaaagagactggccatcgccctggagctggtgaacaacccccccgtgatgttcttcgacgagcccaccagcggcctggacagcgccagctgcttccaggtggtgagcctgatgaagggcctggcccagggcggcagaagcatcatctgcaccatccaccagcccagcgccaagctgttcgagctgttcgaccagctgtacgtgctgagccagggccagtgcgtgtacagaggcaaggtgtgcaacctggtgccctacctgagagacctgggcctgaactgccccacctaccacaaccccgccgacttcgtgatggaggtggccagcggcgagtacggcgaccagaacagcagactggtgagagccgtgagagagggcatgtgcgacagcgaccacaagagagacctgggcggcgacgccgaggtgaaccccttcctgtggcacagacccagcgaggaggacagcagcagcatggagggctgccacagcttcagcgccagctgcctgacccagttctgcatcctgttcaagagaaccttcctgagcatcatgagagacagcgtgctgacccacctgagaatcaccagccacatcggcatcggcctgctgatcggcctgctgtacctgggcatcggcaacgaggccaagaaggtgctgagcaacagcggcttcctgttcttcagcatgctgttcctgatgttcgccgccctgatgcccaccgtgctgaccttccccctggagatgggcgtgttcctgagagagcacctgaactactggtacagcctgaaggcctactacctggccaagaccatggccgacgtgcccttccagatcatgttccccgtggcctactgcagcatcgtgtactggatgaccagccagcccagcgacgccgtgagattcgtgctgttcgccgccctgggcaccatgaccagcctggtggcccagagcctgggcctgctgatcggcgccgccagcaccagcctgcaggtggccaccttcgtgggccccgtgaccgccatccccgtgctgctgttcagcggcttcttcgtgagcttcgacaccatccccacctacctgcagtggatgagctacatcagctacgtgagatacggcttcgagggcgtgatcctgagcatctacggcctggacagagaggacctgcactgcgacatcgacgagacctgccacttccagaagagcgaggccatcctgagagagctggacgtggagaacgccaagctgtacctggacttcatcgtgctgggcatcttcttcatcagcctgagactgatcgcctacttcgtgctgagatacaagatcagagccgagagatag

SEQ ID NO: 73896 - DNA, 1992 bp, synthetic construct
  misc_feature 1..1992: note = Description of Artificial Sequence: Synthetic coding sequence
  source 1..1992: mol_type = other DNA
atgatcatgagactgccccagccccacggcaccaacgccagcagctacagcgccgagatgaccgagcccaagagcgtgtgcgtgagcgtggacgaggtggtgagcagcaacatggaggccaccgagaccgacctgctgaacggccacctgaagaaggtggacaacaacctgaccgaggcccagagattcagcagcctgcccagaagagccgccgtgaacatcgagttcagagacctgagctacagcgtgcccgagggcccctggtggagaaagaagggctacaagaccctgctgaagggcatcagcggcaagttcaacagcggcgagctggtggccatcatgggccccagcggcgccggcaagagcaccctgatgaacatcctggccggctacagagagaccggcatgaagggcgccgtgctgatcaacggcctgcccagagacctgagatgcttcagaaaggtgagctgctacatcatgcaggacgacatgctgctgccccacctgaccgtgcaggaggccatgatggtgagcgcccacctgaagctgcaggagaaggacgagggcagaagagagatggtgaaggagatcctgaccgccctgggcctgctgagctgcgccaacaccagaaccggcagcctgagcggcggccagagaaagagactggccatcgccctggagctggtgaacaacccccccgtgatgttcttcgacgagcccaccagcggcctggacagcgccagctgcttccaggtggtgagcctgatgaagggcctggcccagggcggcagaagcatcatctgcaccatccaccagcccagcgccaagctgttcgagctgttcgaccagctgtacgtgctgagccagggccagtgcgtgtacagaggcaaggtgtgcaacctggtgccctacctgagagacctgggcctgaactgccccacctaccacaaccccgccgacttcgtgatggaggtggccagcggcgagtacggcgaccagaacagcagactggtgagagccgtgagagagggcatgtgcgacagcgaccacaagagagacctgggcggcgacgccgaggtgaaccccttcctgtggcacagacccagcgaggaggacagcagcagcatggagggctgccacagcttcagcgccagctgcctgacccagttctgcatcctgttcaagagaaccttcctgagcatcatgagagacagcgtgctgacccacctgagaatcaccagccacatcggcatcggcctgctgatcggcctgctgtacctgggcatcggcaacgaggccaagaaggtgctgagcaacagcggcttcctgttcttcagcatgctgttcctgatgttcgccgccctgatgcccaccgtgctgaccttccccctggagatgggcgtgttcctgagagagcacctgaactactggtacagcctgaaggcctactacctggccaagaccatggccgacgtgcccttccagatcatgttccccgtggcctactgcagcatcgtgtactggatgaccagccagcccagcgacgccgtgagattcgtgctgttcgccgccctgggcaccatgaccagcctggtggcccagagcctgggcctgctgatcggcgccgccagcaccagcctgcaggtggccaccttcgtgggccccgtgaccgccatccccgtgctgctgttcagcggcttcttcgtgagcttcgacaccatccccacctacctgcagtggatgagctacatcagctacgtgagatacggcttcgagggcgtgatcctgagcatctacggcctggacagagaggacctgcactgcgacatcgacgagacctgccacttccagaagagcgaggccatcctgagagagctggacgtggagaacgccaagctgtacctggacttcatcgtgctgggcatcttcttcatcagcctgagactgatcgcctacttcgtgctgagatacaagatcagagccgagagatag

SEQ ID NO: 73897 - DNA, 2037 bp, synthetic construct
  misc_feature 1..2037: note = Description of Artificial Sequence: Synthetic coding sequence
  source 1..2037: mol_type = other DNA
atggcctgcctgatggccgccttcagcgtgggcaccgccatgaacgccagcagctacagcgccgagatgaccgagcccaagagcgtgtgcgtgagcgtggacgaggtggtgagcagcaacatggaggccaccgagaccgacctgctgaacggccacctgaagaaggtggacaacaacctgaccgaggcccagagattcagcagcctgcccagaagagccgccgtgaacatcgagttcagagacctgagctacagcgtgcccgagggcccctggtggagaaagaagggctacaagaccctgctgaagggcatcagcggcaagttcaacagcggcgagctggtggccatcatgggccccagcggcgccggcaagagcaccctgatgaacatcctggccggctacagagagaccggcatgaagggcgccgtgctgatcaacggcctgcccagagacctgagatgcttcagaaaggtgagctgctacatcatgcaggacgacatgctgctgccccacctgaccgtgcaggaggccatgatggtgagcgcccacctgaagctgcaggagaaggacgagggcagaagagagatggtgaaggagatcctgaccgccctgggcctgctgagctgcgccaacaccagaaccggcagcctgagcggcggccagagaaagagactggccatcgccctggagctggtgaacaacccccccgtgatgttcttcgacgagcccaccagcggcctggacagcgccagctgcttccaggtggtgagcctgatgaagggcctggcccagggcggcagaagcatcatctgcaccatccaccagcccagcgccaagctgttcgagctgttcgaccagctgtacgtgctgagccagggccagtgcgtgtacagaggcaaggtgtgcaacctggtgccctacctgagagacctgggcctgaactgccccacctaccacaaccccgccgacttcgtgatggaggtggccagcggcgagtacggcgaccagaacagcagactggtgagagccgtgagagagggcatgtgcgacagcgaccacaagagagacctgggcggcgacgccgaggtgaaccccttcctgtggcacagacccagcgaggaggtgaagcagaccaagagactgaagggcctgagaaaggacagcagcagcatggagggctgccacagcttcagcgccagctgcctgacccagttctgcatcctgttcaagagaaccttcctgagcatcatgagagacagcgtgctgacccacctgagaatcaccagccacatcggcatcggcctgctgatcggcctgctgtacctgggcatcggcaacgaggccaagaaggtgctgagcaacagcggcttcctgttcttcagcatgctgttcctgatgttcgccgccctgatgcccaccgtgctgaccttccccctggagatgggcgtgttcctgagagagcacctgaactactggtacagcctgaaggcctactacctggccaagaccatggccgacgtgcccttccagatcatgttccccgtggcctactgcagcatcgtgtactggatgaccagccagcccagcgacgccgtgagattcgtgctgttcgccgccctgggcaccatgaccagcctggtggcccagagcctgggcctgctgatcggcgccgccagcaccagcctgcaggtggccaccttcgtgggccccgtgaccgccatccccgtgctgctgttcagcggcttcttcgtgagcttcgacaccatccccacctacctgcagtggatgagctacatcagctacgtgagatacggcttcgagggcgtgatcctgagcatctacggcctggacagagaggacctgcactgcgacatcgacgagacctgccacttccagaagagcgaggccatcctgagagagctggacgtggagaacgccaagctgtacctggacttcatcgtgctgggcatcttcttcatcagcctgagactgatcgcctacttcgtgctgagatacaagatcagagccgagagatag

SEQ ID NO: 73898 - DNA, 2475 bp, synthetic construct
  misc_feature 1..2475: note = Description of Artificial Sequence: Synthetic coding sequence
  source 1..2475: mol_type = other DNA
atgctggccgtgcagcagaccgagcacctgcccgcctgcccccccgccagaagatggagcagcaacttctgccccgagagcaccgagggcggccccagcctgctgggcctgagagacatggtgagaagaggctggagcgtgtgcaccgccatcctgctggccagactgtggtgcctggtgcccacccacaccttcctgagcgagtaccccgaggccgccgagtacccccaccccggctgggtgtactggctgcagatggccgtggcccccggccacctgagagcctgggtgatgagaaacaacgtgaccaccaacatccccagcgccttcagcggcaccctgacccacgaggagaaggccgtgctgaccgtgttcaccggcaccgccaccgccgtgcacgtgcaggtggccgccctggccagcgccaagctggagagcagcgtgttcgtgaccgactgcgtgagctgcaagatcgagaacgtgtgcgacagcgccctgcagggcaagagagtgcccatgagcggcctgcagggcagcagcatcgtgatcatgccccccagcaacagacccctggccagcgccgccagctgcacctggagcgtgcaggtgcagggcggcccccaccacctgggcgtggtggccatcagcggcaaggtgctgagcgccgcccacggcgccggcagagcctacggctggggcttccccggcgaccccatggaggagggctacaagaccctgctgaagggcatcagcggcaagttcaacagcggcgagctggtggccatcatgggccccagcggcgccggcaagagcaccctgatgaacatcctggccggctacagagagaccggcatgaagggcgccgtgctgatcaacggcctgcccagagacctgagatgcttcagaaaggtgagctgctacatcatgcaggacgacatgctgctgccccacctgaccgtgcaggaggccatgatggtgagcgcccacctgaagctgcaggagaaggacgagggcagaagagagatggtgaaggagatcctgaccgccctgggcctgctgagctgcgccaacaccagaaccggcagcctgagcggcggccagagaaagagactggccatcgccctggagctggtgaacaacccccccgtgatgttcttcgacgagcccaccagcggcctggacagcgccagctgcttccaggtggtgagcctgatgaagggcctggcccagggcggcagaagcatcatctgcaccatccaccagcccagcgccaagctgttcgagctgttcgaccagctgtacgtgctgagccagggccagtgcgtgtacagaggcaaggtgtgcaacctggtgccctacctgagagacctgggcctgaactgccccacctaccacaaccccgccgacttcgtgatggaggtggccagcggcgagtacggcgaccagaacagcagactggtgagagccgtgagagagggcatgtgcgacagcgaccacaagagagacctgggcggcgacgccgaggtgaaccccttcctgtggcacagacccagcgaggaggtgaagcagaccaagagactgaagggcctgagaaaggacagcagcagcatggagggctgccacagcttcagcgccagctgcctgacccagttctgcatcctgttcaagagaaccttcctgagcatcatgagagacagcgtgctgacccacctgagaatcaccagccacatcggcatcggcctgctgatcggcctgctgtacctgggcatcggcaacgaggccaagaaggtgctgagcaacagcggcttcctgttcttcagcatgctgttcctgatgttcgccgccctgatgcccaccgtgctgaccttccccctggagatgggcgtgttcctgagagagcacctgaactactggtacagcctgaaggcctactacctggccaagaccatggccgacgtgcccttccagatcatgttccccgtggcctactgcagcatcgtgtactggatgaccagccagcccagcgacgccgtgagattcgtgctgttcgccgccctgggcaccatgaccagcctggtggcccagagcctgggcctgctgatcggcgccgccagcaccagcctgcaggtggccaccttcgtgggccccgtgaccgccatccccgtgctgctgttcagcggcttcttcgtgagcttcgacaccatccccacctacctgcagtggatgagctacatcagctacgtgagatacggcttcgagggcgtgatcctgagcatctacggcctggacagagaggacctgcactgcgacatcgacgagacctgccacttccagaagagcgaggccatcctgagagagctggacgtggagaacgccaagctgtacctggacttcatcgtgctgggcatcttcttcatcagcctgagactgatcgcctacttcgtgctgagatacaagatcagagccgagagatag

SEQ ID NO: 73899 - DNA, 2001 bp, synthetic construct
  misc_feature 1..2001: note = Description of Artificial Sequence: Synthetic coding sequence
  source 1..2001: mol_type = other DNA
atggcctgcctgatggccgccttcagcgtgggcaccgccatgaacgccagcagctacagcgccgagatgaccgagcccaagagcgtgtgcgtgagcgtggacgaggtggtgagcagcaacatggaggccaccgagaccgacctgctgaacggccacctgaagaaggtggacaacaacctgaccgaggcccagagattcagcagcctgcccagaagagccgccgtgaacatcgagttcagagacctgagctacagcgtgcccgagggcccctggtggagaaagaagggctacaagaccctgctgaagggcatcagcggcaagttcaacagcggcgagctggtggccatcatgggccccagcggcgccggcaagagcaccctgatgaacatcctggccggctacagagagaccggcatgaagggcgccgtgctgatcaacggcctgcccagagacctgagatgcttcagaaaggtgagctgctacatcatgcaggacgacatgctgctgccccacctgaccgtgcaggaggccatgatggtgagcgcccacctgaagctgcaggagaaggacgagggcagaagagagatggtgaaggagatcctgaccgccctgggcctgctgagctgcgccaacaccagaaccggcagcctgagcggcggccagagaaagagactggccatcgccctggagctggtgaacaacccccccgtgatgttcttcgacgagcccaccagcggcctggacagcgccagctgcttccaggtggtgagcctgatgaagggcctggcccagggcggcagaagcatcatctgcaccatccaccagcccagcgccaagctgttcgagctgttcgaccagctgtacgtgctgagccagggccagtgcgtgtacagaggcaaggtgtgcaacctggtgccctacctgagagacctgggcctgaactgccccacctaccacaaccccgccgacttcgtgatggaggtggccagcggcgagtacggcgaccagaacagcagactggtgagagccgtgagagagggcatgtgcgacagcgaccacaagagagacctgggcggcgacgccgaggtgaaccccttcctgtggcacagacccagcgaggaggacagcagcagcatggagggctgccacagcttcagcgccagctgcctgacccagttctgcatcctgttcaagagaaccttcctgagcatcatgagagacagcgtgctgacccacctgagaatcaccagccacatcggcatcggcctgctgatcggcctgctgtacctgggcatcggcaacgaggccaagaaggtgctgagcaacagcggcttcctgttcttcagcatgctgttcctgatgttcgccgccctgatgcccaccgtgctgaccttccccctggagatgggcgtgttcctgagagagcacctgaactactggtacagcctgaaggcctactacctggccaagaccatggccgacgtgcccttccagatcatgttccccgtggcctactgcagcatcgtgtactggatgaccagccagcccagcgacgccgtgagattcgtgctgttcgccgccctgggcaccatgaccagcctggtggcccagagcctgggcctgctgatcggcgccgccagcaccagcctgcaggtggccaccttcgtgggccccgtgaccgccatccccgtgctgctgttcagcggcttcttcgtgagcttcgacaccatccccacctacctgcagtggatgagctacatcagctacgtgagatacggcttcgagggcgtgatcctgagcatctacggcctggacagagaggacctgcactgcgacatcgacgagacctgccacttccagaagagcgaggccatcctgagagagctggacgtggagaacgccaagctgtacctggacttcatcgtgctgggcatcttcttcatcagcctgagactgatcgcctacttcgtgctgagatacaagatcagagccgagagatag

SEQ ID NO: 73900 - DNA, 2007 bp, synthetic construct
  misc_feature 1..2007: note = Description of Artificial Sequence: Synthetic coding sequence
  source 1..2007: mol_type = other DNA
atgctgggcacccagggctggaccaagcagagaaagccctgcccccagaacgccagcagctacagcgccgagatgaccgagcccaagagcgtgtgcgtgagcgtggacgaggtggtgagcagcaacatggaggccaccgagaccgacctgctgaacggccacctgaagaaggtggacaacaacctgaccgaggcccagagattcagcagcctgcccagaagagccgccgtgaacatcgagttcagagacctgagctacagcgtgcccgagggcccctggtggagaaagaagggctacaagaccctgctgaagggcatcagcggcaagttcaacagcggcgagctggtggccatcatgggccccagcggcgccggcaagagcaccctgatgaacatcctggccggctacagagagaccggcatgaagggcgccgtgctgatcaacggcctgcccagagacctgagatgcttcagaaaggtgagctgctacatcatgcaggacgacatgctgctgccccacctgaccgtgcaggaggccatgatggtgagcgcccacctgaagctgcaggagaaggacgagggcagaagagagatggtgaaggagatcctgaccgccctgggcctgctgagctgcgccaacaccagaaccggcagcctgagcggcggccagagaaagagactggccatcgccctggagctggtgaacaacccccccgtgatgttcttcgacgagcccaccagcggcctggacagcgccagctgcttccaggtggtgagcctgatgaagggcctggcccagggcggcagaagcatcatctgcaccatccaccagcccagcgccaagctgttcgagctgttcgaccagctgtacgtgctgagccagggccagtgcgtgtacagaggcaaggtgtgcaacctggtgccctacctgagagacctgggcctgaactgccccacctaccacaaccccgccgacttcgtgatggaggtggccagcggcgagtacggcgaccagaacagcagactggtgagagccgtgagagagggcatgtgcgacagcgaccacaagagagacctgggcggcgacgccgaggtgaaccccttcctgtggcacagacccagcgaggaggacagcagcagcatggagggctgccacagcttcagcgccagctgcctgacccagttctgcatcctgttcaagagaaccttcctgagcatcatgagagacagcgtgctgacccacctgagaatcaccagccacatcggcatcggcctgctgatcggcctgctgtacctgggcatcggcaacgaggccaagaaggtgctgagcaacagcggcttcctgttcttcagcatgctgttcctgatgttcgccgccctgatgcccaccgtgctgaccttccccctggagatgggcgtgttcctgagagagcacctgaactactggtacagcctgaaggcctactacctggccaagaccatggccgacgtgcccttccagatcatgttccccgtggcctactgcagcatcgtgtactggatgaccagccagcccagcgacgccgtgagattcgtgctgttcgccgccctgggcaccatgaccagcctggtggcccagagcctgggcctgctgatcggcgccgccagcaccagcctgcaggtggccaccttcgtgggccccgtgaccgccatccccgtgctgctgttcagcggcttcttcgtgagcttcgacaccatccccacctacctgcagtggatgagctacatcagctacgtgagatacggcttcgagggcgtgatcctgagcatctacggcctggacagagaggacctgcactgcgacatcgacgagacctgccacttccagaagagcgaggccatcctgagagagctggacgtggagaacgccaagctgtacctggacttcatcgtgctgggcatcttcttcatcagcctgagactgatcgcctacttcgtgctgagatacaagatcagagccgagagatag

SEQ ID NO: 73901 - DNA, 1941 bp, synthetic construct
  misc_feature 1..1941: note = Description of Artificial Sequence: Synthetic coding sequence
  source 1..1941: mol_type = other DNA
atggccgagaaggccctggaggccgtgggctgcggcctgggccccggcgccgtggccatggccgtgaccctggaggacggcgccgagccccccgtgctgaccacccacctgaagaaggtggagaaccacatcaccgaggcccagagattcagccacctgcccaagagaagcgccgtggacatcgagttcgtggagctgagctacagcgtgagagagggcccctgctggagaaagagaggctacaagaccctgctgaagtgcctgagcggcaagttctgcagaagagagctgatcggcatcatgggccccagcggcgccggcaagagcaccttcatgaacatcctggccggctacagagagagcggcatgaagggccagatcctggtgaacggcagacccagagagctgagaaccttcagaaagatgagctgctacatcatgcaggacgacatgctgctgccccacctgaccgtgctggaggccatgatggtgagcgccaacctgaagctgagcgagaagcaggaggtgaagaaggagctggtgaccgagatcctgaccgccctgggcctgatgagctgcagccacaccagaaccgccctgctgagcggcggccagagaaagagactggccatcgccctggagctggtgaacaacccccccgtgatgttcttcgacgagcccaccagcggcctggacagcgccagctgcttccaggtggtgagcctgatgaagagcctggcccagggcggcagaaccatcatctgcaccatccaccagcccagcgccaagctgttcgagatgttcgacaagctgtacatcctgagccagggccagtgcatcttcaagggcgtggtgaccaacctgatcccctacctgaagggcctgggcctgcactgccccacctaccacaaccccgccgacttcatcatcgaggtggccagcggcgagtacggcgacctgaaccccatgctgttcagagccgtgcagaacggcctgtgcgccatggccgagaagaagagcagccccgagaagaacgaggtgcccgccccctgccccccctgcccccccgaggtggaccccatcgagagccacaccttcgccaccagcaccctgacccagttctgcatcctgttcaagagaaccttcctgagcatcctgagagacaccgtgctgacccacctgagattcatgagccacgtggtgatcggcgtgctgatcggcctgctgtacctgcacatcggcgacgacgccagcaaggtgttcaacaacaccggctgcctgttcttcagcatgctgttcctgatgttcgccgccctgatgcccaccgtgctgaccttccccctggagatggccgtgttcatgagagagcacctgaactactggtacagcctgaaggcctactacctggccaagaccatggccgacgtgcccttccaggtggtgtgccccgtggtgtactgcagcatcgtgtactggatgaccggccagcccgccgagaccagcagattcctgctgttcagcgccctggccaccgccaccgccctggtggcccagagcctgggcctgctgatcggcgccgccagcaacagcctgcaggtggccaccttcgtgggccccgtgaccgccatccccgtgctgctgttcagcggcttcttcgtgagcttcaagaccatccccacctacctgcagtggagcagctacctgagctacgtgagatacggcttcgagggcgtgatcctgaccatctacggcatggagagaggcgacctgacctgcctggaggagagatgccccttcagagagccccagagcatcctgagagccctggacgtggaggacgccaagctgtacatggacttcctggtgctgggcatcttcttcctggccctgagactgctggcctacctggtgctgagatacagagtgaagagcgagagatag

SEQ ID NO: 73902 - DNA, 1941 bp, synthetic construct; identical to SEQ ID NO: 73901
  misc_feature 1..1941: note = Description of Artificial Sequence: Synthetic coding sequence
  source 1..1941: mol_type = other DNA

SEQ ID NO: 73903 - DNA, 1941 bp, synthetic construct; identical to SEQ ID NO: 73901
  misc_feature 1..1941: note = Description of Artificial Sequence: Synthetic coding sequence
  source 1..1941: mol_type = other DNA

SEQ ID NO: 73904 - DNA, 1956 bp, synthetic construct
  misc_feature 1..1956: note = Description of Artificial Sequence: Synthetic coding sequence
  source 1..1956: mol_type = other DNA
atgggcgacctgagcagcctgacccccggcggcagcatgggcctgcaggtgaacagaggcagccagagcagcctggagggcgcccccgccaccgcccccgagccccacagcctgggcatcctgcacgccagctacagcgtgagccacagagtgagaccctggtgggacatcaccagctgcagacagcagtggaccagacagatcctgaaggacgtgagcctgtacgtggagagcggccagatcatgtgcatcctgggcagcagcggcagcggcaagaccaccctgctggacgccatgagcggcagactgggcagagccggcaccttcctgggcgaggtgtacgtgaacggcagagccctgagaagagagcagttccaggactgcttcagctacgtgctgcagagcgacaccctgctgagcagcctgaccgtgagagagaccctgcactacaccgccctgctggccatcagaagaggcaaccccggcagcttccagaagaaggtggaggccgtgatggccgagctgagcctgagccacgtggccgacagactgatcggcaactacagcctgggcggcatcagcaccggcgagagaagaagagtgagcatcgccgcccagctgctgcaggaccccaaggtgatgctgttcgacgagcccaccaccggcctggactgcatgaccgccaaccagatcgtggtgctgctggtggagctggccagaagaaacagaatcgtggtgctgaccatccaccagcccagaagcgagctgttccagctgttcgacaagatcgccatcctgagcttcggcgagctgatcttctgcggcacccccgccgagatgctggacttcttcaacgactgcggctacccctgccccgagcacagcaaccccttcgacttctacatggacctgaccagcgtggacacccagagcaaggagagagagatcgagaccagcaagagagtgcagatgatcgagagcgcctacaagaagagcgccatctgccacaagaccctgaagaacatcgagagaatgaagcacctgaagaccctgcccatggtgcccttcaagaccaaggacagccccggcgtgttcagcaagctgggcgtgctgctgagaagagtgaccagaaacctggtgagaaacaagctggccgtgatcaccagactgctgcagaacctgatcatgggcctgttcctgctgttcttcgtgctgagagtgagaagcaacgtgctgaagggcgccatccaggacagagtgggcctgctgtaccagttcgtgggcgccaccccctacaccggcatgctgaacgccgtgaacctgttccccgtgctgagagccgtgagcgaccaggagagccaggacggcctgtaccagaagtggcagatgatgctggcctacgccctgcacgtgctgcccttcagcgtggtggccaccatgatcttcagcagcgtgtgctactggaccctgggcctgcaccccgaggtggccagattcggctacttcagcgccgccctgctggccccccacctgatcggcgagttcctgaccctggtgctgctgggcatcgtgcagaaccccaacatcgtgaacagcgtggtggccctgctgagcatcgccggcgtgctggtgggcagcggcttcctgagaaacatccaggagatgcccatccccttcaagatcatcagctacttcaccttccagaagtactgcagcgagatcctggtggtgaacgagttctacggcctgaacttcacctgcggcagcagcaacgtgagcgtgaccaccaaccccatgtgcgccttcacccagggcatccagttcatcgagaagacctgccccggcgccaccagcagattcaccatgaacttcctgatcctgtacagcttcatccccgccctggtgatcctgggcatcgtggtgttcaagatcagagaccacctgatcagcagatag

SEQ ID NO: 73905 - DNA, 1443 bp, synthetic construct
  misc_feature 1..1443: note = Description of Artificial Sequence: Synthetic coding sequence
  source 1..1443: mol_type = other DNA
atgtgcatcctgggcagcagcggcagcggcaagaccaccctgctggacgccatgagcggcagactgggcagagccggcaccttcctgggcgaggtgtacgtgaacggcagagccctgagaagagagcagttccaggactgcttcagctacgtgctgcagagcgacaccctgctgagcagcctgaccgtgagagagaccctgcactacaccgccctgctggccatcagaagaggcaaccccggcagcttccagaagaaggtggaggccgtgatggccgagctgagcctgagccacgtggccgacagactgatcggcaactacagcctgggcggcatcagcaccggcgagagaagaagagtgagcatcgccgcccagctgctgcaggaccccatggacctgaccagcgtggacacccagagcaaggagagagagatcgagaccagcaagagagtgcagatgatcgagagcgcctacaagaagagcgccatctgccacaagaccctgaagaacatcgagagaatgaagcacctgaagaccctgcccatggtgcccttcaagaccaaggacagccccggcgtgttcagcaagctgggcgtgctgctgagaagagtgaccagaaacctggtgagaaacaagctggccgtgatcaccagactgctgcagaacctgatcatgggcctgttcctgctgttcttcgtgctgagagtgagaagcaacgtgctgaagggcgccatccaggacagagtgggcctgctgtaccagttcgtgggcgccaccccctacaccggcatgctgaacgccgtgaacctgttccccgtgctgagagccgtgagcgaccaggagagccaggacggcctgtaccagaagtggcagatgatgctggcctacgccctgcacgtgctgcccttcagcgtggtggccaccatgatcttcagcagcgtgtgctactggaccctgggcctgcaccccgaggtggccagattcggctacttcagcgccgccctgctggccccccacctgatcggcgagttcctgaccctggtgctgctgggcatcgtgcagaaccccaacatcgtgaacagcgtggtggccctgctgagcatcgccggcgtgctggtgggcagcggcttcctgagaaacatccaggagatgcccatccccttcaagatcatcagctacttcaccttccagaagtactgcagcgagatcctggtggtgaacgagttctacggcctgaacttcacctgcggcagcagcaacgtgagcgtgaccaccaaccccatgtgcgccttcacccagggcatccagttcatcgagaagacctgccccggcgccaccagcagattcaccatgaacttcctgatcctgtacagcttcatccccgccctggtgatcctgggcatcgtggtgttcaagatcagagaccacctgatcagcagatag

SEQ ID NO: 73906 - DNA, 771 bp, synthetic construct
  misc_feature 1..771: note = Description of Artificial Sequence: Synthetic coding sequence
  source 1..771: mol_type = other DNA
atgggcctgttcctgctgttcttcgtgctgagagtgagaagcaacgtgctgaagggcgccatccaggacagagtgggcctgctgtaccagttcgtgggcgccaccccctacaccggcatgctgaacgccgtgaacctgttccccgtgctgagagccgtgagcgaccaggagagccaggacggcctgtaccagaagtggcagatgatgctggcctacgccctgcacgtgctgcccttcagcgtggtggccaccatgatcttcagcagcgtgtgctactggaccctgggcctgcaccccgaggtggccagattcggctacttcagcgccgccctgctggccccccacctgatcggcgagttcctgaccctggtgctgctgggcatcgtgcagaaccccaacatcgtgaacagcgtggtggccctgctgagcatcgccggcgtgctggtgggcagcggcttcctgagaaacatccaggagatgcccatccccttcaagatcatcagctacttcaccttccagaagtactgcagcgagatcctggtggtgaacgagttctacggcctgaacttcacctgcggcagcagcaacgtgagcgtgaccaccaaccccatgtgcgccttcacccagggcatccagttcatcgagaagacctgccccggcgccaccagcagattcaccatgaacttcctgatcctgtacagcttcatccccgccctggtgatcctgggcatcgtggtgttcaagatcagagaccacctgatcagcagatag

SEQ ID NO: 73907 - DNA, 2022 bp, synthetic construct
  misc_feature 1..2022: note = Description of Artificial Sequence: Synthetic coding sequence
  source 1..2022: mol_type = other DNA
atggccggcaaggccgccgaggagagaggcctgcccaagggcgccaccccccaggacaccagcggcctgcaggacagactgttcagcagcgagagcgacaacagcctgtacttcacctacagcggccagcccaacaccctggaggtgagagacctgaactaccaggtggacctggccagccaggtgccctggttcgagcagctggcccagttcaagatgccctggaccagccccagctgccagaacagctgcgagctgggcatccagaacctgagcttcaaggtgagaagcggccagatgctggccatcatcggcagcagcggctgcggcagagccagcctgctggacgtgatcaccggcagaggccacggcggcaagatcaagagcggccagatctggatcaacggccagcccagcagcccccagctggtgagaaagtgcgtggcccacgtgagacagcacaaccagctgctgcccaacctgaccgtgagagagaccctggccttcatcgcccagatgagactgcccagaaccttcagccaggcccagagagacaagagagtggaggacgtgatcgccgagctgagactgagacagtgcgccgacaccagagtgggcaacatgtacgtgagaggcctgagcggcggcgagagaagaagagtgagcatcggcgtgcagctgctgtggaaccccggcatcctgatcctggacgagcccaccagcggcctggacagcttcaccgcccacaacctggtgaagaccctgagcagactggccaagggcaacagactggtgctgatcagcctgcaccagcccagaagcgacatcttcagactgttcgacctggtgctgctgatgaccagcggcacccccatctacctgggcgccgcccagcacatggtgcagtacttcaccgccatcggctacccctgccccagatacagcaaccccgccgacttctacgtggacctgaccagcatcgacagaagaagcagagagcaggagctggccaccagagagaaggcccagagcctggccgccctgttcctggagaaggtgagagacctggacgacttcctgtggaaggccgagaccaaggacctggacgaggacacctgcgtggagagcagcgtgacccccctggacaccaactgcctgcccagccccaccaagatgcccggcgccgtgcagcagttcaccaccctgatcagaagacagatcagcaacgacttcagagacctgcccaccctgctgatccacggcgccgaggcctgcctgatgagcatgaccatcggcttcctgtacttcggccacggcagcatccagctgagcttcatggacaccgccgccctgctgttcatgatcggcgccctgatccccttcaacgtgatcctggacgtgatcagcaagtgctacagcgagagagccatgctgtactacgagctggaggacggcctgtacaccaccggcccctacttcttcgccaagatcctgggcgagctgcccgagcactgcgcctacatcatcatctacggcatgcccacctactggctggccaacctgagacccggcctgcagcccttcctgctgcacttcctgctggtgtggctggtggtgttctgctgcagaatcatggccctggccgccgccgccctgctgcccaccttccacatggccagcttcttcagcaacgccctgtacaacagcttctacctggccggcggcttcatgatcaacctgagcagcctgtggaccgtgcccgcctggatcagcaaggtgagcttcctgagatggtgcttcgagggcctgatgaagatccagttcagcagaagaacctacaagatgcccctgggcaacctgaccatcgccgtgagcggcgacaagatcctgagcgtgatggagctggacagctaccccctgtacgccatctacctgatcgtgatcggcctgagcggcggcttcatggtgctgtactacgtgagcctgagattcatcaagcagaagcccagccaggactggtag

SEQ ID NO: 73908 - DNA, 2376 bp, synthetic construct
  misc_feature 1..2376: note = Description of Artificial Sequence: Synthetic coding sequence
  source 1..2376: mol_type = other DNA
atggccggcaccagcgcccccggcagcaagagaagaagcgagccccccgcccccagacccggccccccccccggcaccggccacccccccagcaagagagccagaggcttcagcgccgccgccgcccccgaccccgacgaccccttcggcgcccacggcgacttcaccgccgacgacctggaggagctggacaccctggccagccaggccctgagccagtgccccgccgccgccagagacgtgagcagcgaccacaaggtgcacagactgctggacggcatgagcaagaaccccagcggcaagaacagagagaccgtgcccatcaaggacaacttcgagctggaggtgctgcaggcccagtacaaggagctgaaggagaagatgaaggtgatggaggaggaggtgctgatcaagaacggcgagatcaagatcctgagagacagcctgcaccagaccgagagcgtgctggaggagcagagaagaagccacttcctgctggagcaggagaagacccaggccctgagcgacaaggagaaggagttcagcaagaagctgcagagcctgcagagcgagctgcagttcaaggacgccgagatgaacgagctgagaaccaagctgcagaccagcgagagagccaacaagctggccgcccccagcgtgagccacgtgagccccagaaagaaccccagcgtggtgatcaagcccgaggcctgcagcccccagttcggcaagaccagcttccccaccaaggagagcttcagcgccaacatgagcctgccccacccctgccagaccgagagcggctacaagcccctggtgggcagagaggacagcaagccccacagcctgagaggcgacagcatcaagcaggaggaggcccagaagagcttcgtggacagctggagacagagaagcaacacccagggcagcatcctgatcaacctgctgctgaagcagcccctgatccccggcagcagcctgagcctgtgccacctgctgagcagcagcagcgagagccccgccggcacccccctgcagccccccggcttcggcagcaccctggccggcatgagcggcctgagaaccaccggcagctacgacggcagcttcagcctgagcgccctgagagaggcccagaacctggccttcaccggcctgaacctggtggccagaaacgagtgcagcagagacggcgaccccgccgagggcggcagaagagccttccccctgtgccagctgcccggcgccgtgcacttcctgcccctggtgcagttcttcatcggcctgcactgccaggccctgcaggacctggccgccgccaagagaagcggcgcccccggcgacagccccacccacagcagctgcgtgagcagcggcgtggagaccaaccccgaggacagcgtgtgcatcctggagggcttcagcgtgaccgccctgagcatcctgcagcacctggtgtgccacagcggcgccgtggtgagcctgctgctgagcggcgtgggcgccgacagcgccgccggcgagggcaacagaagcctggtgcacagactgagcgacggcgacatgaccagcgccctgagaggcgtggccgacgaccagggccagcaccccctgctgaagatgctgctgcacctgctggccttcagcagcgccgccaccggccacctgcaggccagcgtgctgacccagtgcctgaaggtgctggtgaagctggccgagaacaccagctgcgacttcctgcccagattccagtgcgtgttccaggtgctgcccaagtgcctgagccccgagacccccctgcccagcgtgctgctggccgtggagctgctgagcctgctggccgaccacgaccagctggccccccagctgtgcagccacagcgagggctgcctgctgctgctgctgtacatgtacatcaccagcagacccgacagagtggccctggagacccagtggctgcagctggagcaggaggtggtgtggctgctggccaagctgggcgtgcagagccccctgccccccgtgaccggcagcaactgccagtgcaacgtggaggtggtgagagccctgaccgtgatgctgcacagacagtggctgaccgtgagaagagccggcggcccccccagaaccgaccagcagagaagaaccgtgagatgcctgagagacaccgtgctgctgctgcacggcctgagccagaaggacaagctgttcatgatgcactgcgtggaggtgctgcaccagttcgaccaggtgatgcccggcgtgagcatgctgatcagaggcctgcccgacgtgaccgactgcgaggaggccgccctggacgacctgtgcgccgccgagaccgacgtggaggaccccgaggtggagtgcggctag

SEQ ID NO: 73909 - DNA, 2295 bp, synthetic construct
  misc_feature 1..2295: note = Description of Artificial Sequence: Synthetic coding sequence
  source 1..2295: mol_type = other DNA
atggccggcaccagcgcccccggcagcaagagaagaagcgagccccccgcccccagacccggccccccccccggcaccggccacccccccagcaagagagccagaggcttcagcgccgccgccgcccccgaccccgacgaccccttcggcgcccacggcgacttcaccgccgacgacctggaggagctggacaccctggccagccaggccctgagccagtgccccgccgccgccagagacgtgagcagcgaccacaaggtgcacagactgctggacggcatgagcaagaaccccagcggcaagaacagagagaccgtgcccatcaaggacaacttcgagctggaggtgctgcaggcccagtacaaggagctgaaggagaagatgaaggtgatggaggaggaggtgctgatcaagaacggcgagatcaagatcctgagagacagcctgcaccagaccgagagcgtgctggaggagcagagaagaagccacttcctgctggagcaggagaagacccaggccctgagcgacaaggagaaggagttcagcaagaagctgcagagcctgcagagcgagctgcagttcaaggacgccgagatgaacgagctgagaaccaagctgcagaccagcgagagagccaacaagctggccgcccccagcgtgagccacgtgagccccagaaagaaccccagcgtggtgatcaagcccgaggcctgcagcccccagttcggcaagaccagcttccccaccaaggagagcttcagcgccaacatgagcctgccccacccctgccagaccgagagcggctacaagcccctggtgggcagagaggacagcaagccccacagcctgagaggcgacagcatcaagcaggaggaggcccagaagagcttcgtggacagctggagacagagaagcaacacccagggcagcatcctgatcaacctgctgctgaagcagcccctgatccccggcagcagcctgagcctgtgccacctgctgagcagcagcagcgagagccccgccggcacccccctgcagccccccggcttcggcagcaccctggccggcatgagcggcctgagaaccaccggcagctacgacggcagcttcagcctgagcgccctgagagaggcccagaacctggccttcaccggcctgaacctggtggccagaaacgagtgcagcagagacggcgaccccgccgagggcggcagaagagccttccccctgtgccagctgcccggcgccgtgcacttcctgcccctggtgcagttcttcatcggcctgcactgccaggccctgcaggacctggccgccgccaagagaagcggcgcccccggcgacagccccacccacagcagctgcgtgagcagcggcgtggagaccaaccccgaggacagcgtgtgcatcctggagggcttcagcgtgaccgccctgagcatcctgcagcacctggtgtgccacagcggcgccgtggtgagcctgctgctgagcggcgtgggcgccgacagcgccgccggcgagggcaacagaagcctggtgcacagactgagcgacggcgacatgaccagcgccctgagaggcgtggccgacgaccagggccagcaccccctgctgaagatgctgctgcacctgctggccttcagcagcgccgccaccggccacctgcaggccagcgtgctgacccagtgcctgaaggtgctggtgaagctggccgagaacaccagctgcgacttcctgcccagattccagtgcgtgttccaggtgctgcccaagtgcctgagccccgagacccccctgcccagcgtgctgctggccgtggagctgctgagcctgctggccgaccacgaccagctggccccccagctgtgcagccacagcgagggctgcctgctgctgctgctgtacatgtacatcaccagcagacccgacagagtggccctggagacccagtggctgcagctggagcaggaggtggtgagagccctgaccgtgatgctgcacagacagtggctgaccgtgagaagagccggcggcccccccagaaccgaccagcagagaagaaccgtgagatgcctgagagacaccgtgctgctgctgcacggcctgagccagaaggacaagctgttcatgatgcactgcgtggaggtgctgcaccagttcgaccaggtgatgcccggcgtgagcatgctgatcagaggcctgcccgacgtgaccgactgcgaggaggccgccctggacgacctgtgcgccgccgagaccgacgtggaggaccccgaggtggagtgcggctag

SEQ ID NO: 73910 - DNA, 1995 bp, synthetic construct
  misc_feature 1..1995: note = Description of Artificial Sequence: Synthetic coding sequence
  source 1..1995: mol_type = other DNA
atgaaggtgatggaggaggaggtgctgatcaagaacggcgagatcaagatcctgagagacagcctgcaccagaccgagagcgtgctggaggagcagagaagaagccacttcctgctggagcaggagaagacccaggccctgagcgacaaggagaaggagttcagcaagaagctgcagagcctgcagagcgagctgcagttcaaggacgccgagatgaacgagctgagaaccaagctgcagaccagcgagagagccaacaagctggccgcccccagcgtgagccacgtgagccccagaaagaaccccagcgtggtgatcaagcccgaggcctgcagcccccagttcggcaagaccagcttccccaccaaggagagcttcagcgccaacatgagcctgccccacccctgccagaccgagagcggctacaagcccctggtgggcagagaggacagcaagccccacagcctgagaggcgacagcatcaagcaggaggaggcccagaagagcttcgtggacagctggagacagagaagcaacacccagggcagcatcctgatcaacctgctgctgaagcagcccctgatccccggcagcagcctgagcctgtgccacctgctgagcagcagcagcgagagccccgccggcacccccctgcagccccccggcttcggcagcaccctggccggcatgagcggcctgagaaccaccggcagctacgacggcagcttcagcctgagcgccctgagagaggcccagaacctggccttcaccggcctgaacctggtggccagaaacgagtgcagcagagacggcgaccccgccgagggcggcagaagagccttccccctgtgccagctgcccggcgccgtgcacttcctgcccctggtgcagttcttcatcggcctgcactgccaggccctgcaggacctggccgccgccaagagaagcggcgcccccggcgacagccccacccacagcagctgcgtgagcagcggcgtggagaccaaccccgaggacagcgtgtgcatcctggagggcttcagcgtgaccgccctgagcatcctgcagcacctggtgtgccacagcggcgccgtggtgagcctgctgctgagcggcgtgggcgccgacagcgccgccggcgagggcaacagaagcctggtgcacagactgagcgacggcgacatgaccagcgccctgagaggcgtggccgacgaccagggccagcaccccctgctgaagatgctgctgcacctgctggccttcagcagcgccgccaccggccacctgcaggccagcgtgctgacccagtgcctgaaggtgctggtgaagctggccgagaacaccagctgcgacttcctgcccagattccagtgcgtgttccaggtgctgcccaagtgcctgagccccgagacccccctgcccagcgtgctgctggccgtggagctgctgagcctgctggccgaccacgaccagctggccccccagctgtgcagccacagcgagggctgcctgctgctgctgctgtacatgtacatcaccagcagacccgacagagtggccctggagacccagtggctgcagctggagcaggaggtggtgtggctgctggccaagctgggcgtgcagagccccctgccccccgtgaccggcagcaactgccagtgcaacgtggaggtggtgagagccctgaccgtgatgctgcacagacagtggctgaccgtgagaagagccggcggcccccccagaaccgaccagcagagaagaaccgtgagatgcctgagagacaccgtgctgctgctgcacggcctgagccagaaggacaagctgttcatgatgcactgcgtggaggtgctgcaccagttcgaccaggtgatgcccggcgtgagcatgctgatcagaggcctgcccgacgtgaccgactgcgaggaggccgccctggacgacctgtgcgccgccgagaccgacgtggaggaccccgaggtggagtgcggctag

SEQ ID NO: 73911 - DNA, 2097 bp, synthetic construct
  misc_feature 1..2097: note = Description of Artificial Sequence: Synthetic coding sequence
  source 1..2097: mol_type = other DNA
atgagcaagaaccccagcggcaagaacagagagaccgtgcccatcaaggacaacttcgagctggaggtgctgcaggcccagtacaaggagctgaaggagaagatgaaggtgatggaggaggaggtgctgatcaagaacggcgagatcaagatcctgagagacagcctgcaccagaccgagagcgtgctggaggagcagagaagaagccacttcctgctggagcaggagaagacccaggccctgagcgacaaggagaaggagttcagcaagaagctgcagagcctgcagagcgagctgcagttcaaggacgccgagatgaacgagctgagaaccaagctgcagaccagcgagagagccaacaagctggccgcccccagcgtgagccacgtgagccccagaaagaaccccagcgtggtgatcaagcccgaggcctgcagcccccagttcggcaagaccagcttccccaccaaggagagcttcagcgccaacatgagcctgccccacccctgccagaccgagagcggctacaagcccctggtgggcagagaggacagcaagccccacagcctgagaggcgacagcatcaagcaggaggaggcccagaagagcttcgtggacagctggagacagagaagcaacacccagggcagcatcctgatcaacctgctgctgaagcagcccctgatccccggcagcagcctgagcctgtgccacctgctgagcagcagcagcgagagccccgccggcacccccctgcagccccccggcttcggcagcaccctggccggcatgagcggcctgagaaccaccggcagctacgacggcagcttcagcctgagcgccctgagagaggcccagaacctggccttcaccggcctgaacctggtggccagaaacgagtgcagcagagacggcgaccccgccgagggcggcagaagagccttccccctgtgccagctgcccggcgccgtgcacttcctgcccctggtgcagttcttcatcggcctgcactgccaggccctgcaggacctggccgccgccaagagaagcggcgcccccggcgacagccccacccacagcagctgcgtgagcagcggcgtggagaccaaccccgaggacagcgtgtgcatcctggagggcttcagcgtgaccgccctgagcatcctgcagcacctggtgtgccacagcggcgccgtggtgagcctgctgctgagcggcgtgggcgccgacagcgccgccggcgagggcaacagaagcctggtgcacagactgagcgacggcgacatgaccagcgccctgagaggcgtggccgacgaccagggccagcaccccctgctgaagatgctgctgcacctgctggccttcagcagcgccgccaccggccacctgcaggccagcgtgctgacccagtgcctgaaggtgctggtgaagctggccgagaacaccagctgcgacttcctgcccagattccagtgcgtgttccaggtgctgcccaagtgcctgagccccgagacccccctgcccagcgtgctgctggccgtggagctgctgagcctgctggccgaccacgaccagctggccccccagctgtgcagccacagcgagggctgcctgctgctgctgctgtacatgtacatcaccagcagacccgacagagtggccctggagacccagtggctgcagctggagcaggaggtggtgtggctgctggccaagctgggcgtgcagagccccctgccccccgtgaccggcagcaactgccagtgcaacgtggaggtggtgagagccctgaccgtgatgctgcacagacagtggctgaccgtgagaagagccggcggcccccccagaaccgaccagcagagaagaaccgtgagatgcctgagagacaccgtgctgctgctgcacggcctgagccagaaggacaagctgttcatgatgcactgcgtggaggtgctgcaccagttcgaccaggtgatgcccggcgtgagcatgctgatcagaggcctgcccgacgtgaccgactgcgaggaggccgccctggacgacctgtgcgccgccgagaccgacgtggaggaccccgaggtggagtgcggctag

SEQ ID NO: 73912 - DNA, 591 bp, synthetic construct
  misc_feature 1..591: note = Description of Artificial Sequence: Synthetic coding sequence
  source 1..591: mol_type = other DNA
atgagcaagaaccccagcggcaagaacagagagaccgtgcccatcaaggacaacttcgagctggaggtgctgcaggcccagtacaaggagctgaaggagaagatgaaggtgatggaggaggaggtgctgatcaagaacggcgagatcaagatcctgagagacagcctgcaccagaccgagagcgtgctggaggagcagagaagaagccacttcctgctggagcaggagaagacccaggccctgagcgacaaggagaaggagttcagcaagaagctgcagagcctgcagagcgagctgcagttcaaggacgccgagatgaacgagctgagaaccaagctgcagaccagcgagagagccaacaagctggccgcccccagcgtgagccacgtgagccccagaaagaaccccagcgtggtgatcaagcccgaggcctgcagcccccagttcggcaagaccagcttccccaccaaggagagcttcagcgccaacatgagcctgccccacccctgccagaccgagagcggctacaagcccctggtgggcagagaggacagcaagccccacagcctgagaggcgacagcatcaagtag

SEQ ID NO: 73913 - DNA, 141 bp, synthetic construct
  misc_feature 1..141: note = Description of Artificial Sequence: Synthetic coding sequence
  source 1..141: mol_type = other DNA
atgagcaagaaccccagcggcaagaacagagagaccgtgcccatcaaggacaacttcgagctggaggtgctgcaggcccagtacaaggagctgaaggagaagctgtgcaagaaggccgacaccagctaccaccacctgtag

SEQ ID NO: 73914 - DNA, 1305 bp, synthetic construct
  misc_feature 1..1305: note = Description of Artificial Sequence: Synthetic coding sequence
  source 1..1305: mol_type = other DNA
atgagcatcgagaagatctgggccagagagatcctggacagcagaggcaaccccaccgtggaggtggacctgtacaccgccaagggcctgttcagagccgccgtgcccagcggcgccagcaccggcatctacgaggccctggagctgagagacggcgacaagcagagatacctgggcaagggcgtgctgaaggccgtggaccacatcaacagcaccatcgcccccgccctgatcagcagcggcctgagcgtggtggagcaggagaagctggacaacctgatgctggagctggacggcaccgagaacaagagcaagttcggcgccaacgccatcctgggcgtgagcctggccgtgtgcaaggccggcgccgccgagagagagctgcccctgtacagacacatcgcccagctggccggcaacagcgacctgatcctgcccgtgcccgccttcaacgtgatcaacggcggcagccacgccggcaacaagctggccatgcaggagttcatgatcctgcccgtgggcgccgagagcttcagagacgccatgagactgggcgccgaggtgtaccacaccctgaagggcgtgatcaaggacaagtacggcaaggacgccaccaacgtgggcgacgagggcggcttcgcccccaacatcctggagaacagcgaggccctggagctggtgaaggaggccatcgacaaggccggctacaccgagaagatcgtgatcggcatggacgtggccgccagcgagttctacagagacggcaagtacgacctggacttcaagagccccaccgaccccagcagatacatcaccggcgaccagctgggcgccctgtaccaggacttcgtgagagactaccccgtggtgagcatcgaggaccccttcgaccaggacgactgggccgcctggagcaagttcaccgccaacgtgggcatccagatcgtgggcgacgacctgaccgtgaccaaccccaagagaatcgagagagccgtggaggagaaggcctgcaactgcctgctgctgaaggtgaaccagatcggcagcgtgaccgaggccatccaggcctgcaagctggcccaggagaacggctggggcgtgatggtgagccacagaagcggcgagaccgaggacaccttcatcgccgacctggtggtgggcctgtgcaccggccagatcaagaccggcgccccctgcagaagcgagagactggccaagtacaaccagctgatgagaatcgaggaggagctgggcgacgaggccagattcgccggccacaacttcagaaaccccagcgtgctgtag

SEQ ID NO: 73915 - DNA, 3573 bp, synthetic construct
  misc_feature 1..3573: note = Description of Artificial Sequence: Synthetic coding sequence
  source 1..3573: mol_type = other DNA
atgaagaccagacagaacaaggacagcatgagcatgagaagcggcagaaagaaggaggcccccggccccagagaggagctgagaagcagaggcagagccagccccggcggcgtgagcaccagcagcagcgacggcaaggccgagaagagcagacagaccgccaagaaggccagagtggaggaggccagcacccccaaggtgaacaagcagggcagaagcgaggagatcagcgagagcgagagcgaggagaccaacgcccccaagaagaccaagaccgagcaggagctgcccagaccccagagccccagcgacctggacagcctggacggcagaagcctgaacgacgacggcagcagcgaccccagagacatcgaccaggacaacagaagcaccagccccagcatctacagccccggcagcgtggagaacgacagcgacagcagcagcggcctgagccagggccccgccagaccctaccaccccccccccctgttcccccccagcccccagccccccgacagcacccccagacagcccgaggccagcttcgagccccaccccagcgtgacccccaccggctaccacgcccccatggagccccccaccagcagaatgttccaggccccccccggcgccccccccccccacccccagctgtaccccggcggcaccggcggcgtgctgagcggcccccccatgggccccaagggcggcggcgccgccagcagcgtgggcggccccaacggcggcaagcagcaccccccccccaccacccccatcagcgtgagcagcagcggcgccagcggcgccccccccaccaagccccccaccacccccgtgggcggcggcaacctgcccagcgcccccccccccgccaacttcccccacgtgacccccaacctgccccccccccccgccctgagacccctgaacaacgccagcgccagcccccccggcctgggcgcccagcccctgcccggccacctgcccagcccccacgccatgggccagggcatgggcggcctgccccccggccccgagaagggccccaccctggcccccagcccccacagcctgccccccgccagcagcagcgcccccgccccccccatgagattcccctacagcagcagcagcagcagcagcgccgccgccagcagcagcagcagcagcagcagcagcagcgccagccccttccccgccagccaggccctgcccagctacccccacagcttccccccccccaccagcctgagcgtgagcaaccagccccccaagtacacccagcccagcctgcccagccaggccgtgtggagccagggccccccccccccccccccctacggcagactgctggccaacagcaacgcccaccccggccccttcccccccagcaccggcgcccagagcaccgcccacccccccgtgagcacccaccaccaccaccaccagcagcagcagcagcagcagcagcagcagcagcagcagcagcagcagcagcagcagcaccacggcaacagcggcccccccccccccggcgccttcccccaccccctggagggcggcagcagccaccacgcccacccctacgccatgagccccagcctgggcagcctgagaccctacccccccggccccgcccacctgccccccccccacagccaggtgagctacagccaggccggccccaacggcccccccgtgagcagcagcagcaacagcagcagcagcaccagccagggcagctacccctgcagccaccccagccccagccagggcccccagggcgccccctaccccttcccccccgtgcccaccgtgaccaccagcagcgccaccctgagcaccgtgatcgccaccgtggccagcagccccgccggctacaagaccgccagcccccccggcccccccccctacggcaagagagcccccagccccggcgcctacaagaccgccaccccccccggctacaagcccggcagcccccccagcttcagaaccggcaccccccccggctacagaggcaccagcccccccgccggccccggcaccttcaagcccggcagccccaccgtgggccccggccccctgccccccgccggccccagcggcctgcccagcctgccccccccccccgccgcccccgccagcggcccccccctgagcgccacccagatcaagcaggagcccgccgaggagtacgagacccccgagagccccgtgccccccgccagaagccccagccccccccccaaggtggtggacgtgcccagccacgccagccagagcgccagattcaacaagcacctggacagaggcttcaacagctgcgccagaagcgacctgtacttcgtgcccctggagggcagcaagctggccaagaagagagccgacctggtggagaaggtgagaagagaggccgagcagagagccagagaggagaaggagagagagagagagagagagagagagaaggagagagagagagagaaggagagagagctggagagaagcgtgaagctggcccaggagggcagagcccccgtggagtgccccagcctgggccccgtgccccacagaccccccttcgagcccggcagcgccgtggccaccgtgcccccctacctgggccccgacacccccgccctgagaaccctgagcgagtacgccagaccccacgtgatgagccccggcaacagaaaccaccccttctacgtgcccctgggcgccgtggaccccggcctgctgggctacaacgtgcccgccctgtacagcagcgaccccgccgccagagagagagagagagaggccagagagagagacctgagagacagactgaagcccggcttcgaggtgaagcccagcgagctggagcccctgcacggcgtgcccggccccggcctggaccccttccccagacacggcggcctggccctgcagcccggcccccccggcctgcaccccttccccttccaccccagcctgggccccctggagagagagagactggccctggccgccggccccgccctgagacccgacatgagctacgccgagagactggccgccgagagacagcacgccgagagagtggccgccctgggcaacgaccccctggccagactgcagatgctgaacgtgaccccccaccaccaccagcacagccacatccacagccacctgcacctgcaccagcaggacgccatccacgccgccagcgccagcgtgcaccccctgatcgaccccctggccagcggcagccacctgaccagaatcccctaccccgccggcaccctgcccaaccccctgctgccccaccccctgcacgagaacgaggtgctgagacaccagctgttcgccgccccctacagagacctgcccgccagcctgagcgcccccatgagcgccgcccaccagctgcaggccatgcacgcccagagcgccgagctgcagagactggccctggagcagcagcagtggctgcacgcccaccaccccctgcacagcgtgcccctgcccgcccaggaggactactacagccacctgaagaaggagagcgacaagcccctgtag

SEQ ID NO: 73916 - DNA, 3573 bp, synthetic construct; identical to SEQ ID NO: 73915
  misc_feature 1..3573: note = Description of Artificial Sequence: Synthetic coding sequence
  source 1..3573: mol_type = other DNA

SEQ ID NO: 73917 - DNA, 3573 bp, synthetic construct; identical to SEQ ID NO: 73915
  misc_feature 1..3573: note = Description of Artificial Sequence: Synthetic coding sequence
  source 1..3573: mol_type = other DNA

SEQ ID NO: 73918 - DNA, 519 bp, synthetic construct
  misc_feature 1..519: note = Description of Artificial Sequence: Synthetic coding sequence
  source 1..519: mol_type = other DNA
atgctggtgatccacctggaggagcacgtgatcatcgccttcagccagcacaacaccatcatggacctggtgcagttcttcgtgaccttcttcagctgcttcctgagcctgctgctggtggccgccgtggtgtggaagatcaagcagacctgctgggccagcagaagaagagagcagctgctgagagagagacagcagatggccagcagacccttcgccagcgtggacgtggccctggaggtgggcgccgagcagaccgagttcctgagaggccccctggagggcgcccccaagcccatcgccatcgagccctgcgccggcaacagagccgccgtgctgaccgtgttcctgtgcctgcccagaggcagcagcggcgcccccccccccggccagagcggcctggccatcgccagcgccctgatcgacatcagccagcagaaggccagcgacagcaaggacaagaccagcggcgtgagaaacagaaagcacctgagcaccagacagggcacctgcgtgtag

SEQ ID NO: 73919 - DNA, 4140 bp, synthetic construct
  misc_feature 1..4140: note = Description of Artificial Sequence: Synthetic coding sequence
  source 1..4140: mol_type = other DNA
atggagaccggcggcagagccagaaccggcaccccccagcccgccgcccccggcgtgtggagagccagacccgccggcggcggcggcggcggcgccagcagctggctgctggacggcaacagctggctgctgtgctacggcttcctgtacctggccctgtacgcccaggtgagccagagcaagccctgcgagagaaccggcagctgcttcagcggcagatgcgtgaacagcacctgcctgtgcgaccccggctgggtgggcgaccagtgccagcactgccagggcagattcaagctgaccgagcccagcggctacctgaccgacggccccatcaactacaagtacaagaccaagtgcacctggctgatcgagggctaccccaacgccgtgctgagactgagattcaaccacttcgccaccgagtgcagctgggaccacatgtacgtgtacgacggcgacagcatctacgcccccctgatcgccgtgctgagcggcctgatcgtgcccgagatcagaggcaacgagaccgtgcccgaggtggtgaccaccagcggctacgccctgctgcacttcttcagcgacgccgcctacaacctgaccggcttcaacatcttctacagcatcaacagctgccccaacaactgcagcggccacggcaagtgcaccaccagcgtgagcgtgcccagccaggtgtactgcgagtgcgacaagtactggaagggcgaggcctgcgacatcccctactgcaaggccaactgcggcagccccgaccacggctactgcgacctgaccggcgagaagctgtgcgtgtgcaacgacagctggcagggccccgactgcagcctgaacgtgcccagcaccgagagctactggatcctgcccaacgtgaagcccttcagccccagcgtgggcagagccagccacaaggccgtgctgcacggcaagttcatgtgggtgatcggcggctacaccttcaactacagcagcttccagatggtgctgaactacaacctggagagcagcatctggaacgtgggcacccccagcagaggccccctgcagagatacggccacagcctggccctgtaccaggagaacatcttcatgtacggcggcagaatcgagaccaacgacggcaacgtgaccgacgagctgtgggtgttcaacatccacagccagagctggagcaccaagacccccaccgtgctgggccacggccagcagtacgccgtggagggccacagcgcccacatcatggagctggacagcagagacgtggtgatgatcatcatcttcggctacagcgccatctacggctacaccagcagcatccaggagtaccacatcagcagcaacacctggctggtgcccgagaccaagggcgccatcgtgcagggcggctacggccacaccagcgtgtacgacgagatcaccaagagcatctacgtgcacggcggctacaaggccctgcccggcaacaagtacggcctggtggacgacctgtacaagtacgaggtgaacaccaagacctggaccatcctgaaggagagcggcttcgccagatacctgcacagcgccgtgctgatcaacggcgccatgctgatcttcggcggcaacacccacaacgacaccagcctgagcaacggcgccaagtgcttcagcgccgacttcctggcctacgacatcgcctgcgacgagtggaagatcctgcccaagcccaacctgcacagagacgtgaacagattcggccacagcgccgtggtgatcaacggcagcatgtacatcttcggcggcttcagcagcgtgctgctgaacgacatcctggtgtacaagccccccaactgcaaggccttcagagacgaggagctgtgcaagaacgccggccccggcatcaagtgcgtgtggaacaagaaccactgcgagagctgggagagcggcaacaccaacaacatcctgagagccaagtgcccccccaagaccgccgccagcgacgacagatgctacagatacgccgactgcgccagctgcaccgccaacaccaacggctgccagtggtgcgacgacaagaagtgcatcagcgccaacagcaactgcagcatgagcgtgaagaactacaccaagtgccacgtgagaaacgagcagatctgcaacaagctgaccagctgcaagagctgcagcctgaacctgaactgccagtgggaccagagacagcaggagtgccaggccctgcccgcccacctgtgcggcgagggctggagccacatcggcgacgcctgcctgagagtgaacagcagcagagagaactacgacaacgccaagctgtactgctacaacctgagcggcaacctggccagcctgaccaccagcaaggaggtggagttcgtgctggacgagatccagaagtacacccagcagaaggtgagcccctgggtgggcctgagaaagatcaacatcagctactggggctgggaggacatgagccccttcaccaacaccaccctgcagtggctgcccggcgagcccaacgacagcggcttctgcgcctacctggagagagccgccgtggccggcctgaaggccaacccctgcaccagcatggccaacggcctggtgtgcgagaagcccgtggtgagccccaaccagaacgccagaccctgcaagaagccctgcagcctgagaaccagctgcagcaactgcaccagcaacggcatggagtgcatgtggtgcagcagcaccaagagatgcgtggacagcaacgcctacatcatcagcttcccctacggccagtgcctggagtggcagaccgccacctgcagcccccagaactgcagcggcctgagaacctgcggccagtgcctggagcagcccggctgcggctggtgcaacgaccccagcaacaccggcagaggccactgcatcgagggcagcagcagaggccccatgaagctgatcggcatgcaccacagcgagatggtgctggacaccaacctgtgccccaaggagaagaactacgagtggagcttcatccagtgccccgcctgccagtgcaacggccacagcacctgcatcaacaacaacgtgtgcgagcagtgcaagaacctgaccaccggcaagcagtgccaggactgcatgcccggctactacggcgaccccaccaacggcggccagtgcaccgcctgcacctgcagcggccacgccaacatctgccacctgcacaccggcaagtgcttctgcaccaccaagggcatcaagggcgaccagtgccagctgtgcgacagcgagaacagatacgtgggcaaccccctgagaggcacctgctactacagcctgctgatcgactaccagttcaccttcagcctgctgcaggaggacgacagacaccacaccgccatcaacttcatcgccaaccccgagcagagcaacaagaacctggacatcagcatcaacgccagcaacaacttcaacctgaacatcacctggagcgtgggcagcaccgccggcaccatcagcggcgaggagaccagcatcgtgagcaagaacaacatcaaggagtacagagacagcttcagctacgagaagttcaacttcagaagcaaccccaacatcaccttctacgtgtacgtgagcaacttcagctggcccatcaagatccagatcgccttcagccagcacaacaccatcatggacctggtgcagttcttcgtgaccttcttcagctgcttcctgagcctgctgctggtggccgccgtggtgtggaagatcaagcagacctgctgggccagcagaagaagagagcagctgctgagagagagacagcagatggccagcagacccttcgccagcgtggacgtggccctggaggtgggcgccgagcagaccgagttcctgagaggccccctggagggcgcccccaagcccatcgccatcgagccctgcgccggcaacagagccgccgtgctgaccgtgttcctgtgcctgcccagaggcagcagcggcgcccccccccccggccagagcggcctggccatcgccagcgccctgatcgacatcagccagcagaaggccagcgacagcaaggacaagaccagcggcgtgagaaacagaaagcacctgagcaccagacagggcacctgcgtgtag

SEQ ID NO: 73920 - DNA, 1293 bp, synthetic construct
  misc_feature 1..1293: note = Description of Artificial Sequence: Synthetic coding sequence
  source 1..1293: mol_type = other DNA
atggagtgcatgtggtgcagcagcaccaagagatgcgtggacagcaacgcctacatcatcagcttcccctacggccagtgcctggagtggcagaccgccacctgcagcccccagaactgcagcggcctgagaacctgcggccagtgcctggagcagcccggctgcggctggtgcaacgaccccagcaacaccggcagaggccactgcatcgagggcagcagcagaggccccatgaagctgatcggcatgcaccacagcgagatggtgctggacaccaacctgtgccccaaggagaagaactacgagtggagcttcatccagtgccccgcctgcacctgcagcggccacgccaacatctgccacctgcacaccggcaagtgcttctgcaccaccaagggcatcaagggcgaccagtgccagctgtgcgacagcgagaacagatacgtgggcaaccccctgagaggcacctgctactacagcctgctgatcgactaccagttcaccttcagcctgctgcaggaggacgacagacaccacaccgccatcaacttcatcgccaaccccgagcagagcaacaagaacctggacatcagcatcaacgccagcaacaacttcaacctgaacatcacctggagcgtgggcagcaccgccggcaccatcagcggcgaggagaccagcatcgtgagcaagaacaacatcaaggagtacagagacagcttcagctacgagaagttcaacttcagaagcaaccccaacatcaccttctacgtgtacgtgagcaacttcagctggcccatcaagatccagatcgccttcagccagcacaacaccatcatggacctggtgcagttcttcgtgaccttcttcagctgcttcctgagcctgctgctggtggccgccgtggtgtggaagatcaagcagacctgctgggccagcagaagaagagagcagctgctgagagagagacagcagatggccagcagacccttcgccagcgtggacgtggccctggaggtgggcgccgagcagaccgagttcctgagaggccccctggagggcgcccccaagcccatcgccatcgagccctgcgccggcaacagagccgccgtgctgaccgtgttcctgtgcctgcccagaggcagcagcggcgcccccccccccggccagagcggcctggccatcgccagcgccctgatcgacatcagccagcagaaggccagcgacagcaaggacaagaccagcggcgtgagaaacagaaagcacctgagcaccagacagggcacctgcgtgtag

SEQ ID NO: 73921 - DNA, 207 bp, synthetic construct
  misc_feature 1..207: note = Description of Artificial Sequence: Synthetic coding sequence
  source 1..207: mol_type = other DNA
atgcccaagcacgagttcagcgtggacatgacctgcggcggctgcgccgaggccgtgagcagagtgctgaacaagctgggcggcgtgaagtacgacatcgacctgcccaacaagaaggtgtgcatcgagagcgagcacagcatggacaccctgctggccaccctgaagaagaccggcaagaccgtgagctacctgggcctggagtag

SEQ ID NO: 73922 - DNA, 207 bp, synthetic construct; identical to SEQ ID NO: 73921
  misc_feature 1..207: note = Description of Artificial Sequence: Synthetic coding sequence
  source 1..207: mol_type = other DNA

SEQ ID NO: 73923 - DNA, 207 bp, synthetic construct; identical to SEQ ID NO: 73921
  misc_feature 1..207: note = Description of Artificial Sequence: Synthetic coding sequence
  source 1..207: mol_type = other DNA

SEQ ID NO: 73924 - DNA, 933 bp, synthetic construct
  misc_feature 1..933: note = Description of Artificial Sequence: Synthetic coding sequence
  source 1..933: mol_type = other DNA
atggccgccgccgtggccgccgcccccggcgccctgggcagcctgcacgccggcggcgccagactggtggccgcctgcagcgcctggctgtgccccggcctgagactgcccggcagcctggccggcagaagagccggccccgccatctgggcccagggctgggtgcccgccgccggcggccccgcccccaagagaggctacagcagcgagatgaagaccgaggacgagctgagagtgagacacctggaggaggagaacagaggcatcgtggtgctgggcatcaacagagcctacggcaagaacagcctgagcaagaacctgatcaagatgctgagcaaggccgtggacgccctgaagagcgacaagaaggtgagaaccatcatcatcagaagcgaggtgcccggcatcttctgcgccgccaacctgcccgtgcccaccatcgccgccatcgacggcctggccctgggcggcggcctggagctggccctggcctgcgacatcagagtggccgccagcagcgccaagatgggcctggtggagaccaagctggccatcatccccggcggcggcggcacccagagactgcccagagccatcggcatgagcctggccaaggagctgatcttcagcgccagagtgctggacggcaaggaggccaaggccgtgggcctgatcagccacgtgctggagcagaaccaggagggcgacgccgcctacagaaaggccctggacctggccagagagttcctgccccagggccccgtggccatgagagtggccaagctggccatcaaccagggcatggaggtggacctggtgaccggcctggccatcgaggaggcctgctacgcccagaccatccccaccaaggacagactggagggcctgctggccttcaaggagaagagaccccccagatacaagggcgagtag

SEQ ID NO: 73925 - DNA, 1020 bp, synthetic construct
  misc_feature 1..1020: note = Description of Artificial Sequence: Synthetic coding sequence
  source 1..1020: mol_type = other DNA
atggccgccgccgtggccgccgcccccggcgccctgggcagcctgcacgccggcggcgccagactggtggccgcctgcagcgcctggctgtgccccggcctgagactgcccggcagcctggccggcagaagagccggccccgccatctgggcccagggctgggtgcccgccgccggcggccccgcccccaagagaggctacagcagcgagatgaagaccgaggacgagctgagagtgagacacctggaggaggagaacagaggcatcgtggtgctgggcatcaacagagcctacggcaagaacagcctgagcaagaacctgatcaagatgctgagcaaggccgtggacgccctgaagagcgacaagaaggtgagaaccatcatcatcagaagcgaggtgcccggcatcttctgcgccggcgccgacctgaaggagagagccaagatgagcagcagcgaggtgggccccttcgtgagcaagatcagagccgtgatcaacgacatcgccaacctgcccgtgcccaccatcgccgccatcgacggcctggccctgggcggcggcctggagctggccctggcctgcgacatcagagtggccgccagcagcgccaagatgggcctggtggagaccaagctggccatcatccccggcggcggcggcacccagagactgcccagagccatcggcatgagcctggccaaggagctgatcttcagcgccagagtgctggacggcaaggaggccaaggccgtgggcctgatcagccacgtgctggagcagaaccaggagggcgacgccgcctacagaaaggccctggacctggccagagagttcctgccccagggccccgtggccatgagagtggccaagctggccatcaaccagggcatggaggtggacctggtgaccggcctggccatcgaggaggcctgctacgcccagaccatccccaccaaggacagactggagggcctgctggccttcaaggagaagagaccccccagatacaagggcgagtag

SEQ ID NO: 73926 - DNA, 768 bp, synthetic construct
  misc_feature 1..768: note = Description of Artificial Sequence: Synthetic coding sequence
  source 1..768: mol_type = other DNA
atggccgccgccgtggccgccgcccccggcgccctgggcagcctgcacgccggcggcgccagactggtggccgcctgcagcgcctggctgtgccccggcctgagactgcccggcagcctggccggcagaagagccggccccgccatctgggcccagggctgggtgcccgccgccggcggccccgcccccaagagaggctacagcagcgagatgaagaccgaggacgagctgagagtgagacacctggaggaggagaacagaggcatcgtggtgctgggcatcaacagagcctacggcaagaacagcctgagcaagaacctgatcaagatgctgagcaaggccgtggacgccctgaagagcgacaagaaggtgagaaccatcatcatcagaagcgaggtgcccggcatcttctgcgccggcgccgacctgaaggagagagccaagatgagcagcagcgaggtgggccccttcgtgagcaagatcagagccgtgatcaacgacatcgccaacctgcccgtgcccaccatcgccgccatcgacggcctggccctgggcggcggcctggagctggccctggcctgcgacatcagagtggccgccagcagcgccaagatgggcctggtggagaccaagctggccatcatccccggcggcgtgaccagcagcaccgaggtgctgaaccccagcaagagcagcatgaagatcggcatcatcatcttccagacccccgtgaacatcgacatcctggccagcagccacgagagctag

SEQ ID NO: 73927 - DNA, 1932 bp, synthetic construct
  misc_feature 1..1932: note = Description of Artificial Sequence: Synthetic coding sequence
  source 1..1932: mol_type = other DNA
atgcccctgctgttcctggagagattcccctggcccagcctgagaacctacaccggcctgagcggcctggccctgctgggcaccatcatcagcgcctacagagccctgagccagcccgaggccggccccggcgagcccgaccagctgaccgccagcctgcagcccgagccccccgcccccgccagacccagcgccggcggccccagagccagagacgtggcccagtacctgctgagcgacagcctgttcgtgtgggtgctggtgaacaccgcctgctgcgtgctgatgctggtggccaagctgatccagtgcatcgtgttcggccccctgagagtgagcgagagacagcacctgaaggacaagttctggaacttcatcttctacaagttcatcttcatcttcggcgtgctgaacgtgcagaccgtggaggaggtggtgatgtggtgcctgtggttcgccggcctggtgttcctgcacctgatggtgcagctgtgcaaggacagattcgagtacctgagcttcagccccaccacccccatgagcagccacggcagagtgctgagcctgctggtggccatgctgctgagctgctgcggcctggccgccgtgtgcagcatcaccggctacacccacggcatgcacaccctggccttcatggccgccgagagcctgctggtgaccgtgagaaccgcccacgtgatcctgagatacgtgatccacctgtgggacctgaaccacgagggcacctgggagggcaagggcacctacgtgtactacaccgacttcgtgatggagctgaccctgctgagcctggacctgatgcaccacatccacatgctgctgttcggcaacatctggctgagcatggccagcctggtgatcttcatgcagctgagatacctgttccacgaggtgcagagaagaatcagaagacacaagaactacctgagagtggtgggcaacatggaggccagattcgccgtggccacccccgaggagctggccgtgaacaacgacgactgcgccatctgctgggacagcatgcaggccgccagaaagctgccctgcggccacctgttccacaacagctgcctgagaagctggctggagcaggacaccagctgccccacctgcagaatgagcctgaacatcgccgacaacaacagagtgagagaggagcaccagggcgagaacctggacgagaacctggtgcccgtggccgccgccgagggcagacccagactgaaccagcacaaccacttcttccacttcgacggcagcagaatcgccagctggctgcccagcttcagcgtggaggtgatgcacaccaccaacatcctgggcatcacccaggccagcaacagccagctgaacgccatggcccaccagatccaggagatgttcccccaggtgccctaccacctggtgctgcaggacctgcagctgaccagaagcgtggagatcaccaccgacaacatcctggagggcagaatccaggtgcccttccccacccagagaagcgacagcatcagacccgccctgaacagccccgtggagagacccagcagcgaccaggaggagggcgagaccagcgcccagaccgagagagtgcccctggacctgagccccagactggaggagaccctggacttcggcgaggtggaggtggagcccagcgaggtggaggacttcgaggccagaggcagcagattcagcaagagcgccgacgagagacagagaatgctggtgcagagaaaggacgagctgctgcagcaggccagaaagagattcctgaacaagagcagcgaggacgacgccgccagcgagagcttcctgcccagcgagggcgccagcagcgaccccgtgaccctgagaagaagaatgctggccgccgccgccgagagaagactgcagaagcagcagaccagctag

SEQ ID NO: 73928 - DNA, 954 bp, synthetic construct
  misc_feature 1..954: note = Description of Artificial Sequence: Synthetic coding sequence
  source 1..954: mol_type = other DNA
atgagagacagcgcctgctggcagagaaaggacgagctgctgcagcaggccagaaagagattcctgaacaagagcagcgaggacgacgccgccagcgagagcttcctgcccagcgagggcgccagcagcgaccccgtgaccctgagaagaagaatgctggccgccagaaacggcggcttcagaagcagcagaccccccagcgcccccctgcccagcagcgccgccagctgcgccctgtgccccaccgactggagaagacccgtgcccatccccctgcacggcaaggccggcctgaccgccctgcccctgtacaaggcctgcggcctgatcgtgttcggccagctgatcaacctgatcctgctgtgcaacaccttctacgtgaccttcctgttccccctggagaccctgcagatcctgaccgtgggcatgatcagcagcggcgtggactggaccgcctggggcggcggcagaagcggcggcagcgaggtggcctgcctgcagcaggccgccagcacccccgccagctgcgtgagacccaccaacgccggcgtgctgagcaccacccccagcggcaagagcgtgggcgaggcccacagcgtgagccccccccccagaagaggcgtgaccagcgtgatcaagctgctgagcctgctgtggaagcacgtggactgcgccagaagacccaccggcagctgcaccccccagcagggcatcctggagaaggagctgctggtgagatacctggagcagagaagaggcaagagcagagccatcggctgcgacgaggtgacccccttctgccccaccaccagcggcaccgacttccccagcctgcagagcaaggccggcctgatcagcgtgaacagcggcgcccccgccagccacgagtgcgccccctgggtgcccagccccctgagcatcagcctgagcagactggacctgggcagcggctag

SEQ ID NO: 73929 - DNA, 1638 bp, synthetic construct
  misc_feature 1..1638: note = Description of Artificial Sequence: Synthetic coding sequence
  source 1..1638: mol_type = other DNA
atggccaccgacgccgccctgagaagactgctgagactgcacagaaccgagatcgccgtggccgtggacagcgccttccccctgctgcacgccctggccgaccacgacgtggtgcccgaggacaagttccaggagaccctgcacctgaaggagaaggagggctgcccccaggccttccacgccctgctgagctggctgctgacccaggacagcaccgccatcctggacttctggagagtgctgttcaaggactacaacctggagagatacggcagactgcagcccatcctggacagcttccccaaggacgtggacctgagccagcccagaaagggcagaaagccccccgccgtgcccaaggccctggtgcccccccccagactgcccaccaagagaaaggccagcgaggaggccagagccgccgcccccgccgccctgacccccagaggcaccgccagccccggcagccagctgaaggccaagccccccaagaagcccgagagcagcgccgagcagcagagactgcccctgggcaacggcatccagaccatgagcgccagcgtgcagagagccgtggccatgagcagcggcgacgtgcccggcgccagaggcgccgtggagggcatcctgatccagcaggtgttcgagagcggcggcagcaagaagtgcatccaggtgggcggcgagttctacacccccagcaagttcgaggacagcggcagcggcaagaacaaggccagaagcagcagcggccccaagcccctggtgagagccaagggcgcccagggcgccgcccccggcggcggcgaggccagactgggccagcagggcagcgtgcccgcccccctggccctgcccagcgacccccagctgcaccagaagaacgaggacgagtgcgccgtgtgcagagacggcggcgagctgatctgctgcgacggctgccccagagccttccacctggcctgcctgagcccccccctgagagagatccccagcggcacctggagatgcagcagctgcctgcaggccaccgtgcaggaggtgcagcccagagccgaggagcccagaccccaggagccccccgtggagacccccctgccccccggcctgagaagcgccggcgaggaggtgagaggcccccccggcgagcccctggccggcatggacaccaccctggtgtacaagcacctgcccgccccccccagcgccgcccccctgcccggcctggacagcagcgccctgcaccccctgctgtgcgtgggccccgagggccagcagaacctggcccccggcgccagatgcggcgtgtgcggcgacggcaccgacgtgctgagatgcacccactgcgccgccgccttccactggagatgccacttccccgccggcaccagcagacccggcaccggcctgagatgcagaagctgcagcggcgacgtgacccccgcccccgtggagggcgtgctggcccccagccccgccagactggcccccggccccgccaaggacgacaccgccagccacgagcccgccctgcacagagacgacctggagagcctgctgagcgagcacaccttcgacggcatcctgcagtgggccatccagagcatggccagacccgccgcccccttccccagctag

SEQ ID NO: 73930 - DNA, 735 bp, synthetic construct
  misc_feature 1..735: note = Description of Artificial Sequence: Synthetic coding sequence
  source 1..735: mol_type = other DNA
atgtggctggtgtacagcagcggcgcccccggcacccagcagcccgccagaaacagagtgttcttccccatcggcatggcccccggcggcgtgtgctggagacccgacggctggggcaccggcggccagggcagaatcagcggccccggcagcatgggcgccggccagagactgggcagcagcggcacccagagatgctgctggggcagctgcttcggcaaggaggtggccctgagaagagtgctgcaccccagccccaagaacgaggacgagtgcgccgtgtgcagagacggcggcgagctgatctgctgcgacggctgccccagagccttccacctggcctgcctgagcccccccctgagagagatccccagcggcacctggagatgcagcagctgcctgcaggccaccgtgcaggaggtgcagcccagagccgaggagcccagaccccaggagccccccgtggagacccccctgccccccggcctgagaagcgccggcgaggagcccagatgccagggctggacccccagaccctgcaccccctactgcgtgtgggtgctgagagtgagcagaacctggctgctggtgagagtggccggctgcgccgagatggtgagaacctgctgcggcgtgctgaccgcccccctgcccagcaccggcgccgccaccagccagcccgccccccccggccccggcagagcctgcgccgccgaccccgcccaggagacctag

SEQ ID NO: 73931 - DNA, 1047 bp, synthetic construct
  misc_feature 1..1047: note = Description of Artificial Sequence: Synthetic coding sequence
  source 1..1047: mol_type = other DNA
atgtggctggtgtacagcagcggcgcccccggcacccagcagcccgccagaaacagagtgttcttccccatcggcatggcccccggcggcgtgtgctggagacccgacggctggggcaccggcggccagggcagaatcagcggccccggcagcatgggcgccggccagagactgggcagcagcggcacccagagatgctgctggggcagctgcttcggcaaggaggtggccctgagaagagtgctgcaccccagccccgtgtgcatgggcgtgagctgcctgtgccagaagaacgaggacgagtgcgccgtgtgcagagacggcggcgagctgatctgctgcgacggctgccccagagccttccacctggcctgcctgagcccccccctgagagagatccccagcggcacctggagatgcagcagctgcctgcaggccaccgtgcaggaggtgcagcccagagccgaggagcccagaccccaggagccccccgtggagacccccctgccccccggcctgagaagcgccggcgaggaggtgagaggcccccccggcgagcccctggccggcatggacaccaccctggtgtacaagcacctgcccgccccccccagcgccgcccccctgcccggcctggacagcagcgccctgcaccccctgctgtgcgtgggccccgagggccagcagaacctggcccccggcgccagatgcggcgtgtgcggcgacggcaccgacgtgctgagatgcacccactgcgccgccgccttccactggagatgccacttccccgccggcaccagcagacccggcaccggcctgagatgcagaagctgcagcggcgacgtgacccccgcccccgtggagggcgtgctggcccccagccccgccagactggcccccggccccgccaaggacgacaccgccagccacgagcccgccctgcacagagacgacctggagagcctgctgagcgagcacaccttcgacggcatcctgcagtgggccatccagagcatggccagacccgccgcccccttccccagctag

SEQ ID NO: 73932 - DNA, 1017 bp, synthetic construct
  misc_feature 1..1017: note = Description of Artificial Sequence: Synthetic coding sequence
  source 1..1017: mol_type = other DNA
atgtggctggtgtacagcagcggcgcccccggcacccagcagcccgccagaaacagagtgttcttccccatcggcatggcccccggcggcgtgtgctggagacccgacggctggggcaccggcggccagggcagaatcagcggccccggcagcatgggcgccggccagagactgggcagcagcggcacccagagatgctgctggggcagctgcttcggcaaggaggtggccctgagaagagtgctgcaccccagccccaagaacgaggacgagtgcgccgtgtgcagagacggcggcgagctgatctgctgcgacggctgccccagagccttccacctggcctgcctgagcccccccctgagagagatccccagcggcacctggagatgcagcagctgcctgcaggccaccgtgcaggaggtgcagcccagagccgaggagcccagaccccaggagccccccgtggagacccccctgccccccggcctgagaagcgccggcgaggaggtgagaggcccccccggcgagcccctggccggcatggacaccaccctggtgtacaagcacctgcccgccccccccagcgccgcccccctgcccggcctggacagcagcgccctgcaccccctgctgtgcgtgggccccgagggccagcagaacctggcccccggcgccagatgcggcgtgtgcggcgacggcaccgacgtgctgagatgcacccactgcgccgccgccttccactggagatgccacttccccgccggcaccagcagacccggcaccggcctgagatgcagaagctgcagcggcgacgtgacccccgcccccgtggagggcgtgctggcccccagccccgccagactggcccccggccccgccaaggacgacaccgccagccacgagcccgccctgcacagagacgacctggagagcctgctgagcgagcacaccttcgacggcatcctgcagtgggccatccagagcatggccagacccgccgcccccttccccagctag

SEQ ID NO: 73933 - DNA, 1047 bp, synthetic construct; identical to SEQ ID NO: 73931
  misc_feature 1..1047: note = Description of Artificial Sequence: Synthetic coding sequence
  source 1..1047: mol_type = other DNA

SEQ ID NO: 73934 - DNA, 3717 bp, synthetic construct
  misc_feature 1..3717: note = Description of Artificial Sequence: Synthetic coding sequence
  source 1..3717: mol_type = other DNA
atgaaggtggtgcccgagaagaacgccgtgagaatcctgtggggcagagagagaggcgccagagccatgggcgcccagagactgctgcaggagctggtggaggacaagaccagatggatgaagtgggagggcaagagagtggagctgcccgacagccccagaagcaccttcctgctggccttcagccccgacagaaccctgctggccagcacccacgtgaaccacaacatctacatcaccgaggtgaagaccggcaagtgcgtgcacagcctgatcggccacagaagaaccccctggtgcgtgaccttccaccccaccatcagcggcctgatcgccagcggctgcctggacggcgaggtgagaatctgggacctgcacggcggcagcgagagctggttcaccgacagcaacaacgccatcgccagcctggccttccaccccaccgcccagctgctgctgatcgccaccgccaacgagatccacttctgggactggagcagaagagagcccttcgccgtggtgaagaccgccagcgagatggagagagtgagactggtgagattcgaccccctgggccactacctgctgaccgccatcgtgaaccccagcaaccagcagggcgacgacgagcccgagatccccatcgacggcaccgagctgagccactacagacagagagccctgctgcagagccagcccgtgagaagaacccccctgctgcacaacttcctgcacatgctgagcagcagaagcagcggcatccaggtgggcgagcagagcaccgtgcaggacagcgccacccccagccccccccccccccccccccagcccagcaccgagagacccagaaccagcgcctacatcagactgagacagagagtgagctaccccaccgccgagtgctgccagcacctgggcatcctgtgcctgtgcagcagatgcagcggcaccagagtgcccagcctgctgccccaccaggacagcgtgccccccgccagcgccagagccaccacccccagcttcagcttcgtgcagaccgagcccttccacccccccgagcaggccagcagcacccagcaggaccagggcctgctgaacagacccagcgccttcagcaccgtgcagagcagcaccgccggcaacaccctgagaaacctgagcctgggccccaccagaagaagcctgggcggccccctgagcagccaccccagcagataccacagagagatcgcccccggcctgaccggcagcgagtggaccagaaccgtgctgagcctgaacagcagaagcgaggccgagagcatgcccccccccagaaccagcgccagcagcgtgagcctgctgagcgtgctgagacagcaggagggcggcagccaggccagcgtgtacaccagcgccaccgagggcagaggcttccccgccagcggcctggccaccgagagcgacggcggcaacggcagcagccagaacaacagcggcagcatcagacacgagctgcagtgcgacctgagaagattcttcctggagtacgacagactgcaggagctggaccagagcctgagcggcgaggccccccagacccagcaggcccaggagatgctgaacaacaacatcgagagcgagagacccggccccagccaccagcccaccccccacagcagcgagaacaacagcaacctgagcagaggccacctgaacagatgcagagcctgccacaacctgctgaccttcaacaacgacaccctgagatgggagagaaccacccccaactacagcagcggcgaggccagcagcagctggcaggtgcccagcagcttcgagagcgtgcccagcagcggcagccagctgccccccctggagagaaccgagggccagacccccagcagcagcagactggagctgagcagcagcgccagcccccaggaggagagaaccgtgggcgtggccttcaaccaggagaccggccactgggagagaatctacacccagagcagcagaagcggcaccgtgagccaggaggccctgcaccaggacatgcccgaggagagcagcgaggaggacagcctgagaagaagactgctggagagcagcctgatcagcctgagcagatacgacggcgccggcagcagagagcaccccatctaccccgaccccgccagagacaacggcgacagaagcagacacagagcccccagaaacgccagaatgagcgcccccagcctgggcagattcgtgcccagaagattcctgctgcccgagtacctgccctacgccggcatcttccacgagagaggccagcccggcctggccacccacagcagcgtgaacagagtgctggccggcgccgtgatcggcgacggccagagcgccgtggccagcaacatcgccaacaccacctacagactgcagtggtgggacttcaccaagttcgacctgcccgagatcagcaacgccagcgtgaacgtgctggtgcagaactgcaagatctacaacgacgccagctgcgacatcagcgccgacggccagctgctggccgccttcatccccagcagccagagaggcttccccgacgagggcatcctggccgtgtacagcctggccccccacaacctgggcgagatgctgtacaccaagagattcggccccaacgccatcagcgtgagcctgagccccatgggcagatacgtgatggtgggcctggccagcagaagaatcctgctgcaccccagcaccgagcacatggtggcccaggtgttcagactgcagcaggcccacggcggcgagaccagcatgagaagagtgttcaacgtgctgtaccccatgcccgccgaccagagaagacacgtgagcatcaacagcgccagatggctgcccgagcccggcctgggcctggcctacggcaccaacaagggcgacctggtgatctgcagacccgaggccctgaacagcggcgtggagtactactgggaccagctgaacgagaccgtgttcaccgtgcacagcaacagcagaagcagcgagagacccggcaccagcagagccacctggagaaccgacagagacatgggcctgatgaacgccatcggcctgcagcccagaaaccccgccaccagcgtgaccagccagggcacccagaccctggccctgcagctgcagaacgccgagacccagaccgagagagaggtgcccgagcccggcaccgccgccagcggccccggcgagggcgagggcagcgagtacggcgccagcggcgaggacgccctgagcagaatccagagactgatggccgagggcggcatgaccgccgtggtgcagagagagcagagcaccaccatggccagcatgggcggcttcggcaacaacatcatcgtgagccacagaatccacagaagcagccagaccggcaccgagcccggcgccgcccacaccagcagcccccagcccagcaccagcagaggcctgctgcccgaggccggccagctggccgagagaggcctgagccccagaaccgccagctgggaccagcccggcacccccggcagagagcccacccagcccaccctgcccagcagcagccccgtgcccatccccgtgagcctgcccagcgccgagggccccaccctgcactgcgagctgaccaacaacaaccacctgctggacggcggcagcagcagaggcgacgccgccggccccagaggcgagcccagaaacagatag

SEQ ID NO: 73935 - DNA, 2169 bp, synthetic construct
  misc_feature 1..2169: note = Description of Artificial Sequence: Synthetic coding sequence
  source 1..2169: mol_type = other DNA
atgaaggtggtgcccgagaagaacgccgtgagaatcctgtggggcagagagagaggcgccagagccatgggcgcccagagactgctgcaggagctggtggaggacaagaccagatggatgaagtgggagggcaagagagtggagctgcccgacagccccagaagcaccttcctgctggccttcagccccgacagaaccctgctggccagcacccacgtgaaccacaacatctacatcaccgaggtgaagaccggcaagtgcgtgcacagcctgatcggccacagaagaaccccctggtgcgtgaccttccaccccaccatcagcggcctgatcgccagcggctgcctggacggcgaggtgagaatctgggacctgcacggcggcagcgagagctggttcaccgacagcaacaacgccatcgccagcctggccttccaccccaccgcccagctgctgctgatcgccaccgccaacgagatccacttctgggactggagcagaagagagcccttcgccgtggtgaagaccgccagcgagatggagagagtgagactggtgagattcgaccccctgggccactacctgctgaccgccatcgtgaaccccagcaaccagcagggcgacgacgagcccgagatccccatcgacggcaccgagctgagccactacagacagagagccctgctgcagagccagcccgtgagaagaacccccctgctgcacaacttcctgcacatgctgagcagcagaagcagcggcatccagaccgagcccttccacccccccgagcaggccagcagcacccagcaggaccagggcctgctgaacagacccagcgccttcagcaccgtgcagagcagcaccgccggcaacaccctgagaaacctgagcctgggccccaccagaagaagcctgggcggccccctgagcagccaccccagcagataccacagagagatcgcccccggcctgaccggcagcgagtggaccagaaccgtgctgagcctgaacagcagaagcgaggccgagagcatgcccccccccagaaccagcgccagcagcgtgagcctgctgagcgtgctgagacagcaggagggcggcagccaggccagcgtgtacaccagcgccaccgagggcagaggcttccccgccagcggcctggccaccgagagcgacggcggcaacggcagcagccagaacaacagcggcagcatcagacacgagctgcagtgcgacctgagaagattcttcctggagtacgacagactgcaggagctggaccagagcctgagcggcgaggccccccagacccagcaggcccaggagatgctgaacaacaacatcgagagcgagagacccggccccagccaccagcccaccccccacagcagcgagaacaacagcaacctgagcagaggccacctgaacagatgcagagcctgccacaacctgctgaccttcaacaacgacaccctgagatgggagagaaccacccccaactacagcagcggcgaggccagcagcagctggcaggtgcccagcagcttcgagagcgtgcccagcagcggcagccagctgccccccctggagagaaccgagggccagacccccagcagcagcagactggagctgagcagcagcgccagcccccaggaggagagaaccgtgggcgtggccttcaaccaggagaccggccactgggagagaatctacacccagagcagcagaagcggcaccgtgagccaggaggccctgcaccaggacatgcccgaggagagcagcgaggaggacagcctgagaagaagaagcctggccctgagccccagactggagtacagcggcgccatcctggcccactgcaagctgagactgcccggcagctgccacagccccgccagcgccagccaggtggccggcaccaccggcgcccaccaccacgccagactgatcttcgccttcctggtggagatggagttccaccacgtgagccaggccggcctggagctgctgaccagcggcgacctgcccaccagcgccagccagagcgccggcatcaccggcgtgagccacagagcctggcccagactgctggagagcagcctgatcagcctgagcagatacgacggcgccggcagcagagagcaccccatctaccccgaccccgcctag

SEQ ID NO: 73936 - DNA, 3627 bp, synthetic construct
  misc_feature 1..3627: note = Description of Artificial Sequence: Synthetic coding sequence
  source 1..3627: mol_type = other DNA
atgaaggtggtgcccgagaagaacgccgtgagaatcctgtggggcagagagagaggcgccagagccatgggcgcccagagactgctgcaggagctggtggaggacaagaccagatggatgaagtgggagggcaagagagtggagctgcccgacagccccagaagcaccttcctgctggccttcagccccgacagaaccctgctggccagcacccacgtgaaccacaacatctacatcaccgaggtgaagaccggcaagtgcgtgcacagcctgatcggccacagaagaaccccctggtgcgtgaccttccaccccaccatcagcggcctgatcgccagcggctgcctggacggcgaggtgagaatctgggacctgcacggcggcagcgagagctggttcaccgacagcaacaacgccatcgccagcctggccttccaccccaccgcccagctgctgctgatcgccaccgccaacgagatccacttctgggactggagcagaagagagcccttcgccgtggtgaagaccgccagcgagatggagagagtgagactggtgagattcgaccccctgggccactacctgctgaccgccatcgtgaaccccagcaaccagcagggcgacgacgagcccgagatccccatcgacggcaccgagctgagccactacagacagagagccctgctgcagagccagcccgtgagaagaacccccctgctgcacaacttcctgcacatgctgagcagcagaagcagcggcatccagaccgagcccttccacccccccgagcaggccagcagcacccagcaggaccagggcctgctgaacagacccagcgccttcagcaccgtgcagagcagcaccgccggcaacaccctgagaaacctgagcctgggccccaccagaagaagcctgggcggccccctgagcagccaccccagcagataccacagagagatcgcccccggcctgaccggcagcgagtggaccagaaccgtgctgagcctgaacagcagaagcgaggccgagagcatgcccccccccagaaccagcgccagcagcgtgagcctgctgagcgtgctgagacagcaggagggcggcagccaggccagcgtgtacaccagcgccaccgagggcagaggcttccccgccagcggcctggccaccgagagcgacggcggcaacggcagcagccagaacaacagcggcagcatcagacacgagctgcagtgcgacctgagaagattcttcctggagtacgacagactgcaggagctggaccagagcctgagcggcgaggccccccagacccagcaggcccaggagatgctgaacaacaacatcgagagcgagagacccggccccagccaccagcccaccccccacagcagcgagaacaacagcaacctgagcagaggccacctgaacagatgcagagcctgccacaacctgctgaccttcaacaacgacaccctgagatgggagagaaccacccccaactacagcagcggcgaggccagcagcagctggcaggtgcccagcagcttcgagagcgtgcccagcagcggcagccagctgccccccctggagagaaccgagggccagacccccagcagcagcagactggagctgagcagcagcgccagcccccaggaggagagaaccgtgggcgtggccttcaaccaggagaccggccactgggagagaatctacacccagagcagcagaagcggcaccgtgagccaggaggccctgcaccaggacatgcccgaggagagcagcgaggaggacagcctgagaagaagactgctggagagcagcctgatcagcctgagcagatacgacggcgccggcagcagagagcaccccatctaccccgaccccgccagactgagccccgccgcctactacgcccagagaatgatccagtacctgagcagaagagacagcatcagacagagaagcatgagataccagcagaacagactgagaagcagcaccagcagcagcagcagcgacaaccagggccccagcgtggagggcaccgacctggagttcgaggacttcgaggacaacggcgacagaagcagacacagagcccccagaaacgccagaatgagcgcccccagcctgggcagattcgtgcccagaagattcctgctgcccgagtacctgccctacgccggcatcttccacgagagaggccagcccggcctggccacccacagcagcgtgaacagagtgctggccggcgccgtgatcggcgacggccagagcgccgtggccagcaacatcgccaacaccacctacagactgcagtggtgggacttcaccaagttcgacctgcccgagatcagcaacgccagcgtgaacgtgctggtgcagaactgcaagatctacaacgacgccagctgcgacatcagcgccgacggccagctgctggccgccttcatccccagcagccagagaggcttccccgacgagggcatcctggccgtgtacagcctggccccccacaacctgggcgagatgctgtacaccaagagattcggccccaacgccatcagcgtgagcctgagccccatgggcagatacgtgatggtgggcctggccagcagaagaatcctgctgcaccccagcaccgagcacatggtggcccaggtgttcagactgcagcaggcccacggcggcgagaccagcatgagaagagtgttcaacgtgctgtaccccatgcccgccgaccagagaagacacgtgagcatcaacagcgccagatggctgcccgagcccggcctgggcctggcctacggcaccaacaagggcgacctggtgatctgcagacccgaggccctgaacagcggcgtggagtactactgggaccagctgaacgagaccgtgttcaccgtgcacagcaacagcagaagcagcgagagacccggcaccagcagagccacctggagaaccgacagagacatgggcctgatgaacgccatcggcctgcagcccagaaaccccgccaccagcgtgaccagccagggcacccagaccctggccctgcagctgcagaacgccgagacccagaccgagagagaggtgcccgagcccggcaccgccgccagcggccccggcgagggcgagggcagcgagtacggcgccagcggcgaggacgccctgagcagaatccagagactgatggccgagggcggcatgaccgccgtggtgcagagagagcagagcaccaccatggccagcatgggcggcttcggcaacaacatcatcgtgagccacagaatccacagaagcagccagaccggcaccgagcccggcgccgcccacaccagcagcccccagcccagcaccagcagaggcctgctgcccgaggccggccagctggccgagagaggcctgagccccagaaccgccagctgggaccagcccggcacccccggcagagagcccacccagcccaccctgcccagcagcagccccgtgcccatccccgtgagcctgcccagcgccgagggccccaccctgcactgcgagctgaccaacaacaaccacctgctggacggcggcagcagcagaggcgacgccgccggccccagaggcgagcccagaaacagatag

SEQ ID NO: 73937 - DNA, 3810 bp, synthetic construct
  misc_feature 1..3810: note = Description of Artificial Sequence: Synthetic coding sequence
  source 1..3810: mol_type = other DNA
atgaaggtggtgcccgagaagaacgccgtgagaatcctgtggggcagagagagaggcgccagagccatgggcgcccagagactgctgcaggagctggtggaggacaagaccagatggatgaagtgggagggcaagagagtggagctgcccgacagccccagaagcaccttcctgctggccttcagccccgacagaaccctgctggccagcacccacgtgaaccacaacatctacatcaccgaggtgaagaccggcaagtgcgtgcacagcctgatcggccacagaagaaccccctggtgcgtgaccttccaccccaccatcagcggcctgatcgccagcggctgcctggacggcgaggtgagaatctgggacctgcacggcggcagcgagagctggttcaccgacagcaacaacgccatcgccagcctggccttccaccccaccgcccagctgctgctgatcgccaccgccaacgagatccacttctgggactggagcagaagagagcccttcgccgtggtgaagaccgccagcgagatggagagagtgagactggtgagattcgaccccctgggccactacctgctgaccgccatcgtgaaccccagcaaccagcagggcgacgacgagcccgagatccccatcgacggcaccgagctgagccactacagacagagagccctgctgcagagccagcccgtgagaagaacccccctgctgcacaacttcctgcacatgctgagcagcagaagcagcggcatccaggtgggcgagcagagcaccgtgcaggacagcgccacccccagccccccccccccccccccccagcccagcaccgagagacccagaaccagcgcctacatcagactgagacagagagtgagctaccccaccgccgagtgctgccagcacctgggcatcctgtgcctgtgcagcagatgcagcggcaccagagtgcccagcctgctgccccaccaggacagcgtgccccccgccagcgccagagccaccacccccagcttcagcttcgtgcagaccgagcccttccacccccccgagcaggccagcagcacccagcaggaccagggcctgctgaacagacccagcgccttcagcaccgtgcagagcagcaccgccggcaacaccctgagaaacctgagcctgggccccaccagaagaagcctgggcggccccctgagcagccaccccagcagataccacagagagatcgcccccggcctgaccggcagcgagtggaccagaaccgtgctgagcctgaacagcagaagcgaggccgagagcatgcccccccccagaaccagcgccagcagcgtgagcctgctgagcgtgctgagacagcaggagggcggcagccaggccagcgtgtacaccagcgccaccgagggcagaggcttccccgccagcggcctggccaccgagagcgacggcggcaacggcagcagccagaacaacagcggcagcatcagacacgagctgcagtgcgacctgagaagattcttcctggagtacgacagactgcaggagctggaccagagcctgagcggcgaggccccccagacccagcaggcccaggagatgctgaacaacaacatcgagagcgagagacccggccccagccaccagcccaccccccacagcagcgagaacaacagcaacctgagcagaggccacctgaacagatgcagagcctgccacaacctgctgaccttcaacaacgacaccctgagatgggagagaaccacccccaactacagcagcggcgaggccagcagcagctggcaggtgcccagcagcttcgagagcgtgcccagcagcggcagccagctgccccccctggagagaaccgagggccagacccccagcagcagcagactggagctgagcagcagcgccagcccccaggaggagagaaccgtgggcgtggccttcaaccaggagaccggccactgggagagaatctacacccagagcagcagaagcggcaccgtgagccaggaggccctgcaccaggacatgcccgaggagagcagcgaggaggacagcctgagaagactgagccccgccgcctactacgcccagagaatgatccagtacctgagcagaagagacagcatcagacagagaagcatgagataccagcagaacagactgagaagcagcaccagcagcagcagcagcgacaaccagggccccagcgtggagggcaccgacctggagttcgaggacttcgaggacaacggcgacagaagcagacacagagcccccagaaacgccagaatgagcgcccccagcctgggcagattcgtgcccagaagattcctgctgcccgagtacctgccctacgccggcatcttccacgagagaggccagcccggcctggccacccacagcagcgtgaacagagtgctggccggcgccgtgatcggcgacggccagagcgccgtggccagcaacatcgccaacaccacctacagactgcagtggtgggacttcaccaagttcgacctgcccgagatcagcaacgccagcgtgaacgtgctggtgcagaactgcaagatctacaacgacgccagctgcgacatcagcgccgacggccagctgctggccgccttcatccccagcagccagagaggcttccccgacgagggcatcctggccgtgtacagcctggccccccacaacctgggcgagatgctgtacaccaagagattcggccccaacgccatcagcgtgagcctgagccccatgggcagatacgtgatggtgggcctggccagcagaagaatcctgctgcaccccagcaccgagcacatggtggcccaggtgttcagactgcagcaggcccacggcggcgagaccagcatgagaagagtgttcaacgtgctgtaccccatgcccgccgaccagagaagacacgtgagcatcaacagcgccagatggctgcccgagcccggcctgggcctggcctacggcaccaacaagggcgacctggtgatctgcagacccgaggccctgaacagcggcgtggagtactactgggaccagctgaacgagaccgtgttcaccgtgcacagcaacagcagaagcagcgagagacccggcaccagcagagccacctggagaaccgacagagacatgggcctgatgaacgccatcggcctgcagcccagaaaccccgccaccagcgtgaccagccagggcacccagaccctggccctgcagctgcagaacgccgagacccagaccgagagagaggtgcccgagcccggcaccgccgccagcggccccggcgagggcgagggcagcgagtacggcgccagcggcgaggacgccctgagcagaatccagagactgatggccgagggcggcatgaccgccgtggtgcagagagagcagagcaccaccatggccagcatgggcggcttcggcaacaacatcatcgtgagccacagaatccacagaagcagccagaccggcaccgagcccggcgccgcccacaccagcagcccccagcccagcaccagcagaggcctgctgcccgaggccggccagctggccgagagaggcctgagccccagaaccgccagctgggaccagcccggcacccccggcagagagcccacccagcccaccctgcccagcagcagccccgtgcccatccccgtgagcctgcccagcgccgagggccccaccctgcactgcgagctgaccaacaacaaccacctgctggacggcggcagcagcagaggcgacgccgccggccccagaggcgagcccagaaacagatag

SEQ ID NO: 73938 - DNA, 3897 bp, synthetic construct
  misc_feature 1..3897: note = Description of Artificial Sequence: Synthetic coding sequence
  source 1..3897: mol_type = other DNA
atgaaggtggtgcccgagaagaacgccgtgagaatcctgtggggcagagagagaggcgccagagccatgggcgcccagagactgctgcaggagctggtggaggacaagaccagatggatgaagtgggagggcaagagagtggagctgcccgacagccccagaagcaccttcctgctggccttcagccccgacagaaccctgctggccagcacccacgtgaaccacaacatctacatcaccgaggtgaagaccggcaagtgcgtgcacagcctgatcggccacagaagaaccccctggtgcgtgaccttccaccccaccatcagcggcctgatcgccagcggctgcctggacggcgaggtgagaatctgggacctgcacggcggcagcgagagctggttcaccgacagcaacaacgccatcgccagcctggccttccaccccaccgcccagctgctgctgatcgccaccgccaacgagatccacttctgggactggagcagaagagagcccttcgccgtggtgaagaccgccagcgagatggagagagtgagactggtgagattcgaccccctgggccactacctgctgaccgccatcgtgaaccccagcaaccagcagggcgacgacgagcccgagatccccatcgacggcaccgagctgagccactacagacagagagccctgctgcagagccagcccgtgagaagaacccccctgctgcacaacttcctgcacatgctgagcagcagaagcagcggcatccaggtgggcgagcagagcaccgtgcaggacagcgccacccccagccccccccccccccccccccagcccagcaccgagagacccagaaccagcgcctacatcagactgagacagagagtgagctaccccaccgccgagtgctgccagcacctgggcatcctgtgcctgtgcagcagatgcagcggcaccagagtgcccagcctgctgccccaccaggacagcgtgccccccgccagcgccagagccaccacccccagcttcagcttcgtgcagaccgagcccttccacccccccgagcaggccagcagcacccagcaggaccagggcctgctgaacagacccagcgccttcagcaccgtgcagagcagcaccgccggcaacaccctgagaaacctgagcctgggccccaccagaagaagcctgggcggccccctgagcagccaccccagcagataccacagagagatcgcccccggcctgaccggcagcgagtggaccagaaccgtgctgagcctgaacagcagaagcgaggccgagagcatgcccccccccagaaccagcgccagcagcgtgagcctgctgagcgtgctgagacagcaggagggcggcagccaggccagcgtgtacaccagcgccaccgagggcagaggcttccccgccagcggcctggccaccgagagcgacggcggcaacggcagcagccagaacaacagcggcagcatcagacacgagctgcagtgcgacctgagaagattcttcctggagtacgacagactgcaggagctggaccagagcctgagcggcgaggccccccagacccagcaggcccaggagatgctgaacaacaacatcgagagcgagagacccggccccagccaccagcccaccccccacagcagcgagaacaacagcaacctgagcagaggccacctgaacagatgcagagcctgccacaacctgctgaccttcaacaacgacaccctgagatgggagagaaccacccccaactacagcagcggcgaggccagcagcagctggcaggtgcccagcagcttcgagagcgtgcccagcagcggcagccagctgccccccctggagagaaccgagggccagacccccagcagcagcagactggagctgagcagcagcgccagcccccaggaggagagaaccgtgggcgtggccttcaaccaggagaccggccactgggagagaatctacacccagagcagcagaagcggcaccgtgagccaggaggccctgcaccaggacatgcccgaggagagcagcgaggaggacagcctgagaagaagactgctggagagcagcctgatcagcctgagcagatacgacggcgccggcagcagagagcaccccatctaccccgaccccgccagactgagccccgccgcctactacgcccagagaatgatccagtacctgagcagaagagacagcatcagacagagaagcatgagataccagcagaacagactgagaagcagcaccagcagcagcagcagcgacaaccagggccccagcgtggagggcaccgacctggagttcgaggacttcgaggacaacggcgacagaagcagacacagagcccccagaaacgccagaatgagcgcccccagcctgggcagattcgtgcccagaagattcctgctgcccgagtacctgccctacgccggcatcttccacgagagaggccagcccggcctggccacccacagcagcgtgaacagagtgctggccggcgccgtgatcggcgacggccagagcgccgtggccagcaacatcgccaacaccacctacagactgcagtggtgggacttcaccaagttcgacctgcccgagatcagcaacgccagcgtgaacgtgctggtgcagaactgcaagatctacaacgacgccagctgcgacatcagcgccgacggccagctgctggccgccttcatccccagcagccagagaggcttccccgacgagggcatcctggccgtgtacagcctggccccccacaacctgggcgagatgctgtacaccaagagattcggccccaacgccatcagcgtgagcctgagccccatgggcagatacgtgatggtgggcctggccagcagaagaatcctgctgcaccccagcaccgagcacatggtggcccaggtgttcagactgcagcaggcccacggcggcgagaccagcatgagaagagtgttcaacgtgctgtaccccatgcccgccgaccagagaagacacgtgagcatcaacagcgccagatggctgcccgagcccggcctgggcctggcctacggcaccaacaagggcgacctggtgatctgcagacccgaggccctgaacagcggcgtggagtactactgggaccagctgaacgagaccgtgttcaccgtgcacagcaacagcagaagcagcgagagacccggcaccagcagagccacctggagaaccgacagagacatgggcctgatgaacgccatcggcctgcagcccagaaaccccgccaccagcgtgaccagccagggcacccagaccctggccctgcagctgcagaacgccgagacccagaccgagagagaggtgcccgagcccggcaccgccgccagcggccccggcgagggcgagggcagcgagtacggcgccagcggcgaggacgccctgagcagaatccagagactgatggccgagggcggcatgaccgccgtggtgcagagagagcagagcaccaccatggccagcatgggcggcttcggcaacaacatcatcgtgagccacagaatccacagaagcagccagaccggcaccgagcccggcgccgcccacaccagcagcccccagcccagcaccagcagaggcctgctgcccgaggccggccagctggccgagagaggcctgagccccagaaccgccagctgggaccagcccggcacccccggcagagagcccacccagcccaccctgcccagcagcagccccgtgcccatccccgtgagcctgcccagcgccgagggccccaccctgcactgcgagctgaccaacaacaaccacctgctggacggcggcagcagcagaggcgacgccgccggccccagaggcgagcccagaaacagatag

SEQ ID NO: 73939 - DNA, 75 bp, synthetic construct
  misc_feature 1..75: note = Description of Artificial Sequence: Synthetic coding sequence
  source 1..75: mol_type = other DNA
atgaaggtggtgcccgagaagaacgccgtgagaatcctgtggggcagagagagaggcgccagagccatgggctag

SEQ ID NO: 73940 - DNA, 3810 bp, synthetic construct; identical to SEQ ID NO: 73937
  misc_feature 1..3810: note = Description of Artificial Sequence: Synthetic coding sequence
  source 1..3810: mol_type = other DNA

SEQ ID NO: 73941 - DNA, 3717 bp, synthetic construct; identical to SEQ ID NO: 73934
  misc_feature 1..3717: note = Description of Artificial Sequence: Synthetic coding sequence
  source 1..3717: mol_type = other DNA

SEQ ID NO: 73942 - DNA, 3540 bp, synthetic construct
  misc_feature 1..3540: note = Description of Artificial Sequence: Synthetic coding sequence
  source 1..3540: mol_type = other DNA
atgaaggtggtgcccgagaagaacgccgtgagaatcctgtggggcagagagagaggcgccagagccatgggcgcccagagactgctgcaggagctggtggaggacaagaccagatggatgaagtgggagggcaagagagtggagctgcccgacagccccagaagcaccttcctgctggccttcagccccgacagaaccctgctggccagcacccacgtgaaccacaacatctacatcaccgaggtgaagaccggcaagtgcgtgcacagcctgatcggccacagaagaaccccctggtgcgtgaccttccaccccaccatcagcggcctgatcgccagcggctgcctggacggcgaggtgagaatctgggacctgcacggcggcagcgagagctggttcaccgacagcaacaacgccatcgccagcctggccttccaccccaccgcccagctgctgctgatcgccaccgccaacgagatccacttctgggactggagcagaagagagcccttcgccgtggtgaagaccgccagcgagatggagagagtgagactggtgagattcgaccccctgggccactacctgctgaccgccatcgtgaaccccagcaaccagcagggcgacgacgagcccgagatccccatcgacggcaccgagctgagccactacagacagagagccctgctgcagagccagcccgtgagaagaacccccctgctgcacaacttcctgcacatgctgagcagcagaagcagcggcatccagaccgagcccttccacccccccgagcaggccagcagcacccagcaggaccagggcctgctgaacagacccagcgccttcagcaccgtgcagagcagcaccgccggcaacaccctgagaaacctgagcctgggccccaccagaagaagcctgggcggccccctgagcagccaccccagcagataccacagagagatcgcccccggcctgaccggcagcgagtggaccagaaccgtgctgagcctgaacagcagaagcgaggccgagagcatgcccccccccagaaccagcgccagcagcgtgagcctgctgagcgtgctgagacagcaggagggcggcagccaggccagcgtgtacaccagcgccaccgagggcagaggcttccccgccagcggcctggccaccgagagcgacggcggcaacggcagcagccagaacaacagcggcagcatcagacacgagctgcagtgcgacctgagaagattcttcctggagtacgacagactgcaggagctggaccagagcctgagcggcgaggccccccagacccagcaggcccaggagatgctgaacaacaacatcgagagcgagagacccggccccagccaccagcccaccccccacagcagcgagaacaacagcaacctgagcagaggccacctgaacagatgcagagcctgccacaacctgctgaccttcaacaacgacaccctgagatgggagagaaccacccccaactacagcagcggcgaggccagcagcagctggcaggtgcccagcagcttcgagagcgtgcccagcagcggcagccagctgccccccctggagagaaccgagggccagacccccagcagcagcagactggagctgagcagcagcgccagcccccaggaggagagaaccgtgggcgtggccttcaaccaggagaccggccactgggagagaatctacacccagagcagcagaagcggcaccgtgagccaggaggccctgcaccaggacatgcccgaggagagcagcgaggaggacagcctgagaagactgagccccgccgcctactacgcccagagaatgatccagtacctgagcagaagagacagcatcagacagagaagcatgagataccagcagaacagactgagaagcagcaccagcagcagcagcagcgacaaccagggccccagcgtggagggcaccgacctggagttcgaggacttcgaggacaacggcgacagaagcagacacagagcccccagaaacgccagaatgagcgcccccagcctgggcagattcgtgcccagaagattcctgctgcccgagtacctgccctacgccggcatcttccacgagagaggccagcccggcctggccacccacagcagcgtgaacagagtgctggccggcgccgtgatcggcgacggccagagcgccgtggccagcaacatcgccaacaccacctacagactgcagtggtgggacttcaccaagttcgacctgcccgagatcagcaacgccagcgtgaacgtgctggtgcagaactgcaagatctacaacgacgccagctgcgacatcagcgccgacggccagctgctggccgccttcatccccagcagccagagaggcttccccgacgagggcatcctggccgtgtacagcctggccccccacaacctgggcgagatgctgtacaccaagagattcggccccaacgccatcagcgtgagcctgagccccatgggcagatacgtgatggtgggcctggccagcagaagaatcctgctgcaccccagcaccgagcacatggtggcccaggtgttcagactgcagcaggcccacggcggcgagaccagcatgagaagagtgttcaacgtgctgtaccccatgcccgccgaccagagaagacacgtgagcatcaacagcgccagatggctgcccgagcccggcctgggcctggcctacggcaccaacaagggcgacctggtgatctgcagacccgaggccctgaacagcggcgtggagtactactgggaccagctgaacgagaccgtgttcaccgtgcacagcaacagcagaagcagcgagagacccggcaccagcagagccacctggagaaccgacagagacatgggcctgatgaacgccatcggcctgcagcccagaaaccccgccaccagcgtgaccagccagggcacccagaccctggccctgcagctgcagaacgccgagacccagaccgagagagaggtgcccgagcccggcaccgccgccagcggccccggcgagggcgagggcagcgagtacggcgccagcggcgaggacgccctgagcagaatccagagactgatggccgagggcggcatgaccgccgtggtgcagagagagcagagcaccaccatggccagcatgggcggcttcggcaacaacatcatcgtgagccacagaatccacagaagcagccagaccggcaccgagcccggcgccgcccacaccagcagcccccagcccagcaccagcagaggcctgctgcccgaggccggccagctggccgagagaggcctgagccccagaaccgccagctgggaccagcccggcacccccggcagagagcccacccagcccaccctgcccagcagcagccccgtgcccatccccgtgagcctgcccagcgccgagggccccaccctgcactgcgagctgaccaacaacaaccacctgctggacggcggcagcagcagaggcgacgccgccggccccagaggcgagcccagaaacagatag

SEQ ID NO: 73943 - DNA, 1947 bp, synthetic construct
  misc_feature 1..1947: note = Description of Artificial Sequence: Synthetic coding sequence
  source 1..1947: mol_type = other DNA
atggagaaggccagaagaggcggcgacggcgtgcccagaggccccgtgctgcacatcgtggtggtgggcttccaccacaagaagggctgccaggtggagttcagctacccccccctgatccccggcgacggccacgacagccacaccctgcccgaggagtggaagtacctgcccttcctggccctgcccgacggcgcccacaactaccaggaggacaccgtgttcttccacctgccccccagaaacggcaacggcgccaccgtgttcggcatcagctgctacagacagatcgaggccaaggccctgaaggtgagacaggccgacatcaccagagagaccgtgcagaagagcgtgtgcgtgctgagcaagctgcccctgtacggcctgctgcaggccaagctgcagctgatcacccacgcctacttcgaggagaaggacttcagccagatcagcatcctgaaggagctgtacgagcacatgaacagcagcctgggcggcgccagcctggagggcagccaggtgtacctgggcctgagccccagagacctggtgctgcacttcagacacaaggtgctgatcctgttcaagctgatcctgctggagaagaaggtgctgttctacatcagccccgtgaacaagctggtgggcgccctgatgaccgtgctgagcctgttccccggcatgatcgagcacggcctgagcgactgcagccagtacagacccagaaagagcatgagcgaggacggcggcctgcaggagagcaacccctgcgccgacgacttcgtgagcgccagcaccgccgacgtgagccacaccaacctgggcaccatcagaaaggtgatggccggcaaccacggcgaggacgccgccatgaagaccgaggagcccctgttccaggtggaggacagcagcaagggccaggagcccaacgacaccaaccagtacctgaagccccccagcagacccagccccgacagcagcgagagcgactgggagaccctggaccccagcgtgctggaggaccccaacctgaaggagagagagcagctgggcagcgaccagaccaacctgttccccaaggacagcgtgcccagcgagagcctgcccatcaccgtgcagccccaggccaacaccggccaggtggtgctgatccccggcctgatcagcggcctggaggaggaccagtacggcatgcccctggccatcttcaccaagggctacctgtgcctgccctacatggccctgcagcagcaccacctgctgagcgacgtgaccgtgagaggcttcgtggccggcgccaccaacatcctgttcagacagcagaagcacctgagcgacgccatcgtggaggtggaggaggccctgatccagatccacgaccccgagctgagaaagctgctgaaccccaccaccgccgacctgagattcgccgactacctggtgagacacgtgaccgagaacagagacgacgtgttcctggacggcaccggctgggagggcggcgacgagtggatcagagcccagttcgccgtgtacatccacgccctgctggccgccaccctgcagctggacaacgagaagatcctgagcgactacggcaccaccttcgtgaccgcctggaagaacacccacaactacagagtgtggaacagcaacaagcaccccgccctggccgagatcaaccccaaccaccccttccagggccagtacagcgtgagcgacatgaagctgagattcagccacagcgtgcagaacagcgagagaggcaagaagatcggcaacgtgatggtgaccaccagcagaaacgtggtgcagaccggcaaggccgtgggccagagcgtgggcggcgccttcagcagcgccaagaccgccatgagcagctggctgagcaccttcaccaccagcaccagccagagcctgaccgagccccccgacgagaagccctag

SEQ ID NO: 73944 - DNA, 1773 bp, synthetic construct
  misc_feature 1..1773: note = Description of Artificial Sequence: Synthetic coding sequence
  source 1..1773: mol_type = other DNA
atggagaaggccagaagaggcggcgacggcgtgcccagaggccccgtgctgcacatcgtggtggtgggcttccaccacaagaagggctgccaggtggagttcagctacccccccctgatccccggcgacggccacgacagccacaccctgcccgaggagtggaagtacctgcccttcctggccctgcccgacggcgcccacaactaccaggaggacaccgtgttcttccacctgccccccagaaacggcaacggcgccaccgtgttcggcatcagctgctacagacagatcgaggccaaggccctgaaggtgagacaggccgacatcaccagagagaccgtgcagaagagcgtgtgcgtgctgagcaagctgcccctgtacggcctgctgcaggccaagctgcagctgatcacccacgcctacttcgaggagaaggacttcagccagatcagcatcctgaaggagctgtacgagcacatgaacagcagcctgggcggcgccagcctggagggcagccaggtgtacctgggcctgagccccagagacctggtgctgcacttcagacacaaggtgctgatcctgttcaagctgatcctgctggagaagaaggtgctgttctacatcagccccgtgaacaagctggtgggcgccctgatgaccgtgctgagcctgttccccggcatgatcgagcacggcctgagcgactgcagccagtacagacccagaaagagcatgagcgaggacggcggcctgcaggagagcaacccctgcgccgacgacttcgtgagcgccagcaccgccgacgtgagccacaccaacctgggcaccatcagaaaggtgatggccggcaaccacggcgaggacgccgccatgaagaccgaggagcccctgttccaggtggaggacagcagcaagggccaggagcccaacgacaccaaccagtacctgaagccccccagcagacccagccccgacagcagcgagagcgactgggagaccctggaccccagcgtgctggaggaccccaacctgaaggagagagagcagctgggcagcgaccagaccaacctgttccccaaggacagcgtgcccagcgagagcctgcccatcaccgtgcagccccaggccaacaccggccaggtggtgctgatccccggcctgatcagcggcctggaggaggaccagtacggcatgcccctggccatcttcaccaagggctacctgtgcctgccctacatggccctgcagcagcaccacctgctgagcgacgtgaccgtgagaggcttcgtggccggcgccaccaacatcctgttcagacagcagaagcacctgagcgacgccatcgtggaggtggaggaggccctgatccagatccacgaccccgagctgagaaagctgctgaaccccaccaccgccgacctgagattcgccgactacctggtgagacacgtgaccgagaacagagacgacgtgttcctggacggcaccggctgggagggcggcgacgagtggatcagagcccagttcgccgtgtacatccacgccctgctggccgccaccctgcagctggtgctgttcagaatcgtgaacgtgaagaagatcggcaacgtgatggtgaccaccagcagaaacgtggtgcagaccggcaaggccgtgggccagagcgtgggcggcgccttcagcagcgccaagaccgccatgagcagctggctgagcaccttcaccaccagcaccagccagagcctgaccgagccccccgacgagaagccctag

SEQ ID NO: 73945 - DNA, 1392 bp, synthetic construct
  misc_feature 1..1392: note = Description of Artificial Sequence: Synthetic coding sequence
  source 1..1392: mol_type = other DNA
atggagaaggccagaagaggcggcgacggcgtgcccagaggccccgtgctgcacatcgtggtggtgggcttccaccacaagaagggctgccaggtggagttcagctacccccccctgatccccggcgacggccacgacagccacaccctgcccgaggagtggaagtacctgcccttcctggccctgcccgacggcgcccacaactaccaggaggacaccgtgttcttccacctgccccccagaaacggcaacggcgccaccgtgttcggcatcagctgctacagacagatcgaggccaaggccctgaaggtgagacaggccgacatcaccagagagaccgtgcagaagagcgtgtgcgtgctgagcaagctgcccctgtacggcctgctgcaggccaagctgcagctgatcacccacgcctacttcgaggagaaggacttcagccagatcagcatcctgaaggagctgtacgagcacatgaacagcagcctgggcggcgccagcctggagggcagccaggtgtacctgggcctgagccccagagacctggtgctgcacttcagacacaaggtgctgatcctgttcaagctgatcctgctggagaagaaggtgctgttctacatcagccccgtgaacaagctggtgggcgccctgatgaccgtgctgagcctgttccccggcatgatcgagcacggcctgagcgactgcagccagtacagacccagaaagagcatgagcgaggacggcggcctgcaggagagcaacccctgcgccgacgacttcgtgagcgccagcaccgccgacgtgagccacaccaacctgggcaccatcagaaaggtgatggccggcaaccacggcgaggacgccgccatgaagaccgaggagcccctgttccaggtggaggacagcagcaagggccaggagcccaacgacaccaaccagtacctgaagccccccagcagacccagccccgacagcagcgagagcgactgggagaccctggaccccagcgtgctggaggaccccaacctgaaggagagagagcagctgggcagcgaccagaccaacctgttccccaaggacagcgtgcccagcgagagcctgcccatcaccgtgcagccccaggccaacaccggccaggtggtgctgatccccggcctgatcagcggcctggaggaggaccagtacggcatgcccctggccatcttcaccaagtgcacccaggacgtgctgccccaggccaaccacagcttcaagttcctgatcaccgacagaagaatcacccccagacccctgagaagaagactggtgagcgccaccctgaccaacatgctgcaggagaagagctgctggaagaagcacatcaagtgcagaagaagagtgcagaagtag

SEQ ID NO: 73946 - DNA, 2532 bp, synthetic construct
  misc_feature 1..2532: note = Description of Artificial Sequence: Synthetic coding sequence
  source 1..2532: mol_type = other DNA
atgagcagcgccatgctggtgacctgcctgcccgaccccagcagcagcttcagagaggacgcccccagaccccccgtgcccggcgaggagggcgagacccccccctgccagcccggcgtgggcaagggccaggtgaccaagcccatgcccgtgagcagcaacaccagaagaaacgaggacggcctgggcgagcccgagggcagagccagccccgacagccccctgaccagatggaccaagagcctgcacagcctgctgggcgaccaggacggcgcctacctgttcagaaccttcctggagagagagaagtgcgtggacaccctggacttctggttcgcctgcaacggcttcagacagatgaacctgaaggacaccaagaccctgagagtggccaaggccatctacaagagatacatcgagaacaacagcatcgtgagcaagcagctgaagcccgccaccaagacctacatcagagacggcatcaagaagcagcagatcgacagcatcatgttcgaccaggcccagaccgagatccagagcgtgatggaggagaacgcctaccagatgttcctgaccagcgacatctacctggagtacgtgagaagcggcggcgagaacaccgcctacatgagcaacggcggcctgggcagcctgaaggtggtgtgcggctacctgcccaccctgaacgaggaggaggagtggacctgcgccgacttcaagtgcaagctgagccccaccgtggtgggcctgagcagcaagaccctgagagccaccgccagcgtgagaagcaccgagaccgtggacagcggctacagaagcttcaagagaagcgaccccgtgaacccctaccacatcggcagcggctacgtgttcgcccccgccaccagcgccaacgacagcgagatcagcagcgacgccctgaccgacgacagcatgagcatgaccgacagcagcgtggacggcatccccccctacagagtgggcagcaagaagcagctgcagagagagatgcacagaagcgtgaaggccaacggccaggtgagcctgccccacttccccagaacccacagactgcccaaggagatgacccccgtggagcccgccaccttcgccgccgagctgatcagcagactggagaagctgaagctggagctggagagcagacacagcctggaggagagactgcagcagatcagagaggacgaggagagagagggcagcgagctgaccctgaacagcagagagggcgcccccacccagcaccccctgagcctgctgcccagcggcagctacgaggaggacccccagaccatcctggacgaccacctgagcagagtgctgaagacccccggctgccagagccccggcgtgggcagatacagccccagaagcagaagccccgaccaccaccaccaccaccacagccagtaccacagcctgctgccccccggcggcaagctgccccccgccgccgccagccccggcgcctgccccctgctgggcggcaagggcttcgtgaccaagcagaccaccaagcacgtgcaccaccactacatccaccaccacgccgtgcccaagaccaaggaggagatcgaggccgaggccacccagagagtgcactgcttctgccccggcggcagcgagtactactgctacagcaagtgcaagagccacagcaaggcccccgagaccatgcccagcgagcagttcggcggcagcagaggcagcaccctgcccaagagaaacggcaagggcaccgagcccggcctggccctgcccgccagagagggcggcgcccccggcggcgccggcgccctgcagctgcccagagaggagggcgacagaagccaggacgtgtggcagtggatgctggagagcgagagacagagcaagcccaagccccacagcgcccagagcaccaagaaggcctaccccctggagagcgccagaagcagccccggcgagagagccagcagacaccacctgtggggcggcaacagcggccaccccagaaccacccccagagcccacctgttcacccaggaccccgccatgccccccctgaccccccccaacaccctggcccagctggaggaggcctgcagaagactggccgaggtgagcaagccccccaagcagagatgctgcgtggccagccagcagagagacagaaaccacagcgccaccgtgcagaccggcgccacccccttcagcaaccccagcctggcccccgaggaccacaaggagcccaagaagctggccggcgtgcacgccctgcaggccagcgagctggtggtgacctacttcttctgcggcgaggagatcccctacagaagaatgctgaaggcccagagcctgaccctgggccacttcaaggagcagctgagcaagaagggcaactacagatactacttcaagaaggccagcgacgagttcgcctgcggcgccgtgttcgaggagatctgggaggacgagaccgtgctgcccatgtacgagggcagaatcctgggcaaggtggagagaatcgactag

SEQ ID NO: 73947 - DNA, 2337 bp, synthetic construct
  misc_feature 1..2337: note = Description of Artificial Sequence: Synthetic coding sequence
  source 1..2337: mol_type = other DNA
atgagcagcgccatgctggtgacctgcctgcccgaccccagcagcagcttcagagaggacgcccccagaccccccgtgcccggcgaggagggcgagacccccccctgccagcccggcgtgggcaagggccaggtgaccaagcccatgcccgtgagcagcaacaccagaagaaacgaggacggcctgggcgagcccgagggcagagccagccccgacagccccctgaccagatggaccaagagcctgcacagcctgctgggcgaccaggacggcgcctacctgttcagaaccttcctggagagagagaagtgcgtggacaccctggacttctggttcgcctgcaacggcttcagacagatgaacctgaaggacaccaagaccctgagagtggccaaggccatctacaagagatacatcgagaacaacagcatcgtgagcaagcagctgaagcccgccaccaagacctacatcagagacggcatcaagaagcagcagatcgacagcatcatgttcgaccaggcccagaccgagatccagagcgtgatggaggagaacgcctaccagatgttcctgaccagcgacatctacctggagtacgtgagaagcggcggcgagaacaccgcctacatgagcaacggcggcctgggcagcctgaaggtggtgtgcggctacctgcccaccctgaacgaggaggaggagtggacctgcgccgacttcaagtgcaagctgagccccaccgtggtgggcctgagcagcaagaccctgagagccaccgccagcgtgagaagcaccgagaccgtggacagcggctacagaagcttcaagagaagcgaccccgtgaacccctaccacatcggcagcggctacgtgttcgcccccgccaccagcgccaacgacagcgagatcagcagcgacgccctgaccgacgacagcatgagcatgaccgacagcagcgtggacggcatccccccctacagagtgggcagcaagaagcagctgcagagagagatgcacagaagcgtgaaggccaacggccaggtgagcctgccccacttccccagaacccacagactgcccaaggagatgacccccgtggagcccgccaccttcgccgccgagctgatcagcagactggagaagctgaagctggagctggagagcagacacagcctggaggagagactgcagcagatcagagaggacgaggagagagagggcagcgagctgaccctgaacagcagagagggcgcccccacccagcaccccctgagcctgctgcccagcggcagctacgaggaggacccccagaccatcctggacgaccacctgagcagagtgctgaagacccccggctgccagagccccggcgtgggcagatacagccccagaagcagaagccccgaccaccaccaccaccaccacagccagtaccacagcctgctgccccccggcggcaagctgccccccgccgccgccagccccggcgcctgccccctgctgggcggcaagggcttcgtgaccaagcagaccaccaagcacgtgcaccaccactacatccaccaccacgccgtgcccaagaccaaggaggagatcgaggccgaggccacccagagagtgcactgcttctgccccggcggcagcgagtactactgctacagcaagtgcaagagccacagcaaggcccccgagaccatgcccagcgagcagttcggcgcccagagcaccaagaaggcctaccccctggagagcgccagaagcagccccggcgagagagccagcagacaccacctgtggggcggcaacagcggccaccccagaaccacccccagagcccacctgttcacccaggaccccgccatgccccccctgaccccccccaacaccctggcccagctggaggaggcctgcagaagactggccgaggtgagcaagccccccaagcagagatgctgcgtggccagccagcagagagacagaaaccacagcgccaccgtgcagaccggcgccacccccttcagcaaccccagcctggcccccgaggaccacaaggagcccaagaagctggccggcgtgcacgccctgcaggccagcgagctggtggtgacctacttcttctgcggcgaggagatcccctacagaagaatgctgaaggcccagagcctgaccctgggccacttcaaggagcagctgagcaagaagggcaactacagatactacttcaagaaggccagcgacgagttcgcctgcggcgccgtgttcgaggagatctgggaggacgagaccgtgctgcccatgtacgagggcagaatcctgggcaaggtggagagaatcgactag

SEQ ID NO: 73948 - DNA, 483 bp, synthetic construct
  misc_feature 1..483: note = Description of Artificial Sequence: Synthetic coding sequence
  source 1..483: mol_type = other DNA
atgagcagcgccatgctggtgacctgcctgcccgaccccagcagcagcttcagagaggacgcccccagaccccccgtgcccggcgaggagggcgagacccccccctgccagcccggcgtgggcaagggccaggtgaccaagcccatgcccgtgagcagcaacaccagaagaaacgaggacggcctgggcgagcccgagggcagagccagccccgacagccccctgaccagatggaccaagagcctgcacagcctgctgggcgaccaggacggcgcctacctgttcagaaccttcctggagagagagaagtgcgtggacaccctggacttctggttcgcctgcaacggcttcagacagatgaacctgaaggacaccaagaccctgagagtggtgaacgacttctgccacgacatcctgttctacctgtactgcaagctgtgcatcatcaagagcagcttcaaggagaactacctggtgcagtag

SEQ ID NO: 73949 - DNA, 921 bp, synthetic construct
  misc_feature 1..921: note = Description of Artificial Sequence: Synthetic coding sequence
  source 1..921: mol_type = other DNA
atgagcgaggtgaccagaagcctgctgcagagatggggcgccagcttcagaagaggcgccgacttcgacagctggggccagctggtggaggccatcgacgagtaccagatcctggccagacacctgcagaaggaggcccaggcccagcacaacaacagcgagttcaccgaggagcagaagaagaccatcggcaagatcgccacctgcctggagctgagaagcgccgccctgcagagcacccagagccaggaggagttcaagctggaggacctgaagaagctggagcccatcctgaagaacatcctgacctacaacaaggagttccccttcgacgtgcagcccgtgcccctgagaagaatcctggcccccggcgaggaggagaacctggagttcgaggaggacgaggaggagggcggcgccggcgccggcagccccgacagcttccccgccagagtgcccggcaccctgctgcccagactgcccagcgagcccggcatgaccctgctgaccatcagaatcgagaagatcggcctgaaggacgccggccagtgcatcgacccctacatcaccgtgagcgtgaaggacctgaacggcatcgacctgacccccgtgcaggacacccccgtggccagcagaaaggaggacacctacgtgcacttcaacgtggacatcgagctgcagaagcacgtggagaagctgaccaagggcgccgccatcttcttcgagttcaagcactacaagcccaagaagagattcaccagcaccaagtgcttcgccttcatggagatggacgagatcaagcccggccccatcgtgatcgagctgtacaagaagcccaccgacttcaagagaaagaagctgcagctgctgaccaagaagcccctgtacctgcacctgcaccagaccctgcacaaggagtag

SEQ ID NO: 73950 - DNA, 675 bp, synthetic construct
  misc_feature 1..675: note = Description of Artificial Sequence: Synthetic coding sequence
  source 1..675: mol_type = other DNA
atgagcgaggtgaccagaagcctgctgcagagatggggcgccagcttcagaagaggcgccgacttcgacagctggggccagctggtggaggccatcgacgagtaccagatcctggccagacacctgcagaaggaggcccaggcccagcacaacaacagcgagttcaccgaggagcagaagaagaccatcggcaagatcgccacctgcctggagctgagaagcgccgccctgcagagcacccagagccaggaggagttcaagctggaggacctgaagaagctggagcccatcctgaagaacatcctgacctacaacaaggagttccccttcgacgtgcagcccgtgcccctgagaagaatcctggcccccggcgaggaggagaacctggagttcgaggaggacgaggaggagggcggcgccggcgccggcagccccgacagcttccccgccagagtgcccggcgccgccatcttcttcgagttcaagcactacaagcccaagaagagattcaccagcaccaagtgcttcgccttcatggagatggacgagatcaagcccggccccatcgtgatcgagctgtacaagaagcccaccgacttcaagagaaagaagctgcagctgctgaccaagaagcccctgtacctgcacctgcaccagaccctgcacaaggagtag

SEQ ID NO: 73951 - DNA, 849 bp, synthetic construct
  misc_feature 1..849: note = Description of Artificial Sequence: Synthetic coding sequence
  source 1..849: mol_type = other DNA
atgatcgccaccgaggccgtggtgagagccgcccagggcctggccagacacctgcagaaggaggcccaggcccagcacaacaacagcgagttcaccgaggagcagaagaagaccatcggcaagatcgccacctgcctggagctgagaagcgccgccctgcagagcacccagagccaggaggagttcaagctggaggacctgaagaagctggagcccatcctgaagaacatcctgacctacaacaaggagttccccttcgacgtgcagcccgtgcccctgagaagaatcctggcccccggcgaggaggagaacctggagttcgaggaggacgaggaggagggcggcgccggcgccggcagccccgacagcttccccgccagagtgcccggcaccctgctgcccagactgcccagcgagcccggcatgaccctgctgaccatcagaatcgagaagatcggcctgaaggacgccggccagtgcatcgacccctacatcaccgtgagcgtgaaggacctgaacggcatcgacctgacccccgtgcaggacacccccgtggccagcagaaaggaggacacctacgtgcacttcaacgtggacatcgagctgcagaagcacgtggagaagctgaccaagggcgccgccatcttcttcgagttcaagcactacaagcccaagaagagattcaccagcaccaagtgcttcgccttcatggagatggacgagatcaagcccggccccatcgtgatcgagctgtacaagaagcccaccgacttcaagagaaagaagctgcagctgctgaccaagaagcccctgtacctgcacctgcaccagaccctgcacaaggagtag

SEQ ID NO: 73952 - DNA, 2685 bp, synthetic construct
  misc_feature 1..2685: note = Description of Artificial Sequence: Synthetic coding sequence
  source 1..2685: mol_type = other DNA
atggcctggagatgccccagaatgggcagagtgcccctggcctggtgcctggccctgtgcggctgggcctgcatggcccccagaggcacccaggccgaggagagccccttcgtgggcaaccccggcaacatcaccggcgccagaggcctgaccggcaccctgagatgccagctgcaggtgcagggcgagccccccgaggtgcactggctgagagacggccagatcctggagctggccgacagcacccagacccaggtgcccctgggcgaggacgagcaggacgactggatcgtggtgagccagctgagaatcaccagcctgcagctgagcgacaccggccagtaccagtgcctggtgttcctgggccaccagaccttcgtgagccagcccggctacgtgggcctggagggcctgccctacttcctggaggagcccgaggacagaaccgtggccgccaacacccccttcaacctgagctgccaggcccagggcccccccgagcccgtggacctgctgtggctgcaggacgccgtgcccctggccaccgcccccggccacggcccccagagaagcctgcacgtgcccggcctgaacaagaccagcagcttcagctgcgaggcccacaacgccaagggcgtgaccaccagcagaaccgccaccatcaccgtgctgccccagcagcccagaaacctgcacctggtgagcagacagcccaccgagctggaggtggcctggacccccggcctgagcggcatctaccccctgacccactgcaccctgcaggccgtgctgagcaacgacggcatgggcatccaggccggcgagcccgacccccccgaggagcccctgaccagccaggccagcgtgcccccccaccagctgagactgggcagcctgcacccccacaccccctaccacatcagagtggcctgcaccagcagccagggccccagcagctggacccactggctgcccgtggagacccccgagggcgtgcccctgggcccccccgagaacatcagcgccaccagaaacggcagccaggccttcgtgcactggcaggagcccagagcccccctgcagggcaccctgctgggctacagactggcctaccagggccaggacacccccgaggtgctgatggacatcggcctgagacaggaggtgaccctggagctgcagggcgacggcagcgtgagcaacctgaccgtgtgcgtggccgcctacaccgccgccggcgacggcccctggagcctgcccgtgcccctggaggcctggagacccggccaggcccagcccgtgcaccagctggtgaaggagcccagcacccccgccttcagctggccctggtggtacgtgctgctgggcgccgtggtggccgccgcctgcgtgctgatcctggccctgttcctggtgcacagaagaaagaaggagaccagatacggcgaggtgttcgagcccaccgtggagagaggcgagctggtggtgagatacagagtgagaaagagctacagcagaagaaccaccgaggccaccctgaacagcctgggcatcagcgaggagctgaaggagaagctgagagacgtgatggtggacagacacaaggtggccctgggcaagaccctgggcgagggcgagttcggcgccgtgatggagggccagctgaaccaggacgacagcatcctgaaggtggccgtgaagaccatgaagatcgccatctgcaccagaagcgagctggaggacttcctgagcgaggccgtgtgcatgaaggagttcgaccaccccaacgtgatgagactgatcggcgtgtgcttccagggcagcgagagagagagcttccccgcccccgtggtgatcctgcccttcatgaagcacggcgacctgcacagcttcctgctgtacagcagactgggcgaccagcccgtgtacctgcccacccagatgctggtgaagttcatggccgacatcgccagcggcatggagtacctgagcaccaagagattcatccacagagacctggccgccagaaactgcatgctgaacgagaacatgagcgtgtgcgtggccgacttcggcctgagcaagaagatctacaacggcgactactacagacagggcagaatcgccaagatgcccgtgaagtggatcgccatcgagagcctggccgacagagtgtacaccagcaagagcgacgtgtggagcttcggcgtgaccatgtgggagatcgccaccagaggccagaccccctaccccggcgtggagaacagcgagatctacgactacctgagacagggcaacagactgaagcagcccgccgactgcctggacggcctgtacgccctgatgagcagatgctgggagctgaacccccaggacagacccagcttcaccgagctgagagaggacctggagaacaccctgaaggccctgccccccgcccaggagcccgacgagatcctgtacgtgaacatggacgagggcggcggctaccccgagccccccggcgccgccggcggcgccgacccccccacccagcccgaccccaaggacagctgcagctgcctgaccgccgccgaggtgcaccccgccggcagatacgtgctgtgccccagcaccacccccagccccgcccagcccgccgacagaggcagccccgccgcccccggccaggaggacggcgcctag

SEQ ID NO: 73953 - DNA, 2658 bp, synthetic construct
  misc_feature 1..2658: note = Description of Artificial Sequence: Synthetic coding sequence
  source 1..2658: mol_type = other DNA
atggcctggagatgccccagaatgggcagagtgcccctggcctggtgcctggccctgtgcggctgggcctgcatggcccccagaggcacccaggccgaggagagccccttcgtgggcaaccccggcaacatcaccggcgccagaggcctgaccggcaccctgagatgccagctgcaggtgcagggcgagccccccgaggtgcactggctgagagacggccagatcctggagctggccgacagcacccagacccaggtgcccctgggcgaggacgagcaggacgactggatcgtggtgagccagctgagaatcaccagcctgcagctgagcgacaccggccagtaccagtgcctggtgttcctgggccaccagaccttcgtgagccagcccggctacgtgggcctggagggcctgccctacttcctggaggagcccgaggacagaaccgtggccgccaacacccccttcaacctgagctgccaggcccagggcccccccgagcccgtggacctgctgtggctgcaggacgccgtgcccctggccaccgcccccggccacggcccccagagaagcctgcacgtgcccggcctgaacaagaccagcagcttcagctgcgaggcccacaacgccaagggcgtgaccaccagcagaaccgccaccatcaccgtgctgccccagcagcccagaaacctgcacctggtgagcagacagcccaccgagctggaggtggcctggacccccggcctgagcggcatctaccccctgacccactgcaccctgcaggccgtgctgagcaacgacggcatgggcatccaggccggcgagcccgacccccccgaggagcccctgaccagccaggccagcgtgcccccccaccagctgagactgggcagcctgcacccccacaccccctaccacatcagagtggcctgcaccagcagccagggccccagcagctggacccactggctgcccgtggagacccccgagggcgtgcccctgggcccccccgagaacatcagcgccaccagaaacggcagccaggccttcgtgcactggcaggagcccagagcccccctgcagggcaccctgctgggctacagactggcctaccagggccaggacacccccgaggtgctgatggacatcggcctgagacaggaggtgaccctggagctgcagggcgacggcagcgtgagcaacctgaccgtgtgcgtggccgcctacaccgccgccggcgacggcccctggagcctgcccgtgcccctggaggcctggagacccgtgaaggagcccagcacccccgccttcagctggccctggtggtacgtgctgctgggcgccgtggtggccgccgcctgcgtgctgatcctggccctgttcctggtgcacagaagaaagaaggagaccagatacggcgaggtgttcgagcccaccgtggagagaggcgagctggtggtgagatacagagtgagaaagagctacagcagaagaaccaccgaggccaccctgaacagcctgggcatcagcgaggagctgaaggagaagctgagagacgtgatggtggacagacacaaggtggccctgggcaagaccctgggcgagggcgagttcggcgccgtgatggagggccagctgaaccaggacgacagcatcctgaaggtggccgtgaagaccatgaagatcgccatctgcaccagaagcgagctggaggacttcctgagcgaggccgtgtgcatgaaggagttcgaccaccccaacgtgatgagactgatcggcgtgtgcttccagggcagcgagagagagagcttccccgcccccgtggtgatcctgcccttcatgaagcacggcgacctgcacagcttcctgctgtacagcagactgggcgaccagcccgtgtacctgcccacccagatgctggtgaagttcatggccgacatcgccagcggcatggagtacctgagcaccaagagattcatccacagagacctggccgccagaaactgcatgctgaacgagaacatgagcgtgtgcgtggccgacttcggcctgagcaagaagatctacaacggcgactactacagacagggcagaatcgccaagatgcccgtgaagtggatcgccatcgagagcctggccgacagagtgtacaccagcaagagcgacgtgtggagcttcggcgtgaccatgtgggagatcgccaccagaggccagaccccctaccccggcgtggagaacagcgagatctacgactacctgagacagggcaacagactgaagcagcccgccgactgcctggacggcctgtacgccctgatgagcagatgctgggagctgaacccccaggacagacccagcttcaccgagctgagagaggacctggagaacaccctgaaggccctgccccccgcccaggagcccgacgagatcctgtacgtgaacatggacgagggcggcggctaccccgagccccccggcgccgccggcggcgccgacccccccacccagcccgaccccaaggacagctgcagctgcctgaccgccgccgaggtgcaccccgccggcagatacgtgctgtgccccagcaccacccccagccccgcccagcccgccgacagaggcagccccgccgcccccggccaggaggacggcgcctag

SEQ ID NO: 73954 - DNA, 2439 bp, synthetic construct
  misc_feature 1..2439: note = Description of Artificial Sequence: Synthetic coding sequence
  source 1..2439: mol_type = other DNA
atggagcccctgggcaactggagaagcctgagagcccccctgccccccatgctgctgctgctgctgctgcaggtggccggccccgtgggcgccctggccgagaccctgctgaacgcccccagagccatgggcaccagcagcagcccccccagccccgccagcgtggtggcccccggcaccaccctgttcgaggagagcagactgcccgtgttcaccctggactacccccacgtgcagatccccttcgagatcaccctgtggatcctgctggccagcctggccaagatcggcttccacctgtaccacaagctgcccaccatcgtgcccgagagctgcctgctgatcatggtgggcctgctgctgggcggcatcatcttcggcgtggacgagaagagcccccccgccatgaagaccgacgtgttcttcctgtacctgctgccccccatcgtgctggacgccggctacttcatgcccaccagacccttcttcgagaacatcggcaccatcttctggtacgccgtggtgggcaccctgtggaacagcatcggcatcggcgtgagcctgttcggcatctgccagatcgaggccttcggcctgagcgacatcaccctgctgcagaacctgctgttcggcagcctgatcagcgccgtggaccccgtggccgtgctggccgtgttcgagaacatccacgtgaacgagcagctgtacatcctggtgttcggcgagagcctgctgaacgacgccgtgaccgtggtgctgtacaacctgttcaagagcttctgccagatgaagaccatcgagaccatcgacgtgttcgccggcatcgccaacttcttcgtggtgggcatcggcggcgtgctgatcggcatcttcctgggcttcatcgccgccttcaccaccagattcacccacaacatcagagtgatcgagcccctgttcgtgttcctgtacagctacctgagctacatcaccgccgagatgttccacctgagcggcatcatggccatcaccgcctgcgccatgaccatgaacaagtacgtggaggagaacgtgagccagaagagctacaccaccatcaagtacttcatgaagatgctgagcagcgtgagcgagaccctgatcttcatcttcatgggcgtgagcaccgtgggcaagaaccacgagtggaactgggccttcgtgtgcttcaccctggccttctgcctgatgtggagagccctgggcgtgttcgtgctgacccaggtgatcaacagattcagaaccatccccctgaccttcaaggaccagttcatcatcgcctacggcggcctgagaggcgccatctgcttcgccctggtgttcctgctgcccgccgccgtgttccccagaaagaagctgttcatcaccgccgccatcgtggtgatcttcttcaccgtgttcatcctgggcatcaccatcagacccctggtggagttcctggacgtgaagagaagcaacaagaagcagcaggccgtgagcgaggagatctactgcagactgttcgaccacgtgaagaccggcatcgaggacgtgtgcggccactggggccacaacttctggagagacaagttcaagaagttcgacgacaagtacctgagaaagctgctgatcagagagaaccagcccaagagcagcatcgtgagcctgtacaagaagctggagatcaagcacgccatcgagatggccgagaccggcatgatcagcaccgtgcccaccttcgccagcctgaacgactgcagagaggagaagatcagaaaggtgaccagcagcgagaccgacgagatcagagagctgctgagcagaaacctgtaccagatcagacagagaaccctgagctacaacagacacagcctgaccgccgacaccagcgagagacaggccaaggagatcctgatcagaagaagacacagcctgagagagagcatcagaaaggacagcagcctgaacagagagcacagagccagcaccagcaccagcagatacctgagcctgcccaagaacaccaagctgcccgagaagctgcagaagagaagaaccatcagcatcgccgacggcaacagcagcgacagcgacgccgacgccggcaccaccgtgctgaacctgcagcccagagccagaagattcctgcccgagcagttcagcaagaagagcccccagagctacaagatggagtggaagaacgaggtggacgtggacagcggcagagacatgcccagcaccccccccaccccccacagcagagagaagggcacccagaccagcggcctgctgcagcagcccctgctgagcaaggaccagagcggcagcgagagagaggacagcctgaccgagggcatcccccccaagcccccccccagactggtgtggagagccagcgagcccggcagcagaaaggccagattcggcagcgagaagccctag

SEQ ID NO: 73955 - DNA, 681 bp, synthetic construct
  misc_feature 1..681: note = Description of Artificial Sequence: Synthetic coding sequence
  source 1..681: mol_type = other DNA
gccgagggcaagtggggcctggcccacggcagagccgaggcccacgtgtggcccggccagggcggctggagactgggccccccccagggcagatggaccggcagcagccccctgctggacatcgtgggcggcagaaaggccagacccagacagttccccttcctggccagcatccagaaccagggcagacacttctgcggcggcgccctgatccacgccagattcgtgatgaccgccgccagctgcttccagagccagaaccccggcgtgagcaccgtggtgctgggcgcctacgacctgagaagaagagagagacagagcagacagaccttcagcatcagcagcatgagcgagaacggctacgacccccagcagaacctgaacgacctgatgctgctgcagctggacagagaggccaacctgaccagcagcgtgaccatcctgcccctgcccctgcagaacgccaccgtggaggccggcaccagatgccaggtggccggctggggcagccagagaagcggcggcagactgagcagattccccagattcgtgaacgtgaccgtgacccccgaggaccagtgcagacccaacaacgtgtgcaccggcgtgctgaccagaagaggcggcatctgcaacgtgagcgccccctgcggcggcagaagaggccccgagagatactag

SEQ ID NO: 73956 - DNA, 7875 bp, synthetic construct
  misc_feature 1..7875: note = Description of Artificial Sequence: Synthetic coding sequence
  source 1..7875: mol_type = other DNA
atgttcagaagagccagactgagcgtgaagcccaacgtgagacccggcgtgggcgccagaggcagcaccgccagcaacccccagagaggcagagagagccccagaccccccgaccccgccaccgacagcgccagcaagcccgccgagcccaccgacgtgcccaccgtggacttcggcggcgccgagccccaggagaaggcccccagaagcagcaccgagaagaccggcggcgacaacgacgtggaggagagcagcagaagcagcagcaccgtgagccagagaagaaagagaatcagcagcaccagcagcctggtgaagagcagcgtgagcgtgcccagcgagagccaccccctgagcaccatcaaccaggaggccccccagcccaccgccaccagcaccaaggagaagcagccctgcagcgacagatacagaatctacaaggcccagaagctgagagagatgctgaaggaggagctgagaaaggagaagaagcagtggaagaacaagtacgccatcaacgagagccagagaccccccgacagaagcaagatgaccatgagagacttcatctactacctgcccgacaacaaccccatgaccagcagcctggagcaggagaagaagaccgagaagcccagcacccccgtgcagaccagagagcaggagggcaagagcacccccaacgccgaggacaacgagatggaggaggagaccgacgacggccccctgctggtgcccagagtgaaggtggccgaggacggcagcatcatcctggacgaggagagcctgaccgtggaggtgctgagaaccaagggcccctgcgtggtggaggagaacgaccccatcttcgagagaggcagcaccaccacctacagcagcttcagaaagaactactacagcaagccctggagcaacaaggagaccgacatgttcttcctggccatcagcatggtgggcaccgacttcagcatgatcggccagctgttcccccacagagccagaatcgagatcaagaacaagttcaagagagaggagaagaccaacggctggagaatcgacaaggccttccaggagaagagacccttcgacttcgacttcttcgcccacctgctgcagaaggtgctggccgaggaggagaagagaaagcagaagagcgtgaagaaccacagcctgaaggagaagaagagcaccaagcccagaaagaacgtgaaggtgaagaaggtggcctgcgagggcgtgaacaacgaccccgacgagagcatgagcagcagaatcagcgacaccgagagaagccagaaggacgcccagaccgtggaggaggagagcctgaccctgagcagagaggacgccgagcaggtggccctggaggtggacctgaaccagaagaagagaagaagaaagaagcaggacggcgccaacgagctgggcgtgaacaacctgctggagaacgccaccgtgcaggccggccccagcaagggcgagaagcacaagaacaagtgccaggccatcagacccgagctgaaggagggcgagtgcagcaaggagcagatgctgagctgcacccagaacatcgacggcatcgtgggcttcgccagcaccgagaaggtggagaagagaaccgaccccatcctgagcctgagcaaccagcaggacgccaccagcgtggccaccgagagcagcgagagcagcaccagcgacctgcccagcttcgaggtgggcatcagagccctgtgcgaggtgaacaacgccgagggcagctgcatcgaggagagaaacgtggacctgaagaacaacagcctggagatcgaccagaccgagaacgtgaagcccatgctgagaggcagattccagagacccaagcccaacctgagcagagccggcaagaagagcgtgctgagccagggcaagaccgagagcgagagcaagaacagccacagcaagaccagcgtggagaagaaccacgtggagaaggacaagatgaacaccctggacatcctgagaatggagaccaccgagagagagaaccccgaggccgagaccgtgagcgtgctgggcgagaagaactgcctgcaggagggcagccagctgaaggccctgagacccgtgcaggtgagaggcagactgcagaagcccaagcccaacgccggcaaggccgccgagagaaaggagatcctgatcagccaggaggagatcggcgccaacgtggagaagaacgagaacgagagctgcgccgacagagacaccccccagcacatggaggaccagagcagaaaggacttcgaggaggaggacgtgatcctgcagcccgagaagaacgacagcttccagaacgtgcagcccgacgagcccaaggtgctgaacgagtgcctgagcgtgcaggagaacaacaaggccaacaagctgaaccaggtgcccatcctgagaaccagattccagaagcccaagcccaacatcggcagaggcaccggcagaagagagatcagcagcaaggaggaggtgctggagaagatcctggtgagcggcgagatggccgccgccctgagagagaccgtgagactggacaccagccccaaggagatggtgcccgccgagatcaacaccaaggagatgcagagcgacctgaaggagaccggcagaagagccatcagccccagagagaagatcctggacgtgatcgacgacaccatcgagatggagaccggcctgaaggccatgggcagagagatctgcctgagagagaagacccccgaggtgatcgacgccaccgaggagatcgacaaggacctggaggaggccggcagaagagagatcagcccccagaagaacggccccgaggaggtgaagcccctgggcgaggtggagaccgacctgaaggccaccggcaacgagagcagccccagagagaagacccccgaggtgaccgacgccaccgaggagatcgacaagaacctggaggagaccggcagaagaaagatcagccccagagagaacggccccgaggaggtgaagcccgtggacgagatggagaccgacctgaacgccaccggcagagagagcagccccagagagaagacccccgaggtgatcgacgccaccgaggagatcgacctggaggagaccgagagagaggtgagcccccaggagaacggcctggaggaggtgaagcccctgggcgagatggagaccgacctgaaggccaccggcagagacagcttccccagaggcaagacccccgaggtgatcgacgccatcgaggagatcgagatcgacctggaggagaccgagagagagatcagcccccaggagaacggcctggaggaggtgaagcccctgggcgagatgcagaccgacctgaaggccaccggcagagagatcagccccagagagaagacccccgaggtgatcgacgccaccgaggagatcgacaaggacctggaggagaccggcagaagagagatcagccccgaggagaacggccccgaggaggtgaagcccgtggacgagatggagaccgacctgaagaccaccggcagagagggcagcagcagagagaagaccagagaggtgatcgacgccgccgaggtgatcgagaccgacctggaggagaccgagagagagatcagcccccaggagaacggccccgaggaggtgaagcccgtgggcaagatggagaccgacctgaaggagatcagagaggagatcagccagagagagaaggtgctggccgagttcagcgccatcagagagaaggagatcgacctgaaggagaccggcaagagagacatccccatcatggagaaggtgagcggcaagatggccgtggtggaggagatggaggccgacctgaaggagaccggcaaggagaacttcagagagagaggcagcgaggagatctgcgtgaccgaggagaaggtggccgagctgaagcagaccggcaagaccgacatcagccccagagagaacgagctggaggagaccagcaccagcagacagaccgacacccacctgatgcagagcggcagcaacgacttcagcgccgtgcccagcctggacatccagaacatcagcagcgaggtgctgagcatgatgcacacccccgtggaggagaagagaaacagcgagaaggaggtgagcagccacttcagccacttcaagatcagcagccagacccacgagagcgacaagaccgaggtgcagggcatccagagccccgacgtgcccgagcagttcagcgacatcaacctgagcaagagcctgccccaggagcagaagcccctggagatcaagcccgcccccttcgtgagaagcagattcaagagacccaagcccaacctggccagagccgccctgaagagagagaccaccgagagcgagaagtacatctacgagaagaagagcgagaccaagaagatggagaccatcgtgatgcaggagaacaacgagcagaccgacaccctgcccagccagcacgacgaggccagcctgatgatcagcagagagaaggacaccctgggccacagaaacgaggaggccgtgatcctgccctgcacccagaccgagagaaacctgagccccagcaacagctgcgagcccaaggaggagagccagagcgcccccgtgcagaagaacgacagcgtggtgagcgtgggcaccaacaacgtgaacaccttccagcaggagatgaaggagagcgtgatccagaccgccagacaggtgagaggcagactgcagagacccagacccaacatcagaaagaccggccagagacagatcgtggacaagggcgaggccaagggcatcatcaaggagggcagaaccatcctgcccaaggacgagaccgagaagaaggtgctgaccgtgagcaacagccagatcgagaccgagatcgaggtgcccagcagcgccgtgcccgagcacagaatgtacgagaaccagagccaggtggtgctggtggagaacctgcacgtgaacaagaccaacgagaccatcagacacgagaacaagccctacgtgcccagcagcgcccagatgaccagaagaaagttccagaaggccaagcccaacctgggcagagcccacagcaagaaggaggagcccgtgctggagaaggtgaccaccgaccagagcaaggagggcaagcccgaggaccacctgctgcagaagggcgccagcaacacccagctgctgctgaaggagaaggccgagctgctgaccagcctggaggtgagcgccagaaaggactgcgtgggcagcaaggagagcgccctggccaagatcgacgccgagctggaggaggtgggccccagcagaagagtgggcgaggagaccgtgggcgacaacagccccagcagcgtggtggaggagcagtacctgaacaagctgaccagctgcccccagcccctgaacgagaccagctacagcaagatcgccctggacggcaagaccaccatcagcagcaccagcgagtacgagagaaacagaggcgagagaagaagccacaagaagttcaagcccaacgtgaccagaggcagaggcagcaagagagtgagaggcaagaccagcaagaaggagcccagagccagcaaggccatgctggtgaccctgagagccagccaggaggaggacgacgacgccgacgacttcgagagcgactacgaggaggagagctaccacctggcccccgaggaggtgaacaaggcccccgtgttcgtgcccgtgggcctgagaagccccgagcccgtgagcgcccagatcgaggagaccatggaggagctggagatcaccgtgaacgtgcccgacgtgggctgcatcgccgtggtggagcacgagctgcccaacaccgacgtgaccaccgaggagatgaagcaggaggagaacctgagcgtgcccttcgagatgaccaccagcgagcacatccaggacgagcccggcaccaacgacggcagcaccgaggccgccatcaccctgctgaccatgggcgacctggtgctgcagagcgagatcagcagcgagcagggcgacgtgggcgtgtgcatcatcccccacgtgcacagcaaggacaagagccacatccccagcagcctggacaacgtgaaccacaagatcgtgcacgagtgccaggagctgagcagccccgtgatcaccaccagccccgccagcttcgaggagaacaagatcgtgctggaggagcagagcagcagagaggagatcagcctgatggagaaggtgaaggagaacgccacccccaccagaaacaccatcagcaaggtgaccagcaacctgagaatcagaagcagactggccaagcccaagcccaacctggagaagaccctgggcaccaacagactggacgactaccaggaggtgagcagcctgtgcgtgaccaagggcgccgagatggagacccagagagagaccgagaagaacgccagcaaggccaccgagctggagaacaagaacctgggccccgtgaccaccgccgagaacaaggaccagagcaagctggcctgcgtgcacggcatcaagggcaccagcatcagcagcgaggtgaacctgaccgagagaaacgagaaccaggaggagagcagccaggaggtgcacatgctgagcgtggcccccgtggccagcagcgagaccggcccctgcaccctgggcctggacagaggcctgggcgagaacagcgtggaggagccccagatcaaggacagcaagggcgacagcgtgctgaccctgcccgtgcccgagtacacccccaccagcatccccgaggtgcagcaggagaacatcatcaacccccaggacctgaccgtgaacctggtggccaacgtgccccaggacggcgaggacgagcaggccttcatcctgaccctggtggagatccccgccaacgccgtggaggagttcaccgacgccaccgcccagttcatgcccaaccccctgctgcccgcccccatcctggtgaagagcgtgaacaccgaggagagaggcgacatgagcatctgcctgcccgccaccagcgtgggccaggacgccatgggcctgagcatcagcggcagagacaacagcaagaagccccccgacaacctggacctggtgagcagaaagagattccagtgcagactggacaagaacgaccacatcccccccgccaagaagagaagcctgaccctgagagacgactgccaggagtacaccaccgaggtgcacagcaaggagctgaccaacgtgttcgaggagaccggcgagagccacaagggccaggacatcttcctgaccagcggcagcaccctgaccacccccgagccccagagacagcaggtggaggccgccttccagagcagaggcagcagaagccccgacgcctgcatggacaagaacgtgccccagctgccccaggacgagatgatcgtgagcgacaaggaggagagaaccgacgccgcccccaagagccagcagatggacagcagaaccagcagcagcaaggccagcctgagcagacccggcagaagacccctgggcttcctgagcctgatctgcagcaagaacagcctggagagcgacgagcccatgcaggtgcacagcaagaagagactgaagcccctgatccccggcctgagaaagaagctgaagagaagcaaccccttcaacgagagccaggagaagaacagagagagcagcgacctgctgcccagccccagcgtgatcaccacccagagcgagaacatcagcagcagcgccacccaggtgagctgcgaccagcccctgctgaaggagggctacaagagcgcccagaagagagccccccagggcgaggccaccaccgtgagcgagtacttcttcaacgacatcttcatcgaggtggacgagaccgagtag

SEQ ID NO: 73957 - DNA, 1392 bp, synthetic construct
  misc_feature 1..1392: note = Description of Artificial Sequence: Synthetic coding sequence
  source 1..1392: mol_type = other DNA
atgctggtgaccctgagagccagccaggaggaggacgacgacgccgacgacttcgagagcgactacgaggaggagagctaccacctggcccccgaggaggtgaacaaggcccccgtgttcgtgcccgtgggcctgagaagccccgagcccgtgagcgcccagatcgaggagaccatggaggagctggagatcaccgtgaacgtgcccgacgtgggctgcatcgccgtggtggagcacgagctgcccaacaccgacgtgaccaccgaggagatgaagcaggaggagaacctgagcgtgcccttcgagatgaccaccagcgagcacatccaggacgagcccggcaccaacgacggcagcaccgaggccgccatcaccctgctgaccatgggcgacctggtgctgcagagcgagatcagcagcgagcagggcgacggcgtgtgcatcatcccccacgtgcacagcaaggacaagagccacatccccagcagcctggacaacgtgaaccacaagatcgtgcacgagtgccaggagctgagcagccccgtgatcaccaccagccccgccagcttcgaggagaacaagatcgtgctggaggagcagagcagcagagaggagatcagcctgatggagaaggtgaaggagaacgccacccccaccagaaacaccatcagcaaggtgaccagcaacctgagaatcagaagcagactggccaagcccaagcccaacctggagaagaccctgggcaccaacagactggacgactaccaggaggtgagcagcctgtgcgtgaccaagggcgccgagatggagacccagagagagaccgagaagaacgccagcaaggccaccgagctggagaacaagaacctgggccccgtgaccaccgccgagaacaaggaccagagcaagctggcctgcgtgcacggcatcaagggcaccagcatcagcagcgaggtgaacctgaccgagagaaacgagaaccaggaggagagcagccaggaggtgcacatgctgagcgtggcccccgtggccagcagcgagaccggcccctgcaccctgggcctggacagaggcctgggcgagaacagcgtggaggagccccagatcaaggacagcaagggcgacagcgtgctgaccctgcccgtgcccgagtacacccccaccagcatccccgaggtgcagcaggagaacatcatcaacccccaggacctgaccgtgttcgtgtaccagcagctgcagctggtgaagatgccctgggtgtacctgttcctggaggagatcatcctgaagagcagactgatcatctggatcctgtacctgggcagagacttcaacgccggcctgatcaagatgaccaccttcctgctgcccaagaacgtgcacagcctgtag

SEQ ID NO: 73958 - DNA, 2445 bp, synthetic construct
  misc_feature 1..2445: note = Description of Artificial Sequence: Synthetic coding sequence
  source 1..2445: mol_type = other DNA
atgttcagaagagccagactgagcgtgaagcccaacgtgagacccggcgtgggcgccagaggcagcaccgccagcaacccccagagaggcagagagagccccagaccccccgaccccgccaccgacagcgccagcaagcccgccgagcccaccgacgtgcccaccgtggacttcggcggcgccgagccccaggagaaggcccccagaagcagcaccgagaagaccggcggcgacaacgacgtggaggagagcagcagaagcagcagcaccgtgagccagagaagaaagagaatcagcagcaccagcagcctggtgaagagcagcgtgagcgtgcccagcgagagccaccccctgagcaccatcaaccaggaggccccccagcccaccgccaccagcaccaaggagaagcagccctgcagcgacagatacagaatctacaaggcccagaagctgagagagatgctgaaggaggagctgagaaaggagaagaagcagtggaagaacaagtacgccatcaacgagagccagagaccccccgacagaagcaagatgaccatgagagacttcatctactacctgcccgacaacaaccccatgaccagcagcctggagcaggagaagaagaccgagaagcccagcacccccgtgcagaccagagagcaggagggcaagagcacccccaacgccgaggacaacgagatggaggaggagaccgacgacggccccctgctggtgcccagagtgaaggtggccgaggacggcagcatcatcctggacgaggagagcctgaccgtggaggtgctgagaaccaagggcccctgcgtggtggaggagaacgaccccatcttcgagagaggcagcaccaccacctacagcagcttcagaaagaactactacagcaagccctggagcaacaaggagaccgacatgttcttcctggccatcagcatggtgggcaccgacttcagcatgatcggccagctgttcccccacagagccagaatcgagatcaagaacaagttcaagagagaggagaagaccaacggctggagaatcgacaaggccttccaggagaagagacccttcgacttcgacttcttcgcccacctgctgcagaaggtgctggccgaggaggagaagagaaagcagaagagcgtgaagaaccacagcctgaaggagaagaagagcaccaagcccagaaagaacgtgaaggtgaagaaggtggcctgcgagggcgtgaacaacgaccccgacgagagcatgagcagcagaatcagcgacaccgagagaagccagaaggacgcccagaccgtggaggaggagagcctgaccctgagcagagaggacgccgagcaggtggccctggaggtggacctgaaccagaagaagagaagaagaaagaagcaggacggcgccaacgagctgggcgtgaacaacctgctggagaacgccaccgtgcaggccggccccagcaagggcgagaagcacaagaacaagtgccaggccatcagacccgagctgaaggagggcgagtgcagcaaggagcagatgctgagctgcacccagaacatcgacggcatcgtgggcttcgccagcaccgagaaggtggagaagagaaccgaccccatcctgagcctgagcaaccagcaggacgccaccagcgtggccaccgagagcagcgagagcagcaccagcgacctgcccagcttcgaggtgggcatcagagccctgtgcgaggtgaacaacgccgagggcagctgcatcgaggagagaaacgtggacctgaagaacaacagcctggagatcgaccagaccgagaacgtgaagcccatgctgagaggcagattccagagacccaagcccaacctgagcagagccggcaagaagagcgtgctgagccagggcaagaccgagagcgagagcaagaacagccacagcaagaccagcgtggagaagaaccacgtggagaaggacaagatgaacaccctggacatcctgagaatggagaccaccgagagagagaaccccgaggccgagaccgtgagcgtgctgggcgagaagaactgcctgcaggagggcagccagctgaaggccctgagacccgtgcaggtgagaggcagactgcagaagcccaagcccaacgccggcaaggccgccgagagaaaggagatcctgatcagccaggaggagatcggcgccaacgtggagaagaacgagaacgagagctgcgccgacagagacaccccccagcacatggaggaccagagcagaaaggacttcgaggaggaggacgtgatcctgcagcccgagaagaacgacagcttccagaacgtgcagcccgacgagcccaaggtgctgaacgagtgcctgagcgtgcaggagaacaacaaggccaacaagctgaaccaggtgcccatcctgagaaccagattccagaagccctag

SEQ ID NO: 73959 - DNA, 2541 bp, synthetic construct
  misc_feature 1..2541: note = Description of Artificial Sequence: Synthetic coding sequence
  source 1..2541: mol_type = other DNA
atgttcagaagagccagactgagcgtgaagcccaacgtgagacccggcgtgggcgccagaggcagcaccgccagcaacccccagagaggcagagagagccccagaccccccgaccccgccaccgacagcgccagcaagcccgccgagcccaccgacgtgcccaccgtggacttcggcggcgccgagccccaggagaaggcccccagaagcagcaccgagaagaccggcggcgacaacgacgtggaggagagcagcagaagcagcagcaccgtgagccagagaagaaagagaatcagcagcaccagcagcctggtgaagagcagcgtgagcgtgcccagcgagagccaccccctgagcaccatcaaccaggaggccccccagcccaccgccaccagcaccaaggagaagcagccctgcagcgacagatacagaatctacaaggcccagaagctgagagagatgctgaaggaggagctgagaaaggagaagaagcagtggaagaacaagtacgccatcaacgagagccagagaccccccgacagaagcaagatgaccatgagagacttcatctactacctgcccgacaacaaccccatgaccagcagcctggagcaggagaagaagaccgagaagcccagcacccccgtgcagaccagagagcaggagggcaagagcacccccaacgccgaggacaacgagatggaggaggagaccgacgacggccccctgctggtgcccagagtgaaggtggccgaggacggcagcatcatcctggacgaggagagcctgaccgtggaggtgctgagaaccaagggcccctgcgtggtggaggagaacgaccccatcttcgagagaggcagcaccaccacctacagcagcttcagaaagaactactacagcaagccctggagcaacaaggagaccgacatgttcttcctggccatcagcatggtgggcaccgacttcagcatgatcggccagctgttcccccacagagccagaatcgagatcaagaacaagttcaagagagaggagaagaccaacggctggagaatcgacaaggccttccaggagaagagacccttcgacttcgacttcttcgcccacctgctgcagaaggtgctggccgaggaggagaagagaaagcagaagagcgtgaagaaccacagcctgaaggagaagaagagcaccaagcccagaaagaacgtgaaggtgaagaaggtggcctgcgagggcgtgaacaacgaccccgacgagagcatgagcagcagaatcagcgacaccgagagaagccagaaggacgcccagaccgtggaggaggagagcctgaccctgagcagagaggacgccgagcaggtggccctggaggtggacctgaaccagaagaagagaagaagaaagaagcaggacggcgccaacgagctgggcgtgaacaacctgctggagaacgccaccgtgcaggccggccccagcaagggcgagaagcacaagaacaagtgccaggccatcagacccgagctgaaggagggcgagtgcagcaaggagcagatgctgagctgcacccagaacatcgacggcatcgtgggcttcgccagcaccgagaaggtggagaagagaaccgaccccatcctgagcctgagcaaccagcaggacgccaccagcgtggccaccgagagcagcgagagcagcaccagcgacctgcccagcttcgaggtgggcatcagagccctgtgcgaggtgaacaacgccgagggcagctgcatcgaggagagaaacgtggacctgaagaacaacagcctggagatcgaccagaccgagaacgtgaagcccatgctgagaggcagattccagagacccaagcccaacctgagcagagccggcaagaagagcgtgctgagccagggcaagaccgagagcgagagcaagaacagccacagcaagaccagcgtggagaagaaccacgtggagaaggacaagatgaacaccctggacatcctgagaatggagaccaccgagagagagaaccccgaggccgagaccgtgagcgtgctgggcgagaagaactgcctgcaggagggcagccagctgaaggccctgagacccgtgcaggtgagaggcagactgcagaagcccaagcccaacgccggcaaggccgccgagagaaaggagatcctgatcagccaggaggagatcggcgccaacgtggagaagaacgagaacgagagctgcgccgacagagacaccccccagcacatggaggaccagagcagaaaggacttcgaggaggaggacgtgatcctgcagcccgagaagaacgacagcttccagaacgtgcagcccgacgagcccaaggtgctgaacgagtgcctgagcgtgcaggagaacaacaaggccaacaagctgaaccaggtgcccatcctgagaaccagattccagaagcccaagcccaacatcggcagaggcaccggcagaagagagatcagcagcaaggaggaggtgctggagaagatcctgagcctgggcaagtggagacagcactag

SEQ ID NO: 73960 - DNA, 6399 bp, synthetic construct
  misc_feature 1..6399: note = Description of Artificial Sequence: Synthetic coding sequence
  source 1..6399: mol_type = other DNA
atgagcagcagaatcagcgacaccgagagaagccagaaggacgcccagaccgtggaggaggagagcctgaccctgagcagagaggacgccgagcaggtggccctggaggtggacctgaaccagaagaagagaagaagaaagaagcaggacggcgccaacgagctgggcgtgaacaacctgctggagaacgccaccgtgcaggccggccccagcaagggcgagaagcacaagaacaagtgccaggccatcagacccgagctgaaggagggcgagtgcagcaaggagcagatgctgagctgcacccagaacatcgacggcatcgtgggcttcgccagcaccgagaaggtggagaagagaaccgaccccatcctgagcctgagcaaccagcaggacgccaccagcgtggccaccgagagcagcgagagcagcaccagcgacctgcccagcttcgaggtgggcatcagagccctgtgcgaggtgaacaacgccgagggcagctgcatcgaggagagaaacgtggacctgaagaacaacagcctggagatcgaccagaccgagaacgtgaagcccatgctgagaggcagattccagagacccaagcccaacctgagcagagccggcaagaagagcgtgctgagccagggcaagaccgagagcgagagcaagaacagccacagcaagaccagcgtggagaagaaccacgtggagaaggacaagatgaacaccctggacatcctgagaatggagaccaccgagagagagaaccccgaggccgagaccgtgagcgtgctgggcgagaagaactgcctgcaggagggcagccagctgaaggccctgagacccgtgcaggtgagaggcagactgcagaagcccaagcccaacgccggcaaggccgccgagagaaaggagatcctgatcagccaggaggagatcggcgccaacgtggagaagaacgagaacgagagctgcgccgacagagacaccccccagcacatggaggaccagagcagaaaggacttcgaggaggaggacgtgatcctgcagcccgagaagaacgacagcttccagaacgtgcagcccgacgagcccaaggtgctgaacgagtgcctgagcgtgcaggagaacaacaaggccaacaagctgaaccaggtgcccatcctgagaaccagattccagaagcccaagcccaacatcggcagaggcaccggcagaagagagatcagcagcaaggaggaggtgctggagaagatcctggtgagcggcgagatggccgccgccctgagagagaccgtgagactggacaccagccccaaggagatggtgcccgccgagatcaacaccaaggagatgcagagcgacctgaaggagaccggcagaagagccatcagccccagagagaagatcctggacgtgatcgacgacaccatcgagatggagaccggcctgaaggccatgggcagagagatctgcctgagagagaagacccccgaggtgatcgacgccaccgaggagatcgacaaggacctggaggaggccggcagaagagagatcagcccccagaagaacggccccgaggaggtgaagcccctgggcgaggtggagaccgacctgaaggccaccggcaacgagagcagccccagagagaagacccccgaggtgaccgacgccaccgaggagatcgacaagaacctggaggagaccggcagaagaaagatcagccccagagagaacggccccgaggaggtgaagcccgtggacgagatggagaccgacctgaacgccaccggcagagagagcagccccagagagaagacccccgaggtgatcgacgccaccgaggagatcgacctggaggagaccgagagagaggtgagcccccaggagaacggcctggaggaggtgaagcccctgggcgagatggagaccgacctgaaggccaccggcagagacagcttccccagaggcaagacccccgaggtgatcgacgccatcgaggagatcgagatcgacctggaggagaccgagagagagatcagcccccaggagaacggcctggaggaggtgaagcccctgggcgagatgcagaccgacctgaaggccaccggcagagagatcagccccagagagaagacccccgaggtgatcgacgccaccgaggagatcgacaaggacctggaggagaccggcagaagagagatcagccccgaggagaacggccccgaggaggtgaagcccgtggacgagatggagaccgacctgaagaccaccggcagagagggcagcagcagagagaagaccagagaggtgatcgacgccgccgaggtgatcgagaccgacctggaggagaccgagagagagatcagcccccaggagaacggccccgaggaggtgaagcccgtgggcaagatggagaccgacctgaaggagatcagagaggagatcagccagagagagaaggtgctggccgagttcagcgccatcagagagaaggagatcgacctgaaggagaccggcaagagagacatccccatcatggagaaggtgagcggcaagatggccgtggtggaggagatggaggccgacctgaaggagaccggcaaggagaacttcagagagagaggcagcgaggagatctgcgtgaccgaggagaaggtggccgagctgaagcagaccggcaagaccgacatcagccccagagagaacgagctggaggagaccagcaccagcagacagaccgacacccacctgatgcagagcggcagcaacgacttcagcgccgtgcccagcctggacatccagaacatcagcagcgaggtgctgagcatgatgcacacccccgtggaggagaagagaaacagcgagaaggaggtgagcagccacttcagccacttcaagatcagcagccagacccacgagagcgacaagaccgaggtgcagggcatccagagccccgacgtgcccgagcagttcagcgacatcaacctgagcaagagcctgccccaggagcagaagcccctggagatcaagcccgcccccttcgtgagaagcagattcaagagacccaagcccaacctggccagagccgccctgaagagagagaccaccgagagcgagaagtacatctacgagaagaagagcgagaccaagaagatggagaccatcgtgatgcaggagaacaacgagcagaccgacaccctgcccagccagcacgacgaggccagcctgatgatcagcagagagaaggacaccctgggccacagaaacgaggaggccgtgatcctgccctgcacccagaccgagagaaacctgagccccagcaacagctgcgagcccaaggaggagagccagagcgcccccgtgcagaagaacgacagcgtggtgagcgtgggcaccaacaacgtgaacaccttccagcaggagatgaaggagagcgtgatccagaccgccagacaggtgagaggcagactgcagagacccagacccaacatcagaaagaccggccagagacagatcgtggacaagggcgaggccaagggcatcatcaaggagggcagaaccatcctgcccaaggacgagaccgagaagaaggtgctgaccgtgagcaacagccagatcgagaccgagatcgaggtgcccagcagcgccgtgcccgagcacagaatgtacgagaaccagagccaggtggtgctggtggagaacctgcacgtgaacaagaccaacgagaccatcagacacgagaacaagccctacgtgcccagcagcgcccagatgaccagaagaaagttccagaaggccaagcccaacctgggcagagcccacagcaagaaggaggagcccgtgctggagaaggtgaccaccgaccagagcaaggagggcaagcccgaggaccacctgctgcagaagggcgccagcaacacccagctgctgctgaaggagaaggccgagctgctgaccagcctggaggtgagcgccagaaaggactgcgtgggcagcaaggagagcgccctggccaagatcgacgccgagctggaggaggtgggccccagcagaagagtgggcgaggagaccgtgggcgacaacagccccagcagcgtggtggaggagcagtacctgaacaagctgaccagctgcccccagcccctgaacgagaccagctacagcaagatcgccctggacggcaagaccaccatcagcagcaccagcgagtacgagagaaacagaggcgagagaagaagccacaagaagttcaagcccaacgtgaccagaggcagaggcagcaagagagtgagaggcaagaccagcaagaaggagcccagagccagcaaggccatgctggtgaccctgagagccagccaggaggaggacgacgacgccgacgacttcgagagcgactacgaggaggagagctaccacctggcccccgaggaggtgaacaaggcccccgtgttcgtgcccgtgggcctgagaagccccgagcccgtgagcgcccagatcgaggagaccatggaggagctggagatcaccgtgaacgtgcccgacgtgggctgcatcgccgtggtggagcacgagctgcccaacaccgacgtgaccaccgaggagatgaagcaggaggagaacctgagcgtgcccttcgagatgaccaccagcgagcacatccaggacgagcccggcgtgtgcatcatcccccacgtgcacagcaaggacaagagccacatccccagcagcctggacaacgtgaaccacaagatcgtgcacgagtgccaggagctgagcagccccgtgatcaccaccagccccgccagcttcgaggagaacaagatcgtgctggaggagcagagcagcagagaggagatcagcctgatggagaaggtgaaggagaacgccacccccaccagaaacaccatcagcaaggtgaccagcaacctgagaatcagaagcagactggccaagcccaagcccaacctggagaagaccctgggcaccaacagactggacgactaccaggaggtgagcagcctgtgcgtgaccaagggcgccgagatggagacccagagagagaccgagaagaacgccagcaaggccaccgagctggagaacaagaacctgggccccgtgaccaccgccgagaacaaggaccagagcaagctggcctgcgtgcacggcatcaagggcaccagcatcagcagcgaggtgaacctgaccgagagaaacgagaaccaggaggagagcagccaggaggtgcacatgctgagcgtggcccccgtggccagcagcgagaccggcccctgcaccctgggcctggacagaggcctgggcgagaacagcgtggaggagccccagatcaaggacagcaagggcgacagcgtgctgaccctgcccgtgcccgagtacacccccaccagcatccccgaggtgcagcaggagaacatcatcaacccccaggacctgaccgtgaacctggtggccaacgtgccccaggacggcgaggacgagcaggccttcatcctgaccctggtggagatccccgccaacgccgtggaggagttcaccgacgccaccgcccagttcatgcccaaccccctgctgcccgcccccatcctggtgaagagcgtgaacaccgaggagagaggcgacatgagcatctgcctgcccgccaccagcgtgggccaggacgccatgggcctgagcatcagcggcagagacaacagcaagaagccccccgacaacctggacctggtgagcagaaagagattccagtgcagactggacaagaacgaccacatcccccccgccaagaagagaagcctgaccctgagagacgactgccaggagtacaccaccgaggtgcacagcaaggagctgaccaacgtgttcgaggagaccggcgagagccacaagggccaggacatcttcctgaccagcggcagcaccctgaccacccccgagccccagagacagcaggtggaggccgccttccagagcagaggcagcagaagccccgacgcctgcatggacaagaacgtgccccagctgccccaggacgagatgatcgtgagcgacaaggaggagagaaccgacgccgcccccaagagccagcagatggacagcagaaccagcagcagcaaggccagcctgagcagacccggcagaagacccctgggcttcctgagcctgatctgcagcaagaacagcctggagagcgacgagcccatgcaggtgcacagcaagaagagactgaagcccctgatccccggcctgagaaagaagctgaagagaagcaaccccttcaacgagagccaggagaagaacagagagagcagcgacctgctgcccagccccagcgtgatcaccacccagagcgagaacatcagcagcagcgccacccagagccccttctag

SEQ ID NO: 73961 - DNA, 1392 bp, synthetic construct; identical to SEQ ID NO: 73957
  misc_feature 1..1392: note = Description of Artificial Sequence: Synthetic coding sequence
  source 1..1392: mol_type = other DNA

SEQ ID NO: 73962 - DNA, 1518 bp, synthetic construct
  misc_feature 1..1518: note = Description of Artificial Sequence: Synthetic coding sequence
  source 1..1518: mol_type = other DNA
atgggcctggtgagcagcaagaagcccgacaaggagaagcccatcaaggagaaggacaagggccagtggagccccctgaaggtgagcgcccaggacaaggacgccccccccctgccccccctggtggtgttcaaccacctgaccccccccccccccgacgagcacctggacgaggacaagcacttcgtggtggccctgtacgactacaccgccatgaacgacagagacctgcagatgctgaagggcgagaagctgcaggtgctgaagggcaccggcgactggtggctggccagaagcctggtgaccggcagagagggctacgtgcccagcaacttcgtggccagagtggagagcctggagatggagagatggttcttcagaagccagggcagaaaggaggccgagagacagctgctggcccccatcaacaaggccggcagcttcctgatcagagagagcgagaccaacaagggcgccttcagcctgagcgtgaaggacgtgaccacccagggcgagctgatcaagcactacaagatcagatgcctggacgagggcggctactacatcagccccagaatcaccttccccagcctgcaggccctggtgcagcactacagcaagaagggcgacggcctgtgccagagactgaccctgccctgcgtgagacccgccccccagaacccctgggcccaggacgagtgggagatccccagacagagcctgagactggtgagaaagctgggcagcggccagttcggcgaggtgtggatgggctactacaagaacaacatgaaggtggccatcaagaccctgaaggagggcaccatgagccccgaggccttcctgggcgaggccaacgtgatgaaggccctgcagcacgagagactggtgagactgtacgccgtggtgaccaaggagcccatctacatcgtgaccgagtacatggccagaggctgcctgctggacttcctgaagaccgacgagggcagcagactgagcctgcccagactgatcgacatgagcgcccagatcgccgagggcatggcctacatcgagagaatgaacagcatccacagagacctgagagccgccaacatcctggtgagcgaggccctgtgctgcaagatcgccgacttcggcctggccagaatcatcgacagcgagtacaccgcccaggagggcgccaagttccccatcaagtggaccgcccccgaggccatccacttcggcgtgttcaccatcaaggccgacgtgtggagcttcggcgtgctgctgatggaggtggtgacctacggcagagtgccctaccccggcatgagcaaccccgaggtgatcagaaacctggagagaggctacagaatgcccagacccgacacctgcccccccgagctgtacagaggcgtgatcgccgagtgctggagaagcagacccgaggagagacccaccttcgagttcctgcagagcgtgctggaggacttctacaccgccaccgagagacagtacgagctgcagccctag

SEQ ID NO: 73963 - DNA, 1773 bp, synthetic construct
  misc_feature 1..1773: note = Description of Artificial Sequence: Synthetic coding sequence
  source 1..1773: mol_type = other DNA
atgggcctggtgagcagcaagaagcccgacaaggagaagcccatcaaggagaaggacaagggccagtggagccccctgaaggtgagcgcccaggacaaggacgccccccccctgccccccctggtggtgttcaaccacctgaccccccccccccccgacgagcacctggacgaggacaagcacttcgtggtggccctgtacgactacaccgccatgaacgacagagacctgcagatgctgaagggcgagaagctgcaggtgctgaagggcaccggcgactggtggctggccagaagcctggtgaccggcagagagggctacgtgcccagcaacttcgtggccagagtggagagcctggagatggagagatggttcttcagaagccagggcagaaaggaggccgagagacagctgctggcccccatcaacaaggccggcagcttcctgatcagagagagcgagaccaacaagggcgccttcagcctgagcgtgaaggacgtgaccacccagggcgagctgatcaagcactacaagatcagatgcctggacgagggcggctactacatcagccccagaatcaccttccccagcctgcaggccctggtgcagcactacagcaagaagggcgacggcctgtgccagagactgaccctgccctgcgtgagacccgccccccagaacccctgggcccaggacgagtgggagatccccagacagagcctgagactggtgagaaagctgggcagcggccagttcggcgaggtgtggatgggctactacaagaacaacatgaaggtggccatcaagaccctgaaggagggcaccatgagccccgaggccttcctgggcgaggccaacgtgatgaaggccctgcagcacgagagactggtgagactgtacgccgtggtgaccaaggagcccatctacatcgtgaccgagtacatggccagaggctgcctgctggacttcctgaagaccgacgagggcagcagactgagcctgcccagactgatcgacatgagcgcccagatcgccgagggcatggcctacatcgagagaatgaacagcatccacagagacctgagagccgccaacatcctggtgagcgaggccctgtgctgcaagatcgccgacttcggcctggccagaatcatcgacagcgagtacaccgcccaggagggcgccaagttccccatcaagtggaccgcccccgaggccatccacttcggcgtgttcaccatcaaggccgacgtgtggagcttcggcgtgctgctgatggaggtggtgacctacggcagagtgccctaccccggcatgagcaaccccgaggtgatcagaaacctggagagaggctacagaatgcccagacccgacacctgcccccccgagctgtacagaggcgtgatcgccgagtgctggagaagcagacccgaggagagacccaccttcgactgcacccccggcagagtgaccagacccctgtgcgccgccagcttcgtggagggctgcaacagcgacctggccagaagcagcggcgtgctgagccccagcaaggtgttcagaaccggcaagagactgagcagcagcaaggcccccgtgctgggcacccccagagccggcagagtgcccgccagcgccccctgcgtggaccccgccctgcccagatacagaagccagaccggcagcagaggcagacagcagggccagccccagcccagactgagaagcagcaccgccggcctgttctgcaacaaggtgaccagcgtgagatag

SEQ ID NO: 73964 - DNA, 615 bp, synthetic construct
  misc_feature 1..615: note = Description of Artificial Sequence: Synthetic coding sequence
  source 1..615: mol_type = other DNA
atggccaccgccagccccagcgtgttcctgctgatggtgaacggccaggtggagagcgcccagttccccgagtacgacgacctgtactgcaagtactgcttcgtgtacggccaggactgggcccccaccgccggcctggaggagggcatcagccagatcaccagcaagagccaggacgtgagacaggccctggtgtggaacttccccatcgacgtgaccttcaagagcaccaacccctacggctggccccagatcgtgctgagcgtgtacggccccgacgtgttcggcaacgacgtggtgagaggctacggcgccgtgcacgtgcccttcagccccggcagacacaagagaaccatccccatgttcgtgcccgagagcaccagcaagctgcagaagttcaccagctggttcatgggcagaagacccgagtacaccgaccccaaggtggtggcccagggcgagggcagagaggtgaccagagtgagaagccagggcttcgtgaccctgctgttcaacgtggtgaccaaggacatgagaaagctgggctacgacaccggccccagcgacacccagggcgtgctgggccccagccccccccagagcttcccccagtag

SEQ ID NO: 73965 - DNA, 462 bp, synthetic construct
  misc_feature 1..462: note = Description of Artificial Sequence: Synthetic coding sequence
  source 1..462: mol_type = other DNA
atggccaccgccagccccagcgtgttcctgctgatggtgaacggccaggtggagagcgcccagttccccgagtacgacgacctgtactgcaagtactgcttcgtgtacggccaggactgggcccccaccgccggcctggaggagggcatcagccagatcaccagcaagagccaggacgtgagacaggccctggtgtggaacttccccatcgacgtgaccttcaagagcaccaacccctacggctggccccagatcgtgctgagcgtgtacggccccgacgtgttcggcaacgacgtggtgagaggctacggcgccgtgcacgtgcccttcagccccggcagacacaagagaaccatccccatgttcgtgcccgagagcaccagcaagctgcagaagttcaccagcctgtgcctggtggccagcagcgacctgcaggccgccccccccaccgaggacaagtag

SEQ ID NO: 73966 - DNA, 486 bp, synthetic construct
  misc_feature 1..486: note = Description of Artificial Sequence: Synthetic coding sequence
  source 1..486: mol_type = other DNA
atggccaccgccagccccagcgtgttcctgctgatggtgaacggccaggtggagagcgcccagttccccgagtacgacgacctgtactgcaagtactgcttcgtgtacggccaggactgggcccccaccgccggcctggaggagggcatcagccagatcaccagcaagagccaggacgtgagacaggccctggtgtggaacttccccatcgacgtgaccttcaagagcaccaacccctacggctggccccagatcgtgctgagcgtgtacggccccgacgtgttcggcaacgacgtggtgagaggctacggcgccgtgcacgtgcccttcagccccggcagacacaagagaaccatccccatgttcgtgcccgagagcaccagcaagctgcagaagttcaccagctggttcatgggcagaagacccgagtacaccgaccccaaggtggtggcccagggcgagggcagagaggcccagcccggctag

SEQ ID NO: 73967 - DNA, 564 bp, synthetic construct
  misc_feature 1..564: note = Description of Artificial Sequence: Synthetic coding sequence
  source 1..564: mol_type = other DNA
atggccaccgccagccccagcgtgttcctgctgatggtgaacggccaggtggagagcgcccagttccccgagtacgacgacctgtactgcaagtactgcttcgtgtacggccaggactgggcccccaccgccggcctggaggagggcatcagccagatcaccagcaagagccaggacgtgagacaggccctggtgtggaacttccccatcgacgtgaccttcaagagcaccaacccctacggctggccccagatcgtgctgagcgtgtacggccccgacgtgttcggcaacgacgtggtgagaggctacggcgccgtgcacgtgcccttcagccccggcagacacaagagaaccatccccatgttcgtgcccgagagcaccagcaagctgcagaagttcaccagctggttcatgggcagaagacccgagtacaccgaccccaaggtggtggcccagggcgagggcagagaggacgagaacgccgaggccgagatccccagaagcacctgggtgagcctgtgccccagccccgcctggctgatgctgcccttctgcccccagtag

SEQ ID NO: 73968 - DNA, 402 bp, synthetic construct
  misc_feature 1..402: note = Description of Artificial Sequence: Synthetic coding sequence
  source 1..402: mol_type = other DNA
ctgctgatggtgaacggccaggtggagagcgcccagttccccgagtacgacgacctgtactgcaagtactgcttcgtgtacggccaggactgggcccccaccgccggcctggaggagggcatcagccagatcaccagcaagagccaggacgtgagacaggccctggtgtggaacttccccatcgacgtgaccttcaagagcaccaacccctacggctggccccagatcgtgctgagcgtgtacggccccgacgtgttcggcaacgacgtggtgagaggctacggcgccgtgcacgtgcccttcagccccggcagacacaagagaaccatccccatgttcgtgcccgagagcaccagcaagctgcagaagttcaccagaagcgccagctgcagcacccactag

SEQ ID NO: 73969 - DNA, 615 bp, synthetic construct; identical to SEQ ID NO: 73964
  misc_feature 1..615: note = Description of Artificial Sequence: Synthetic coding sequence
  source 1..615: mol_type = other DNA

SEQ ID NO: 73970 - DNA, 444 bp, synthetic construct
  misc_feature 1..444: note = Description of Artificial Sequence: Synthetic coding sequence
  source 1..444: mol_type = other DNA
atgatgaccagcaccgccagcaccgccctgtgcaccgccagaaccggccccccccagagagtgtggagaagaggcagccacagaagccaccccagagccaagatgtgcggcaagcactggtgcggcaccagccccctgatgagccccctgaaggcccccacccccaccgccggccacagaagctgcagcgcctgcatggaccagatgtgcagcggcaccatgtggttcgaggccatgggcccctgcacctgccccagccacctggccggcaccaagggccccagcccctgcctgagccagaacctgagactgaactgcagaagcctgcaggccggcagctggggcggcggccccagcacccagacccccagatggtggctgagagtgaaggccggcaagccccccagcggcctgagcgtgaaggacagcagcgtgagcagatag

SEQ ID NO: 73971 - DNA, 528 bp, synthetic construct
  misc_feature 1..528: note = Description of Artificial Sequence: Synthetic coding sequence
  source 1..528: mol_type = other DNA
atggccgaggtgcacgtgatcggccagatcatcggcgccagcggcttcagcgagagcagcctgttctgcaagtggggcatccacaccggcgccgcctggaagctgctgagcggcgtgagagagggccagacccaggtggacaccccccagatcggcgacatggcctactggagccaccccatcgacctgcacttcgccaccaagggcctgcagggctggcccagactgcacttccaggtgtggagccaggacagcttcggcagatgccagctggccggctacggcttctgccacgtgcccagcagccccggcacccaccagctggcctgccccacctggagacccctgggcagctggagagagcagctggccagagccttcgtgggcggcggcccccagctgctgcacggcgacaccatctacagcggcgccgacagatacagactgcacaccgccgccggcggcaccgtgcacctggagatcggcctgctgctgagaaacttcgacagatacggcgtggagtgctag

SEQ ID NO: 73972 - DNA, 1452 bp, synthetic construct
  misc_feature 1..1452: note = Description of Artificial Sequence: Synthetic coding sequence
  source 1..1452: mol_type = other DNA
atgaccgaggtggagtacacccagctgcagcacatcctgtgcagccacatggaggccgccgccgacggcgagctggagaccagactgaacagcgccctgctggccgccgccggccccggcgccggcgccggcggcttcgccgccggcggccagggcggcgccgcccccgtgtaccccgtgctgtgccccagcgccctggccgccgacgccccctgcctgggccacatcgacttccaggagctgagaatgatgctgctgagcgaggccggcgccgccgagaagaccagcggcggcggcgacggcgccagagccagagccgacggcgccgccaaggagggcgccggcgccgccgccgccgccgccggccccgacggcgcccccgaggccagagccaagcccgccgtgagagtgagactggaggacagattcaacagcatccccgccgagcccccccccgcccccagaggccccgagccccccgagcccggcggcgccctgaacaacctggtgaccctgatcagacaccccagcgagctgatgaacgtgcccctgcagcagcagaacaagtgcaccgccctggtgaagaacaagaccgccgccaccaccaccgccctgcagttcacctaccccctgttcaccaccaacgcctgcagcaccagcggcaacagcaacctgagccagacccagagcagcagcaacagctgcagcgtgctggaggccgccaagcaccaggacatcggcctgcccagagccttcagcttctgctaccagcaggagatcgagagcaccaagcagaccctgggcagcagaaacaaggtgctgcccgagcaggtgtggatcaaggtgggcgaggccgccctgtgcaagcaggccctgaagagaaacagaagcagaatgagacagctggacaccaacgtggagagaagagccctgggcgagatccagaacgtgggcgagggcgccaccgccacccagggcgcctggcagagcagcgagagcagccaggccaacctgggcgagcaggcccagagcggcccccagggcggcagaagccagagaagagagagacacaacagaatggagagagacagaagaagaagaatcagaatctgctgcgacgagctgaacctgctggtgcccttctgcaacgccgagaccgacaaggccaccaccctgcagtggaccaccgccttcctgaagtacatccaggagagacacggcgacagcctgaagaaggtgctgagcaccaacagcagatacgtgatgctgtggacctgcttcctgaagatgaagagcgccgtggacggcaagaacccccagcacgcctacagaaccgccaaccacaagtggctgtgcctgcacgaggccagaagcttcgccttcgaggtgagcatctgggcccacttccagctgttcagagtgagaatccccgagggcttcctgagcatctag

SEQ ID NO: 73973 - DNA, 843 bp, synthetic construct
  misc_feature 1..843: note = Description of Artificial Sequence: Synthetic coding sequence
  source 1..843: mol_type = other DNA
atgggccccaaggacagcgccaagtgcctgcacagaggcccccagcccagccactgggccgccggcgacggccccacccaggagagatgcggccccagaagcctgggcagccccgtgctgggcctggacacctgcagagcctgggaccacgtggacggccagatcctgggccagctgagacccctgaccgaggaggaggaggaggagggcgccggcgccaccctgagcagaggccccgccttccccggcatgggcagcgaggagctgagactggccagcttctacgactggcccctgaccgccgaggtgccccccgagctgctggccgccgccggcttcttccacaccggccaccaggacaaggtgagatgcttcttctgctacggcggcctgcagagctggaagagaggcgacgacccctggaccgagcacgccaagtggttccccagctgccagttcctgctgagaagcaagggcagagacttcgtgcacagcgtgcaggagacccacagccagctgctgggcagctgggacccctgggaggagcccgaggacgccgcccccgtggcccccagcgtgcccgccagcggctaccccgagctgcccacccccagaagagaggtgcagagcgagagcgcccaggagcccggcgccagagacgtggaggcccagctgagaagactgcaggaggagagaacctgcaaggtgtgcctggacagagccgtgagcatcgtgttcgtgccctgcggccacctggtgtgcgccgagtgcgcccccggcctgcagctgtgccccatctgcagagcccccgtgagaagcagagtgagaaccttcctgagctag

SEQ ID NO: 73974 - DNA, 3564 bp, synthetic construct
  misc_feature 1..3564: note = Description of Artificial Sequence: Synthetic coding sequence
  source 1..3564: mol_type = other DNA
atgagacccagaggcgccgccttcgccgccggcccccccggcgacctgcacctgggcaccgccatcggcttcgccggcgccatctggagaagcagaagccccgccatgagcaccctgctggacatcaagagcagcgtgctgagacaggtgcaggtgtgccccagcttcagaagaagaaccgagcaggaccccggcagcgccagcgccgacccccaggagcccgccaccggcgcctggaagcccggcgacggcgtggagttcttcgcccacatgagactgatgctgaagaagggcgagggcagacagggcctgccctgcctggaggtgcccctgagaagcggcagccccgccccccccgagcccgtggaccccagcctgggcctgagagccctggcccccgaggaggtggagatgctgtacgaggaggccctgtacaccgtgctgtacagagccggcaccatgggccccgaccaggtggacgacgaggaggccctgctgagctacctgcagcaggtgttcggcaccagcctggaggagcacaccgaggccatcgagagagtgagaaaggccaaggcccccacctacgccctgaaggtgagcgtgatgagagccaagaacctgctggccaaggaccccaacggcttcagcgacccctactgcatgctgggcatcctgcccgccagcgacgccaccagagagcccagagcccagaaggagcagagattcggcttcagaaagggcagcaagagaggcggccccctgcccgccaagtgcatccaggtgaccgaggtgaagagcagcaccctgaaccccgtgtggaaggagcacttcctgttcgagatcgaggacgtgagcaccgaccagctgcacctggacatctgggaccacgacgacgacgtgagcctggtggaggcctgcagaaagctgaacgaggtgatcggcctgaagggcatgggcagatacttcaagcagatcgtgaagagcgccagagccaacggcaccgccggccccaccgaggaccacaccgacgacttcctgggctgcctgaacatccccgtgagagaggtgcccgtggccggcgtggacagatggttcaagctggagcccagaagcagcgccagcagagtgcagggccactgccacctggtgctgaagctgatcaccacccagagagacaccgccatgagccagagaggcagaagcggcttcctgagccacctgctgctgctgagccacctgctgagactggagcacagcgccgaggagcccaacagcagcagctggagaggcgagctgagcacccccgccgccaccatcctgtgcctgcacggcgcccagagcaacctgagccccctgcagctggccgtgctgcactggcaggtgagcagcagacaccaccagacctgcaccctggactacagctacctgctgggcctgctggaggacatgcaggcccactgggaggaggcccccagcctgccccaggagcaggaggagagcctggccgacagcctgagcgccttcagcgagttcggcctgcagctgctgagacagctgagagactacttccccgccaccaacagcaccgccgtgcacagactggagctgctgctgaagtgcctgggcaagctgcagctgttccagcccagcttcgagatctgccccttcgagagcgagctgaacatggacatcgccgccgccctgaagagaggcaacagagagtggtacgacagaatcctgaacgacaagagccccagagagcagcccggcccccagagactgcccggcctggtggtgctggccgacgccgtgtacgacgacctgcagttctgctacagcgtgtacgccagcctgttccacagcatcctgaacgtggacgtgttcaccctgaccttcagacagctggagagactggtggccgaggaggcctgggtgctgaccgaggagctgagccccaagatgaccctggaggtggccagcggcctgttcgagctgtacctgaccctggccgacctgcagagattctgggacagcatccccggcagagacagcagaagcctggccctggccggcatccacgcccccttcctgcccgccgtgaagctgtggttccaggtgctgagagaccaggccaagtggagactgcagggcgccgtggacatggacaccctggagcccgtggacgccagcagcagacacagcagcagcgccgccaccgccggcctgtgcctgagccacatccaggagctgtgggtgagactggcctggcccgaccccgcccaggcccagggcctgggcacccagctgggccaggacgtgtgcgaggccaccctgttctacaccgagctgctgagaaagaaggtggacacccagcccggcgccgccggcgaggccgtgagcgaggccctgtgcgtggtgctgaacaacgtggagctggtgagaaaggccgccggccaggccctgaagggcctggcctggcccgagggcgccaccggccccgagggcgtgctgcccagacccctgctgagctgcacccaggccctggacgacgacctgcagagagaggcccacaccgtgaccgcccacctgaccagcaagatggtgggcgacatcagaaagtacgtgcagcacatcagcctgagccccgacagcatccagaacgacgaggccgtggcccccctgatgaagtacctggacgagaagctggccctgctgaacgccagcctggtgaagggcaacctgagcagagtgctggaggccctgtgggagctgctgctgcaggccatcctgcaggccctgggcgccaacagagacgtgagcgccgacttctacagcagattccacttcaccctggaggccctggtgagcttcttccacgccgagggccagggcctgcccctggagagcctgagagacggcagctacaagagactgaaggaggagctgagactgcacaagtgcagcaccagagagtgcatcgagcagttctacctggacaagctgaagcagagaaccctggagcagaacagattcggcagactgagcgtgagatgccactacgaggccgccgagcagagactggccgtggaggtgctgcacgccgccgacctgctgcccctggacgccaacggcctgagcgaccccttcgtgatcgtggagctgggccccccccacctgttccccctggtgagaagccagagaacccaggtgaagaccagaaccctgcaccccgtgtacgacgagctgttctacttcagcgtgcccgccgaggcctgcagaagaagagccgcctgcgtgctgttcaccgtgatggaccacgactggctgagcaccaacgacttcgccggcgaggccgccctgggcctgggcggcgtgaccggcgtggccagaccccaggtgggcggcggcgccagagccggccagcccgtgaccctgcacctgtgcagacccagagcccaggtgagaagcgccctgagaagactggagggcagaaccagcaaggaggcccaggagttcgtgaagaagctgaaggagctggagaagtgcatggaggccgacccctag

SEQ ID NO: 73975 - DNA, 3510 bp, synthetic construct
  misc_feature 1..3510: note = Description of Artificial Sequence: Synthetic coding sequence
  source 1..3510: mol_type = other DNA
atgagcaccctgctggacatcaagagcagcgtgctgagacaggtgcaggtgtgccccagcttcagaagaagaaccgagcaggaccccggcagcgccagcgccgacccccaggagcccgccaccggcgcctggaagcccggcgacggcgtggagttcttcgcccacatgagactgatgctgaagaagggcgagggcagacagggcctgccctgcctggaggcctggggcagcccctgcagacagagcccccaccccggcccccacacccaggtgcccctgagaagcggcagccccgccccccccgagcccgtggaccccagcctgggcctgagagccctggcccccgaggaggtggagatgctgtacgaggaggccctgtacaccgtgctgtacagagccggcaccatgggccccgaccaggtggacgacgaggaggccctgctgagctacctgcagcaggtgttcggcaccagcctggaggagcacaccgaggccatcgagagagtgagaaaggccaaggcccccacctacgccctgaaggtgagcgtgatgagagccaagaacctgctggccaaggaccccaacggcttcagcgacccctactgcatgctgggcatcctgcccgccagcgacgccaccagagagcccagagcccagaaggagcagagattcggcttcagaaagggcagcaagagaggcggccccctgcccgccaagtgcatccaggtgaccgaggtgaagagcagcaccctgaaccccgtgtggaaggagcacttcctgttcgagatcgaggacgtgagcaccgaccagctgcacctggacatctgggaccacgacgacgacgtgagcctggtggaggcctgcagaaagctgaacgaggtgatcggcctgaagggcatgggcagatacttcaagcagatcgtgaagagcgccagagccaacggcaccgccggccccaccgaggaccacaccgacgacttcctgggctgcctgaacatccccgtgagagaggtgcccgtggccggcgtggacagatggttcaagctggagcccagaagcagcgccagcagagtgcagggccactgccacctggtgctgaagctgatcaccacccagagagacaccgccatgagccagagaggcagaagcggcttcctgagccacctgctgctgctgagccacctgctgagactggagcacagcgccgaggagcccaacagcagcagctggagaggcgagctgagcacccccgccgccaccatcctgtgcctgcacggcgcccagagcaacctgagccccctgcagctggccgtgctgcactggcaggtgagcagcagacaccaccagacctgcaccctggactacagctacctgctgggcctgctggaggacatgcaggcccactgggaggaggcccccagcctgccccaggagcaggaggagagcctggccgacagcctgagcgccttcagcgagttcggcctgcagctgctgagacagctgagagactacttccccgccaccaacagcaccgccgtgcacagactggagctgctgctgaagtgcctgggcaagctgcagctgttccagcccagcttcgagatctgccccttcgagagcgagctgaacatggacatcgccgccgccctgaagagaggcaacagagagtggtacgacagaatcctgaacgacaagagccccagagagcagcccggcccccagagactgcccggcctggtggtgctggccgacgccgtgtacgacgacctgcagttctgctacagcgtgtacgccagcctgttccacagcatcctgaacgtggacgtgttcaccctgaccttcagacagctggagagactggtggccgaggaggcctgggtgctgaccgaggagctgagccccaagatgaccctggaggtggccagcggcctgttcgagctgtacctgaccctggccgacctgcagagattctgggacagcatccccggcagagacagcagaagcctggccctggccggcatccacgcccccttcctgcccgccgtgaagctgtggttccaggtgctgagagaccaggccaagtggagactgcagggcgccgtggacatggacaccctggagcccgtggacgccagcagcagacacagcagcagcgccgccaccgccggcctgtgcctgagccacatccaggagctgtgggtgagactggcctggcccgaccccgcccaggcccagggcctgggcacccagctgggccaggacgtgtgcgaggccaccctgttctacaccgagctgctgagaaagaaggtggacacccagcccggcgccgccggcgaggccgtgagcgaggccctgtgcgtggtgctgaacaacgtggagctggtgagaaaggccgccggccaggccctgaagggcctggcctggcccgagggcgccaccggccccgagggcgtgctgcccagacccctgctgagctgcacccaggccctggacgacgacctgcagagagaggcccacaccgtgaccgcccacctgaccagcaagatggtgggcgacatcagaaagtacgtgcagcacatcagcctgagccccgacagcatccagaacgacgaggccgtggcccccctgatgaagtacctggacgagaagctggccctgctgaacgccagcctggtgaagggcaacctgagcagagtgctggaggccctgtgggagctgctgctgcaggccatcctgcaggccctgggcgccaacagagacgtgagcgccgacttctacagcagattccacttcaccctggaggccctggtgagcttcttccacgccgagggccagggcctgcccctggagagcctgagagacggcagctacaagagactgaaggaggagctgagactgcacaagtgcagcaccagagagtgcatcgagcagttctacctggacaagctgaagcagagaaccctggagcagaacagattcggcagactgagcgtgagatgccactacgaggccgccgagcagagactggccgtggaggtgctgcacgccgccgacctgctgcccctggacgccaacggcctgagcgaccccttcgtgatcgtggagctgggccccccccacctgttccccctggtgagaagccagagaacccaggtgaagaccagaaccctgcaccccgtgtacgacgagctgttctacttcagcgtgcccgccgaggcctgcagaagaagagccgcctgcgtgctgttcaccgtgatggaccacgactggctgagcaccaacgacttcgccggcgaggccgccctgggcctgggcggcgtgaccggcgtggccagaccccaggtgggcggcggcgccagagccggccagcccgtgaccctgcacctgtgcagacccagagcccaggtgagaagcgccctgagaagactggagggcagaaccagcaaggaggcccaggagttcgtgaagaagctgaaggagctggagaagtgcatggaggccgacccctag

SEQ ID NO: 73976 - DNA, 3510 bp, synthetic construct; identical to SEQ ID NO: 73975
  misc_feature 1..3510: note = Description of Artificial Sequence: Synthetic coding sequence
  source 1..3510: mol_type = other DNA

SEQ ID NO: 73977 - DNA, 3351 bp, synthetic construct
  misc_feature 1..3351: note = Description of Artificial Sequence: Synthetic coding sequence
  source 1..3351: mol_type = other DNA
atgagcaccctgctggacatcaagagcagcgtgctgagacaggtgcaggtgtgccccagcttcagaagaagaaccgagcaggaccccggcagcgccagcgccgacccccaggagcccgccaccggcgcctggaagcccggcgacggcgtggagttcttcgcccacatgagactgatgctgaagaagggcgagggcagacagggcctgccctgcctggaggtgcccctgagaagcggcagccccgccccccccgagcccgtggaccccagcctgggcctgagagccctggcccccgaggaggtggagatgctgtacgaggaggccctgtacaccgtgctgtacagagccggcaccatgggccccgaccaggtggacgacgaggaggccctgctgagctacctgcagcaggtgttcggcaccagcctggaggagcacaccgaggccatcgagagagtgagaaaggccaaggcccccacctacgccctgaaggtgagcgtgatgagagccaagaacctgctggccaaggaccccaacggcttcagcgacccctactgcatgctgggcatcctgcccgccagcgacgccaccagagagcccagagcccagaaggagcagagattcggcttcagaaagggcagcaagagaggcggccccctgcccgccaagtgcatccaggtgaccgaggtgaagagcagcaccctgaaccccgtgtggaaggagcacttcctgttcgagatcgaggacgtgagcaccgaccagctgcacctggacatctgggaccacgacgacgacgtgagcctggtggaggcctgcagaaagctgaacgaggtgatcggcctgaagggcatgggcagatacttcaagcagatcgtgaagagcgccagagccaacggcaccgccggccccaccgaggaccacaccgacgacttcctgggctgcctgaacatccccgtgagaagagacaccgccatgagccagagaggcagaagcggcttcctgagccacctgctgctgctgagccacctgctgagactggagcacagcgccgaggagcccaacagcagcagctggagaggcgagctgagcacccccgccgccaccatcctgtgcctgcacggcgcccagagcaacctgagccccctgcagctggccgtgctgcactggcaggtgagcagcagacaccaccagacctgcaccctggactacagctacctgctgggcctgctggaggacatgcaggcccactgggaggaggcccccagcctgccccaggagcaggaggagagcctggccgacagcctgagcgccttcagcgagttcggcctgcagctgctgagacagctgagagactacttccccgccaccaacagcaccgccgtgcacagactggagctgctgctgaagtgcctgggcaagctgcagctgttccagcccagcttcgagatctgccccttcgagagcgagctgaacatggacatcgccgccgccctgaagagaggcaacagagagtggtacgacagaatcctgaacgacaagagccccagagagcagcccggcccccagagactgcccggcctggtggtgctggccgacgccgtgtacgacgacctgcagttctgctacagcgtgtacgccagcctgttccacagcatcctgaacgtggacgtgttcaccctgaccttcagacagctggagagactggtggccgaggaggcctgggtgctgaccgaggagctgagccccaagatgaccctggaggtggccagcggcctgttcgagctgtacctgaccctggccgacctgcagagattctgggacagcatccccggcagagacagcagaagcctggccctggccggcatccacgcccccttcctgcccgccgtgaagctgtggttccaggtgctgagagaccaggccaagtggagactgcagggcgccgtggacatggacaccctggagcccgtggacgccagcagcagacacagcagcagcgccgccaccgccggcctgtgcctgagccacatccaggagctgtgggtgagactggcctggcccgaccccgcccaggcccagggcctgggcacccagctgggccaggacgtgtgcgaggccaccctgttctacaccgagctgctgagaaagaaggtggacacccagcccggcgccgccggcgaggccgtgagcgaggccctgtgcgtggtgctgaacaacgtggagctggtgagaaaggccgccggccaggccctgaagggcctggcctggcccgagggcgccaccggccccgagggcgtgctgcccagacccctgctgagctgcacccaggccctggacgacgacctgcagagagaggcccacaccgtgaccgcccacctgaccagcaagatggtgggcgacatcagaaagtacgtgcagcacatcagcctgagccccgacagcatccagaacgacgaggccgtggcccccctgatgaagtacctggacgagaagctggccctgctgaacgccagcctggtgaagggcaacctgagcagagtgctggaggccctgtgggagctgctgctgcaggccatcctgcaggccctgggcgccaacagagacgtgagcgccgacttctacagcagattccacttcaccctggaggccctggtgagcttcttccacgccgagggccagggcctgcccctggagagcctgagagacggcagctacaagagactgaaggaggagctgagactgcacaagtgcagcaccagagagtgcatcgagcagttctacctggacaagctgaagcagagaaccctggagcagaacagattcggcagactgagcgtgagatgccactacgaggccgccgagcagagactggccgtggaggtgctgcacgccgccgacctgctgcccctggacgccaacggcctgagcgaccccttcgtgatcgtggagctgggccccccccacctgttccccctggtgagaagccagagaacccaggtgaagaccagaaccctgcaccccgtgtacgacgagctgttctacttcagcgtgcccgccgaggcctgcagaagaagagccgcctgcgtgctgttcaccgtgatggaccacgactggctgagcaccaacgacttcgccggcgaggccgccctgggcctgggcggcgtgaccggcgtggccagaccccaggtgggcggcggcgccagagccggccagcccgtgaccctgcacctgtgcagacccagagcccaggtgagaagcgccctgagaagactggagggcagaaccagcaaggaggcccaggagttcgtgaagaagctgaaggagctggagaagtgcatggaggccgacccctag

SEQ ID NO: 73978 - DNA, 3459 bp, synthetic construct
  misc_feature 1..3459: note = Description of Artificial Sequence: Synthetic coding sequence
  source 1..3459: mol_type = other DNA
atgagcaccctgctggacatcaagagcagcgtgctgagacaggtgcaggtgtgccccagcttcagaagaagaaccgagcaggaccccggcagcgccagcgccgacccccaggagcccgccaccggcgcctggaagcccggcgacggcgtggagttcttcgcccacatgagactgatgctgaagaagggcgagggcagacagggcctgccctgcctggaggtgcccctgagaagcggcagccccgccccccccgagcccgtggaccccagcctgggcctgagagccctggcccccgaggaggtggagatgctgtacgaggaggccctgtacaccgtgctgtacagagccggcaccatgggccccgaccaggtggacgacgaggaggccctgctgagctacctgcagcaggtgttcggcaccagcctggaggagcacaccgaggccatcgagagagtgagaaaggccaaggcccccacctacgccctgaaggtgagcgtgatgagagccaagaacctgctggccaaggaccccaacggcttcagcgacccctactgcatgctgggcatcctgcccgccagcgacgccaccagagagcccagagcccagaaggagcagagattcggcttcagaaagggcagcaagagaggcggccccctgcccgccaagtgcatccaggtgaccgaggtgaagagcagcaccctgaaccccgtgtggaaggagcacttcctgttcgagatcgaggacgtgagcaccgaccagctgcacctggacatctgggaccacgacgacgacgtgagcctggtggaggcctgcagaaagctgaacgaggtgatcggcctgaagggcatgggcagatacttcaagcagatcgtgaagagcgccagagccaacggcaccgccggccccaccgaggaccacaccgacgacttcctgggctgcctgaacatccccgtgagagaggtgcccgtggccggcgtggacagatggttcaagctggagcccagaagcagcgccagcagagtgcagggccactgccacctggtgctgaagctgatcaccacccagagagacaccgccatgagccagagaggcagaagcggcttcctgagccacctgctgctgctgagccacctgctgagactggagcacagcgccgaggagcccaacagcagcagctggagaggcgagctgagcacccccgccgccaccatcctgtgcctgcacggcgcccagagcaacctgagccccctgcagctggccgtgctgcactggcaggtgagcagcagacaccaccagacctgcaccctggactacagctacctgctgggcctgctggaggacatgcaggcccactgggaggaggcccccagcctgccccaggagcaggaggagagcctggccgacagcctgagcgccttcagcgagttcggcctgcagctgctgagacagctgagagactacttccccgccaccaacagcaccgccgtgcacagactggagctgctgctgaagtgcctgggcaagctgcagctgttccagcccagcttcgagatctgccccttcgagagcgagctgaacatggacatcgccgccgccctgaagagaggcaacagagagtggtacgacagaatcctgaacgacaagagccccagagagcagcccggcccccagagactgcccggcctggtggtgctggccgacgccgtgtacgacgacctgcagttctgctacagcgtgtacgccagcctgttccacagcatcctgaacgtggacgtgttcaccctgaccttcagacagctggagagactggtggccgaggaggcctgggtgctgaccgaggagctgagccccaagatgaccctggaggtggccagcggcctgttcgagctgtacctgaccctggccgacctgcagagattctgggacagcatccccggcagagacagcagaagcctggccctggccggcatccacgcccccttcctgcccgccgtgaagctgtggttccaggtgctgagagaccaggccaagtggagactgcagggcgccgtggacatggacaccctggagcccgtggacgccagcagcagacacagcagcagcgccgccaccgccggcctgtgcctgagccacatccaggagctgtgggtgagactggcctggcccgaccccgcccaggcccagggcctgggcacccagctgggccaggacgtgtgcgaggccaccctgttctacaccgagctgctgagaaagaaggtggacacccagcccggcgccgccggcgaggccgtgagcgaggccctgtgcgtggtgctgaacaacgtggagctggtgagaaaggccgccggccaggccctgaagggcctggcctggcccgagggcgccaccggccccgagggcgtgctgcccagacccctgctgagctgcacccaggccctggacgacgacctgcagagagaggcccacaccgtgaccgcccacctgaccagcaagatggtgggcgacatcagaaagtacgtgcagcacatcagcctgagccccgacagcatccagaacgacgaggccgtggcccccctgatgaagtacctggacgagaagctggccctgctgaacgccagcctggtgaagggcaacctgagcagagtgctggaggccctgtgggagctgctgctgcaggccatcctgcaggccctgggcgccaacagagacgtgagcgccgacttctacagcagattccacttcaccctggaggccctggtgagcttcttccacgccgagggccagggcctgcccctggagagcctgagagacggcagctacaagagactgaaggaggagctgagactgcacaagtgcagcaccagagagtgcatcgagcagttctacctggacaagctgaagcagagaaccctggagcagaacagattcggcagactgagcgtgagatgccactacgaggccgccgagcagagactggccgtggaggtgctgcacgccgccgacctgctgcccctggacgccaacggcctgagcgaccccttcgtgatcgtggagctgggccccccccacctgttccccctggtgagaagccagagaacccaggtgaagaccagaaccctgcaccccgtgtacgacgagctgttctacttcagcgtgcccgccgaggcctgcagaagaagagccgcctgcgtgctgttcaccgtgatggaccacgactggctgagcaccaacgacttcgccggcgaggccgccctgggcctgggcggcgtgaccggcgtggccagaccccaggtgggcggcggcgccagagccggccagcccgtgaccctgcacctgtgcagacccagagcccaggtgagaagcgccctgagaagactggagggcagaaccagcaaggaggcccaggagttcgtgaagaagctgaaggagctggagaagtgcatggaggccgacccctag

SEQ ID NO: 73979 - DNA, 537 bp, synthetic construct
  misc_feature 1..537: note = Description of Artificial Sequence: Synthetic coding sequence
  source 1..537: mol_type = other DNA
atgagccagagaggcagaagcggcttcctgagccacctgctgctgctgagccacctgctgagactggagcacagcgccgaggagcccaacagcagcagctggagaggcgagctgagcacccccgccgccaccatcctgtgcctgcacggcgcccagagcaacctgagccccctgcagctggccgtgctgcactggcaggtgagcagcagacaccaccagacctgcaccctggactacagctacctgctgggcctgctggaggacatgcaggcccactgggaggaggcccccagcctgccccaggagcaggaggagagcctggccgacagcctgagcgccttcagcgagttcggcctgcagctgctgagacagctgagagactacttccccgccaccaacagcaccgccgtgcacagactggagctgctgctgaagtgcctgggcaagctgcagctgttccagcccagcttcgagatctgccccagagtgggcgccgagcacggccactgctgcggccccgaggagagacagccctag

SEQ ID NO: 73980 - DNA, 1782 bp, synthetic construct
  misc_feature 1..1782: note = Description of Artificial Sequence: Synthetic coding sequence
  source 1..1782: mol_type = other DNA
atggccgccgccagcagcagcgacagcgacgcctgcggcgccgagagcaacgaggccaacagcaagtggctggacgcccactacgaccccatggccaacatccacaccttcagcgcctgcctggccctggccgacctgcacggcgacggcgagtacaagctggtggtgggcgacctgggccccggcggccagcagcccagactgaaggtgctgaagggccccctggtgatgaccgagagccccctgcccgccctgcccgccgccgccgccaccttcctgatggagcagcacgagcccagaacccccgccctggccctggccagcggcccctgcgtgtacgtgtacaagaacctgagaccctacttcaagttcagcctgccccagctgccccccaaccccctggagcaggacctgtggaaccaggccaaggaggacagaatcgaccccctgaccctgaaggagatgctggagagcatcagagagaccgccgaggagcccctgagcatccagagcctgagattcctgcagctggagctgagcgagatggaggccttcgtgaaccagcacaagagcaacagcatcaagagacagaccgtgatcaccaccatgaccaccctgaagaagaacctggccgacgaggacgccgtgagctgcctggtgctgggcaccgagaacaaggagctgctggtgctggaccccgaggccttcaccatcctggccaagatgagcctgcccagcgtgcccgtgttcctggaggtgagcggccagttcgacgtggagttcagactggccgccgcctgcagaaacggcaacatctacatcctgagaagagacagcaagcaccccaagtactgcatcgagctgagcgcccagcccgtgggcctgatcagagtgcacaaggtgctggtggtgggcagcacccaggacagcctgcacggcttcacccacaagggcaagaagctgtggaccgtgcagatgcccgccgccatcctgaccatgaacctgctggagcagcacagcagaggcctgcaggccgtgatggccggcctggccaacggcgaggtgagaatctacagagacaaggccctgctgaacgtgatccacacccccgacgccgtgaccagcctgtgcttcggcagatacggcagagaggacaacaccctgatcatgaccaccagaggcggcggcctgatcatcaagatcctgaagagaaccgccgtgttcgtggagggcggcagcgaggtgggccccccccccgcccaggccatgaagctgaacgtgcccagaaagaccagactgtacgtggaccagaccctgagagagagagaggccggcaccgccatgcacagagccttccagaccgacctgtacctgctgagactgagagccgccagagcctacctgcaggccctggagagcagcctgagccccctgagcaccaccgccagagagcccctgaagctgcacgccgtggtgcagggcctgggccccaccttcaagctgaccctgcacctgcagaacaccagcaccaccagacccgtgctgggcctgctggtgtgcttcctgtacaacgaggccctgtacagcctgcccagagccttcttcaaggtgcccctgctggtgcccggcctgaactaccccctggagaccttcgtggagagcctgagcaacaagggcatcagcgacatcatcaaggtgctggtgctgagagagggccagagcgcccccctgctgagcgcccacgtgaacatgcccggcagcgagggcctggccgccgcctag

SEQ ID NO: 73981 - DNA, 498 bp, synthetic construct
  misc_feature 1..498: note = Description of Artificial Sequence: Synthetic coding sequence
  source 1..498: mol_type = other DNA
atgagccccggcccccagctgtggcacctgctgcaggccctggtgagcatgtgcatcagaatcagcgaccccaccagcagcagcgcctgccccaactgcctgcagatcctgtggaacaagaccttcggcaccagacccaagagagagaccgccgaggagcccctgagcatccagagcctgagattcctgcagctggagctgagcgagatggaggccttcgtgaaccagcacaagagcaacagcatcaagagacagaccgtgatcaccaccatgaccaccctgaagaagaacctggccgacgaggacgccgtgagctgcctggtgctgggcaccgagaacaaggagctgctggtgctggaccccgaggccttcaccatcctggccaagatgagcctgcccagcgtgcccgtgttcctggaggtgagcggccagttcgacgtggagttcagactggccgccgcctgcagaaacggcaacatctacatcctgagaagatag

SEQ ID NO: 73982 - DNA, 2172 bp, synthetic construct
  misc_feature 1..2172: note = Description of Artificial Sequence: Synthetic coding sequence
  source 1..2172: mol_type = other DNA
atgctgagcagcatggccgccgccggcagcgtgaaggccgccctgcaggtggccgaggtgctggaggccatcgtgagctgctgcgtgggccccgagggcagacaggtgctgtgcaccaagcccaccggcgaggtgctgctgagcagaaacggcggcagactgctggaggccctgcacctggagcaccccatcgccagaatgatcgtggactgcgtgagcagccacctgaagaagaccggcgacggcgccaagaccttcatcatcttcctgtgccacctgctgagaggcctgcacgccatcaccgacagagagaaggaccccctgatgtgcgagaacatccagacccacggcagacactggaagaactgcagcagatggaagttcatcagccaggccctgctgaccttccagacccagatcctggacggcatcatggaccagtacctgagcagacacttcctgagcatcttcagcagcgccaaggagagaaccctgtgcagaagcagcctggagctgctgctggaggcctacttctgcggcagagtgggcagaaacaaccacaagttcatcagccagctgatgtgcgactacttcttcaagtgcatgacctgcaagagcggcatcggcgtgttcgagctggtggacgaccacttcgtggagctgaacgtgggcgtgaccggcctgcccgtgagcgacagcagaatcatcgccggcctggtgctgcagaaggacttcagcgtgtacagacccgccgacggcgacatgagaatggtgatcgtgaccgagaccatccagcccctgttcagcaccagcggcagcgagttcatcctgaacagcgaggcccagttccagaccagccagttctggatcatggagaagaccaaggccatcatgaagcacctgcacagccagaacgtgaagctgctgatcagcagcgtgaagcagcccgacctggtgagctactacgccggcgtgaacggcatcagcgtggtggagtgcctgagcagcgaggaggtgagcctgatcagaagaatcatcggcctgagccccttcgtgcccccccaggccttcagccagtgcgagatccccaacaccgccctggtgaagttctgcaagcccctgatcctgagaagcaagagatacgtgcacctgggcctgatcagcacctgcgccttcatcccccacagcatcgtgctgtgcggccccgtgcacggcctgatcgagcagcacgaggacgccctgcacggcgccctgaagatgctgagacagctgttcaaggacctggacctgaactacatgacccagaccaacgaccagaacggcaccagcagcctgttcatctacaagaacagcggcgagagctaccaggcccccgaccccggcaacggcagcatccagagaccctaccaggacaccgtggccgagaacaaggacgccctggagaagacccagacctacctgaaggtgcacagcaacctggtgatccccgacgtggagctggagacctacatcccctacagcacccccaccctgacccccaccgacaccttccagaccgtggagaccctgacctgcctgagcctggagagaaacagactgaccgactactacgagcccctgctgaagaacaacagcaccgcctacagcaccagaggcaacagaatcgagatcagctacgagaacctgcaggtgaccaacatcaccagaaagggcagcatgctgcccgtgagctgcaagctgcccaacatgggcaccagccagagctacctgagcagcagcatgcccgccggctgcgtgctgcccgtgggcggcaacttcgagatcctgctgcactactacctgctgaactacgccaagaagtgccaccagagcgaggagaccatggtgagcatgatcatcgccaacgccctgctgggcatccccaaggtgctgtacaagagcaagaccggcaagtacagcttcccccacacctacatcagagccgtgcacgccctgcagaccaaccagcccctggtgagcagccagaccggcctggagagcgtgatgggcaagtaccagctgctgaccagcgtgctgcagtgcctgaccaagatcctgaccatcgacatggtgatcaccgtgaagagacacccccagaaggtgcacaaccaggacagcgaggacgagctgtag

SEQ ID NO: 73983 - DNA, 2133 bp, synthetic construct
  misc_feature 1..2133: note = Description of Artificial Sequence: Synthetic coding sequence
  source 1..2133: mol_type = other DNA
atggtgatggcctgcagagtggtgaacaagagaagacacatgggcctgcagcagctgagcagcttcgccgagaccggcagaaccttcctgggccccctgaagagcagcaagttcatcatcgacgaggagtgccacgagagcgtgctgatcagcagcaccgtgagactgctggagagcctggacctgaccagcgccgtgggccagctgctgaacgaggccgtgcaggcccagaacaacacctacagaaccggcatcagcaccctgctgttcctggtgggcgcctggagcagcgccgtggaggagtgcctgcacctgggcgtgcccatcagcatcatcgtgagcgtgatgagcgagggcctgaacttctgcagcgaggaggtggtgagcctgcacgtgcccgtgcacaacatcttcgactgcatggacagcaccaagaccttcagccagctggagaccttcagcgtgagcctgtgccccttcctgcaggtgcccagcgacaccgacctgatcgaggagctgcacggcctgaaggacgtggccagccagaccctgaccatcagcaacctgagcggcagacccctgaagagctacgagctgttcaagccccagaccaaggtggaggccgacaacaacaccagcagaaccctgaagaacagcctgctggccgacacctgctgcagacagagcatcctgatccacagcagacacttcaacagaaccgacaacaccgagggcgtgagcaagcccgacggcttccaggagcacgtgaccgccacccacaagacctacagatgcaacgacctggtggagctggccgtgggcctgagccacggcgaccacagcagcatgaagctggtggaggaggccgtgcagctgcagtaccagaacgcctgcgtgcagcagggcaactgcaccaagcccttcatgttcgacatcagcagaatcttcacctgctgcctgcccggcctgcccgagaccagcagctgcgtgtgccccggctacatcaccgtggtgagcgtgagcaacaaccccgtgatcaaggagctgcagaaccagcccgtgagaatcgtgctgatcgagggcgacctgaccgagaactacagacacctgggcttcaacaagagcgccaacatcaagaccgtgctggacagcatgagactgcaggaggacagcagcgaggagctgtgggccaaccacgtgctgcaggtgctgatccagttcaaggtgaacctggtgctggtgcagggcaacgtgagcgagagactgatcgagaagtgcatcaacagcaagagactggtgatcggcagcgtgaacggcagcgtgatgcaggccttcgccgaggccgccggcgccgtgcaggtggcctacatcacccaggtgaacgaggactgcgtgggcgacggcgtgtgcgtgaccttctggagaagcagccccctggacgtggtggacagaaacaacagaatcgccatcctgctgaagaccgagggcatcaacctggtgaccgccgtgctgaccaaccccgtgaccgcccagatgcagatcaaggaggacagattctggacctgcgcctacagactgtactacgccctgaaggaggagaaggtgttcctgggcggcggcgccgtggagttcctgtgcctgagctgcctgcacatcctggccgagcagagcctgaagaaggagaaccacgcctgcagcggctggctgcacaacaccagcagctggctggccagcagcctggccatctacagacccaccgtgctgaagttcctggccaacggctggcagaagtacctgagcaccctgctgtacaacaccgccaactacagcagcgagttcgaggccagcacctacatccagcaccacctgcagaacgccaccgacagcggcagccccagcagctacatcctgaacgagtacagcaagctgaacagcagaatcttcaacagcgacatcagcaacaagctggagcagatccccagagtgtacgacgtggtgacccccaagatcgaggcctggagaagagccctggacctggtgctgctggtgctgcagaccgacagcgagatcatcaccggccacggccacacccagatcaacagccaggagctgaccggcttcctgttcctgtag

SEQ ID NO: 73984 - DNA, 576 bp, synthetic construct
  misc_feature 1..576: note = Description of Artificial Sequence: Synthetic coding sequence
  source 1..576: mol_type = other DNA
atggtgatggcctgcagagtggtgaacaagagaagacacatgggcctgcagcagctgagcagcttcgccgagaccggcagaaccttcctgggccccctgaagagcagcaagttcatcatcgacgaggagtgccacgagagcgtgctgatcagcagcaccgtgagactgctggagagcctggacctgaccagcgccgtgggccagctgctgaacgaggccgtgcaggcccagaacaacacctacagaaccggcatcagcaccctgctgttcctggtgggcgcctggagcagcgccgtggaggagtgcctgcacctgggcgtgcccatcagcatcatcgtgagcgtgatgagcgagggcctgaacttctgcagcgaggaggtggtgagcctgcacgtgcccgtgcacaacatcttcgactgcatggacagcaccaagaccttcagccagctggagaccttcagcgtgagcctgtgccccttcctgcaggtgcccagcgacaccgacctgatcgaggagctgcacggcctgaaggacgtggccagccagaccctgaccatcagcaacctgagcggctag

SEQ ID NO: 73985 - DNA, 2133 bp, synthetic construct; identical to SEQ ID NO: 73983
  misc_feature 1..2133: note = Description of Artificial Sequence: Synthetic coding sequence
  source 1..2133: mol_type = other DNA

SEQ ID NO: 73986 - DNA, 2166 bp, synthetic construct
  misc_feature 1..2166: note = Description of Artificial Sequence: Synthetic coding sequence
  source 1..2166: mol_type = other DNA
atgctgctgcccgtgttcaccctgaagctgagacacaagatcagccccagaatggtggccatcggcagatacgacggcacccacccctgcctggccgccgccacccagaccggcaaggtgttcatccacaacccccacaccagaaaccagcacgtgagcgccagcagagtgttccagagccccctggagagcgacgtgagcctgctgagcatcaaccaggccgtgagctgcctgaccgccggcgtgctgaaccccgagctgggctacgacgccctgctggtgggcacccagaccaacctgctggcctacgacgtgtacaacaacagcgacctgttctacagagaggtggccgacggcgccaacgccatcgtgctgggcaccctgggcgacatcagcagccccctggccatcatcggcggcaactgcgccctgcagggcttcaaccacgagggcagcgacctgttctggaccgtgaccggcgacaacgtgaacagcctggccctgtgcgacttcgacggcgacggcaagaaggagctgctggtgggcagcgaggacttcgacatcagagtgttcaaggaggacgagatcgtggccgagatgaccgagaccgagatcgtgaccagcctgtgccccatgtacggcagcagattcggctacgccctgagcaacggcaccgtgggcgtgtacgacaagaccagcagatactggagaatcaagagcaagaaccacgccatgagcatccacgccttcgacctgaacagcgacggcgtgaacgagctgatcaccggctggagcaacggcaaggtggacgccagaagcgacagaaccggcgaggtgatcttcaaggacaacttcagcagcgccatcgccggcgtggtggagggcgactacagaatggacggccacatccagctgatctgctgcagcgtggacggcgagatcagaggctacctgcccggcaccgccgagatgagaggcaacctgatggacaccagcgccgagcaggacctgatcagagagctgagccagaagaagcagaacctgctgctggagctgagaaactacgaggagaacgccaaggccgagctggccagccccctgaacgaggccgacggccacagaggcatcatccccgccaacaccagactgcacaccaccctgagcgtgagcctgggcaacgagacccagaccgcccacaccgagctgagaatcagcaccagcaacgacaccatcatcagagccgtgctgatcttcgccgagggcatcttcaccggcgagagccacgtggtgcaccccagcatccacaacctgagcagcagcatctgcatccccatcgtgccccccaaggacgtgcccgtggacctgcacctgaaggccttcgtgggctacagaagcagcacccagttccacgtgttcgagagcaccagacagctgcccagattcagcatgtacgccctgaccagcctggaccccgccagcgagcccatcagctacgtgaacttcaccatcgccgagagagcccagagagtggtggtgtggctgggccagaacttcctgctgcccgaggacacccacatccagaacgcccccttccaggtgtgcttcaccagcctgagaaacggcggccacctgcacatcaagatcaagctgagcggcgagatcaccatcaacaccgacgacatcgacctggccggcgacatcatccagagcatggccagcttcttcgccatcgaggacctgcaggtggaggccgacttccccgtgtacttcgaggagctgagaaaggtgctggtgaaggtggacgagtaccacagcgtgcaccagaagctgagcgccgacatggccgaccacagcaacctgatcagaagcctgctggtgggcgccgaggacgccagactgatgagagacatgaagaccatgaagagcagatacatggagctgtacgacctgaacagagacctgctgaacggctacaagatcagatgcaacaaccacaccgagctgctgggcaacctgaaggccgtgaaccaggccatccagagagccggcagactgagagtgggcaagcccaagaaccaggtgatcaccgcctgcagagacgccatcagaagcaacaacatcaacaccctgttcaagatcatgagagtgggcaccgccagcagctag

SEQ ID NO: 73987 - DNA, 1560 bp, synthetic construct
  misc_feature 1..1560: note = Description of Artificial Sequence: Synthetic coding sequence
  source 1..1560: mol_type = other DNA
atggccgaggagagagtggccaccagaacccagttccccgtgagcaccgagagccagaagcccagacagaagaaggcccccgagttccccatcctggagaagcagaactggctgatccacctgcactacatcagaaaggactacgaggcctgcaaggccgtgatcaaggagcagctgcaggagacccagggcctgtgcgagtacgccatctacgtgcaggccctgatcttcagactggagggcaacatccaggagagcctggagctgttccagacctgcgccgtgctgagcccccagagcgccgacaacctgaagcaggtggccagaagcctgttcctgctgggcaagcacaaggccgccatcgaggtgtacaacgaggccgccaagctgaaccagaaggactgggagatcagccacaacctgggcgtgtgctacatctacctgaagcagttcaacaaggcccaggaccagctgcacaacgccctgaacctgaacagacacgacctgacctacatcatgctgggcaagatccacctgctggagggcgacctggacaaggccatcgaggtgtacaagaaggccgtggagttcagccccgagaacaccgagctgctgaccaccctgggcctgctgtacctgcagctgggcatctaccagaaggccttcgagcacctgggcaacgccctgacctacgaccccaccaactacaaggccatcctggccgccggcagcatgatgcagacccacggcgacttcgacgtggccctgaccaagtacagagtggtggcctgcgccgtgcccgagagcccccccctgtggaacaacatcggcatgtgcttcttcggcaagaagaagtacgtggccgccatcagctgcctgaagagagccaactacctggcccccttcgactggaagatcctgtacaacctgggcctggtgcacctgaccatgcagcagtacgccagcgccttccacttcctgagcgccgccatcaacttccagcccaagatgggcgagctgtacatgctgctggccgtggccctgaccaacctggaggacatcgagaacgccaagagagcctacgccgaggccgtgcacctggacaagtgcaaccccctggtgaacctgaactacgccgtgctgctgtacaaccagggcgagaagaagaacgccctggcccagtaccaggagatggagaagaaggtgagcctgctgaaggacaacagcagcctggagttcgacagcgagatggtggagatggcccagaagctgggcgccgccctgcaggtgggcgaggccctggtgtggaccaagcccgtgaaggaccccaagagcaagcaccagaccaccagcaccagcaagcccgccagcttccagcagcccctgggcagcaaccaggccctgggccaggccatgagcagcgccgccgcctacagaaccctgcccagcggcgccggcggcaccagccagttcaccaagccccccagcctgcccctggagcccgagcccgccgtggagagcagccccaccgagaccagcgagcagatcagagagaagtag

SEQ ID NO: 73988 - DNA, 1584 bp, synthetic construct
  misc_feature 1..1584: note = Description of Artificial Sequence: Synthetic coding sequence
  source 1..1584: mol_type = other DNA
atggccctgaccgtggtgcccagcttcagcgtgagcggcgtgtggaagagaacccagttccccgtgagcaccgagagccagaagcccagacagaagaaggcccccgagttccccatcctggagaagcagaactggctgatccacctgcactacatcagaaaggactacgaggcctgcaaggccgtgatcaaggagcagctgcaggagacccagggcctgtgcgagtacgccatctacgtgcaggccctgatcttcagactggagggcaacatccaggagagcctggagctgttccagacctgcgccgtgctgagcccccagagcgccgacaacctgaagcaggtggccagaagcctgttcctgctgggcaagcacaaggccgccatcgaggtgtacaacgaggccgccaagctgaaccagaaggactgggagatcagccacaacctgggcgtgtgctacatctacctgaagcagttcaacaaggcccaggaccagctgcacaacgccctgaacctgaacagacacgacctgacctacatcatgctgggcaagatccacctgctggagggcgacctggacaaggccatcgaggtgtacaagaaggccgtggagttcagccccgagaacaccgagctgctgaccaccctgggcctgctgtacctgcagctgggcatctaccagaaggccttcgagcacctgggcaacgccctgacctacgaccccaccaactacaaggccatcctggccgccggcagcatgatgcagacccacggcgacttcgacgtggccctgaccaagtacagagtggtggcctgcgccgtgcccgagagcccccccctgtggaacaacatcggcatgtgcttcttcggcaagaagaagtacgtggccgccatcagctgcctgaagagagccaactacctggcccccttcgactggaagatcctgtacaacctgggcctggtgcacctgaccatgcagcagtacgccagcgccttccacttcctgagcgccgccatcaacttccagcccaagatgggcgagctgtacatgctgctggccgtggccctgaccaacctggaggacatcgagaacgccaagagagcctacgccgaggccgtgcacctggacaagtgcaaccccctggtgaacctgaactacgccgtgctgctgtacaaccagggcgagaagaagaacgccctggcccagtaccaggagatggagaagaaggtgagcctgctgaaggacaacagcagcctggagttcgacagcgagatggtggagatggcccagaagctgggcgccgccctgcaggtgggcgaggccctggtgtggaccaagcccgtgaaggaccccaagagcaagcaccagaccaccagcaccagcaagcccgccagcttccagcagcccctgggcagcaaccaggccctgggccaggccatgagcagcgccgccgcctacagaaccctgcccagcggcgccggcggcaccagccagttcaccaagccccccagcctgcccctggagcccgagcccgccgtggagagcagccccaccgagaccagcgagcagatcagagagaagtag

SEQ ID NO: 73989 - DNA, 1524 bp, synthetic construct
  misc_feature 1..1524: note = Description of Artificial Sequence: Synthetic coding sequence
  source 1..1524: mol_type = other DNA
atgatctggaacaccagaaacagcacctacatcttcaccgcccccgagttccccatcctggagaagcagaactggctgatccacctgcactacatcagaaaggactacgaggcctgcaaggccgtgatcaaggagcagctgcaggagacccagggcctgtgcgagtacgccatctacgtgcaggccctgatcttcagactggagggcaacatccaggagagcctggagctgttccagacctgcgccgtgctgagcccccagagcgccgacaacctgaagcaggtggccagaagcctgttcctgctgggcaagcacaaggccgccatcgaggtgtacaacgaggccgccaagctgaaccagaaggactgggagatcagccacaacctgggcgtgtgctacatctacctgaagcagttcaacaaggcccaggaccagctgcacaacgccctgaacctgaacagacacgacctgacctacatcatgctgggcaagatccacctgctggagggcgacctggacaaggccatcgaggtgtacaagaaggccgtggagttcagccccgagaacaccgagctgctgaccaccctgggcctgctgtacctgcagctgggcatctaccagaaggccttcgagcacctgggcaacgccctgacctacgaccccaccaactacaaggccatcctggccgccggcagcatgatgcagacccacggcgacttcgacgtggccctgaccaagtacagagtggtggcctgcgccgtgcccgagagcccccccctgtggaacaacatcggcatgtgcttcttcggcaagaagaagtacgtggccgccatcagctgcctgaagagagccaactacctggcccccttcgactggaagatcctgtacaacctgggcctggtgcacctgaccatgcagcagtacgccagcgccttccacttcctgagcgccgccatcaacttccagcccaagatgggcgagctgtacatgctgctggccgtggccctgaccaacctggaggacatcgagaacgccaagagagcctacgccgaggccgtgcacctggacaagtgcaaccccctggtgaacctgaactacgccgtgctgctgtacaaccagggcgagaagaagaacgccctggcccagtaccaggagatggagaagaaggtgagcctgctgaaggacaacagcagcctggagttcgacagcgagatggtggagatggcccagaagctgggcgccgccctgcaggtgggcgaggccctggtgtggaccaagcccgtgaaggaccccaagagcaagcaccagaccaccagcaccagcaagcccgccagcttccagcagcccctgggcagcaaccaggccctgggccaggccatgagcagcgccgccgcctacagaaccctgcccagcggcgccggcggcaccagccagttcaccaagccccccagcctgcccctggagcccgagcccgccgtggagagcagccccaccgagaccagcgagcagatcagagagaagtag

SEQ ID NO: 73990 - DNA, 1044 bp, synthetic construct
  misc_feature 1..1044: note = Description of Artificial Sequence: Synthetic coding sequence
  source 1..1044: mol_type = other DNA
atgctgggcaagatccacctgctggagggcgacctggacaaggccatcgaggtgtacaagaaggccgtggagttcagccccgagaacaccgagctgctgaccaccctgggcctgctgtacctgcagctgggcatctaccagaaggccttcgagcacctgggcaacgccctgacctacgaccccaccaactacaaggccatcctggccgccggcagcatgatgcagacccacggcgacttcgacgtggccctgaccaagtacagagtggtggcctgcgccgtgcccgagagcccccccctgtggaacaacatcggcatgtgcttcttcggcaagaagaagtacgtggccgccatcagctgcctgaagagagccaactacctggcccccttcgactggaagatcctgtacaacctgggcctggtgcacctgaccatgcagcagtacgccagcgccttccacttcctgagcgccgccatcaacttccagcccaagatgggcgagctgtacatgctgctggccgtggccctgaccaacctggaggacatcgagaacgccaagagagcctacgccgaggccgtgcacctggacaagtgcaaccccctggtgaacctgaactacgccgtgctgctgtacaaccagggcgagaagaagaacgccctggcccagtaccaggagatggagaagaaggtgagcctgctgaaggacaacagcagcctggagttcgacagcgagatggtggagatggcccagaagctgggcgccgccctgcaggtgggcgaggccctggtgtggaccaagcccgtgaaggaccccaagagcaagcaccagaccaccagcaccagcaagcccgccagcttccagcagcccctgggcagcaaccaggccctgggccaggccatgagcagcgccgccgcctacagaaccctgcccagcggcgccggcggcaccagccagttcaccaagccccccagcctgcccctggagcccgagcccgccgtggagagcagccccaccgagaccagcgagcagatcagagagaagtag

SEQ ID NO: 73991 - DNA, 1026 bp, synthetic construct
  misc_feature 1..1026: note = Description of Artificial Sequence: Synthetic coding sequence
  source 1..1026: mol_type = other DNA
atgagcgtgctggacgccctgtgggaggacagagacgtgagattcgacctgagcgcccagcagatgaagaccagacccggcgaggtgctgatcgactgcctggacagcatcgaggacaccaagggcaacaacggcgacagaggcagactgctggtgaccaacctgagaatcctgtggcacagcctggccctgagcagagtgaacgtgagcgtgggctacaactgcatcctgaacatcaccaccagaaccgccaacagcaagctgagaggccagaccgaggccctgtacatcctgaccaagtgcaacagcaccagattcgagttcatcttcaccaacctggtgcccggcagccccagactgttcaccagcgtgatggccgtgcacagagcctacgagaccagcaagatgtacagagacttcaagctgagaagcgccctgatccagaacaagcagctgagactgctgccccaggagcacgtgtacgacaagatcaacggcgtgtggaacctgagcagcgaccagggcaacctgggcaccttcttcatcaccaacgtgagaatcgtgtggcacgccaacatgaacgacagcttcaacgtgagcatcccctacctgcagatcagaagcatcaagatcagagacagcaagttcggcctggccctggtgatcgagagcagccagcagagcggcggctacgtgctgggcttcaagatcgaccccgtggagaagctgcaggagagcgtgaaggagatcaacagcctgcacaaggtgtacagcgccagccccatcttcggcgtggactacgagatggaggagaagccccagcccctggaggccctgaccgtggagcagatccaggacgacgtggagatcgacagcgacggccacaccgacgccttcgtggcctacttcgccgacggcaacaagcagcaggacagagagcccgtgttcagcgaggagctgggcctggccatcgagaagctgaaggacggcttcaccctgcagggcctgtgggaggtgatgagctag

SEQ ID NO: 73992 - DNA, 963 bp, synthetic construct
  misc_feature 1..963: note = Description of Artificial Sequence: Synthetic coding sequence
  source 1..963: mol_type = other DNA
atgagcgtgctggacgccctgtgggaggacagagacgtgagattcgacctgagcgcccagcagatgaagaccagacccggcgaggtgctgatcgactgcctggacagcatcgaggacaccaagggcaacaacggcgacagaggcagactgctggtgaccaacctgagaatcctgtggcacagcctggccctgagcagagtgaacgtgagcgtgggctacaactgcatcctgaacatcaccaccagaaccgccaacagcaagctgagaggccagaccgaggccctgtacatcctgaccaagtgcaacagcaccagattcgagttcatcttcaccaacctggtgcccggcagccccagactgttcaccagcgtgatggccgtgcacagagcctacgagaccagcaagatgtacagagacttcaagctgagaagcgccctgatccagaacaagcagctgagactgctgccccaggagcacgtgtacgacaagatcaacggcgtgtggaacctgagcagcgaccagggcaacctgggcaccttcttcatcaccaacgtgagaatcgtgtggcacgccaacatgaacgacagcttcaacgtgagcatcccctacctgcagatcagcggcggctacgtgctgggcttcaagatcgaccccgtggagaagctgcaggagagcgtgaaggagatcaacagcctgcacaaggtgtacagcgccagccccatcttcggcgtggactacgagatggaggagaagccccagcccctggaggccctgaccgtggagcagatccaggacgacgtggagatcgacagcgacggccacaccgacgccttcgtggcctacttcgccgacggcaacaagcagcaggacagagagcccgtgttcagcgaggagctgggcctggccatcgagaagctgaaggacggcttcaccctgcagggcctgtgggaggtgatgagctag

SEQ ID NO: 73993 - DNA, 1635 bp, synthetic construct
  misc_feature 1..1635: note = Description of Artificial Sequence: Synthetic coding sequence
  source 1..1635: mol_type = other DNA
atgagcgtgctggacgccctgtgggaggacagagacgtgagattcgacctgagcgcccagcagatgaagaccagacccggcgaggtgctgatcgactgcctggacagcatcgaggacaccaagggcaacaacggcgacagaggcagactgctggtgaccaacctgagaatcctgtggcacagcctggccctgagcagagtgaacgtgagcgtgggctacaactgcatcctgaacatcaccaccagaaccgccaacagcaagctgagaggccagaccgaggccctgtacatcctgaccaagtgcaacagcaccagattcgagttcatcttcaccaacctggtgcccggcagccccagactgttcaccagcgtgatggccgtgcacagagcctacgagaccagcaagatgtacagagacttcaagctgagaagcgccctgatccagaacaagcagctgagactgctgccccaggagcacgtgtacgacaagatcaacggcgtgtggaacctgagcagcgaccagggcaacctgggcaccttcttcatcaccaacgtgagaatcgtgtggcacgccaacatgaacgacagcttcaacgtgagcatcccctacctgcagatcagaagcatcaagatcagagacagcaagttcggcctggccctggtgatcgagagcagccagcagagcggcggctacgtgctgggcttcaagatcgaccccgtggagaagctgcaggagagcgtgaaggagatcaacagcctgcacaaggtgtacagcgccagccccatcttcggcgtggactacgagatggaggagaagccccagcccctggaggccctgaccgtggagcagatccaggacgacgtggagatcgacagcgacggccacaccgacgccttcgtggcctacttcgccgacggcaacaagctggacagcatcgccagcgagtgggtgggcctgccccccctgcccagcgccagatgcctgttcggcctgggcgaggtggacgacaagatctacgtggtggccggcaaggacctgcagaccgaggccagcctggacagcgtgctgtgctacgaccccgtggccgccaagtggaacgaggtgaagaagctgcccatcaaggtgtacggccacaacgtgatcagccacaagggcatgatctactgcctgggcggcaagaccgacgacaagaagtgcaccaacagagtgttcatcttcaaccccaagaagggcgactggaaggacctggcccccatgaagatccccagaagcatgttcggcgtggccgtgcacaagggcaagatcgtgatcgccggcggcgtgaccgaggacggcctgagcgccagcgtggaggccttcgacctgaccaccaacaagtgggacgtgatgaccgagttcccccaggagagaagcagcatcagcctggtgagcctggccggcagcctgtacgccatcggcggcttcgccatgatccagctggagagcaaggagttcgcccccaccgaggtgaacgacatctggaagtacgaggacgacaagaaggagtgggccggcatgctgaaggagatcagatacgccagcggcgccagctgcctggccaccagactgaacctgttcaagctgagcaagctgtag

SEQ ID NO: 73994 - DNA, 2148 bp, synthetic construct
  misc_feature 1..2148: note = Description of Artificial Sequence: Synthetic coding sequence
  source 1..2148: mol_type = other DNA
atggacctgatcctgaacagaatggactacctgcaggtgggcgtgaccagccagaagaccatgaagctgatccccgccagcagacacagagccacccagaaggtggtgatcggcgaccacgacggcgtggtgatgtgcttcggcatgaagaagggcgaggccgccgccgtgttcaagaccctgcccggccccaagatcgccagactggagctgggcggcgtgatcaacaccccccaggagaagatcttcatcgccgccgccagcgagatcagaggcttcaccaagagaggcaagcagttcctgagcttcgagaccaacctgaccgagagcatcaaggccatgcacatcagcggcagcgacctgttcctgagcgccagctacatctacaaccactactgcgactgcaaggaccagcactactacctgagcggcgacaagatcaacgacgtgatctgcctgcccgtggagagactgagcagaatcacccccgtgctggcctgccaggacagagtgctgagagtgctgcagggcagcgacgtgatgtacgccgtggaggtgcccggcccccccaccgtgctggccctgcacaacggcaacggcggcgacagcggcgaggacctgctgttcggcaccagcgacggcaagctggccctgatccagatcaccaccagcaagcccgtgagaaagtgggagatccagaacgagaagaagagaggcggcatcctgtgcatcgacagcttcgacatcgtgggcgacggcgtgaaggacctgctggtgggcagagacgacggcatggtggaggtgtacagcttcgacaacgccaacgagcccgtgctgagattcgaccagatgctgagcgagagcgtgaccagcatccagggcggctgcgtgggcaaggacagctacgacgagatcgtggtgagcacctacagcggctgggtgaccggcctgaccaccgagcccatccacaaggagagcggccccggcgaggagctgaagatcaaccaggagatgcagaacaagatcagcagcctgagaaacgagctggagcacctgcagtacaaggtgctgcaggagagagagaactaccagcagagcagccagagcagcaaggccaagagcgccgtgcccagcttcggcatcaacgacaagttcaccctgaacaaggacgacgccagctacagcctgatcctggaggtgcagaccgccatcgacaacgtgctgatccagagcgacgtgcccatcgacctgctggacgtggacaagaacagcgccgtggtgagcttcagcagctgcgacagcgagagcaacgacaacttcctgctggccacctacagatgccaggccgacaccaccagactggagctgaagatcagaagcatcgagggccagtacggcaccctgcaggcctacgtgacccccagaatccagcccaagacctgccaggtgagacagtaccacatcaagcccctgagcctgcaccagagaacccacttcatcgaccacgacagacccatgaacaccctgaccctgaccggccagttcagcttcgccgaggtgcacagctgggtggtgttctgcctgcccgaggtgcccgagaagccccccgccggcgagtgcgtgaccttctacttccagaacaccttcctggacacccagctggagagcacctacagaaagggcgagggcgtgttcaagagcgacaacatcagcaccatcagcatcctgaaggacgtgctgagcaaggaggccaccaagagaaagatcaacctgaacatcagctacgagatcaacgaggtgagcgtgaagcacaccctgaagctgatccaccccaagctggagtaccagctgctgctggccaagaaggtgcagctgatcgacgccctgaaggagctgcagatccacgagggcaacaccaacttcctgatccccgagtaccactgcatcctggaggaggccgaccacctgcaggaggagtacaagaagcagcccgcccacctggagagactgtacggcatgatcaccgacctgttcatcgacaagttcaagttcaagggcaccaacgtgaagaccaaggtgcccctgctgctggagatcctggacagctacgaccagaacgccctgatcagcttcttcgacgccgcctag

SEQ ID NO: 73995 - DNA, 2019 bp, synthetic construct
  misc_feature 1..2019: note = Description of Artificial Sequence: Synthetic coding sequence
  source 1..2019: mol_type = other DNA
atggacctgatcctgaacagaatggactacctgcaggtgggcgtgaccagccagaagaccatgaagctgatccccgccagcagacacagagccacccagaaggtggtgatcggcgaccacgacggcgtggtgatgtgcttcggcatgaagaagggcgaggccgccgccgtgttcaagaccctgcccggccccaagatcgccagactggagctgggcggcgtgatcaacaccccccaggagaagatcttcatcgccgccgccagcgagatcagaggcttcaccaagagaggcaagcagttcctgagcttcgagaccaacctgaccgagagcatcaaggccatgcacatcagcggcagcgacctgttcctgagcgccagctacatctacaaccactactgcgactgcaaggaccagcactactacctgagcggcgacaagatcaacgacgtgatctgcctgcccgtggagagactgagcagaatcacccccgtgctggcctgccaggacagagtgctgagagtgctgcagggcagcgacgtgatgtacgccgtggaggtgcccggcccccccaccgtgctggccctgcacaacggcaacggcggcgacagcggcgaggacctgctgttcggcaccagcgacggcaagctggccctgatccagatcaccaccagcaagcccgtgagaaagtgggagatccagaacgagaagaagagaggcggcatcctgtgcatcgacagcttcgacatcgtgggcgacggcgtgaaggacctgctggtgggcagagacgacggcatggtggaggtgtacagcttcgacaacgccaacgagcccgtgctgagattcgaccagatgctgagcgagagcgtgaccagcatccagggcggctgcgtgggcaaggacagctacgacgagatcgtggtgagcacctacagcggctgggtgaccggcctgaccaccgagcccatccacaaggagagcggccccggcgaggagctgaagatcaaccaggagatgcagaacaagatcagcagcctgagaaacgagctggagcacctgcagtacaaggtgctgcaggagagagagaactaccagcagagcagccagagcagcaaggccaagagcgccgtgcccagcttcggcatcaacgacaagttcaccctgaacaaggacgacgccagctacagcctgatcctggaggtgcagaccgccatcgacaacgtgctgatccagagcgacgtgcccatcgacctgctggacgtggacaagaacagcgccgtggtgagcttcagcagctgcgacagcgagagcaacgacaacttcctgctggccacctacagatgccaggccgacaccaccagactggagctgaagatcagaagcatcgagggccagtacggcaccctgcaggcctacgtgacccccagaatccagcccaagacctgccaggtgagacagtaccacatcaagcccctgagcctgcaccagagaacccacttcatcgaccacgacagacccatgaacaccctgaccctgaccggccagttcagcttcgccgaggtgcacagctgggtggtgttctgcctgcccgaggtgcccgagaagccccccgccggcgagtgcgtgaccttctacttccagaacaccttcctggacacccagctggagagcacctacagaaagggcgagggcgtgttcaagagcgacaacatcagcaccatcagcatcctgaaggacgtgctgagcaaggaggccaccaagagaaagatcaacctgaacatcagctacgagatcaacgaggtgagcgtgaagcacaccctgaagctgatccaccccaagctggagtaccagctgctgctggccaagaaggtgcagctgatcgacgccctgaaggagctgcagatccacgagggcaacaccaacttcctgatccccgagtaccactgcatcctggaggaggccgaccacctgcaggaggagtacaagaagcagcccgcccacctggagagactgtacggctag

SEQ ID NO: 73996 - DNA, 417 bp, synthetic construct
  misc_feature 1..417: note = Description of Artificial Sequence: Synthetic coding sequence
  source 1..417: mol_type = other DNA
gacgtgctgagcaaggaggccaccaagagaaagatcaacctgaacatcagctacgagatcaacgaggtgagcgtgaagcacaccctgaagctgatccaccccaagctggagtaccagctgctgctggccaagaaggtgcagctgatcgacgccctgaaggagctgcagatccacgagggcaacaccaacttcctgatccccgagtaccactgcatcctggaggaggccgaccacctgcaggaggagtacaagaagcagcccgcccacctggagagactgtacggcatgatcaccgacctgttcatcgacaagttcaagttcaagggcaccaacgtgaagaccaaggtgcccctgctgctggagatcctggacagctacgaccagaacgccctgatcagcttcttcgacgccgcctag

SEQ ID NO: 73997 - DNA, 2664 bp, synthetic construct
  misc_feature 1..2664: note = Description of Artificial Sequence: Synthetic coding sequence
  source 1..2664: mol_type = other DNA
atgagcctgttcaaggccagagactggtggagcaccatcctgggcgacaaggaggagttcgaccagggctgcctgtgcctggccaacgtggacaacagcggcaacggccaggacaagatcatcgtgggcagcttcatgggctacctgagaatcttcagcccccaccccgccaagaccggcgacggcgcccaggccgaggacctgctgctggaggtggacctgagagaccccgtgctgcaggtggaggtgggcaagttcgtgagcggcaccgagatgctgcacctggccgtgctgcacagcagaaagctgtgcgtgtacagcgtgagcggcaccctgggcaacgtggagcacggcaaccagtgccagatgaagctgatgtacgagcacaacctgcagagaaccgcctgcaacatgacctacggcagcttcggcggcgtgaagggcagagacctgatctgcatccagagcatggacggcatgctgatggtgttcgagcaggagagctacgccttcggcagattcctgcccggcttcctgctgcccggccccctggcctacagcagcagaaccgacagcttcctgaccgtgagcagctgccagcaggtggagagctacaagtaccaggtgctggccttcgccaccgacgccgacaagagacaggagaccgagcagcagaagctgggcagcggcaagagactggtggtggactggaccctgaacatcggcgagcaggccctggacatctgcatcgtgagcttcaaccagagcgccagcagcgtgttcgtgctgggcgagagaaacttcttctgcctgaaggacaacggccagatcagattcatgaagaagctggactggagccccagctgcttcctgccctactgcagcgtgagcgagggcaccatcaacaccctgatcggcaaccacaacaacatgctgcacatctaccaggacgtgaccctgaagtgggccacccagctgccccacatccccgtggccgtgagagtgggctgcctgcacgacctgaagggcgtgatcgtgaccctgagcgacgacggccacctgcagtgcagctacctgggcaccgaccccagcctgttccaggcccccaacgtgcagagcagagagctgaactacgacgagctggacgtggagatgaaggagctgcagaagatcatcaaggacgtgaacaagagccagggcgtgtggcccatgaccgagagagaggacgacctgaacgtgagcgtggtggtgagccccaacttcgacagcgtgagccaggccaccgacgtggaggtgggcaccgacctggtgcccagcgtgaccgtgaaggtgaccctgcagaacagagtgatcctgcagaaggccaagctgagcgtgtacgtgcagccccccctggagctgacctgcgaccagttcaccttcgagttcatgacccccgacctgaccagaaccgtgagcttcagcgtgtacctgaagagaagctacacccccagcgagctggagggcaacgccgtggtgagctacagcagacccaccgacagaaaccccgacggcatccccagagtgatccagtgcaagttcagactgcccctgaagctgatctgcctgcccggccagcccagcaagaccgccagccacaagatcaccatcgacaccaacaagagccccgtgagcctgctgagcctgttccccggcttcgccagccagagcgacgacgaccaggtgaacgtgatgggcttccacttcctgggcggcgccagaatcaccgtgctggccagcaagaccagccagagatacagaatccagagcgagcagttcgaggacctgtggctgatcaccaacgagctgatcctgagactgcaggagtacttcgagaagcagggcgtgaaggacttcgcctgcagcttcagcggcagcatccccctgcaggagtacttcgagctgatcgaccaccacttcgagctgagaatcaacggcgagaagctggaggagctgctgagcgagagagccgtgcagttcagagccatccagagaagactgctggccagattcaaggacaagacccccgcccccctgcagcacctggacaccctgctggacggcacctacaagcaggtgatcgccctggccgacgccgtggaggagaaccagggcaacctgttccagagcttcaccagactgaagagcgccacccacctggtgatcctgctgatcgccctgtggcagaagctgagcgccgaccaggtggccatcctggaggccgccttcctgcccctgcaggaggacacccaggagctgggctgggaggagaccgtggacgccgccatcagccacctgctgaagacctgcctgagcaagagcagcaaggagcaggccctgaacctgaacagccagctgaacatccccaaggacaccagccagctgaagaagcacatcaccctgctgtgcgacagactgagcaagggcggcagactgtgcctgagcaccgacgccgccgccccccagaccatggtgatgcccggcggctgcaccaccatccccgagagcgacctggaggagagaagcgtggagcaggacagcaccgagctgttcaccaaccacagacacctgaccgccgagacccccagacccgaggtgagccccctgcagggcgtgagcgagtag

SEQ ID NO: 73998 - DNA, 2544 bp, synthetic construct
  misc_feature 1..2544: note = Description of Artificial Sequence: Synthetic coding sequence
  source 1..2544: mol_type = other DNA
atgagcctgttcaaggccagagactggtggagcaccatcctgggcgacaaggaggagttcgaccagggctgcctgtgcctggccaacgtggacaacagcggcaacggccaggacaagatcatcgtgggcagcttcatgggctacctgagaatcttcagcccccaccccgccaagaccggcgacggcgcccaggccgaggacctgctgctggaggtggacctgagagaccccgtgctgcaggtggaggtgggcaagttcgtgagcggcaccgagatgctgcacctggccgtgctgcacagcagaaagctgtgcgtgtacagcgtgagcggcaccctgggcaacgtggagcacggcaaccagtgccagatgaagctgatgtacgagcacaacctgcagagaaccgcctgcaacatgacctacggcagcttcggcggcgtgaagggcagagacctgatctgcatccagagcatggacggcatgctgatggtgttcgagcaggagagctacgccttcggcagattcctgcccggcttcctgctgcccggccccctggcctacagcagcagaaccgacagcttcctgaccgtgagcagctgccagcaggtggagagctacaagtaccaggtgctggccttcgccaccgacgccgacaagagacaggagaccgagcagcagaagctgggcagcggcaagagactggtggtggactggaccctgaacatcggcgagcaggccctggacatctgcatcgtgagcttcaaccagagcgccagcagcgtgttcgtgctgggcgagagaaacttcttctgcctgaaggacaacggccagatcagattcatgaagaagctggactggagccccagctgcttcctgccctactgcagcgtgagcgagggcaccatcaacaccctgatcggcaaccacaacaacatgctgcacatctaccaggacgtgaccctgaagtgggccacccagctgccccacatccccgtggccgtgagagtgggctgcctgcacgacctgaagggcgtgatcgtgaccctgagcgacgacggccacctgcagtgcagctacctgggcaccgaccccagcctgttccaggcccccaacgtgcagagcagagagctgaactacgacgagctggacgtggagatgaaggagctgcagaagatcatcaaggacgtgaacaagagccagggcgtgtggcccatgaccgagagagaggacgacctgaacgtgagcgtggtggtgagccccaacttcgacagcgtgagccaggccaccgacgtggaggtgggcaccgacctggtgcccagcgtgaccgtgaaggtgaccctgcagaacagagtgatcctgcagaaggccaagctgagcgtgtacgtgcagccccccctggagctgacctgcgaccagttcaccttcgagttcatgagcatccccagagtgatccagtgcaagttcagactgcccctgaagctgatctgcctgcccggccagcccagcaagaccgccagccacaagatcaccatcgacaccaacaagagccccgtgagcctgctgagcctgttccccggcttcgccagccagagcgacgacgaccaggtgaacgtgatgggcttccacttcctgggcggcgccagaatcaccgtgctggccagcaagaccagccagagatacagaatccagagcgagcagttcgaggacctgtggctgatcaccaacgagctgatcctgagactgcaggagtacttcgagaagcagggcgtgaaggacttcgcctgcagcttcagcggcagcatccccctgcaggagtacttcgagctgatcgaccaccacttcgagctgagaatcaacggcgagaagctggaggagctgctgagcgagagagccgtgcagttcagagccatccagagaagactgctggccagattcaaggacaagacccccgcccccctgcagcacctggacaccctgctggacggcacctacaagcaggtgatcgccctggccgacgccgtggaggagaaccagggcaacctgttccagagcttcaccagactgaagagcgccacccacctggtgatcctgctgatcgccctgtggcagaagctgagcgccgaccaggtggccatcctggaggccgccttcctgcccctgcaggaggacacccaggagctgggctgggaggagaccgtggacgccgccatcagccacctgctgaagacctgcctgagcaagagcagcaaggagcaggccctgaacctgaacagccagctgaacatccccaaggacaccagccagctgaagaagcacatcaccctgctgtgcgacagactgagcaagggcggcagactgtgcctgagcaccgacgccgccgccccccagaccatggtgatgcccggcggctgcaccaccatccccgagagcgacctggaggagagaagcgtggagcaggacagcaccgagctgttcaccaaccacagacacctgaccgccgagacccccagacccgaggtgagccccctgcagggcgtgagcgagtag

SEQ ID NO: 73999 - DNA, 2559 bp, synthetic construct
  misc_feature 1..2559: note = Description of Artificial Sequence: Synthetic coding sequence
  source 1..2559: mol_type = other DNA
atgagcctgttcaaggccagagactggtggagcaccatcctgggcgacaaggaggagttcgaccagggctgcctgtgcctggccaacgtggacaacagcggcaacggccaggacaagatcatcgtgggcagcttcatgggctacctgagaatcttcagcccccaccccgccaagaccggcgacggcgcccaggccgaggacctgctgctggaggtggacctgagagaccccgtgctgcaggtggaggtgggcaagttcgtgagcggcaccgagatgctgcacctggccgtgctgcacagcagaaagctgtgcgtgtacagcgtgagcggcaccctgggcaacgtggagcacggcaaccagtgccagatgaagctgatgtacgagcacaacctgcagagaaccgcctgcaacatgacctacggcagcttcggcggcgtgaagggcagagacctgatctgcatccagagcatggacggcatgctgatggtgttcgagcaggagagctacgccttcggcagattcctgcccggcttcctgctgcccggccccctggcctacagcagcagaaccgacagcttcctgaccgtgagcagctgccagcaggtggagagctacaagtaccaggtgctggccttcgccaccgacgccgacaagagacaggagaccgagcagcagaagctgggcagcggcaagagactggtggtggactggaccctgaacatcggcgagcaggccctggacatctgcatcgtgagcttcaaccagagcgccagcagcgtgttcgtgctgggcgagagaaacttcttctgcctgaaggacaacggccagatcagattcatgaagaagctggactggagccccagctgcttcctgccctactgcagcgtgagcgagggcaccatcaacaccctgatcggcaaccacaacaacatgctgcacatctaccaggacgtgaccctgaagtgggccacccagctgccccacatccccgtggccgtgagagtgggctgcctgcacgacctgaagggcgtgatcgtgaccctgagcgacgacggccacctgcagtgcagctacctgggcaccgaccccagcctgttccaggcccccaacgtgcagagcagagagctgaactacgacgagctggacgtggagatgaaggagctgcagaagatcatcaaggacgtgaacaagagccagggcgtgtggcccatgaccgagagagaggacgacctgaacgtgagcgtggtggtgagccccaacttcgacagcgtgagccaggccaccgacgtggaggtgggcaccgacctggtgcccagcgtgaccgtgaaggtgaccctgcagaacagagtgatcctgcagaaggccaagctgagcgtgtacgtgcagccccccctggagctgacctgcgaccagttcaccttcgagttcatgagcctgaacgtgctgggcatccccagagtgatccagtgcaagttcagactgcccctgaagctgatctgcctgcccggccagcccagcaagaccgccagccacaagatcaccatcgacaccaacaagagccccgtgagcctgctgagcctgttccccggcttcgccagccagagcgacgacgaccaggtgaacgtgatgggcttccacttcctgggcggcgccagaatcaccgtgctggccagcaagaccagccagagatacagaatccagagcgagcagttcgaggacctgtggctgatcaccaacgagctgatcctgagactgcaggagtacttcgagaagcagggcgtgaaggacttcgcctgcagcttcagcggcagcatccccctgcaggagtacttcgagctgatcgaccaccacttcgagctgagaatcaacggcgagaagctggaggagctgctgagcgagagagccgtgcagttcagagccatccagagaagactgctggccagattcaaggacaagacccccgcccccctgcagcacctggacaccctgctggacggcacctacaagcaggtgatcgccctggccgacgccgtggaggagaaccagggcaacctgttccagagcttcaccagactgaagagcgccacccacctggtgatcctgctgatcgccctgtggcagaagctgagcgccgaccaggtggccatcctggaggccgccttcctgcccctgcaggaggacacccaggagctgggctgggaggagaccgtggacgccgccatcagccacctgctgaagacctgcctgagcaagagcagcaaggagcaggccctgaacctgaacagccagctgaacatccccaaggacaccagccagctgaagaagcacatcaccctgctgtgcgacagactgagcaagggcggcagactgtgcctgagcaccgacgccgccgccccccagaccatggtgatgcccggcggctgcaccaccatccccgagagcgacctggaggagagaagcgtggagcaggacagcaccgagctgttcaccaaccacagacacctgaccgccgagacccccagacccgaggtgagccccctgcagggcgtgagcgagtag

SEQ ID NO: 74000 - DNA, 2649 bp, synthetic construct
  misc_feature 1..2649: note = Description of Artificial Sequence: Synthetic coding sequence
  source 1..2649: mol_type = other DNA
atgagcctgttcaaggccagagactggtggagcaccatcctgggcgacaaggaggagttcgaccagggctgcctgtgcctggccaacgtggacaacagcggcaacggccaggacaagatcatcgtgggcagcttcatgggctacctgagaatcttcagcccccaccccgccaagaccggcgacggcgcccaggccgaggacctgctgctggaggtggacctgagagaccccgtgctgcaggtggaggtgggcaagttcgtgagcggcaccgagatgctgcacctggccgtgctgcacagcagaaagctgtgcgtgtacagcgtgagcggcaccctgggcaacgtggagcacggcaaccagtgccagatgaagctgatgtacgagcacaacctgcagagaaccgcctgcaacatgacctacggcagcttcggcggcgtgaagggcagagacctgatctgcatccagagcatggacggcatgctgatggtgttcgagcaggagagctacgccttcggcagattcctgcccggcttcctgctgcccggccccctggcctacagcagcagaaccgacagcttcctgaccgtgagcagctgccagcaggtggagagctacaagtaccaggtgctggccttcgccaccgacgccgacaagagacaggagaccgagcagcagaagctgggcagcggcaagagactggtggtggactggaccctgaacatcggcgagcaggccctggacatctgcatcgtgagcttcaaccagagcgccagcagcgtgttcgtgctgggcgagagaaacttcttctgcctgaaggacaacggccagatcagattcatgaagaagctggactggagccccagctgcttcctgccctactgcagcgtgagcgagggcaccatcaacaccctgatcggcaaccacaacaacatgctgcacatctaccaggacgtgaccctgaagtgggccacccagctgccccacatccccgtggccgtgagagtgggctgcctgcacgacctgaagggcgtgatcgtgaccctgagcgacgacggccacctgcagtgcagctacctgggcaccgaccccagcctgttccaggcccccaacgtgcagagcagagagctgaactacgacgagctggacgtggagatgaaggagctgcagaagatcatcaaggacgtgaacaagagccagggcgtgtggcccatgaccgagagagaggacgacctgaacgtgagcgtggtggtgagccccaacttcgacagcgtgagccaggccaccgacgtggaggtgggcaccgacctggtgcccagcgtgaccgtgaaggtgaccctgcagaacagagtgatcctgcagaaggccaagctgagcgtgtacgtgcagccccccctggagctgacctgcgaccagttcaccttcgagttcatgacccccgacctgaccagaaccgtgagcttcagcgtgtacctgaagagaagctacacccccagcgagctggagggcaacgccgtggtgagctacagcagacccaccggcatccccagagtgatccagtgcaagttcagactgcccctgaagctgatctgcctgcccggccagcccagcaagaccgccagccacaagatcaccatcgacaccaacaagagccccgtgagcctgctgagcctgttccccggcttcgccagccagagcgacgacgaccaggtgaacgtgatgggcttccacttcctgggcggcgccagaatcaccgtgctggccagcaagaccagccagagatacagaatccagagcgagcagttcgaggacctgtggctgatcaccaacgagctgatcctgagactgcaggagtacttcgagaagcagggcgtgaaggacttcgcctgcagcttcagcggcagcatccccctgcaggagtacttcgagctgatcgaccaccacttcgagctgagaatcaacggcgagaagctggaggagctgctgagcgagagagccgtgcagttcagagccatccagagaagactgctggccagattcaaggacaagacccccgcccccctgcagcacctggacaccctgctggacggcacctacaagcaggtgatcgccctggccgacgccgtggaggagaaccagggcaacctgttccagagcttcaccagactgaagagcgccacccacctggtgatcctgctgatcgccctgtggcagaagctgagcgccgaccaggtggccatcctggaggccgccttcctgcccctgcaggaggacacccaggagctgggctgggaggagaccgtggacgccgccatcagccacctgctgaagacctgcctgagcaagagcagcaaggagcaggccctgaacctgaacagccagctgaacatccccaaggacaccagccagctgaagaagcacatcaccctgctgtgcgacagactgagcaagggcggcagactgtgcctgagcaccgacgccgccgccccccagaccatggtgatgcccggcggctgcaccaccatccccgagagcgacctggaggagagaagcgtggagcaggacagcaccgagctgttcaccaaccacagacacctgaccgccgagacccccagacccgaggtgagccccctgcagggcgtgagcgagtag

SEQ ID NO: 74001 - DNA, 1446 bp, synthetic construct
  misc_feature 1..1446: note = Description of Artificial Sequence: Synthetic coding sequence
  source 1..1446: mol_type = other DNA
atgagcctgttcaaggccagagactggtggagcaccatcctgggcgacaaggaggagttcgaccagggctgcctgtgcctggccaacgtggacaacagcggcaacggccaggacaagatcatcgtgggcagcttcatgggctacctgagaatcttcagcccccaccccgccaagaccggcgacggcgcccaggccgaggacctgctgctggaggtggacctgagagaccccgtgctgcaggtggaggtgggcaagttcgtgagcggcaccgagatgctgcacctggccgtgctgcacagcagaaagctgtgcgtgtacagcgtgagcggcaccctgggcaacgtggagcacggcaaccagtgccagatgaagctgatgtacgagcacaacctgcagagaaccgcctgcaacatgacctacggcagcttcggcggcgtgaagggcagagacctgatctgcatccagagcatggacggcatgctgatggtgttcgagcaggagagctacgccttcggcagattcctgcccggcttcctgctgcccggccccctggcctacagcagcagaaccgacagcttcctgaccgtgagcagctgccagcaggtggagagctacaagtaccaggtgctggccttcgccaccgacgccgacaagagacaggagaccgagcagcagaagctgggcagcggcaagagactggtggtggactggaccctgaacatcggcgagcaggccctggacatctgcatcgtgagcttcaaccagagcgccagcagcgtgttcgtgctgggcgagagaaacttcttctgcctgaaggacaacggccagatcagattcatgaagaagctggactggagccccagctgcttcctgccctactgcagcgtgagcgagggcaccatcaacaccctgatcggcaaccacaacaacatgctgcacatctaccaggacgtgaccctgaagtgggccacccagctgccccacatccccgtggccgtgagagtgggctgcctgcacgacctgaagggcgtgatcgtgaccctgagcgacgacggccacctgcagtgcagctacctgggcaccgaccccagcctgttccaggcccccaacgtgcagagcagagagctgaactacgacgagctggacgtggagatgaaggagctgcagaagatcatcaaggacgtgaacaagagccagggcgtgtggcccatgaccgagagagaggacgacctgaacgtgagcgtggtggtgagccccaacttcgacagcgtgagccaggccaccgacgtggaggtgggcaccgacctggtgcccagcgtgaccgtgaaggtgaccctgcagaacagagtgatcctgcagaaggccaagctgagcgtgtacgtgcagccccccctggagctgacctgcgaccagttcaccttcgagttcatgaacttccccagctag

SEQ ID NO: 74002 - DNA, 2559 bp, synthetic construct
  misc_feature 1..2559: note = Description of Artificial Sequence: Synthetic coding sequence
  source 1..2559: mol_type = other DNA
atgagcctgttcaaggccagagactggtggagcaccatcctgggcgacaaggaggagttcgaccagggctgcctgtgcctggccaacgtggacaacagcggcaacggccaggacaagatcatcgtgggcagcttcatgggctacctgagaatcttcagcccccaccccgccaagaccggcgacggcgcccaggccgaggacctgctgctggaggtggacctgagagaccccgtgctgcaggtggaggtgggcaagttcgtgagcggcaccgagatgctgcacctggccgtgctgcacagcagaaagctgtgcgtgtacagcgtgagcggcaccctgggcaacgtggagcacggcaaccagtgccagatgaagctgatgtacgagcacaacctgcagagaaccgcctgcaacatgacctacggcagcttcggcggcgtgaagggcagagacctgatctgcatccagagcatggacggcatgctgatggtgttcgagcaggagagctacgccttcggcagattcctgcccggcttcctgctgcccggccccctggcctacagcagcagaaccgacagcttcctgaccgtgagcagctgccagcaggtggagagctacaagtaccaggtgctggccttcgccaccgacgccgacaagagacaggagaccgagcagcagaagctgggcagcggcaagagactggtggtggactggaccctgaacatcggcgagcaggccctggacatctgcatcgtgagcttcaaccagagcgccagcagcgtgttcgtgctgggcgagagaaacttcttctgcctgaaggacaacggccagatcagattcatgaagaagctggactggagccccagctgcttcctgccctactgcagcgtgagcgagggcaccatcaacaccctgatcggcaaccacaacaacatgctgcacatctaccaggacgtgaccctgaagtgggccacccagctgccccacatccccgtggccgtgagagtgggctgcctgcacgacctgaagggcgtgatcgtgaccctgagcgacgacggccacctgcagtgcagctacctgggcaccgaccccagcctgttccaggcccccaacgtgcagagcagagagctgaactacgacgagctggacgtggagatgaaggagctgcagaagatcatcaaggacgtgaacaagagccagggcgtgtggcccatgaccgagagagaggacgacctgaacgtgagcgtggtggtgagccccaacttcgacagcgtgagccaggccaccgacgtggaggtgggcaccgacctggtgcccagcgtgaccgtgaaggtgaccctgcagaacagagtgatcctgcagaaggccaagctgagcgtgtacgtgcagccccccctggagctgacctgcgaccagttcaccttcgagttcatgaacagaaaccccgacggcatccccagagtgatccagtgcaagttcagactgcccctgaagctgatctgcctgcccggccagcccagcaagaccgccagccacaagatcaccatcgacaccaacaagagccccgtgagcctgctgagcctgttccccggcttcgccagccagagcgacgacgaccaggtgaacgtgatgggcttccacttcctgggcggcgccagaatcaccgtgctggccagcaagaccagccagagatacagaatccagagcgagcagttcgaggacctgtggctgatcaccaacgagctgatcctgagactgcaggagtacttcgagaagcagggcgtgaaggacttcgcctgcagcttcagcggcagcatccccctgcaggagtacttcgagctgatcgaccaccacttcgagctgagaatcaacggcgagaagctggaggagctgctgagcgagagagccgtgcagttcagagccatccagagaagactgctggccagattcaaggacaagacccccgcccccctgcagcacctggacaccctgctggacggcacctacaagcaggtgatcgccctggccgacgccgtggaggagaaccagggcaacctgttccagagcttcaccagactgaagagcgccacccacctggtgatcctgctgatcgccctgtggcagaagctgagcgccgaccaggtggccatcctggaggccgccttcctgcccctgcaggaggacacccaggagctgggctgggaggagaccgtggacgccgccatcagccacctgctgaagacctgcctgagcaagagcagcaaggagcaggccctgaacctgaacagccagctgaacatccccaaggacaccagccagctgaagaagcacatcaccctgctgtgcgacagactgagcaagggcggcagactgtgcctgagcaccgacgccgccgccccccagaccatggtgatgcccggcggctgcaccaccatccccgagagcgacctggaggagagaagcgtggagcaggacagcaccgagctgttcaccaaccacagacacctgaccgccgagacccccagacccgaggtgagccccctgcagggcgtgagcgagtag

SEQ ID NO: 74003 - DNA, 2664 bp, synthetic construct
  misc_feature 1..2664: note = Description of Artificial Sequence: Synthetic coding sequence
  source 1..2664: mol_type = other DNA
atgagcctgttcaaggccagagactggtggagcaccatcctgggcgacaaggaggagttcgaccagggctgcctgtgcctggccaacgtggacaacagcggcaacggccaggacaagatcatcgtgggcagcttcatgggctacctgagaatcttcagcccccaccccgccaagaccggcgacggcgcccaggccgaggacctgctgctggaggtggacctgagagaccccgtgctgcaggtggaggtgggcaagttcgtgagcggcaccgagatgctgcacctggccgtgctgcacagcagaaagctgtgcgtgtacagcgtgagcggcaccctgggcaacgtggagcacggcaaccagtgccagatgaagctgatgtacgagcacaacctgcagagaaccgcctgcaacatgacctacggcagcttcggcggcgtgaagggcagagacctgatctgcatccagagcatggacggcatgctgatggtgttcgagcaggagagctacgccttcggcagattcctgcccggcttcctgctgcccggccccctggcctacagcagcagaaccgacagcttcctgaccgtgagcagctgccagcaggtggagagctacaagtaccaggtgctggccttcgccaccgacgccgacaagagacaggagaccgagcagcagaagctgggcagcggcaagagactggtggtggactggaccctgaacatcggcgagcaggccctggacatctgcatcgtgagcttcaaccagagcgccagcagcgtgttcgtgctgggcgagagaaacttcttctgcctgaaggacaacggccagatcagattcatgaagaagctggactggagccccagctgcttcctgccctactgcagcgtgagcgagggcaccatcaacaccctgatcggcaaccacaacaacatgctgcacatctaccaggacgtgaccctgaagtgggccacccagctgccccacatccccgtggccgtgagagtgggctgcctgcacgacctgaagggcgtgatcgtgaccctgagcgacgacggccacctgcagtgcagctacctgggcaccgaccccagcctgttccaggcccccaacgtgcagagcagagagctgaactacgacgagctggacgtggagatgaaggagctgcagaagatcatcaaggacgtgaacaagagccagggcgtgtggcccatgaccgagagagaggacgacctgaacgtgagcgtggtggtgagccccaacttcgacagcgtgagccaggccaccgacgtggaggtgggcaccgacctggtgcccagcgtgaccgtgaaggtgaccctgcagaacagagtgatcctgcagaaggccaagctgagcgtgtacgtgcagccccccctggagctgacctgcgaccagttcaccttcgagttcatgacccccgacctgaccagaaccgtgagcttcagcgtgtacctgaagagaagctacacccccagcgagctggagggcaacgccgtggtgagctacagcagacccaccgtgcagaacagcctgggcatccccagagtgatccagtgcaagttcagactgcccctgaagctgatctgcctgcccggccagcccagcaagaccgccagccacaagatcaccatcgacaccaacaagagccccgtgagcctgctgagcctgttccccggcttcgccagccagagcgacgacgaccaggtgaacgtgatgggcttccacttcctgggcggcgccagaatcaccgtgctggccagcaagaccagccagagatacagaatccagagcgagcagttcgaggacctgtggctgatcaccaacgagctgatcctgagactgcaggagtacttcgagaagcagggcgtgaaggacttcgcctgcagcttcagcggcagcatccccctgcaggagtacttcgagctgatcgaccaccacttcgagctgagaatcaacggcgagaagctggaggagctgctgagcgagagagccgtgcagttcagagccatccagagaagactgctggccagattcaaggacaagacccccgcccccctgcagcacctggacaccctgctggacggcacctacaagcaggtgatcgccctggccgacgccgtggaggagaaccagggcaacctgttccagagcttcaccagactgaagagcgccacccacctggtgatcctgctgatcgccctgtggcagaagctgagcgccgaccaggtggccatcctggaggccgccttcctgcccctgcaggaggacacccaggagctgggctgggaggagaccgtggacgccgccatcagccacctgctgaagacctgcctgagcaagagcagcaaggagcaggccctgaacctgaacagccagctgaacatccccaaggacaccagccagctgaagaagcacatcaccctgctgtgcgacagactgagcaagggcggcagactgtgcctgagcaccgacgccgccgccccccagaccatggtgatgcccggcggctgcaccaccatccccgagagcgacctggaggagagaagcgtggagcaggacagcaccgagctgttcaccaaccacagacacctgaccgccgagacccccagacccgaggtgagccccctgcagggcgtgagcgagtag

SEQ ID NO: 74004 - DNA, 933 bp, synthetic construct
  misc_feature 1..933: note = Description of Artificial Sequence: Synthetic coding sequence
  source 1..933: mol_type = other DNA
atgggctacctgagaatcttcagcccccaccccgccaagaccggcgacggcgcccaggccgaggacctgctgctggaggtggacctgagagaccccgtgctgcaggtggaggtgggcaagttcgtgagcggcaccgagatgctgcacctggccgtgctgcacagcagaaagctgtgcgtgtacagcgtgagcggcaccctgggcaacgtggagcacggcaaccagtgccagatgaagctgatgtacgagcacaacctgcagagaaccgcctgcaacatgacctacggcagcttcggcggcgtgaagggcagagacctgatctgcatccagagcatggacggcatgctgatggtgttcgagcaggagagctacgccttcggcagattcctgcccggcttcctgctgcccggccccctggcctacagcagcagaaccgacagcttcctgaccgtgagcagctgccagcaggtggagagctacaagtaccaggtgctggccttcgccaccgacgccgacaagagacaggagaccgagcagcagaagctgggcagcggcaagagactggtggtggactggaccctgaacatcggcgagcaggccctggacatctgcatcgtgagcttcaaccagagcgccagcagcgtgttcgtgctgggcgagagaaacttcttctgcctgaaggacaacggccagatcagattcatgaagaagctggactggagccccagctgcttcctgccctactgcagcgtgagcgagggcaccatcaacaccctgatcggcaaccacaacaacatgctgcacatctaccaggacgtgaccctgaagtgggccacccagctgccccacatccccgtggccgtgagagtgggctgcctgcagttcagcctgtggaagcacctgctgcccagaagcagcaccctggagaagtag

SEQ ID NO: 74005 - DNA, 294 bp, synthetic construct
  misc_feature 1..294: note = Description of Artificial Sequence: Synthetic coding sequence
  source 1..294: mol_type = other DNA
atgagcctgttcaaggccagagactggtggagcaccatcctgggcgacaaggaggagttcgaccagggctgcctgtgcctggccaacgtggacaacagcggcaacggccaggacaagatcatcgtgggcagcttcatgggctacctgagaatcttcagcccccaccccgccaagaccggcgacggcgcccaggccgaggacctgctgctggaggtggacctgagagaccccgtgctgcaggtggaggtgggcaagttcgtgagcggcaccgagatgctgcacctggccgtgtag

SEQ ID NO: 74006 - DNA, 1365 bp, synthetic construct
  misc_feature 1..1365: note = Description of Artificial Sequence: Synthetic coding sequence
  source 1..1365: mol_type = other DNA
tgagacctggtgcccagcgtgaccgtgaaggtgaccctgcagaacagagtgatcctgcagaaggccaagctgagcgtgtacgtgcagccccccctggagctgacctgcgaccagttcaccttcgagttcatgacccccgacctgaccagaaccgtgagcttcagcgtgtacctgaagagaagctacacccccagcgagctggagggcaacgccgtggtgagctacagcagacccaccgacagaaaccccgacggcatccccagagtgatccagtgcaagttcagactgcccctgaagctgatctgcctgcccggccagcccagcaagaccgccagccacaagatcaccatcgacaccaacaagagccccgtgagcctgctgagcctgttccccggcttcgccagccagagcgacgacgaccaggtgaacgtgatgggcttccacttcctgggcggcgccagaatcaccgtgctggccagcaagaccagccagagatacagaatccagagcgagcagttcgaggacctgtggctgatcaccaacgagctgatcctgagactgcaggagtacttcgagaagcagggcgtgaaggacttcgcctgcagcttcagcggcagcatccccctgcaggagtacttcgagctgatcgaccaccacttcgagctgagaatcaacggcgagaagctggaggagctgctgagcgagagagccgtgcagttcagagccatccagagaagactgctggccagattcaaggacaagacccccgcccccctgcagcacctggacaccctgctggacggcacctacaagcaggtgatcgccctggccgacgccgtggaggagaaccagggcaacctgttccagagcttcaccagactgaagagcgccacccacctggtgatcctgctgatcgccctgtggcagaagctgagcgccgaccaggtggccatcctggaggccgccttcctgcccctgcaggaggacacccaggagctgggctgggaggagaccgtggacgccgccatcagccacctgctgaagacctgcctgagcaagagcagcaaggagcaggccctgaacctgaacagccagctgaacatccccaaggacaccagccagctgaagaagcacatcaccctgctgtgcgacagactgagcaagggcggcagactgtgcctgagcaccgacgccgccgccccccagaccatggtgatgcccggcggctgcaccaccatccccgagagcgacctggaggagagaagcgtggagcaggacagcaccgagctgttcaccaaccacagacacctgaccgccgagacccccagacccggcaagagactggacggcctgcacaagagatag

SEQ ID NO: 74007 - DNA, 1227 bp, synthetic construct
  misc_feature 1..1227: note = Description of Artificial Sequence: Synthetic coding sequence
  source 1..1227: mol_type = other DNA
atgaagctgatgtacgagcacaacctgcagagaaccgcctgcaacatgacctacggcagcttcggcggcgtgaagggcagagacctgatctgcatccagagcatggacggcatgctgatggtgttcgagcaggagagctacgccttcggcagattcctgcccggcttcctgctgcccggccccctggcctacagcagcagaaccgacagcttcctgaccgtgagcagctgccagcaggtggagagctacaagtaccaggtgctggccttcgccaccgacgccgacaagagacaggagaccgagcagcagaagctgggcagcggcaagagactggtggtggactggaccctgaacatcggcgagcaggccctggacatctgcatcgtgagcttcaaccagagcgccagcagcgtgttcgtgctgggcgagagaaacttcttctgcctgaaggacaacggccagatcagattcatgaagaagctggactggagccccagctgcttcctgccctactgcagcgtgagcgagggcaccatcaacaccctgatcggcaaccacaacaacatgctgcacatctaccaggacgtgaccctgaagtgggccacccagctgccccacatccccgtggccgtgagagtgggctgcctgcacgacctgaagggcgtgatcgtgaccctgagcgacgacggccacctgcagtgcagctacctgggcaccgaccccagcctgttccaggcccccaacgtgcagagcagagagctgaactacgacgagctggacgtggagatgaaggagctgcagaagatcatcaaggacgtgaacaagagccagggcgtgtggcccatgaccgagagagaggacgacctgaacgtgagcgtggtggtgagccccaacttcgacagcgtgagccaggccaccgacgtggaggtgggcaccgacctggtgcccagcgtgaccgtgaaggtgaccctgcagaacagagtgatcctgcagaaggccaagctgagcgtgtacgtgcagccccccctggagctgacctgcgaccagttcaccttcgagttcatgacccccgacctgaccagaaccgtgagcttcagcgtgtacctgaagagaagcatccaccaccagaactggaaggagatgctgctgttcctgatccccgaccagcagatcgagatcctgatggccttcagagagctgagcaacgtgaacctggacttcccctag

SEQ ID NO: 74008 - DNA, 984 bp, synthetic construct
  misc_feature 1..984: note = Description of Artificial Sequence: Synthetic coding sequence
  source 1..984: mol_type = other DNA
atggagggcagcaacggcttcggcatcgacagcatcctgagccacagagccggcagccccgccctgcccaagggcgaccccctgctgggcgactgcagaagccccctggagctgagccccagaagcgagagcagcagcgactgcagcagccccgccagccccggcagagactgcctggagaccggcacccccagacccggcggcgccagcggccccggcctggacagccacctgcagcccggccagctgagcgcccccgcccagagcagaaccgtgaccagcagcttcctgatcagagacatcctggccgactgcaagcccctggccgcctgcgccccctacagcagcagcggccagcccgccgcccccgagcccggcggcagactggccgccaaggccgccgaggacttcagagacaagctggacaagagcggcagcaacgccagcagcgacagcgagtacaaggtgaaggaggagggcgacagagagatcagcagcagcagagacagcccccccgtgagactgaagaagcccagaaaggccagaaccgccttcaccgaccaccagctggcccagctggagagaagcttcgagagacagaagtacctgagcgtgcaggacagaatggagctggccgccagcctgaacctgaccgacacccaggtgaagacctggtaccagaacagaagaaccaagtggaagagacagaccgccgtgggcctggagctgctggccgaggccggcaactacagcgccctgcagagaatgttccccagcccctacttctacccccagagcctggtgagcaacctggaccccggcgccgccctgtacctgtacagaggccccagcgcccccccccccgccctgcagagacccctggtgcccagaatcctgatccacggcctgcagggcgccagcgagccccccccccccctgccccccctggccggcgtgctgcccagagccgcccagcccagatag

SEQ ID NO: 74009 - DNA, 984 bp, synthetic construct; identical to SEQ ID NO: 74008
  misc_feature 1..984: note = Description of Artificial Sequence: Synthetic coding sequence
  source 1..984: mol_type = other DNA

SEQ ID NO: 74010 - DNA, 270 bp, synthetic construct
  misc_feature 1..270: note = Description of Artificial Sequence: Synthetic coding sequence
  source 1..270: mol_type = other DNA
atgaccaccagccagaagcacagagacttcgtggccgagcccatgggcgagaagcccgtgggcagcctggccggcatcggcgaggtgctgggcaagaagctggaggagagaggcttcgacaaggcctacgtggtgctgggccagttcctggtgctgaagaaggacgaggacctgttcagagagtggctgaaggacacctgcggcgccaacgccaagcagagcagagactgcttcggctgcctgagagagtggtgcgacgccttcctgtag

SEQ ID NO: 74011 - DNA, 270 bp, synthetic construct; identical to SEQ ID NO: 74010
  misc_feature 1..270: note = Description of Artificial Sequence: Synthetic coding sequence
  source 1..270: mol_type = other DNA

SEQ ID NO: 74012 - DNA, 270 bp, synthetic construct; identical to SEQ ID NO: 74010
  misc_feature 1..270: note = Description of Artificial Sequence: Synthetic coding sequence
  source 1..270: mol_type = other DNA

SEQ ID NO: 74013 - DNA, 87 bp, synthetic construct
  misc_feature 1..87: note = Description of Artificial Sequence: Synthetic coding sequence
  source 1..87: mol_type = other DNA
atgaccaccagccagaagcacagagacttcgtggccgagcccatgggcgagaagcccgtgggcagcctggccggcatcggcgagtag

SEQ ID NO: 74014 - DNA, 270 bp, synthetic construct; identical to SEQ ID NO: 74010
  misc_feature 1..270: note = Description of Artificial Sequence: Synthetic coding sequence
  source 1..270: mol_type = other DNA

SEQ ID NO: 74015 - DNA, 963 bp, synthetic construct
  misc_feature 1..963: note = Description of Artificial Sequence: Synthetic coding sequence
  source 1..963: mol_type = other DNA
atggccgacgagaagaccttcagaatcggcttcatcgtgctgggcctgttcctgctggccctgggcaccttcctgatgagccacgacagaccccaggtgtacggcaccttctacgccatgggcagcgtgatggtgatcggcggcatcatctggagcatgtgccagtgctaccccaagatcaccttcgtgcccgccgacagcgacttccagggcatcctgagccccaaggccatgggcctgctggagaacggcctggccgccgagatgaagagccccagcccccagcccccctacgtgagactgtgggaggaggccgcctacgaccagagcctgcccgacttcagccacatccagatgaaggtgatgagctacagcgaggaccacagaagcctgctggcccccgagatgggccagcccaagctgggcaccagcgacggcggcgagggcggccccggcgacgtgcaggcctggatggaggccgccgtggtgatccacaagggcagcgacgagagcgagggcgagagaagactgacccagagctggcccggccccctggcctgcccccagggccccgcccccctggccagcttccaggacgacctggacatggacagcagcgagggcagcagccccaacgccagcccccacgacagagaggaggcctgcagcccccagcaggagccccagggctgcagatgccccctggacagattccaggacttcgccctgatcgacgcccccaccctggaggacgagccccaggagggccagcagtgggagatcgccctgcccaacaactggcagagataccccagaaccaaggtggaggagaaggaggccagcgacaccggcggcgaggagcccgagaaggaggaggaggacctgtactacggcctgcccgacggcgccggcgacctgctgcccgacaaggagctgggcttcgagcccgacacccagggctag

SEQ ID NO: 74016 - DNA, 765 bp, synthetic construct
  misc_feature 1..765: note = Description of Artificial Sequence: Synthetic coding sequence
  source 1..765: mol_type = other DNA
atgcagagacccggcgagcccggcgccgccagattcggcccccccgagggctgcgccgaccacagaccccacagatacagaagcttcatgatcgaggagatcctgaccgagccccccggccccaagggcgccgcccccgccgccgccgccgccgccgccggcgagctgctgaagttcggcgtgcaggccctgctggccgccagacccttccacagccacctggccgtgctgaaggccgagcaggccgccgtgttcaagttccccctggcccccctgggctgcagcggcctgagcagcgccctgctggccgccggccccggcctgcccggcgccgccggcgccccccacctgcccctggagctgcagctgagaggcaagctggaggccgccggccccggcgagcccggcaccaaggccaagaagggcagaagaagcagaaccgtgttcaccgagctgcagctgatgggcctggagaagagattcgagaagcagaagtacctgagcacccccgacagaatcgacctggccgagagcctgggcctgagccagctgcaggtgaagacctggtaccagaacagaagaatgaagtggaagaagatcgtgctgcagggcggcggcctggagagccccaccaagcccaagggcagacccaagaagaacagcatccccaccagcgagcagctgaccgagcaggagagagccaaggacgccgagaagcccgccgaggtgcccggcgagcccagcgacagaagcagagaggactag

SEQ ID NO: 74017 - DNA, 303 bp, synthetic construct
  misc_feature 1..303: note = Description of Artificial Sequence: Synthetic coding sequence
  source 1..303: mol_type = other DNA
atgggcctggagaagagattcgagaagcagaagtacctgagcacccccgacagaatcgacctggccgagagcctgggcctgagccagctgcaggtgaagacctggtaccagaacagaagaatgaagtggaagaagatcgtgctgcagggcggcggcctggagagccccaccaagcccaagggcagacccaagaagaacagcatccccaccagcgagcagctgaccgagcaggagagagccaaggacgccgagaagcccgccgaggtgcccggcgagcccagcgacagaagcagagaggactag

SEQ ID NO: 74018 - DNA, 840 bp, synthetic construct
  misc_feature 1..840: note = Description of Artificial Sequence: Synthetic coding sequence
  source 1..840: mol_type = other DNA
atgcactgccacgccgagctgagactgagcagccccggccagctgaaggccgccagaagaagatacaagaccttcatgatcgacgagatcctgagcaaggagacctgcgactacttcgagaagctgagcctgtacagcgtgtgccccagcctggtggtgagacccaagcccctgcacagctgcaccggcagccccagcctgagagcctaccccctgctgagcgtgatcaccagacagcccaccgtgatcagccacctggtgcccgccacccccggcatcgcccaggccctgagctgccaccaggtgaccgaggccgtgagcgccgaggcccccggcggcgaggccctggccagcagcgagagcgagaccgagcagcccacccccagacagaagaagcccagaagaagcagaaccatcttcaccgagctgcagctgatgggcctggagaagaagttccagaagcagaagtacctgagcacccccgacagactggacctggcccagagcctgggcctgacccagctgcaggtgaagacctggtaccagaacagaagaatgaagtggaagaagatggtgctgaagggcggccaggaggcccccaccaagcccaagggcagacccaagaagaacagcatccccaccagcgaggagatcgaggccgaggagaagatgaacagccaggcccagggccaggagcagctggagcccagccagggccaggaggagctgtgcgaggcccaggagcccaaggccagagacgtgcccctggagatggccgagccccccgaccccccccaggagctgcccatccccagcagcgagcccccccccctgagctag

SEQ ID NO: 74019 - DNA, 1887 bp, synthetic construct
  misc_feature 1..1887: note = Description of Artificial Sequence: Synthetic coding sequence
  source 1..1887: mol_type = other DNA
atggagccccccgacgcccccgcccaggccagaggcgcccccagactgctgctgctggccgtgctgctggccgcccaccccgacgcccaggccgaggtgagactgagcgtgccccccctggtggaggtgatgagaggcaagagcgtgatcctggactgcacccccaccggcacccacgaccactacatgctggagtggttcctgaccgacagaagcggcgccagacccagactggccagcgccgagatgcagggcagcgagctgcaggtgaccatgcacgacaccagaggcagaagccccccctaccagctggacagccagggcagactggtgctggccgaggcccaggtgggcgacgagagagactacgtgtgcgtggtgagagccggcgccgccggcaccgccgaggccaccgccagactgaacgtgttcgccaagcccgaggccaccgaggtgagccccaacaagggcaccctgagcgtgatggaggacagcgcccaggagatcgccacctgcaacagcagaaacggcaaccccgcccccaagatcacctggtacagaaacggccagagactggaggtgcccgtggagatgaaccccgagggctacatgaccagcagaaccgtgagagaggccagcggcctgctgagcctgaccagcaccctgtacctgagactgagaaaggacgacagagacgccagcttccactgcgccgcccactacagcctgcccgagggcagacacggcagactggacagccccaccttccacctgaccctgcactaccccaccgagcacgtgcagttctgggtgggcagccccagcacccccgccggctgggtgagagagggcgacaccgtgcagctgctgtgcagaggcgacggcagccccagccccgagtacaccctgttcagactgcaggacgagcaggaggaggtgctgaacgtgaacctggagggcaacctgaccctggagggcgtgaccagaggccagagcggcacctacggctgcagagtggaggactacgacgccgccgacgacgtgcagctgagcaagaccctggagctgagagtggcctacctggaccccctggagctgagcgagggcaaggtgctgagcctgcccctgaacagcagcgccgtggtgaactgcagcgtgcacggcctgcccacccccgccctgagatggaccaaggacagcacccccctgggcgacggccccatgctgagcctgagcagcatcaccttcgacagcaacggcacctacgtgtgcgaggccagcctgcccaccgtgcccgtgctgagcagaacccagaacttcaccctgctggtgcagggcagccccgagctgaagaccgccgagatcgagcccaaggccgacggcagctggagagagggcgacgaggtgaccctgatctgcagcgccagaggccaccccgaccccaagctgagctggagccagctgggcggcagccccgccgagcccatccccggcagacagggctgggtgagcagcagcctgaccctgaaggtgaccagcgccctgagcagagacggcatcagctgcgaggccagcaacccccacggcaacaagagacacgtgttccacttcggcaccgtgagcccccagaccagccaggccggcgtggccgtgatggccgtggccgtgagcgtgggcctgctgctgctggtggtggccgtgttctactgcgtgagaagaaagggcggcccctgctgcagacagagaagagagaagggcgcccccccccccggcgagcccggcctgagccacagcggcagcgagcagcccgagcagaccggcctgctgatgggcggcgccagcggcggcgccagaggcggcagcggcggcttcggcgacgagtgctag

SEQ ID NO: 74020 - DNA, 1767 bp, synthetic construct
  misc_feature 1..1767: note = Description of Artificial Sequence: Synthetic coding sequence
  source 1..1767: mol_type = other DNA
atggagccccccgacgcccccgcccaggccagaggcgcccccagactgctgctgctggccgtgctgctggccgcccaccccgacgcccaggccgaggtgagactgagcgtgccccccctggtggaggtgatgagaggcaagagcgtgatcctggactgcacccccaccggcacccacgaccactacatgctggagtggttcctgaccgacagaagcggcgccagacccagactggccagcgccgagatgcagggcagcgagctgcaggtgaccatgcacgacaccagaggcagaagccccccctaccagctggacagccagggcagactggtgctggccgaggcccaggtgggcgacgagagagactacgtgtgcgtggtgagagccggcgccgccggcaccgccgaggccaccgccagactgaacgtgttcgccaagcccgaggccaccgaggtgagccccaacaagggcaccctgagcgtgatggaggacagcgcccaggagatcgccacctgcaacagcagaaacggcaaccccgcccccaagatcacctggtacagaaacggccagagactggaggtgcccgtggagatgaaccccgagggctacatgaccagcagaaccgtgagagaggccagcggcctgctgagcctgaccagcaccctgtacctgagactgagaaaggacgacagagacgccagcttccactgcgccgcccactacagcctgcccgagggcagacacggcagactggacagccccaccttccacctgaccctgcactaccccaccgagcacgtgcagttctgggtgggcagccccagcacccccgccggctgggtgagagagggcgacaccgtgcagctgctgtgcagaggcgacggcagccccagccccgagtacaccctgttcagactgcaggacgagcaggaggaggtgctgaacgtgaacctggagggcaacctgaccctggagggcgtgaccagaggccagagcggcacctacggctgcagagtggaggactacgacgccgccgacgacgtgcagctgagcaagaccctggagctgagagtggcctacctggaccccctggagctgagcgagggcaaggtgctgagcctgcccctgaacagcagcgccgtggtgaactgcagcgtgcacggcctgcccacccccgccctgagatggaccaaggacagcacccccctgggcgacggccccatgctgagcctgagcagcatcaccttcgacagcaacggcacctacgtgtgcgaggccagcctgcccaccgtgcccgtgctgagcagaacccagaacttcaccctgctggtgcagggcagccccgagctgaagaccgccgagatcgagcccaaggccgacggcagctggagagagggcgacgaggtgaccctgatctgcagcgccagaggccaccccgaccccaagctgagctggagccagctgggcggcagccccgccgagcccatccccggcagacagggctgggtgagcagcagcctgaccctgaaggtgaccagcgccctgagcagagacggcatcagctgcgaggccagcaacccccacggcaacaagagacacgtgttccacttcggcaccgtgagcccccagaccagccaggccggcgtggccgtgatggccgtggccgtgagcgtgggcctgctgctgctggtggtggccgtgttctactgcgtgagaagaaagggcggcccctgctgcagacagagaagagagaagggcgccccctag

SEQ ID NO: 74021 - DNA, 321 bp, synthetic construct
  misc_feature 1..321: note = Description of Artificial Sequence: Synthetic coding sequence
  source 1..321: mol_type = other DNA
atgatgaccctggtgcccagagccagaaccagagccggccaggaccactacagccacccctgccccagattcagccaggtgctgctgaccgagggcatcatgacctactgcctgaccaagaacctgagcgacgtgaacatcctgcacagactgctgaagaacggcaacgtgagaaacaccctgctgcagagcaaggtgggcctgctgacctactacgtgaagctgtaccccggcgaggtgaccctgctgaccagacccagcatccagatgagactgtgctgcatcaccggcagcgtgagcagacccagaagccagaagtag

SEQ ID NO: 74022 - DNA, 321 bp, synthetic construct; identical to SEQ ID NO: 74021
  misc_feature 1..321: note = Description of Artificial Sequence: Synthetic coding sequence
  source 1..321: mol_type = other DNA

SEQ ID NO: 74023 - DNA, 1146 bp, synthetic construct
  misc_feature 1..1146: note = Description of Artificial Sequence: Synthetic coding sequence
  source 1..1146: mol_type = other DNA
atggagagaggcatgcacctgggcgccgccgccgccggcgaggacgacctgttcctgcacaagagcctgagcgccagcaccagcaagagactggaggccgccttcagaagcaccccccccggcatggacctgagcctggcccccccccccagagagagacccgccagcagcagcagcagccccctgggctgcttcgagcccgccgaccccgagggcgccggcctgctgctgcccccccccggcggcggcggcggcggcagcgccggcagcggcggcggcggcggcggcggcgtgggcgtgcccggcctgctggtgggcagcgccggcgtgggcggcgaccccagcctgagcagcctgcccgccggcgccgccctgtgcctgaagtacggcgagagcgccagcagaggcagcgtggccgagagcagcggcggcgagcagagccccgacgacgacagcgacggcagatgcgagctggtgctgagagccggcgtggccgaccccagagccagccccggcgccggcggcggcggcgccaaggccgccgagggctgcagcaacgcccacctgcacggcggcgccagcgtgccccccggcggcctgggcggcggcggcggcggcggcagcagcagcggcagcagcggcggcggcggcggcagcggcagcggcagcggcggcagcagcagcagcagcagcagcagcagcaagaagagcaaggagcagaaggccctgagactgaacatcaacgccagagagagaagaagaatgcacgacctgaacgacgccctggacgagctgagagccgtgatcccctacgcccacagccccagcgtgagaaagctgagcaagatcgccaccctgctgctggccaagaactacatcctgatgcaggcccaggccctggaggagatgagaagactggtggcctacctgaaccagggccaggccatcagcgccgccagcctgcccagcagcgccgccgccgccgccgccgccgccgccctgcaccccgccctgggcgcctacgagcaggccgccggctaccccttcagcgccggcctgccccccgccgccagctgccccgagaagtgcgccctgttcaacagcgtgagcagcagcctgtgcaagcagtgcaccgagaagccctag

SEQ ID NO: 74024 - DNA, 678 bp, synthetic construct
  misc_feature 1..678: note = Description of Artificial Sequence: Synthetic coding sequence
  source 1..678: mol_type = other DNA
atggccgagctgaagagcctgagcggcgacgcctacctggccctgagccacggctacgccgccgccgccgccggcctggcctacggcgccgccagagagcccgaggccgccagaggctacggcacccccggccccggcggcgacctgcccgccgcccccgcccccagagcccccgcccaggccgccgagagcagcggcgagcagagcggcgacgaggacgacgccttcgagcagagaagaagaagaagaggccccggcagcgccgccgacggcagaagaagacccagagagcagagaagcctgagactgagcatcaacgccagagagagaagaagaatgcacgacctgaacgacgccctggacggcctgagagccgtgatcccctacgcccacagccccagcgtgagaaagctgagcaagatcgccaccctgctgctggccaagaactacatcctgatgcaggcccaggccctggacgagatgagaagactggtggccttcctgaaccagggccagggcctggccgcccccgtgaacgccgcccccctgacccccttcggccaggccaccgtgtgccccttcagcgccggcgccgccctgggcccctgccccgacaagtgcgccgccttcagcggcacccccagcgccctgtgcaagcactgccacgagaagccctag

SEQ ID NO: 74025 - DNA, 1239 bp, synthetic construct
  misc_feature 1..1239: note = Description of Artificial Sequence: Synthetic coding sequence
  source 1..1239: mol_type = other DNA
atggagagaatccccagcgcccagcccccccccgcctgcctgcccaaggcccccggcctggagcacggcgacctgcccggcatgtaccccgcccacatgtaccaggtgtacaagagcagaagaggcatcaagagaagcgaggacagcaaggagacctacaagctgccccacagactgatcgagaagaagagaagagacagaatcaacgagtgcatcgcccagctgaaggacctgctgcccgagcacctgaagctgaccaccctgggccacctggagaaggccgtggtgctggagctgaccctgaagcacgtgaaggccctgaccaacctgatcgaccagcagcagcagaagatcatcgccctgcagagcggcctgcaggccggcgagctgagcggcagaaacgtggagaccggccaggagatgttctgcagcggcttccagacctgcgccagagaggtgctgcagtacctggccaagcacgagaacaccagagacctgaagagcagccagctggtgacccacctgcacagagtggtgagcgagctgctgcagggcggcaccagcagaaagcccagcgaccccgcccccaaggtgatggacttcaaggagaagcccagcagccccgccaagggcagcgagggccccggcaagaactgcgtgcccgtgatccagagaaccttcgcccacagcagcggcgagcagagcggcagcgacaccgacaccgacagcggctacggcggcgagagcgagaagggcgacctgagaagcgagcagccctgcttcaagagcgaccacggcagaagattcaccatgggcgagagaatcggcgccatcaagcaggagagcgaggagccccccaccaagaagaacagaatgcagctgagcgacgacgagggccacttcaccagcagcgacctgatcagcagccccttcctgggcccccacccccaccagccccccttctgcctgcccttctacctgatcccccccagcgccaccgcctacctgcccatgctggagaagtgctggtaccccaccagcgtgcccgtgctgtaccccggcctgaacgccagcgccgccgccctgagcagcttcatgaaccccgacaagatcagcgcccccctgctgatgccccagagactgcccagccccctgcccgcccaccccagcgtggacagcagcgtgctgctgcaggccctgaagcccatcccccccctgaacctggagaccaaggactag

SEQ ID NO: 74026 - DNA, 378 bp, synthetic construct
  misc_feature 1..378: note = Description of Artificial Sequence: Synthetic coding sequence
  source 1..378: mol_type = other DNA
atgccccacagcagcgacagcagcgacagcagcttcagcagaagccccccccccggcaagcaggacagcagcgacgacgtgagaagagtgcagagaagagagaagaacagaatcgccgcccagaagagcagacagagacagacccagaaggccgacaccctgcacctggagagcgaggacctggagaagcagaacgccgccctgagaaaggagatcaagcagctgaccgaggagctgaagtacttcaccagcgtgctgaacagccacgagcccctgtgcagcgtgctggccgccagcacccccagcccccccgaggtggtgtacagcgcccacgccttccaccagccccacgtgagcagccccagattccagccctag

SEQ ID NO: 74027 - DNA, 384 bp, synthetic construct
  misc_feature 1..384: note = Description of Artificial Sequence: Synthetic coding sequence
  source 1..384: mol_type = other DNA
atgagccagggcctgcccgccgccggcagcgtgctgcagagaagcgtggccgcccccggcaaccagccccagccccagccccagcagcagagccccgaggacgacgacagaaaggtgagaagaagagagaagaacagagtggccgcccagagaagcagaaagaagcagacccagaaggccgacaagctgcacgaggagtacgagagcctggagcaggagaacaccatgctgagaagagagatcggcaagctgaccgaggagctgaagcacctgaccgaggccctgaaggagcacgagaagatgtgccccctgctgctgtgccccatgaacttcgtgcccgtgccccccagacccgaccccgtggccggctgcctgcccagatag

SEQ ID NO: 74028 - DNA, 489 bp, synthetic construct
  misc_feature 1..489: note = Description of Artificial Sequence: Synthetic coding sequence
  source 1..489: mol_type = other DNA
atgaaggagaccatcatgaaccaggagaagctggccaagctgcaggcccaggtgagaatcggcggcaagggcaccgccagaagaaagaagaaggtggtgcacagaaccgccaccgccgacgacaagaagctgcagttcagcctgaagaagctgggcgtgaacaacatcagcggcatcgaggaggtgaacatgttcaccaaccagggcaccgtgatccacttcaacaaccccaaggtgcaggccagcctggccgccaacaccttcaccatcaccggccacgccgagaccaagcagctgaccgagatgctgcccagcatcctgaaccagctgggcgccgacagcctgaccagcctgagaagactggccgaggccctgcccaagcagagcgtggacggcaaggcccccctggccaccggcgaggacgacgacgacgaggtgcccgacctggtggagaacttcgacgaggccagcaagaacgaggccaactag

SEQ ID NO: 74029 - DNA, 621 bp, synthetic construct
  misc_feature 1..621: note = Description of Artificial Sequence: Synthetic coding sequence
  source 1..621: mol_type = other DNA
atgagaagaaccggcgcccccgcccaggccgacagcagaggcagaggcagagccagaggcggctgccccggcggcgaggccaccctgagccagcccccccccagaggcggcaccagaggccaggagccccagatgaaggagaccatcatgaaccaggagaagctggccaagctgcaggcccaggtgagaatcggcggcaagggcaccgccagaagaaagaagaaggtggtgcacagaaccgccaccgccgacgacaagaagctgcagttcagcctgaagaagctgggcgtgaacaacatcagcggcatcgaggaggtgaacatgttcaccaaccagggcaccgtgatccacttcaacaaccccaaggtgcaggccagcctggccgccaacaccttcaccatcaccggccacgccgagaccaagcagctgaccgagatgctgcccagcatcctgaaccagctgggcgccgacagcctgaccagcctgagaagactggccgaggccctgcccaagcagagcgtggacggcaaggcccccctggccaccggcgaggacgacgacgacgaggtgcccgacctggtggagaacttcgacgaggccagcaagaacgaggccaactag

SEQ ID NO: 74030 - DNA, 1158 bp, synthetic construct
  misc_feature 1..1158: note = Description of Artificial Sequence: Synthetic coding sequence
  source 1..1158: mol_type = other DNA
atggccgccgccctgttcgtgctgctgggcttcgccctgctgggcacccacggcgccagcggcgccgccggcttcgtgcaggcccccctgagccagcagagatgggtgggcggcagcgtggagctgcactgcgaggccgtgggcagccccgtgcccgagatccagtggtggttcgagggccagggccccaacgacacctgcagccagctgtgggacggcgccagactggacagagtgcacatccacgccacctaccaccagcacgccgccagcaccatcagcatcgacaccctggtggaggaggacaccggcacctacgagtgcagagccagcaacgaccccgacagaaaccacctgaccagagcccccagagtgaagtgggtgagagcccaggccgtggtgctggtgctggagcccggcaccgtgttcaccaccgtggaggacctgggcagcaagatcctgctgacctgcagcctgaacgacagcgccaccgaggtgaccggccacagatggctgaagggcggcgtggtgctgaaggaggacgccctgcccggccagaagaccgagttcaaggtggacagcgacgaccagtggggcgagtacagctgcgtgttcctgcccgagcccatgggcaccgccaacatccagctgcacggcccccccagagtgaaggccgtgaagagcagcgagcacatcaacgagggcgagaccgccatgctggtgtgcaagagcgagagcgtgccccccgtgaccgactgggcctggtacaagatcaccgacagcgaggacaaggccctgatgaacggcagcgagagcagattcttcgtgagcagcagccagggcagaagcgagctgcacatcgagaacctgaacatggaggccgaccccggccagtacagatgcaacggcaccagcagcaagggcagcgaccaggccatcatcaccctgagagtgagaagccacctggccgccctgtggcccttcctgggcatcgtggccgaggtgctggtgctggtgaccatcatcttcatctacgagaagagaagaaagcccgaggacgtgctggacgacgacgacgccggcagcgcccccctgaagagcagcggccagcaccagaacgacaagggcaagaacgtgagacagagaaacagcagctag

SEQ ID NO: 74031 - DNA, 618 bp, synthetic construct
  misc_feature 1..618: note = Description of Artificial Sequence: Synthetic coding sequence
  source 1..618: mol_type = other DNA
atgaagcagagcgacgccagcccccaggagagagtggacagcgacgaccagtggggcgagtacagctgcgtgttcctgcccgagcccatgggcaccgccaacatccagctgcacggcccccccagagtgaaggccgtgaagagcagcgagcacatcaacgagggcgagaccgccatgctggtgtgcaagagcgagagcgtgccccccgtgaccgactgggcctggtacaagatcaccgacagcgaggacaaggccctgatgaacggcagcgagagcagattcttcgtgagcagcagccagggcagaagcgagctgcacatcgagaacctgaacatggaggccgaccccggccagtacagatgcaacggcaccagcagcaagggcagcgaccaggccatcatcaccctgagagtgagaagccacctggccgccctgtggcccttcctgggcatcgtggccgaggtgctggtgctggtgaccatcatcttcatctacgagaagagaagaaagcccgaggacgtgctggacgacgacgacgccggcagcgcccccctgaagagcagcggccagcaccagaacgacaagggcaagaacgtgagacagagaaacagcagctag

SEQ ID NO: 74032 - DNA, 810 bp, synthetic construct
  misc_feature 1..810: note = Description of Artificial Sequence: Synthetic coding sequence
  source 1..810: mol_type = other DNA
atggccgccgccctgttcgtgctgctgggcttcgccctgctgggcacccacggcgccagcggcgccgccggcaccgtgttcaccaccgtggaggacctgggcagcaagatcctgctgacctgcagcctgaacgacagcgccaccgaggtgaccggccacagatggctgaagggcggcgtggtgctgaaggaggacgccctgcccggccagaagaccgagttcaaggtggacagcgacgaccagtggggcgagtacagctgcgtgttcctgcccgagcccatgggcaccgccaacatccagctgcacggcccccccagagtgaaggccgtgaagagcagcgagcacatcaacgagggcgagaccgccatgctggtgtgcaagagcgagagcgtgccccccgtgaccgactgggcctggtacaagatcaccgacagcgaggacaaggccctgatgaacggcagcgagagcagattcttcgtgagcagcagccagggcagaagcgagctgcacatcgagaacctgaacatggaggccgaccccggccagtacagatgcaacggcaccagcagcaagggcagcgaccaggccatcatcaccctgagagtgagaagccacctggccgccctgtggcccttcctgggcatcgtggccgaggtgctggtgctggtgaccatcatcttcatctacgagaagagaagaaagcccgaggacgtgctggacgacgacgacgccggcagcgcccccctgaagagcagcggccagcaccagaacgacaagggcaagaacgtgagacagagaaacagcagctag

SEQ ID NO: 74033 - DNA, 531 bp, synthetic construct
  misc_feature 1..531: note = Description of Artificial Sequence: Synthetic coding sequence
  source 1..531: mol_type = other DNA
atgggcaccgccaacatccagctgcacggcccccccagagtgaaggccgtgaagagcagcgagcacatcaacgagggcgagaccgccatgctggtgtgcaagagcgagagcgtgccccccgtgaccgactgggcctggtacaagatcaccgacagcgaggacaaggccctgatgaacggcagcgagagcagattcttcgtgagcagcagccagggcagaagcgagctgcacatcgagaacctgaacatggaggccgaccccggccagtacagatgcaacggcaccagcagcaagggcagcgaccaggccatcatcaccctgagagtgagaagccacctggccgccctgtggcccttcctgggcatcgtggccgaggtgctggtgctggtgaccatcatcttcatctacgagaagagaagaaagcccgaggacgtgctggacgacgacgacgccggcagcgcccccctgaagagcagcggccagcaccagaacgacaagggcaagaacgtgagacagagaaacagcagctag

SEQ ID NO: 74034 - DNA, 2985 bp, synthetic construct
  misc_feature 1..2985: note = Description of Artificial Sequence: Synthetic coding sequence
  source 1..2985: mol_type = other DNA
atgagaagaagaccccccagcagaggcggcagaggcgccgccagagccagagagaccagaagacagcccagacacagaagcggcagaagaatggccgaggccatcagctgcaccctgaactgcagctgccagagcttcaagcccggcaagatcaaccacagacagtgcgaccagtgcaagcacggctgggtggcccacgccctgagcaagctgagaatcccccccatgtaccccaccagccaggtggagatcgtgcagagcaacgtggtgttcgacatcagcagcctgatgctgtacggcacccaggccatccccgtgagactgaagatcctgctggacagactgttcagcgtgctgaagcaggacgaggtgctgcagatcctgcacgccctggactggaccctgcaggactacatcagaggctacgtgctgcaggacgccagcggcaaggtgctggaccactggagcatcatgaccagcgaggaggaggtggccaccctgcagcagttcctgagattcggcgagaccaagagcatcgtggagctgatggccatccaggagaaggaggagcagagcatcatcatcccccccagcaccgccaacgtggacatcagagccttcatcgagagctgcagccacagaagcagcagcctgcccacccccgtggacaagggcaaccccagcagcatccaccccttcgagaacctgatcagcaacatgaccttcatgctgcccttccagttcttcaaccccctgccccccgccctgatcggcagcctgcccgagcagtacatgctggagcagggccacgaccagagccaggaccccaagcaggaggtgcacggccccttccccgacagcagcttcctgaccagcagcagcacccccttccaggtggagaaggaccagtgcctgaactgccccgacgccatcaccaagaaggaggacagcacccacctgagcgacagcagcagctacaacatcgtgaccaagttcgagagaacccagctgagccccgaggccaaggtgaagcccgagagaaacagcctgggcaccaagaagggcagagtgttctgcaccgcctgcgagaagaccttctacgacaagggcaccctgaagatccactacaacgccgtgcacctgaagatcaagcacaagtgcaccatcgagggctgcaacatggtgttcagcagcctgagaagcagaaacagacacagcgccaaccccaaccccagactgcacatgcccatgaacagaaacaacagagacaaggacctgagaaacagcctgaacctggccagcagcgagaactacaagtgccccggcttcaccgtgaccagccccgactgcagacccccccccagctaccccggcagcggcgaggacagcaagggccagcccgccttccccaacatcggccagaacggcgtgctgttccccaacctgaagaccgtgcagcccgtgctgcccttctacagaagccccgccacccccgccgaggtggccaacacccccggcatcctgcccagcctgcccctgctgagcagcagcatccccgagcagctgatcagcaacgagatgcccttcgacgccctgcccaagaagaagagcagaaagagcagcatgcccatcaagatcgagaaggaggccgtggagatcgccaacgagaagagacacaacctgagcagcgacgaggacatgcccctgcaggtggtgagcgaggacgagcaggaggcctgcagcccccagagccacagagtgagcgaggagcagcacgtgcagagcggcggcctgggcaagcccttccccgagggcgagagaccctgccacagagagagcgtgatcgagagcagcggcgccatcagccagacccccgagcaggccacccacaacagcgagagagagaccgagcagacccccgccctgatcatggtgcccagagaggtggaggacggcggccacgagcactacttcacccccggcatggagccccaggtgcccttcagcgactacatggagctgcagcagagactgctggccggcggcctgttcagcgccctgagcaacagaggcatggccttcccctgcctggaggacagcaaggagctggagcacgtgggccagcacgccctggccagacagatcgaggagaacagattccagtgcgacatctgcaagaagaccttcaagaacgcctgcagcgtgaagatccaccacaagaacatgcacgtgaaggagatgcacacctgcaccgtggagggctgcaacgccaccttccccagcagaagaagcagagacagacacagcagcaacctgaacctgcaccagaaggccctgagccaggaggccctggagagcagcgaggaccacttcagagccgcctacctgctgaaggacgtggccaaggaggcctaccaggacgtggccttcacccagcaggccagccagaccagcgtgatcttcaagggcaccagcagaatgggcagcctggtgtaccccatcacccaggtgcacagcgccagcctggagagctacaacagcggccccctgagcgagggcaccatcctggacctgagcaccaccagcagcatgaagagcgagagcagcagccacagcagctgggacagcgacggcgtgagcgaggagggcaccgtgctgatggaggacagcgacggcaactgcgagggcagcagcctggtgcccggcgaggacgagtaccccatctgcgtgctgatggagaaggccgaccagagcctggccagcctgcccagcggcctgcccatcacctgccacctgtgccagaagacctacagcaacaagggcaccttcagagcccactacaagaccgtgcacctgagacagctgcacaagtgcaaggtgcccggctgcaacaccatgttcagcagcgtgagaagcagaaacagacacagccagaaccccaacctgcacaagagcctggccagcagccccagccacctgcagtag

SEQ ID NO: 74035 - DNA, 2964 bp, synthetic construct
  misc_feature 1..2964: note = Description of Artificial Sequence: Synthetic coding sequence
  source 1..2964: mol_type = other DNA
atgagatgcagaaacatgttcttcagcttcaaggccagcctgtgcggctgcggcgccgccaccgcccccagcctgaccgccatcagctgcaccctgaactgcagctgccagagcttcaagcccggcaagatcaaccacagacagtgcgaccagtgcaagcacggctgggtggcccacgccctgagcaagctgagaatcccccccatgtaccccaccagccaggtggagatcgtgcagagcaacgtggtgttcgacatcagcagcctgatgctgtacggcacccaggccatccccgtgagactgaagatcctgctggacagactgttcagcgtgctgaagcaggacgaggtgctgcagatcctgcacgccctggactggaccctgcaggactacatcagaggctacgtgctgcaggacgccagcggcaaggtgctggaccactggagcatcatgaccagcgaggaggaggtggccaccctgcagcagttcctgagattcggcgagaccaagagcatcgtggagctgatggccatccaggagaaggaggagcagagcatcatcatcccccccagcaccgccaacgtggacatcagagccttcatcgagagctgcagccacagaagcagcagcctgcccacccccgtggacaagggcaaccccagcagcatccaccccttcgagaacctgatcagcaacatgaccttcatgctgcccttccagttcttcaaccccctgccccccgccctgatcggcagcctgcccgagcagtacatgctggagcagggccacgaccagagccaggaccccaagcaggaggtgcacggccccttccccgacagcagcttcctgaccagcagcagcacccccttccaggtggagaaggaccagtgcctgaactgccccgacgccatcaccaagaaggaggacagcacccacctgagcgacagcagcagctacaacatcgtgaccaagttcgagagaacccagctgagccccgaggccaaggtgaagcccgagagaaacagcctgggcaccaagaagggcagagtgttctgcaccgcctgcgagaagaccttctacgacaagggcaccctgaagatccactacaacgccgtgcacctgaagatcaagcacaagtgcaccatcgagggctgcaacatggtgttcagcagcctgagaagcagaaacagacacagcgccaaccccaaccccagactgcacatgcccatgaacagaaacaacagagacaaggacctgagaaacagcctgaacctggccagcagcgagaactacaagtgccccggcttcaccgtgaccagccccgactgcagacccccccccagctaccccggcagcggcgaggacagcaagggccagcccgccttccccaacatcggccagaacggcgtgctgttccccaacctgaagaccgtgcagcccgtgctgcccttctacagaagccccgccacccccgccgaggtggccaacacccccggcatcctgcccagcctgcccctgctgagcagcagcatccccgagcagctgatcagcaacgagatgcccttcgacgccctgcccaagaagaagagcagaaagagcagcatgcccatcaagatcgagaaggaggccgtggagatcgccaacgagaagagacacaacctgagcagcgacgaggacatgcccctgcaggtggtgagcgaggacgagcaggaggcctgcagcccccagagccacagagtgagcgaggagcagcacgtgcagagcggcggcctgggcaagcccttccccgagggcgagagaccctgccacagagagagcgtgatcgagagcagcggcgccatcagccagacccccgagcaggccacccacaacagcgagagagagaccgagcagacccccgccctgatcatggtgcccagagaggtggaggacggcggccacgagcactacttcacccccggcatggagccccaggtgcccttcagcgactacatggagctgcagcagagactgctggccggcggcctgttcagcgccctgagcaacagaggcatggccttcccctgcctggaggacagcaaggagctggagcacgtgggccagcacgccctggccagacagatcgaggagaacagattccagtgcgacatctgcaagaagaccttcaagaacgcctgcagcgtgaagatccaccacaagaacatgcacgtgaaggagatgcacacctgcaccgtggagggctgcaacgccaccttccccagcagaagaagcagagacagacacagcagcaacctgaacctgcaccagaaggccctgagccaggaggccctggagagcagcgaggaccacttcagagccgcctacctgctgaaggacgtggccaaggaggcctaccaggacgtggccttcacccagcaggccagccagaccagcgtgatcttcaagggcaccagcagaatgggcagcctggtgtaccccatcacccaggtgcacagcgccagcctggagagctacaacagcggccccctgagcgagggcaccatcctggacctgagcaccaccagcagcatgaagagcgagagcagcagccacagcagctgggacagcgacggcgtgagcgaggagggcaccgtgctgatggaggacagcgacggcaactgcgagggcagcagcctggtgcccggcgaggacgagtaccccatctgcgtgctgatggagaaggccgaccagagcctggccagcctgcccagcggcctgcccatcacctgccacctgtgccagaagacctacagcaacaagggcaccttcagagcccactacaagaccgtgcacctgagacagctgcacaagtgcaaggtgcccggctgcaacaccatgttcagcagcgtgagaagcagaaacagacacagccagaaccccaacctgcacaagagcctggccagcagccccagccacctgcagtag

SEQ ID NO: 74036 - DNA, 2712 bp, synthetic construct
  misc_feature 1..2712: note = Description of Artificial Sequence: Synthetic coding sequence
  source 1..2712: mol_type = other DNA
atggcccacctgggccccaccccccccccccacagcctgaactacaagagcgaggacagactgagcgagcaggactggcccgcctacttcaaggtgccctgctgcggcgtggacaccagccagatcgagagcgaggaggccgaggtggacgtgagagagagagagacccagagagacagagagcccaagagagccagagacctgaccctgagagacagctgcaccgacaacagcatgcagttcggcaccagaaccaccaccgccgagcccggcttcatgggcacctggcagaacgccgacaccaacctgctgttcagaatgagccagcaggccatcagatgcaccctggtgaactgcacctgcgagtgcttccagcccggcaagatcaacctgagaacctgcgaccagtgcaagcacggctgggtggcccacgccctggacaagctgagcacccagcacctgtaccaccccacccaggtggagatcgtgcagagcaacgtggtgttcgacatcagcagcctgatgctgtacggcacccaggccgtgcccgtgagactgaagatcctgctggacagactgttcagcgtgctgaagcaggaggaggtgctgcacatcctgcacggcctgggctggaccctgagagactacgtgagaggctacatcctgcaggacgccgccggcaaggtgctggacagatgggccatcatgagcagagaggaggagatcatcaccctgcagcagttcctgagattcggcgagaccaagagcatcgtggagctgatggccatccaggagaaggagggccaggccgtggccgtgcccagcagcaagaccgacagcgacatcagaaccttcatcgagagcaacaacagaaccagaagccccagcctgctggcccacctggagaacagcaaccccagcagcatccaccacttcgagaacatccccaacagcctggccttcctgctgcccttccagtacatcaaccccgtgagcgcccccctgctgggcctgccccccaacggcctgctgctggagcagcccggcctgagactgagagagcccagcctgagcacccagaacgagtacaacgagagcagcgagagcgaggtgagccccaccccctacaagaacgaccagacccccaacagaaacgccctgaccagcatcaccaacgtggagcccaagaccgagcccgcctgcgtgagccccatccagaacagcgcccccgtgagcgacctgaccaagaccgagcaccccaagagcagcttcagaatccacagaatgagaagaatgggcagcgccagcagaaagggcagagtgttctgcaacgcctgcggcaagaccttctacgacaagggcaccctgaagatccactacaacgccgtgcacctgaagatcaagcacagatgcaccatcgagggctgcaacatggtgttcagcagcctgagaagcagaaacagacacagcgccaaccccaaccccagactgcacatgcccatgctgagaaacaacagagacaaggacctgatcagagccaccagcggcgccgccacccccgtgatcgccagcaccaagagcaacctggccctgaccagccccggcagaccccccatgggcttcaccaccccccccctggaccccgtgctgcagaaccccctgcccagccagctggtgttcagcggcctgaagaccgtgcagcccgtgccccccttctacagaagcctgctgacccccggcgagatggtgagcccccccaccagcctgcccaccagccccatcatccccaccagcggcaccatcgagcagcacccccccccccccagcgagcccgtggtgcccgccgtgatgatggccacccacgagcccagcgccgacctggcccccaagaagaagcccagaaagagcagcatgcccgtgaagatcgagaaggagatcatcgacaccgccgacgagttcgacgacgaggacgacgaccccaacgacggcggcgccgtggtgaacgacatgagccacgacaaccactgccacagccaggaggagatgagccccggcatgagcgtgaaggacttcagcaagcacaacagaaccagatgcatcagcagaaccgagatcagaagagccgacagcatgaccagcgaggaccaggagcccgagagagactacgagaacgagagcgagagcagcgagcccaagctgggcgaggagagcatggagggcgacgagcacatccacagcgaggtgagcgagaaggtgctgatgaacagcgagagacccgacgagaaccacagcgagcccagccaccaggacgtgatcaaggtgaaggaggagttcaccgaccccacctacgacatgttctacatgagccagtacggcctgtacaacggcggcggcgccagcatggccgccctgcacgagagcttcaccagcagcctgaactacggcagcccccagaagttcagccccgagggcgacctgtgcagcagccccgaccccaagatctgctacgtgtgcaagaagagcttcaagagcagctacagcgtgaagctgcactacagaaacgtgcacctgaaggagatgcacgtgtgcaccgtggccggctgcaacgccgccttccccagcagaagaagcagagacagatactgggagaagagcaacgagcagaacggcctgctggtgagctggggcgagaccctgagcagcctgaagtag

SEQ ID NO: 74037 - DNA, 3099 bp, synthetic construct
  misc_feature 1..3099: note = Description of Artificial Sequence: Synthetic coding sequence
  source 1..3099: mol_type = other DNA
atggcccacctgggccccaccccccccccccacagcctgaactacaagagcgaggacagactgagcgagcaggactggcccgcctacttcaaggtgccctgctgcggcgtggacaccagccagatcgaggccatcagatgcaccctggtgaactgcacctgcgagtgcttccagcccggcaagatcaacctgagaacctgcgaccagtgcaagcacggctgggtggcccacgccctggacaagctgagcacccagcacctgtaccaccccacccaggtggagatcgtgcagagcaacgtggtgttcgacatcagcagcctgatgctgtacggcacccaggccgtgcccgtgagactgaagatcctgctggacagactgttcagcgtgctgaagcaggaggaggtgctgcacatcctgcacggcctgggctggaccctgagagactacgtgagaggctacatcctgcaggacgccgccggcaaggtgctggacagatgggccatcatgagcagagaggaggagatcatcaccctgcagcagttcctgagattcggcgagaccaagagcatcgtggagctgatggccatccaggagaaggagggccaggccgtggccgtgcccagcagcaagaccgacagcgacatcagaaccttcatcgagagcaacaacagaaccagaagccccagcctgctggcccacctggagaacagcaaccccagcagcatccaccacttcgagaacatccccaacagcctggccttcctgctgcccttccagtacatcaaccccgtgagcgcccccctgctgggcctgccccccaacggcctgctgctggagcagcccggcctgagactgagagagcccagcctgagcacccagaacgagtacaacgagagcagcgagagcgaggtgagccccaccccctacaagaacgaccagacccccaacagaaacgccctgaccagcatcaccaacgtggagcccaagaccgagcccgcctgcgtgagccccatccagaacagcgcccccgtgagcgacctgaccaagaccgagcaccccaagagcagcttcagaatccacagaatgagaagaatgggcagcgccagcagaaagggcagagtgttctgcaacgcctgcggcaagaccttctacgacaagggcaccctgaagatccactacaacgccgtgcacctgaagatcaagcacagatgcaccatcgagggctgcaacatggtgttcagcagcctgagaagcagaaacagacacagcgccaaccccaaccccagactgcacatgcccatgctgagaaacaacagagacaaggacctgatcagagccaccagcggcgccgccacccccgtgatcgccagcaccaagagcaacctggccctgaccagccccggcagaccccccatgggcttcaccaccccccccctggaccccgtgctgcagaaccccctgcccagccagctggtgttcagcggcctgaagaccgtgcagcccgtgccccccttctacagaagcctgctgacccccggcgagatggtgagcccccccaccagcctgcccaccagccccatcatccccaccagcggcaccatcgagcagcacccccccccccccagcgagcccgtggtgcccgccgtgatgatggccacccacgagcccagcgccgacctggcccccaagaagaagcccagaaagagcagcatgcccgtgaagatcgagaaggagatcatcgacaccgccgacgagttcgacgacgaggacgacgaccccaacgacggcggcgccgtggtgaacgacatgagccacgacaaccactgccacagccaggaggagatgagccccggcatgagcgtgaaggacttcagcaagcacaacagaaccagatgcatcagcagaaccgagatcagaagagccgacagcatgaccagcgaggaccaggagcccgagagagactacgagaacgagagcgagagcagcgagcccaagctgggcgaggagagcatggagggcgacgagcacatccacagcgaggtgagcgagaaggtgctgatgaacagcgagagacccgacgagaaccacagcgagcccagccaccaggacgtgatcaaggtgaaggaggagttcaccgaccccacctacgacatgttctacatgagccagtacggcctgtacaacggcggcggcgccagcatggccgccctgcacgagagcttcaccagcagcctgaactacggcagcccccagaagttcagccccgagggcgacctgtgcagcagccccgaccccaagatctgctacgtgtgcaagaagagcttcaagagcagctacagcgtgaagctgcactacagaaacgtgcacctgaaggagatgcacgtgtgcaccgtggccggctgcaacgccgccttccccagcagaagaagcagagacagacacagcgccaacatcaacctgcacagaaagctgctgaccaaggagctggacgacatgggcctggacagcagccagcccagcctgagcaaggacctgagagacgagttcctggtgaagatctacggcgcccagcaccccatgggcctggacgtgagagaggacgccagcagccccgccggcaccgaggacagccacctgaacggctacggcagaggcatggccgaggactacatggtgctggacctgagcaccaccagcagcctgcagagcagcagcagcatccacagcagcagagagagcgacgccggcagcgacgagggcatcctgctggacgacatcgacggcgccagcgacagcggcgagagcgcccacaaggccgaggcccccgccctgcccggcagcctgggcgccgaggtgagcggcagcctgatgttcagcagcctgagcggcagcaacggcggcatcatgtgcaacatctgccacaagatgtacagcaacaagggcaccctgagagtgcactacaagaccgtgcacctgagagagatgcacaagtgcaaggtgcccggctgcaacatgatgttcagcagcgtgagaagcagaaacagacacagccagaaccccaacctgcacaagaacatccccttcaccagcgtggactag

SEQ ID NO: 74038 - DNA, 3300 bp, synthetic construct
  misc_feature 1..3300: note = Description of Artificial Sequence: Synthetic coding sequence
  source 1..3300: mol_type = other DNA
atggcccacctgggccccaccccccccccccacagcctgaactacaagagcgaggacagactgagcgagcaggactggcccgcctacttcaaggtgccctgctgcggcgtggacaccagccagatcgagagcgaggaggccgaggtggacgtgagagagagagagacccagagagacagagagcccaagagagccagagacctgaccctgagagacagctgcaccgacaacagcatgcagttcggcaccagaaccaccaccgccgagcccggcttcatgggcacctggcagaacgccgacaccaacctgctgttcagaatgagccagcaggccatcagatgcaccctggtgaactgcacctgcgagtgcttccagcccggcaagatcaacctgagaacctgcgaccagtgcaagcacggctgggtggcccacgccctggacaagctgagcacccagcacctgtaccaccccacccaggtggagatcgtgcagagcaacgtggtgttcgacatcagcagcctgatgctgtacggcacccaggccgtgcccgtgagactgaagatcctgctggacagactgttcagcgtgctgaagcaggaggaggtgctgcacatcctgcacggcctgggctggaccctgagagactacgtgagaggctacatcctgcaggacgccgccggcaaggtgctggacagatgggccatcatgagcagagaggaggagatcatcaccctgcagcagttcctgagattcggcgagaccaagagcatcgtggagctgatggccatccaggagaaggagggccaggccgtggccgtgcccagcagcaagaccgacagcgacatcagaaccttcatcgagagcaacaacagaaccagaagccccagcctgctggcccacctggagaacagcaaccccagcagcatccaccacttcgagaacatccccaacagcctggccttcctgctgcccttccagtacatcaaccccgtgagcgcccccctgctgggcctgccccccaacggcctgctgctggagcagcccggcctgagactgagagagcccagcctgagcacccagaacgagtacaacgagagcagcgagagcgaggtgagccccaccccctacaagaacgaccagacccccaacagaaacgccctgaccagcatcaccaacgtggagcccaagaccgagcccgcctgcgtgagccccatccagaacagcgcccccgtgagcgacctgaccaagaccgagcaccccaagagcagcttcagaatccacagaatgagaagaatgggcagcgccagcagaaagggcagagtgttctgcaacgcctgcggcaagaccttctacgacaagggcaccctgaagatccactacaacgccgtgcacctgaagatcaagcacagatgcaccatcgagggctgcaacatggtgttcagcagcctgagaagcagaaacagacacagcgccaaccccaaccccagactgcacatgcccatgctgagaaacaacagagacaaggacctgatcagagccaccagcggcgccgccacccccgtgatcgccagcaccaagagcaacctggccctgaccagccccggcagaccccccatgggcttcaccaccccccccctggaccccgtgctgcagaaccccctgcccagccagctggtgttcagcggcctgaagaccgtgcagcccgtgccccccttctacagaagcctgctgacccccggcgagatggtgagcccccccaccagcctgcccaccagccccatcatccccaccagcggcaccatcgagcagcacccccccccccccagcgagcccgtggtgcccgccgtgatgatggccacccacgagcccagcgccgacctggcccccaagaagaagcccagaaagagcagcatgcccgtgaagatcgagaaggagatcatcgacaccgccgacgagttcgacgacgaggacgacgaccccaacgacggcggcgccgtggtgaacgacatgagccacgacaaccactgccacagccaggaggagatgagccccggcatgagcgtgaaggacttcagcaagcacaacagaaccagatgcatcagcagaaccgagatcagaagagccgacagcatgaccagcgaggaccaggagcccgagagagactacgagaacgagagcgagagcagcgagcccaagctgggcgaggagagcatggagggcgacgagcacatccacagcgaggtgagcgagaaggtgctgatgaacagcgagagacccgacgagaaccacagcgagcccagccaccaggacgtgatcaaggtgaaggaggagttcaccgaccccacctacgacatgttctacatgagccagtacggcctgtacaacggcggcggcgccagcatggccgccctgcacgagagcttcaccagcagcctgaactacggcagcccccagaagttcagccccgagggcgacctgtgcagcagccccgaccccaagatctgctacgtgtgcaagaagagcttcaagagcagctacagcgtgaagctgcactacagaaacgtgcacctgaaggagatgcacgtgtgcaccgtggccggctgcaacgccgccttccccagcagaagaagcagagacagacacagcgccaacatcaacctgcacagaaagctgctgaccaaggagctggacgacatgggcctggacagcagccagcccagcctgagcaaggacctgagagacgagttcctggtgaagatctacggcgcccagcaccccatgggcctggacgtgagagaggacgccagcagccccgccggcaccgaggacagccacctgaacggctacggcagaggcatggccgaggactacatggtgctggacctgagcaccaccagcagcctgcagagcagcagcagcatccacagcagcagagagagcgacgccggcagcgacgagggcatcctgctggacgacatcgacggcgccagcgacagcggcgagagcgcccacaaggccgaggcccccgccctgcccggcagcctgggcgccgaggtgagcggcagcctgatgttcagcagcctgagcggcagcaacggcggcatcatgtgcaacatctgccacaagatgtacagcaacaagggcaccctgagagtgcactacaagaccgtgcacctgagagagatgcacaagtgcaaggtgcccggctgcaacatgatgttcagcagcgtgagaagcagaaacagacacagccagaaccccaacctgcacaagaacatccccttcaccagcgtggactag

SEQ ID NO: 74039 - DNA, 984 bp, synthetic construct
  misc_feature 1..984: note = Description of Artificial Sequence: Synthetic coding sequence
  source 1..984: mol_type = other DNA
cccagcgagcccgtggtgcccgccgtgatgatggccacccacgagcccagcgccgacctggcccccaagaagaagcccagaaagagcagcatgcccgtgaagatcgagaaggagatcatcgacaccgccgacgagttcgacgacgaggacgacgaccccaacgacggcggcgccgtggtgaacgacatgagccacgacaaccactgccacagccaggaggagatgagccccggcatgagcgtgaaggacttcagcaagcacaacagaaccagatgcatcagcagaaccgagatcagaagagccgacagcatgaccagcgaggaccaggagcccgagagagactacgagaacgagagcgagagcagcgagcccaagctgggcgaggagagcatggagggcgacgagcacatccacagcgaggtgagcgagaaggtgctgatgaacagcgagagacccgacgagaaccacagcgagcccagccaccaggacgtgatcaaggtgaaggaggagttcaccgaccccacctacgacatgttctacatgagccagtacggcctgtacaacggcggcggcgccagcatggccgccctgcacgagagcttcaccagcagcctgaactacggcagcccccagaagttcagccccgagggcgacctgtgcagcagccccgaccccaagatctgctacgtgtgcaagaagagcttcaagagcagctacagcgtgaagctgcactacagaaacgtgcacctgaaggagatgcacgtgtgcaccgtggccggctgcaacgccgccttccccagcagaagaagcagagacagaaacagaaacctgagaatggagagaaccatcggccccggccacagagacagcctgcacctgagaagaggcaacagcaacagacccggcacctgctgcctgcacaccggcgacagcctggaggagagcgtgatcgtgagaatcagctgcaagagactggagagctag

SEQ ID NO: 74040 - DNA, 2583 bp, synthetic construct
  misc_feature 1..2583: note = Description of Artificial Sequence: Synthetic coding sequence
  source 1..2583: mol_type = other DNA
agcgaggaggccgaggtggacgtgagagagagagagacccagagagacagagagcccaagagagccagagacctgaccctgagagacagctgcaccgacaacagcatgcagttcggcaccagaaccaccaccgccgagcccggcttcatgggcacctggcagaacgccgacaccaacctgctgttcagaatgagccagcaggccatcagatgcaccctggtgaactgcacctgcgagtgcttccagcccggcaagatcaacctgagaacctgcgaccagtgcaagcacggctgggtggcccacgccctggacaagctgagcacccagcacctgtaccaccccacccaggtggagatcgtgcagagcaacgtggtgttcgacatcagcagcctgatgctgtacggcacccaggccgtgcccgtgagactgaagatcctgctggacagactgttcagcgtgctgaagcaggaggaggtgctgcacatcctgcacggcctgggctggaccctgagagactacgtgagaggctacatcctgcaggacgccgccggcaaggtgctggacagatgggccatcatgagcagagaggaggagatcatcaccctgcagcagttcctgagattcggcgagaccaagagcatcgtggagctgatggccatccaggagaaggagggccaggccgtggccgtgcccagcagcaagaccgacagcgacatcagaaccttcatcgagagcaacaacagaaccagaagccccagcctgctggcccacctggagaacagcaaccccagcagcatccaccacttcgagaacatccccaacagcctggccttcctgctgcccttccagtacatcaaccccgtgagcgcccccctgctgggcctgccccccaacggcctgctgctggagcagcccggcctgagactgagagagcccagcctgagcacccagaacgagtacaacgagagcagcgagagcgaggtgagccccaccccctacaagaacgaccagacccccaacagaaacgccctgaccagcatcaccaacgtggagcccaagaccgagcccgcctgcgtgagccccatccagaacagcgcccccgtgagcgacctgaccaagaccgagcaccccaagagcagcttcagaatccacagaatgagaagaatgggcagcgccagcagaaagggcagagtgttctgcaacgcctgcggcaagaccttctacgacaagggcaccctgaagatccactacaacgccgtgcacctgaagatcaagcacagatgcaccatcgagggctgcaacatggtgttcagcagcctgagaagcagaaacagacacagcgccaaccccaaccccagactgcacatgcccatgctgagaaacaacagagacaaggacctgatcagagccaccagcggcgccgccacccccgtgatcgccagcaccaagagcaacctggccctgaccagccccggcagaccccccatgggcttcaccaccccccccctggaccccgtgctgcagaaccccctgcccagccagctggtgttcagcggcctgaagaccgtgcagcccgtgccccccttctacagaagcctgctgacccccggcgagatggtgagcccccccaccagcctgcccaccagccccatcatccccaccagcggcaccatcgagcagcacccccccccccccagcgagcccgtggtgcccgccgtgatgatggccacccacgagcccagcgccgacctggcccccaagaagaagcccagaaagagcagcatgcccgtgaagatcgagaaggagatcatcgacaccgccgacgagttcgacgacgaggacgacgaccccaacgacggcggcgccgtggtgaacgacatgagccacgacaaccactgccacagccaggaggagatgagccccggcatgagcgtgaaggacttcagcaagcacaacagaaccagatgcatcagcagaaccgagatcagaagagccgacagcatgaccagcgaggaccaggagcccgagagagactacgagaacgagagcgagagcagcgagcccaagctgggcgaggagagcatggagggcgacgagcacatccacagcgaggtgagcgagaaggtgctgatgaacagcgagagacccgacgagaaccacagcgagcccagccaccaggacgtgatcaaggtgaaggaggagttcaccgaccccacctacgacatgttctacatgagccagtacggcctgtacaacggcggcggcgccagcatggccgccctgcacgagagcttcaccagcagcctgaactacggcagcccccagaagttcagccccgagggcgacctgtgcagcagccccgaccccaagatctgctacgtgtgcaagaagagcttcaagagcagctacagcgtgaagctgcactacagaaacgtgcacctgaaggagatgcacgtgtgcaccgtggccggctgcaacgccgccttccccagcagaagaagcagagacagaaacagaaacctgagaatggagagaaccatcggccccggccacagagacagcctgcacctgctgcccacctag

SEQ ID NO: 74041 - DNA, 1206 bp, synthetic construct
  misc_feature 1..1206: note = Description of Artificial Sequence: Synthetic coding sequence
  source 1..1206: mol_type = other DNA
atggcccacctgggccccaccccccccccccacagcctgaactacaagagcgaggacagactgagcgagcaggactggcccgcctacttcaaggtgccctgctgcggcgtggacaccagccagatcgagagcgaggaggccgaggtggacgtgagagagagagagacccagagagacagagagcccaagagagccagagacctgaccctgagagacagctgcaccgacaacagcatgcagttcggcaccagaaccaccaccgccgagcccggcttcatgggcacctggcagaacgccgacaccaacctgctgttcagaatgagccagcaggtgcccctggcctgcaccggcagagtgctgggcgccgacttctgccccaacctggaggagccctaccacagactggaggtgcaggccatcagatgcaccctggtgaactgcacctgcgagtgcttccagcccggcaagatcaacctgagaacctgcgaccagtgcaagcacggctgggtggcccacgccctggacaagctgagcacccagcacctgtaccaccccacccaggtggagatcgtgcagagcaacgtggtgttcgacatcagcagcctgatgctgtacggcacccaggccgtgcccgtgagactgaagatcctgctggacagactgttcagcgtgctgaagcaggaggaggtgctgcacatcctgcacggcctgggctggaccctgagagactacgtgagaggctacatcctgcaggacgccgccggcaaggtgctggacagatgggccatcatgagcagagaggaggagatcatcaccctgcagcagttcctgagattcggcgagaccaagagcatcgtggagctgatggccatccaggagaaggagggccaggccgtggccgtgcccagcagcaagaccgacagcgacatcagaaccttcatcgagagcaacaacagaaccagaagccccagcctgctggcccacctggagaacagcaaccccagcagcatccaccacttcgagaacatccccaacagcctggccttcctgctgcccttccagtacatcaaccccgtgagcgcccccctgctgggcctgccccccaacggcctgctgctggagcagcccggcctgagactgagagagcccagcctgagcacccagaacgagtacaacgagagcagcgagagcgaggtgagcccctag

SEQ ID NO: 74042 - DNA, 306 bp, synthetic construct
  misc_feature 1..306: note = Description of Artificial Sequence: Synthetic coding sequence
  source 1..306: mol_type = other DNA
atgtgcagactgctggtgcccctggcctgcaccggcagagtgctgggcgccgacttctgccccaacctggaggagccctaccacagactggaggtgcaggccatcagatgcaccctggtgaactgcacctgcgagtgcttccagcccggcaagatcaacctgagaacctgcgaccagtgcaagcacggctgggtggcccacgccctggacaagctgagcacccagcacctgtaccaccccacccaggtggagatcgtgcagagcaacgtggtgttcgacatcagcagcctgatgctgtacggctag

SEQ ID NO: 74043 - DNA, 1233 bp, synthetic construct
  misc_feature 1..1233: note = Description of Artificial Sequence: Synthetic coding sequence
  source 1..1233: mol_type = other DNA
atggcccacctgggccccaccccccccccccacagcctgaactacaagagcgaggacagactgagcgagcaggactggcccgcctacttcaaggtgccctgctgcggcgtggacaccagccagatcgagagcgaggaggccgaggtggacgtgagagagagagagacccagagagacagagagcccaagagagccagagacctgaccctgagagacagctgcaccgacaacagcatgcagttcggcaccagaaccaccaccgccgagcccggcttcatgggcacctggcagaacgccgacaccaacctgctgttcagaatgagccagcaggccggcctgaagctgctgaccagcggcgacccccccgtgctggacttccagagcgccggcatcaccggcgtgagccactgcaccagactgaaggtggccatgatcagcaaggccatcagatgcaccctggtgaactgcacctgcgagtgcttccagcccggcaagatcaacctgagaacctgcgaccagtgcaagcacggctgggtggcccacgccctggacaagctgagcacccagcacctgtaccaccccacccaggtggagatcgtgcagagcaacgtggtgttcgacatcagcagcctgatgctgtacggcacccaggccgtgcccgtgagactgaagatcctgctggacagactgttcagcgtgctgaagcaggaggaggtgctgcacatcctgcacggcctgggctggaccctgagagactacgtgagaggctacatcctgcaggacgccgccggcaaggtgctggacagatgggccatcatgagcagagaggaggagatcatcaccctgcagcagttcctgagattcggcgagaccaagagcatcgtggagctgatggccatccaggagaaggagggccaggccgtggccgtgcccagcagcaagaccgacagcgacatcagaaccttcatcgagagcaacaacagaaccagaagccccagcctgctggcccacctggagaacagcaaccccagcagcatccaccacttcgagaacatccccaacagcctggccttcctgctgcccttccagtacatcaaccccgtgagcgcccccctgctgggcctgccccccaacggcctgctgctggagcagcccggcctgagactgagagagcccagcctgagcacccagaacgagtacaacgagagcagcgagagcgaggtgagcccctag

SEQ ID NO: 74044 - DNA, 2712 bp, synthetic construct; identical to SEQ ID NO: 74036
  misc_feature 1..2712: note = Description of Artificial Sequence: Synthetic coding sequence
  source 1..2712: mol_type = other DNA

SEQ ID NO: 74045 - DNA, 2712 bp, synthetic construct
  misc_feature 1..2712: note = Description of Artificial Sequence: Synthetic coding sequence
  source 1..2712: mol_type = other DNA
atggcccacctgggccccaccccccccccccacagcctgaactacaagagcgaggacagactgagcgagcaggactggcccgcctacttcaaggtgccctgctgcggcgtggacaccagccagatcgagagcgaggaggccgaggtggacgtgagagagagagagacccagagagacagagagcccaagagagccagagacctgaccctgagagacagctgcaccgacaacagcatgcagttcggcaccagaaccaccaccgccgagcccggcttcatgggcacctggcagaacgccgacaccaacctgctgttcagaatgagccagcaggccatcagatgcaccctggtgaactgcacctgcgagtgcttccagcccggcaagatcaacctgagaacctgcgaccagtgcaagcacggctgggtggcccacgccctggacaagctgagcacccagcacctgtaccaccccacccaggtggagatcgtgcagagcaacgtggtgttcgacatcagcagcctgatgctgtacggcacccaggccgtgcccgtgagactgaagatcctgctggacagactgttcagcgtgctgaagcaggaggaggtgctgcacatcctgcacggcctgggctggaccctgagagactacgtgagaggctacatcctgcaggacgccgccggcaaggtgctggacagatgggccatcatgagcagagaggaggagatcatcaccctgcagcagttcctgagattcggcgagaccaagagcatcgtggagctgatggccatccaggagaaggagggccaggccgtggccgtgcccagcagcaagaccgacagcgacatcagaaccttcatcgagagcaacaacagaaccagaagccccagcctgctggcccacctggagaacagcaaccccagcagcatccaccacttcgagaacatccccaacagcctggccttcctgctgcccttccagtacatcaaccccgtgagcgcccccctgctgggcctgccccccaacggcctgctgctggagcagcccggcctgagactgagagagcccagcctgagcacccagaacgagtacaacgagagcagcgagagcgaggtgagccccaccccctacaagaacgaccagacccccaacagaaacgccctgaccagcatcaccaacgtggagcccaagaccgagcccgcctgcgtgagccccatccagaacagcgcccccgtgagcgacctgaccaagaccgagcaccccaagagcagcttcagaatccacagaatgagaagaatgggcagcgccagcagaaagggcagagtgttctgcaacgcctgcggcaagaccttctacgacaagggcaccctgaagatccactacaacgccgtgcacctgaagatcaagcacagatgcaccatcgagggctgcaacatggtgttcagcagcctgagaagcagaaacagacacagcgccaaccccaaccccagactgcacatgcccatgctgagaaacaacagagacaaggacctgatcagagccaccagcggcgccgccacccccgtgatcgccagcaccaagagcaacctggccctgaccagccccggcagaccccccatgggcttcaccaccccccccctggaccccgtgctgcagaaccccctgcccagccagctggtgttcagcggcctgaagaccgtgcagcccgtgccccccttctacagaagcctgctgacccccggcgagatggtgagcccccccaccagcctgcccaccagccccatcatccccaccagcggcaccatcgagcagcacccccccccccccagcgagcccgtggtgcccgccgtgatgatggccacccacgagcccagcgccgacctggcccccaagaagaagcccagaaagagcagcatgcccgtgaagatcgagaaggagatcatcgacaccgccgacgagttcgacgacgaggacgacgaccccaacgacggcggcgccgtggtgaacgacatgagccacgacaaccactgccacagccaggaggagatgagccccggcatgagcgtgaaggacttcagcaagcacaacagaaccagatgcatcagcagaaccgagatcagaagagccgacagcatgaccagcgaggaccaggagcccgagagagactacgagaacgagagcgagagcagcgagcccaagctgggcgaggagagcatggagggcgacgagcacatccacagcgaggtgagcgagaaggtgctgatgaacagcgagagacccgacgagaaccacagcgagcccagccaccaggacgtgatcaaggtgaaggaggagttcaccgaccccacctacgacatgttctacatgagccagtacggcctgtacaacggcggcggcgccagcatggccgccctgcacgagagcttcaccagcagcctgaactacggcagcccccagaagttcagccccgagggcgacctgtgcagcagccccgaccccaagatctgctacgtgtgcaagaagagcttcaagagcagctacagcgtgaagctgcactacagaaacgtgcacctgaaggagatgcacgtgtgcaccgtggccggctgcaacgccgccttccccagcagaagaagcagagacagaaacagaaacctgagaatggagagaaccatcggccccggccacagagacagcctgcacctgagaagcacctag

SEQ ID NO: 74046 - DNA, 1950 bp, synthetic construct
  misc_feature 1..1950: note = Description of Artificial Sequence: Synthetic coding sequence
  source 1..1950: mol_type = other DNA
atgctgtacggcacccaggccgtgcccgtgagactgaagatcctgctggacagactgttcagcgtgctgaagcaggaggaggtgctgcacatcctgcacggcctgggctggaccctgagagactacgtgagaggctacatcctgcaggacgccgccggcaaggtgctggacagatgggccatcatgagcagagaggaggagatcatcaccctgcagcagttcctgagattcggcgagaccaagagcatcgtggagctgatggccatccaggagaaggagggccaggccgtggccgtgcccagcagcaagaccgacagcgacatcagaaccttcatcgagagcaacaacagaaccagaagccccagcctgctggcccacctggagaacagcaaccccagcagcatccaccacttcgagaacatccccaacagcctggccttcctgctgcccttccagtacatcaaccccgtgagcgcccccctgctgggcctgccccccaacggcctgctgctggagcagcccggcctgagactgagagagcccagcctgagcacccagaacgagtacaacgagagcagcgagagcgaggtgagccccaccccctacaagaacgaccagacccccaacagaaacgccctgaccagcatcaccaacgtggagcccaagaccgagcccgcctgcgtgagccccatccagaacagcgcccccgtgagcgacctgaccaagaccgagcaccccaagagcagcttcagaatccacagaatgagaagaatgggcagcgccagcagaaagggcagagtgttctgcaacgcctgcggcaagaccttctacgacaagggcaccctgaagatccactacaacgccgtgcacctgaagatcaagcacagatgcaccatcgagggctgcaacatggtgttcagcagcctgagaagcagaaacagacacagcgccaaccccaaccccagactgcacatgcccatgctgagaaacaacagagacaaggacctgatcagagccaccagcggcgccgccacccccgtgatcgccagcaccaagagcaacctggccctgaccagccccggcagaccccccatgggcttcaccaccccccccctggaccccgtgctgcagaaccccctgcccagccagctggtgttcagcggcctgaagaccgtgcagcccgtgccccccttctacagaagcctgctgacccccggcgagatggtgagcccccccaccagcctgcccaccagccccatcatccccaccagcggcaccatcgagcagcacccccccccccccagcgagcccgtggtgcccgccgtgatgatggccacccacgagcccagcgccgacctggcccccaagaagaagcccagaaagagcagcatgcccgtgaagatcgagaaggagatcatcgacaccgccgacgagttcgacgacgaggacgacgaccccaacgacggcggcgccgtggtgaacgacatgagccacgacaaccactgccacagccaggaggagatgagccccggcatgagcgtgaaggacttcagcaagcacaacagaaccagatgcatcagcagaaccgagatcagaagagccgacagcatgaccagcgaggaccaggagcccgagagagactacgagaacgagagcgagagcagcgagcccaagctgggcgaggagagcatggagggcgacgagcacatccacagcgaggtgagcgagaaggtgctgatgaacagcgagagacccgacgagaaccacagcgagcccagccaccaggacgtgatcaaggtgaaggaggagttcaccgaccccacctacgacatgttctacatgagccagtacggcctgtacaacggcggcggcgccagcatggccgccctgcacgagagcttcaccagcagcctgaactacggcagcccccaggtgctgcccagaagatag

SEQ ID NO: 74047 - DNA, 3015 bp, synthetic construct
  misc_feature 1..3015: note = Description of Artificial Sequence: Synthetic coding sequence
  source 1..3015: mol_type = other DNA
atgaccgacgacgtgaaggagcccagcagattcagcctgctgctggccatcagatgcaccctggtgaactgcacctgcgagtgcttccagcccggcaagatcaacctgagaacctgcgaccagtgcaagcacggctgggtggcccacgccctggacaagctgagcacccagcacctgtaccaccccacccaggtggagatcgtgcagagcaacgtggtgttcgacatcagcagcctgatgctgtacggcacccaggccgtgcccgtgagactgaagatcctgctggacagactgttcagcgtgctgaagcaggaggaggtgctgcacatcctgcacggcctgggctggaccctgagagactacgtgagaggctacatcctgcaggacgccgccggcaaggtgctggacagatgggccatcatgagcagagaggaggagatcatcaccctgcagcagttcctgagattcggcgagaccaagagcatcgtggagctgatggccatccaggagaaggagggccaggccgtggccgtgcccagcagcaagaccgacagcgacatcagaaccttcatcgagagcaacaacagaaccagaagccccagcctgctggcccacctggagaacagcaaccccagcagcatccaccacttcgagaacatccccaacagcctggccttcctgctgcccttccagtacatcaaccccgtgagcgcccccctgctgggcctgccccccaacggcctgctgctggagcagcccggcctgagactgagagagcccagcctgagcacccagaacgagtacaacgagagcagcgagagcgaggtgagccccaccccctacaagaacgaccagacccccaacagaaacgccctgaccagcatcaccaacgtggagcccaagaccgagcccgcctgcgtgagccccatccagaacagcgcccccgtgagcgacctgaccaagaccgagcaccccaagagcagcttcagaatccacagaatgagaagaatgggcagcgccagcagaaagggcagagtgttctgcaacgcctgcggcaagaccttctacgacaagggcaccctgaagatccactacaacgccgtgcacctgaagatcaagcacagatgcaccatcgagggctgcaacatggtgttcagcagcctgagaagcagaaacagacacagcgccaaccccaaccccagactgcacatgcccatgctgagaaacaacagagacaaggacctgatcagagccaccagcggcgccgccacccccgtgatcgccagcaccaagagcaacctggccctgaccagccccggcagaccccccatgggcttcaccaccccccccctggaccccgtgctgcagaaccccctgcccagccagctggtgttcagcggcctgaagaccgtgcagcccgtgccccccttctacagaagcctgctgacccccggcgagatggtgagcccccccaccagcctgcccaccagccccatcatccccaccagcggcaccatcgagcagcacccccccccccccagcgagcccgtggtgcccgccgtgatgatggccacccacgagcccagcgccgacctggcccccaagaagaagcccagaaagagcagcatgcccgtgaagatcgagaaggagatcatcgacaccgccgacgagttcgacgacgaggacgacgaccccaacgacggcggcgccgtggtgaacgacatgagccacgacaaccactgccacagccaggaggagatgagccccggcatgagcgtgaaggacttcagcaagcacaacagaaccagatgcatcagcagaaccgagatcagaagagccgacagcatgaccagcgaggaccaggagcccgagagagactacgagaacgagagcgagagcagcgagcccaagctgggcgaggagagcatggagggcgacgagcacatccacagcgaggtgagcgagaaggtgctgatgaacagcgagagacccgacgagaaccacagcgagcccagccaccaggacgtgatcaaggtgaaggaggagttcaccgaccccacctacgacatgttctacatgagccagtacggcctgtacaacggcggcggcgccagcatggccgccctgcacgagagcttcaccagcagcctgaactacggcagcccccagaagttcagccccgagggcgacctgtgcagcagccccgaccccaagatctgctacgtgtgcaagaagagcttcaagagcagctacagcgtgaagctgcactacagaaacgtgcacctgaaggagatgcacgtgtgcaccgtggccggctgcaacgccgccttccccagcagaagaagcagagacagacacagcgccaacatcaacctgcacagaaagctgctgaccaaggagctggacgacatgggcctggacagcagccagcccagcctgagcaaggacctgagagacgagttcctggtgaagatctacggcgcccagcaccccatgggcctggacgtgagagaggacgccagcagccccgccggcaccgaggacagccacctgaacggctacggcagaggcatggccgaggactacatggtgctggacctgagcaccaccagcagcctgcagagcagcagcagcatccacagcagcagagagagcgacgccggcagcgacgagggcatcctgctggacgacatcgacggcgccagcgacagcggcgagagcgcccacaaggccgaggcccccgccctgcccggcagcctgggcgccgaggtgagcggcagcctgatgttcagcagcctgagcggcagcaacggcggcatcatgtgcaacatctgccacaagatgtacagcaacaagggcaccctgagagtgcactacaagaccgtgcacctgagagagatgcacaagtgcaaggtgcccggctgcaacatgatgttcagcagcgtgagaagcagaaacagacacagccagaaccccaacctgcacaagaacatccccttcaccagcgtggactag

SEQ ID NO: 74048 - DNA, 11781 bp, synthetic construct
  misc_feature 1..11781: note = Description of Artificial Sequence: Synthetic coding sequence
  source 1..11781: mol_type = other DNA
atgggcaacgaggtgagcctggagggcggcgccggcgacggccccctgccccccggcggcgccggccccggccccggccccggccccggccccggcgccggcaagccccccagcgcccccgccggcggcggccagctgcccgccgccggcgccgccagaagcaccgccgtgccccccgtgcccggccccggccccggccccggccccggccccggccccggcagcaccagcagaagactggaccccaaggagcccctgggcaaccagagagccgccagccccacccccaagcaggccagcgccaccacccccggccacgagagccccagagagaccagagcccagggccccgccggccaggaggccgacggccccagaagaaccctgcaggtggacagcagaacccagagaagcggcagaagccccagcgtgagccccgacagaggcagcacccccaccagcccctacagcgtgccccagatcgcccccctgcccagcagcaccctgtgccccatctgcaagaccagcgacctgaccagcacccccagccagcccaacttcaacacctgcacccagtgccacaacaaggtgtgcaaccagtgcggcttcaaccccaacccccacctgacccaggtgaaggagtggctgtgcctgaactgccagatgcagagagccctgggcatggacatgaccaccgcccccagaagcaagagccagcagcagctgcacagccccgccctgagccccgcccacagccccgccaagcagcccctgggcaagcccgaccaggagagaagcagaggccccggcggcccccagcccggcagcagacaggccgagaccgccagagccaccagcgtgcccggccccgcccaggccgccgccccccccgaggtgggcagagtgagcccccagcccccccagcccaccaagcccagcaccgccgagcccagaccccccgccggcgaggcccccgccaagagcgccaccgccgtgcccgccggcctgggcgccaccgagcagacccaggagggcctgaccggcaagctgttcggcctgggcgccagcctgctgacccaggccagcaccctgatgagcgtgcagcccgaggccgacacccagggccagcccgcccccagcaagggcacccccaagatcgtgttcaacgacgccagcaaggaggccggccccaagcccctgggcagcggccccggccccggccccgcccccggcgccaagaccgagcccggcgccagaatgggccccggcagcggccccggcgccctgcccaagaccggcggcaccaccagccccaagcacggcagagccgagcaccaggccgccagcaaggccgccgccaagcccaagaccatgcccaaggagagagccatctgccccctgtgccaggccgagctgaacgtgggcagcaagagccccgccaactacaacacctgcaccacctgcagactgcaggtgtgcaacctgtgcggcttcaaccccaccccccacctggtggagaagaccgagtggctgtgcctgaactgccagaccaagagactgctggagggcagcctgggcgagcccacccccctgcccccccccaccagccagcagccccccgtgggcgccccccacagagccagcggcaccagccccctgaagcagaagggcccccagggcctgggccagcccagcggccccctgcccgccaaggccagccccctgagcaccaaggccagccccctgcccagcaaggccagcccccaggccaagcccctgagagccagcgagcccagcaagacccccagcagcgtgcaggagaagaagaccagagtgcccaccaaggccgagcccatgcccaagcccccccccgagaccacccccacccccgccacccccaaggtgaagagcggcgtgagaagagccgagcccgccacccccgtggtgaaggccgtgcccgaggcccccaagggcggcgaggccgaggacctggtgggcaagccctacagccaggacgccagcagaagcccccagagcctgagcgacaccggctacagcagcgacggcatcagcagcagccagagcgagatcaccggcgtggtgcagcaggaggtggagcagctggacagcgccggcgtgaccggcccccacccccccagccccagcgagatccacaaggtgggcagcagcatgagacccctgctgcaggcccagggcctggcccccagcgagagaagcaagcccctgagcagcggcaccggcgaggagcagaagcagagaccccacagcctgagcatcacccccgaggccttcgacagcgacgaggagctggaggacatcctggaggaggacgaggacagcgccgagtggagaagaagaagagagcagcaggacaccgccgagagcagcgacgacttcggcagccagctgagacacgactacgtggaggacagcagcgagggcggcctgagccccctgcccccccagccccccgccagagccgccgagctgaccgacgaggacttcatgagaagacagatcctggagatgagcgccgaggaggacaacctggaggaggacgacaccgccaccagcggcagaggcctggccaagcacggcacccagaagggcggccccagacccagacccgagcccagccaggagcccgccgccctgcccaagagaagactgccccacaacgccaccaccggctacgaggagctgctgcccgagggcggcagcgccgaggccaccgacggcagcggcaccctgcagggcggcctgagaagattcaagaccatcgagctgaacagcaccggcagctacggccacgagctggacctgggccagggccccgaccccagcctggacagagagcccgagctggagatggagagcctgaccggcagccccgaggacagaagcagaggcgagcacagcagcaccctgcccgccagcacccccagctacaccagcggcaccagccccaccagcctgagcagcctggaggaggacagcgacagcagccccagcagaagacagagactggaggaggccaagcagcagagaaaggccagacacagaagccacggccccctgctgcccaccatcgaggacagcagcgaggaggaggagctgagagaggaggaggagctgctgagagagcaggagaagatgagagaggtggagcagcagagaatcagaagcaccgccagaaagaccagaagagacaaggaggagctgagagcccagagaagaagagagagaagcaagaccccccccagcaacctgagccccatcgaggacgccagccccaccgaggagctgagacaggccgccgagatggaggagctgcacagaagcagctgcagcgagtacagccccagccccagcctggacagcgaggccgaggccctggacggcggccccagcagactgtacaagagcggcagcgagtacaacctgcccaccttcatgagcctgtacagccccaccgagacccccagcggcagcagcaccacccccagcagcggcagacccctgaagagcgccgaggaggcctacgaggagatgatgagaaaggccgagctgctgcagagacagcagggccaggccgccggcgccagaggcccccacggcggccccagccagcccaccggccccagaggcctgggcagcttcgagtaccaggacaccaccgacagagagtacggccaggccgcccagcccgccgccgagggcacccccgccagcctgggcgccgccgtgtacgaggagatcctgcagaccagccagagcatcgtgagaatgagacaggccagcagcagagacctggccttcgccgaggacaagaagaaggagaagcagttcctgaacgccgagagcgcctacatggaccccatgaagcagaacggcggccccctgacccccggcaccagccccacccagctggccgcccccgtgagcttcagcacccccaccagcagcgacagcagcggcggcagagtgatccccgacgtgagagtgacccagcacttcgccaaggagacccaggaccccctgaagctgcacagcagccccgccagccccagcagcgccagcaaggagatcggcatgcccttcagccagggccccggcacccccgccaccaccgccgtggccccctgccccgccggcctgcccagaggctacatgacccccgccagccccgccggcagcgagagaagccccagccccagcagcaccgcccacagctacggccacagccccaccaccgccaactacggcagccagaccgaggacctgccccaggcccccagcggcctggccgccgccggcagagccgccagagagaagcccctgagcgccagcgacggcgagggcggcaccccccagcccagcagagcctacagctacttcgccagcagcagcccccccctgagccccagcagccccagcgagagccccaccttcagccccggcaagatgggccccagagccaccgccgagttcagcacccagacccccagccccgcccccgccagcgacatgcccagaagccccggcgcccccacccccagccccatggtggcccagggcacccagaccccccacagacccagcacccccagactggtgtggcaggagagcagccaggaggcccccttcatggtgatcaccctggccagcgacgccagcagccagaccagaatggtgcacgccagcgccagcaccagccccctgtgcagccccaccgagacccagcccaccacccacggctacagccagaccaccccccccagcgtgagccagctgccccccgagccccccggcccccccggcttccccagagtgcccagcgccggcgccgacggccccctggccctgtacggctggggcgccctgcccgccgagaacatcagcctgtgcagaatcagcagcgtgcccggcaccagcagagtggagcccggccccagaacccccggcaccgccgtggtggacctgagaaccgccgtgaagcccacccccatcatcctgaccgaccagggcatggacctgaccagcctggccgtggaggccagaaagtacggcctggccctggaccccatccccggcagacagagcaccgccgtgcagcccctggtgatcaacctgaacgcccaggagcacaccttcctggccaccgccaccaccgtgagcatcaccatggccagcagcgtgttcatggcccagcagaagcagcccgtggtgtacggcgacccctaccagagcagactggacttcggccagggcggcggcagccccgtgtgcctggcccaggtgaagcaggtggagcaggccgtgcagaccgccccctacagaagcggccccagaggcagacccagagaggccaagttcgccagatacaacctgcccaaccaggtggcccccctggccagaagagacgtgctgatcacccagatgggcaccgcccagagcatcggcctgaagcccggccccgtgcccgagcccggcgccgagccccacagagccacccccgccgagctgagaagccacgccctgcccggcgccagaaagccccacaccgtggtggtgcagatgggcgagggcaccgccggcaccgtgaccaccctgctgcccgaggagcccgccggcgccctggacctgaccggcatgagacccgagagccagctggcctgctgcgacatggtgtacaagctgcccttcggcagcagctgcaccggcaccttccaccccgcccccagcgtgcccgagaagagcatggccgacgccgccccccccggccagagcagcagccccttctacggccccagagaccccgagccccccgagccccccacctacagagcccagggcgtggtgggccccggcccccacgaggagcagagaccctacccccagggcctgcccggcagactgtacagcagcatgagcgacaccaacctggccgaggccggcctgaactaccacgcccagagaatcggccagctgttccagggccccggcagagacagcgccatggacctgagcagcctgaagcacagctacagcctgggcttcgccgacggcagatacctgggccagggcctgcagtacggcagcgtgaccgacctgagacaccccaccgacctgctggcccaccccctgcccatgagaagatacagcagcgtgagcaacatctacagcgaccacagatacggccccagaggcgacgccgtgggcttccaggaggccagcctggcccagtacagcgccaccaccgccagagagatcagcagaatgtgcgccgccctgaacagcatggaccagtacggcggcagacacggcagcggcggcggcggccccgacctggtgcagtaccagccccagcacggccccggcctgagcgccccccagagcctggtgcccctgagacccggcctgctgggcaaccccaccttccccgagggccaccccagccccggcaacctggcccagtacggccccgccgccggccagggcaccgccgtgagacagctgctgcccagcaccgccaccgtgagagccgccgacggcatgatctacagcaccatcaacacccccatcgccgccaccctgcccatcaccacccagcccgccagcgtgctgagacccatggtgagaggcggcatgtacagaccctacgccagcggcggcatcaccgccgtgcccctgaccagcctgaccagagtgcccatgatcgcccccagagtgcccctgggccccaccggcctgtacagataccccgcccccagcagattccccatcgccagcagcgtgccccccgccgagggccccgtgtacctgggcaagcccgccgccgccaaggcccccggcgccggcggccccagcagacccgagatgcccgtgggcgccgccagagaggagcccctgcccaccaccacccccgccgccatcaaggaggccgccggcgcccccgcccccgcccccctggccggccagaagccccccgccgacgccgcccccggcggcggcagcggcgccctgagcagacccggcttcgagaaggaggaggccagccaggaggagagacagagaaagcagcaggagcagctgctgcagctggagagagagagagtggagctggagaagctgagacagctgagactgcaggaggagctggagagagagagagtggagctgcagagacacagagaggaggagcagctgctggtgcagagagagctgcaggagctgcagaccatcaagcaccacgtgctgcagcagcagcaggaggagagacaggcccagttcgccctgcagagagagcagctggcccagcagagactgcagctggagcagatccagcagctgcagcagcagctgcagcagcagctggaggagcagaagcagagacagaaggcccccttccccgccgcctgcgaggcccccggcagaggcccccccctggccgccgccgagctggcccagaacggccagtactggccccccctgacccacgccgccttcatcgccatggccggccccgagggcctgggccagcccagagagcccgtgctgcacagaggcctgcccagcagcgccagcgacatgagcctgcagaccgaggagcagtgggaggccagcagaagcggcatcaagaagagacacagcatgcccagactgagagacgcctgcgagctggagagcggcaccgagccctgcgtggtgagaagaatcgccgacagcagcgtgcagaccgacgacgaggacggcgagagcagatacctgctgagcagaagaagaagagccagaagaagcgccgactgcagcgtgcagaccgacgacgaggacagcgccgagtgggagcagcccgtgagaagaagaagaagcagactgcccagacacagcgacagcggcagcgacagcaagcacgacgccaccgccagcagcagcagcgccgccgccaccgtgagagccatgagcagcgtgggcatccagaccatcagcgactgcagcgtgcagaccgagcccgaccagctgcccagagtgagccccgccatccacatcaccgccgccaccgaccccaaggtggagatcgtgagatacatcagcgcccccgagaagaccggcagaggcgagagcctggcctgccagaccgagcccgacggccaggcccagggcgtggccggcccccagctggtgggccccaccgccatcagcccctacctgcccggcatccagatcgtgacccccggccccctgggcagattcgagaagaagaagcccgaccccctggagatcggctaccaggcccacctgccccccgagagcctgagccagctggtgagcagacagccccccaagagcccccaggtgctgtacagccccgtgagccccctgagcccccacagactgctggacaccagcttcgccagcagcgagagactgaacaaggcccacgtgagcccccagaagcacttcaccgccgacagcgccctgagacagcagaccctgcccagacccatgaagaccctgcagagaagcctgagcgaccccaagcccctgagccccaccgccgaggagagcgccaaggagagattcagcctgtaccagcaccagggcggcctgggcagccaggtgagcgccctgccccccaacagcctggtgagaaaggtgaagagaaccctgcccagccccccccccgaggaggcccacctgcccctggccggccaggccagcccccagctgtacgccgccagcctgctgcagagaggcctgaccggccccaccaccgtgcccgccaccaaggccagcctgctgagagagctggacagagacctgagactggtggagcacgagagcaccaagctgagaaagaagcaggccgagctggacgaggaggagaaggagatcgacgccaagctgaagtacctggagctgggcatcacccagagaaaggagagcctggccaaggacagaggcggcagagactacccccccctgagaggcctgggcgagcacagagactacctgagcgacagcgagctgaaccagctgagactgcagggctgcaccacccccgccggccagttcgtggacttccccgccaccgccgccgcccccgccacccccagcggccccaccgccttccagcagcccagattccagccccccgccccccagtacagcgccggcagcggcggccccacccagaacggcttccccgcccaccaggcccccacctaccccggccccagcacctaccccgcccccgccttcccccccggcgccagctaccccgccgagcccggcctgcccaaccagcaggccttcagacccaccggccactacgccggccagacccccatgcccaccacccagagcaccctgttccccgtgcccgccgacagcagagcccccctgcagaagcccagacagaccagcctggccgacctggagcagaaggtgcccaccaactacgaggtgatcgccagccccgtggtgcccatgagcagcgcccccagcgagaccagctacagcggccccgccgtgagcagcggctacgagcagggcaaggtgcccgaggtgcccagagccggcgacagaggcagcgtgagccagagccccgcccccacctaccccagcgacagccactacaccagcctggagcagaacgtgcccagaaactacgtgatgatcgacgacatcagcgagctgaccaaggacagcaccagcaccgcccccgacagccagagactggagcccctgggccccggcagcagcggcagacccggcaaggagcccggcgagcccggcgtgctggacggccccaccctgccctgctgctacgccagaggcgaggaggagagcgaggaggacagctacgaccccagaggcaagggcggccacctgagaagcatggagagcaacggcagacccgccagcacccactactacggcgacagcgactacagacacggcgccagagtggagaagtacggccccggccccatgggccccaagcaccccagcaagagcctggcccccgccgccatcagcagcaagagaagcaagcacagaaagcagggcatggagcagaagatcagcaagttcagccccatcgaggaggccaaggacgtggagagcgacctggccagctaccccccccccgccgtgagcagcagcctggtgagcagaggcagaaagttccaggacgagatcacctacggcctgaagaagaacgtgtacgagcagcagaagtactacggcatgagcagcagagacgccgtggaggacgacagaatctacggcggcagcagcagaagcagagcccccagcgcctacagcggcgagaagctgagcagccacgacttcagcggctggggcaagggctacgagagagagagagaggccgtggagagactgcagaaggccggccccaagcccagcagcctgagcatggcccacagcagagtgagaccccccatgagaagccaggccagcgaggaggagagccccgtgagccccctgggcagacccagacccgccggcggccccctgccccccggcggcgacacctgcccccagttctgcagcagccacagcatgcccgacgtgcaggagcacgtgaaggacggccccagagcccacgcctacaagagagaggagggctacatcctggacgacagccactgcgtggtgagcgacagcgaggcctaccacctgggccaggaggagaccgactggttcgacaagcccagagacgccagaagcgacagattcagacaccacggcggccacgccgtgagcagcagcagccagaagagaggccccgccagacacagctaccacgactacgacgagccccccgaggagggcctgtggccccacgacgagggcggccccggcagacacgccagcgccaaggagcacagacacggcgaccacggcagacacagcggcagacacaccggcgaggagcccggcagaagagccgccaagccccacgccagagacctgggcagacacgaggccagaccccacagccagcccagcagcgcccccgccatgcccaagaagggccagcccggctaccccagcagcgccgagtacagccagcccagcagagccagcagcgcctaccaccacgccagcgacagcaagaagggcagcagacaggcccacagcggccccgccgccctgcagagcaaggccgagccccaggcccagccccagctgcagggcagacaggccgcccccggcccccagcagagccagagccccagcagcagacagatccccagcggcgccgccagcagacagccccagacccagcagcagcagcagggcctgggcctgcagcccccccagcaggccctgacccaggccagactgcagcagcagagccagcccaccaccagaggcagcgcccccgccgccagccagcccgccggcaagccccagcccggccccagcaccgccaccggcccccagcccgccggcccccccagagccgagcagaccaacggcagcaagggcaccgccaaggccccccagcagggcagagccccccaggcccagcccgcccccggccccggccccgccggcgtgaaggccggcgccagacccggcggcacccccggcgcccccgccggccagcccggcgccgacggcgagagcgtgttcagcaagatcctgcccggcggcgccgccgagcaggccggcaagctgaccgaggccgtgagcgccttcggcaagaagttcagcagcttctggtag

SEQ ID NO: 74049 - DNA, 702 bp, synthetic construct
  misc_feature 1..702: note = Description of Artificial Sequence: Synthetic coding sequence
  source 1..702: mol_type = other DNA
atggagcccaccgcccccagcctgaccgaggaggacctgaccgaggtgaagaaggacgccctggagaacctgagagtgtacctgtgcgagaagatcatcgccgagagacacttcgaccacctgagagccaagaagatcctgagcagagaggacaccgaggagatcagctgcagaaccagcagcagaaagagagccggcaagctgctggactacctgcaggagaaccccaagggcctggacaccctggtggagagcatcagaagagagaagacccagaacttcctgatccagaagatcaccgacgaggtgctgaagctgagaaacatcaagctggagcacctgaagggcctgaagtgcagcagctgcgagcccttccccgacggcgccaccaacaacctgagcagaagcaacagcgacgagagcaacttcagcgagaagctgagagccagcaccgtgatgtaccaccccgagggcgagagcagcaccacccccttcttcagcaccaacagcagcctgaacctgcccgtgctggaggtgggcagaaccgagaacaccatcttcagcagcaccaccctgcccagacccggcgaccccggcgccccccccctgccccccgacctgcagctggaggaggagggcacctgcgccaacagcagcgagatgttcctgcccctgagaagcagaaccgtgagcagacagtag

SEQ ID NO: 74050 - DNA, 702 bp, synthetic construct; identical to SEQ ID NO: 74049
  misc_feature 1..702: note = Description of Artificial Sequence: Synthetic coding sequence
  source 1..702: mol_type = other DNA

SEQ ID NO: 74051 - DNA, 471 bp, synthetic construct
  misc_feature 1..471: note = Description of Artificial Sequence: Synthetic coding sequence
  source 1..471: mol_type = other DNA
atggagcccaccgcccccagcctgaccgaggaggacctgaccgaggtgaagaaggacgccctggagaacctgagagtgtacctgtgcgagaagatcatcgccgagagacacttcgaccacctgagagccaagaagatcctgagcagagaggacaccgaggagatcagctgcagaaccagcagcagaaagagagccggcaagctgctggactacctgcaggagaaccccaagggcctggacaccctggtggagagcatcagaagagagaagacccagaacttcctgatccagaagatcaccgacgaggtgctgaagctgagaaacatcaagctggagcacctgaaggacggcgccaccaacaacctgagcagaagcaacagcgacgagagcaacttcagcgagaagctgagagccagcaccgtgatgtaccaccccgagggcgagagcagcaccacccccttcttctactag

SEQ ID NO: 74052 - DNA, 2508 bp, synthetic construct
  misc_feature 1..2508: note = Description of Artificial Sequence: Synthetic coding sequence
  source 1..2508: mol_type = other DNA
atgagcagaagaaagcagggcaagccccagcacctgagcaagagagagttcagccccgagcccctggaggccatcctgaccgacgacgagcccgaccacggccccctgggcgcccccgagggcgaccacgacctgctgacctgcggccagtgccagatgaacttccccctgggcgacatcctgatcttcatcgagcacaagagaaagcagtgcaacggcagcctgtgcctggagaaggccgtggacaagccccccagccccagccccatcgagatgaagaaggccagcaaccccgtggaggtgggcatccaggtgacccccgaggacgacgactgcctgagcaccagcagcagaggcatctgccccaagcaggagcacatcgccgacaagctgctgcactggagaggcctgagcagccccagaagcgcccacggcgccctgatccccacccccggcatgagcgccgagtacgccccccagggcatctgcaaggacgagcccagcagctacacctgcaccacctgcaagcagcccttcaccagcgcctggttcctgctgcagcacgcccagaacacccacggcctgagaatctacctggagagcgagcacggcagccccctgacccccagagtgggcatccccagcggcctgggcgccgagtgccccagccagccccccctgcacggcatccacatcgccgacaacaaccccttcaacctgctgagaatccccggcagcgtgagcagagaggccagcggcctggccgagggcagattcccccccaccccccccctgttcagccccccccccagacaccacctggacccccacagaatcgagagactgggcgccgaggagatggccctggccacccaccaccccagcgccttcgacagagtgctgagactgaaccccatggccatggagccccccgccatggacttcagcagaagactgagagagctggccggcaacaccagcagcccccccctgagccccggcagacccagccccatgcagagactgctgcagcccttccagcccggcagcaagccccccttcctggccaccccccccctgccccccctgcagagcgcccccccccccagccagccccccgtgaagagcaagagctgcgagttctgcggcaagaccttcaagttccagagcaacctggtggtgcacagaagaagccacaccggcgagaagccctacaagtgcaacctgtgcgaccacgcctgcacccaggccagcaagctgaagagacacatgaagacccacatgcacaagagcagccccatgaccgtgaagagcgacgacggcctgagcaccgccagcagccccgagcccggcaccagcgacctggtgggcagcgccagcagcgccctgaagagcgtggtggccaagttcaagagcgagaacgaccccaacctgatccccgagaacggcgacgaggaggaggaggaggacgacgaggaggaggaggaggaggaggaggaggaggaggaggagctgaccgagagcgagagagtggactacggcttcggcctgagcctggaggccgccagacaccacgagaacagcagcagaggcgccgtggtgggcgtgggcgacgagagcagagccctgcccgacgtgatgcagggcatggtgctgagcagcatgcagcacttcagcgaggccttccaccaggtgctgggcgagaagcacaagagaggccacctggccgaggccgagggccacagagacacctgcgacgaggacagcgtggccggcgagagcgacagaatcgacgacggcaccgtgaacggcagaggctgcagccccggcgagagcgccagcggcggcctgagcaagaagctgctgctgggcagccccagcagcctgagccccttcagcaagagaatcaagctggagaaggagttcgacctgccccccgccgccatgcccaacaccgagaacgtgtacagccagtggctggccggctacgccgccagcagacagctgaaggaccccttcctgagcttcggcgacagcagacagagccccttcgccagcagcagcgagcacagcagcgagaacggcagcctgagattcagcaccccccccggcgagctggacggcggcatcagcggcagaagcggcaccggcagcggcggcagcaccccccacatcagcggccccggccccggcagacccagcagcaaggagggcagaagaagcgacacctgcgagtactgcggcaaggtgttcaagaactgcagcaacctgaccgtgcacagaagaagccacaccggcgagagaccctacaagtgcgagctgtgcaactacgcctgcgcccagagcagcaagctgaccagacacatgaagacccacggccaggtgggcaaggacgtgtacaagtgcgagatctgcaagatgcccttcagcgtgtacagcaccctggagaagcacatgaagaagtggcacagcgacagagtgctgaacaacgacatcaagaccgagtag

SEQ ID NO: 74053 - DNA, 2322 bp, synthetic construct
  misc_feature 1..2322: note = Description of Artificial Sequence: Synthetic coding sequence
  source 1..2322: mol_type = other DNA
atgagcagaagaaagcagggcaagccccagcacctgagcaagagagagttcagccccgagcccctggaggccatcctgaccgacgacgagcccgaccacggccccctgggcgcccccgagggcgaccacgacctgctgacctgcggccagtgccagatgaacttccccctgggcgacatcctgatcttcatcgagcacaagagaaagcagtgcaacggcagcctgtgcctggagaaggccgtggacaagccccccagccccagccccatcgagatgaagaaggccagcaaccccgtggaggtgggcatccaggtgacccccgaggacgacgactgcctgagcaccagcagcagaggcatctgccccaagcaggagcacatcgccgacaagctgctgcactggagaggcctgagcagccccagaagcgcccacggcgccctgatccccacccccggcatgagcgccgagtacgccccccagggcatctgcaaggacgagcccagcagctacacctgcaccacctgcaagcagcccttcaccagcgcctggttcctgctgcagcacgcccagaacacccacggcctgagaatctacctggagagcgagcacggcagccccctgacccccagagtgggcatccccagcggcctgggcgccgagtgccccagccagccccccctgcacggcatccacatcgccgacaacaaccccttcaacctgctgagaatccccggcagcgtgagcagagaggccagcggcctggccgagggcagattcccccccaccccccccctgttcagccccccccccagacaccacctggacccccacagaatcgagagactgggcgccgaggagatggccctggccacccaccaccccagcgccttcgacagagtgctgagactgaaccccatggccatggagccccccgccatggacttcagcagaagactgagagagctggccggcaacaccagcagcccccccctgagccccggcagacccagccccatgcagagactgctgcagcccttccagcccggcagcaagccccccttcctggccaccccccccctgccccccctgcagagcgcccccccccccagccagccccccgtgaagagcaagagctgcgagttctgcggcaagaccttcaagttccagagcaacctggtggtgcacagaagaagccacaccggcgagaagccctacaagtgcaacctgtgcgaccacgcctgcacccaggccagcaagctgaagagacacatgaagacccacatgcacaagagcagccccatgaccgtgaagagcgacgacggcctgagcaccgccagcagccccgagcccggcaccagcgacctggtgggcagcgccagcagcgccctgaagagcgtggtggccaagttcaagagcgagaacgaccccaacctgatccccgagaacggcgacgaggaggaggaggaggacgacgaggaggaggaggaggaggaggaggaggaggaggaggagctgaccgagagcgagagagtggactacggcttcggcctgagcctggaggccgccagacaccacgagaacagcagcagaggcgccgtggtgggcgtgggcgacgagagcagagccctgcccgacgtgatgcagggcatggtgctgagcagcatgcagcacttcagcgaggccttccaccaggtgctgggcgagaagcacaagagaggccacctggccgaggccgagggccacagagacacctgcgacgaggacagcgtggccggcgagagcgacagaatcgacgacggcaccgtgaacggcagaggctgcagccccggcgagagcgccagcggcggcctgagcaagaagctgctgctgggcagccccagcagcctgagccccttcagcaagagaatcaagctggagaaggagttcgacctgccccccgccgccatgcccaacaccgagaacgtgtacagccagtggctggccggctacgccgccagcagacagctgaaggaccccttcctgagcttcggcgacagcagacagagccccttcgccagcagcagcgagcacagcagcgagaacggcagcctgagattcagcaccccccccggcgagctggacggcggcatcagcggcagaagcggcaccggcagcggcggcagcaccccccacatcagcggccccggccccggcagacccagcagcaaggagggcagaagaagcgacacctgcagcagccacacccccatcagaagaagcacccagagagcccaggacgtgtggcagttcagcgacggcagcagcagagccctgaagttctag

SEQ ID NO: 74054 - DNA, 2406 bp, synthetic construct
  misc_feature 1..2406: note = Description of Artificial Sequence: Synthetic coding sequence
  source 1..2406: mol_type = other DNA
atgagcagaagaaagcagggcaagccccagcacctgagcaagagagagttcagccccgagcccctggaggccatcctgaccgacgacgagcccgaccacggccccctgggcgcccccgagggcgaccacgacctgctgacctgcggccagtgccagatgaacttccccctgggcgacatcctgatcttcatcgagcacaagagaaagcagtgcaacggcagcctgtgcctggagaaggccgtggacaagccccccagccccagccccatcgagatgaagaaggccagcaaccccgtggaggtgggcatccaggtgacccccgaggacgacgactgcctgagcaccagcagcagaggcatctgccccaagcaggagcacatcgccggcaaggacgagcccagcagctacacctgcaccacctgcaagcagcccttcaccagcgcctggttcctgctgcagcacgcccagaacacccacggcctgagaatctacctggagagcgagcacggcagccccctgacccccagagtgggcatccccagcggcctgggcgccgagtgccccagccagccccccctgcacggcatccacatcgccgacaacaaccccttcaacctgctgagaatccccggcagcgtgagcagagaggccagcggcctggccgagggcagattcccccccaccccccccctgttcagccccccccccagacaccacctggacccccacagaatcgagagactgggcgccgaggagatggccctggccacccaccaccccagcgccttcgacagagtgctgagactgaaccccatggccatggagccccccgccatggacttcagcagaagactgagagagctggccggcaacaccagcagcccccccctgagccccggcagacccagccccatgcagagactgctgcagcccttccagcccggcagcaagccccccttcctggccaccccccccctgccccccctgcagagcgcccccccccccagccagccccccgtgaagagcaagagctgcgagttctgcggcaagaccttcaagttccagagcaacctggtggtgcacagaagaagccacaccggcgagaagccctacaagtgcaacctgtgcgaccacgcctgcacccaggccagcaagctgaagagacacatgaagacccacatgcacaagagcagccccatgaccgtgaagagcgacgacggcctgagcaccgccagcagccccgagcccggcaccagcgacctggtgggcagcgccagcagcgccctgaagagcgtggtggccaagttcaagagcgagaacgaccccaacctgatccccgagaacggcgacgaggaggaggaggaggacgacgaggaggaggaggaggaggaggaggaggaggaggaggagctgaccgagagcgagagagtggactacggcttcggcctgagcctggaggccgccagacaccacgagaacagcagcagaggcgccgtggtgggcgtgggcgacgagagcagagccctgcccgacgtgatgcagggcatggtgctgagcagcatgcagcacttcagcgaggccttccaccaggtgctgggcgagaagcacaagagaggccacctggccgaggccgagggccacagagacacctgcgacgaggacagcgtggccggcgagagcgacagaatcgacgacggcaccgtgaacggcagaggctgcagccccggcgagagcgccagcggcggcctgagcaagaagctgctgctgggcagccccagcagcctgagccccttcagcaagagaatcaagctggagaaggagttcgacctgccccccgccgccatgcccaacaccgagaacgtgtacagccagtggctggccggctacgccgccagcagacagctgaaggaccccttcctgagcttcggcgacagcagacagagccccttcgccagcagcagcgagcacagcagcgagaacggcagcctgagattcagcaccccccccggcgagctggacggcggcatcagcggcagaagcggcaccggcagcggcggcagcaccccccacatcagcggccccggccccggcagacccagcagcaaggagggcagaagaagcgacacctgcgagtactgcggcaaggtgttcaagaactgcagcaacctgaccgtgcacagaagaagccacaccggcgagagaccctacaagtgcgagctgtgcaactacgcctgcgcccagagcagcaagctgaccagacacatgaagacccacggccaggtgggcaaggacgtgtacaagtgcgagatctgcaagatgcccttcagcgtgtacagcaccctggagaagcacatgaagaagtggcacagcgacagagtgctgaacaacgacatcaagaccgagtag

SEQ ID NO: 74055 - DNA, 732 bp, synthetic construct
  misc_feature 1..732: note = Description of Artificial Sequence: Synthetic coding sequence
  source 1..732: mol_type = other DNA
atgagcagaagaaagcagggcaagccccagcacctgagcaagagagagttcagccccgagcccctggaggccatcctgaccgacgacgagcccgaccacggccccctgggcgcccccgagggcgaccacgacctgctgacctgcggccagtgccagatgaacttccccctgggcgacatcctgatcttcatcgagcacaagagaaagcagtgcaacggcagcctgtgcctggagaaggccgtggacaagccccccagccccagccccatcgagatgaagaaggccagcaaccccgtggaggtgggcatccaggtgacccccgaggacgacgactgcctgagcaccagcagcagaggcatctgccccaagcaggagcacatcgccgacaagctgctgcactggagaggcctgagcagccccagaagcgcccacggcgccctgatccccacccccggcatgagcgccgagtacgccccccagggcatctgcaaggacgagcccagcagctacacctgcaccacctgcaagcagcccttcaccagcgcctggttcctgctgcagcacgcccagaacacccacggcctgagaatctacctggagagcgagcacggcagccccctgacccccagagtgctgcacaccccccccttcggcgtggtgcccagagagctgaagatgtgcggcagcttcagaatggaggccagagagcccctgagcagcgagaagatctag

SEQ ID NO: 74056 - DNA, 2397 bp, synthetic construct
  misc_feature 1..2397: note = Description of Artificial Sequence: Synthetic coding sequence
  source 1..2397: mol_type = other DNA
atgagcaagggcaccgacgaggacatcttcagcggcgtgagcttcttcctgaccagactgagcagatgcgagcccagcagaagacccccccccgccccccagcccaccatgagcagaagaaagcagggcaagccccagcacctgagcaagagagagttcagccccgagcccctggaggccatcctgaccgacgacgagcccgaccacggccccctgggcgcccccgagggcgaccacgacctgctgacctgcggccagtgccagatgaacttccccctgggcgacatcctgatcttcatcgagcacaagagaaagcagtgcaacggcagcctgtgcctggagaaggccgtggacaagccccccagccccagccccatcgagatgaagaaggccagcaaccccgtggaggtgggcatccaggtgacccccgaggacgacgactgcctgagcaccagcagcagaggcatctgccccaagcaggagcacatcgccgacaagctgctgcactggagaggcctgagcagccccagaagcgcccacggcgccctgatccccacccccggcatgagcgccgagtacgccccccagggcatctgcaaggacgagcccagcagctacacctgcaccacctgcaagcagcccttcaccagcgcctggttcctgctgcagcacgcccagaacacccacggcctgagaatctacctggagagcgagcacggcagccccctgacccccagagtgggcatccccagcggcctgggcgccgagtgccccagccagccccccctgcacggcatccacatcgccgacaacaaccccttcaacctgctgagaatccccggcagcgtgagcagagaggccagcggcctggccgagggcagattcccccccaccccccccctgttcagccccccccccagacaccacctggacccccacagaatcgagagactgggcgccgaggagatggccctggccacccaccaccccagcgccttcgacagagtgctgagactgaaccccatggccatggagccccccgccatggacttcagcagaagactgagagagctggccggcaacaccagcagcccccccctgagccccggcagacccagccccatgcagagactgctgcagcccttccagcccggcagcaagccccccttcctggccaccccccccctgccccccctgcagagcgcccccccccccagccagccccccgtgaagagcaagagctgcgagttctgcggcaagaccttcaagttccagagcaacctggtggtgcacagaagaagccacaccggcgagaagccctacaagtgcaacctgtgcgaccacgcctgcacccaggccagcaagctgaagagacacatgaagacccacatgcacaagagcagccccatgaccgtgaagagcgacgacggcctgagcaccgccagcagccccgagcccggcaccagcgacctggtgggcagcgccagcagcgccctgaagagcgtggtggccaagttcaagagcgagaacgaccccaacctgatccccgagaacggcgacgaggaggaggaggaggacgacgaggaggaggaggaggaggaggaggaggaggaggaggagctgaccgagagcgagagagtggactacggcttcggcctgagcctggaggccgtggtgggcgtgggcgacgagagcagagccctgcccgacgtgatgcagggcatggtgctgagcagcatgcagcacttcagcgaggccttccaccaggtgctgggcgagaagcacaagagaggccacctggccgaggccgagggccacagagacacctgcgacgaggacagcgtggccggcgagagcgacagaatcgacgacggcaccgtgaacggcagaggctgcagccccggcgagagcgccagcggcggcctgagcaagaagctgctgctgggcagccccagcagcctgagccccttcagcaagagaatcaagctggagaaggagttcgacctgccccccgccgccatgcccaacaccgagaacgtgtacagccagtggctggccggctacgccgccagcagacagctgaaggaccccttcctgagcttcggcgacagcagacagagccccttcgccagcagcagcgagcacagcagcgagaacggcagcctgagattcagcaccccccccggcgagctggacggcggcatcagcggcagaagcggcaccggcagcggcggcagcaccccccacatcagcggccccggccccggcagacccagcagcaaggagggcagaagaagcgacacctgcagcagccacacccccatcagaagaagcacccagagagcccaggacgtgtggcagttcagcgacggcagcagcagagccctgaagttctag

SEQ ID NO: 74057 - DNA, 1329 bp, synthetic construct
  misc_feature 1..1329: note = Description of Artificial Sequence: Synthetic coding sequence
  source 1..1329: mol_type = other DNA
atgagcgccgagtacgccccccagggcatctgcaaggacgagcccagcagctacacctgcaccacctgcaagcagcccttcaccagcgcctggttcctgctgcagcacgcccagaacacccacggcctgagaatctacctggagagcgagcacggcagccccctgacccccagaagcaacctggtggtgcacagaagaagccacaccggcgagaagccctacaagtgcaacctgtgcgaccacgcctgcacccaggccagcaagctgaagagacacatgaagacccacatgcacaagagcagccccatgaccgtgaagagcgacgacggcctgagcaccgccagcagccccgagcccggcaccagcgacctggtgggcagcgccagcagcgccctgaagagcgtggtggccaagttcaagagcgagaacgaccccaacctgatccccgagaacggcgacgaggaggaggaggaggacgacgaggaggaggaggaggaggaggaggaggaggaggaggagctgaccgagagcgagagagtggactacggcttcggcctgagcctggaggccgccagacaccacgagaacagcagcagaggcgccgtggtgggcgtgggcgacgagagcagagccctgcccgacgtgatgcagggcatggtgctgagcagcatgcagcacttcagcgaggccttccaccaggtgctgggcgagaagcacaagagaggccacctggccgaggccgagggccacagagacacctgcgacgaggacagcgtggccggcgagagcgacagaatcgacgacggcaccgtgaacggcagaggctgcagccccggcgagagcgccagcggcggcctgagcaagaagctgctgctgggcagccccagcagcctgagccccttcagcaagagaatcaagctggagaaggagttcgacctgccccccgccgccatgcccaacaccgagaacgtgtacagccagtggctggccggctacgccgccagcagacagctgaaggaccccttcctgagcttcggcgacagcagacagagccccttcgccagcagcagcgagcacagcagcgagaacggcagcctgagattcagcaccccccccggcgagctggacggcggcatcagcggcagaagcggcaccggcagcggcggcagcaccccccacatcagcggccccggccccggcagacccagcagcaaggagggcagaagaagcgacacctgcagcagccacacccccatcagaagaagcacccagagagcccaggacgtgtggcagttcagcgacggcagcagcagagccctgaagttctag

SEQ ID NO: 74058 - DNA, 2382 bp, synthetic construct
  misc_feature 1..2382: note = Description of Artificial Sequence: Synthetic coding sequence
  source 1..2382: mol_type = other DNA
atgagcagaagaaagcagggcaagccccagcacctgagcaagagagagttcagccccgagcccctggaggccatcctgaccgacgacgagcccgaccacggccccctgggcgcccccgagggcgaccacgacctgctgacctgcggccagtgccagatgaacttccccctgggcgacatcctgatcttcatcgagcacaagagaaagcagtgcaacggcagcctgtgcctggagaaggccgtggacaagccccccagccccagccccatcgagatgaagaaggccagcaaccccgtggaggtgggcatccaggtgacccccgaggacgacgactgcctgagcaccagcagcagaggcatctgccccaagcaggagcacatcgccggcaaggacgagcccagcagctacacctgcaccacctgcaagcagcccttcaccagcgcctggttcctgctgcagcacgcccagaacacccacggcctgagaatctacctggagagcgagcacggcagccccctgacccccagagtgggcatccccagcggcctgggcgccgagtgccccagccagccccccctgcacggcatccacatcgccgacaacaaccccttcaacctgctgagaatccccggcagcgtgagcagagaggccagcggcctggccgagggcagattcccccccaccccccccctgttcagccccccccccagacaccacctggacccccacagaatcgagagactgggcgccgaggagatggccctggccacccaccaccccagcgccttcgacagagtgctgagactgaaccccatggccatggagccccccgccatggacttcagcagaagactgagagagctggccggcaacaccagcagcccccccctgagccccggcagacccagccccatgcagagactgctgcagcccttccagcccggcagcaagccccccttcctggccaccccccccctgccccccctgcagagcgcccccccccccagccagccccccgtgaagagcaagagctgcgagttctgcggcaagaccttcaagttccagagcaacctggtggtgcacagaagaagccacaccggcgagaagccctacaagtgcaacctgtgcgaccacgcctgcacccaggccagcaagctgaagagacacatgaagacccacatgcacaagagcagccccatgaccgtgaagagcgacgacggcctgagcaccgccagcagccccgagcccggcaccagcgacctggtgggcagcgccagcagcgccctgaagagcgtggtggccaagttcaagagcgagaacgaccccaacctgatccccgagaacggcgacgaggaggaggaggaggacgacgaggaggaggaggaggaggaggaggaggaggaggaggagctgaccgagagcgagagagtggactacggcttcggcctgagcctggaggccgccagacaccacgagaacagcagcagaggcgccgtggtgggcgtgggcgacgagagcagagccctgcccgacgtgatgcagggcatggtgctgagcagcatgcagcacttcagcgaggccttccaccaggtgctgggcgagaagcacaagagaggccacctggccgaggccgagggccacagagacacctgcgacgaggacagcgtggccggcgagagcgacagaatcgacgacggcaccgtgaacggcagaggctgcagccccggcgagagcgccagcggcggcctgagcaagaagctgctgctgggcagccccagcagcctgagccccttcagcaagagaatcaagctggagaaggagttcgacctgccccccgccgccatgcccaacaccgagaacgtgtacagccagtggctggccggctacgccgccagcagacagctgaaggaccccttcctgagcttcggcgacagcagacagagccccttcgccagcagcagcgagcacagcagcgagaacggcagcctgagattcagcaccccccccggcgagctggacggcggcatcagcggcagaagcggcaccggcagcggcggcagcaccccccacatcagcggccccggccccggcagacccagcagcaaggagggcagaagaagcgacacctgcgagtactgcggcaaggtgttcaagaactgcagcaacctgaccgtgcacagaagaagccacaccggcgagagaccctacaagtgcgagctgtgcaactacgcctgcgcccagagcagcaagctgaccagacacatgaagacccacggccaggtgctgcacaccccccccttcggcgtggtgcccagagagctgaagatgtgcggcagcttcagaatggaggccagagagcccctgagcagcgagaagatctag

SEQ ID NO: 74059 - DNA, 2472 bp, synthetic construct
  misc_feature 1..2472: note = Description of Artificial Sequence: Synthetic coding sequence
  source 1..2472: mol_type = other DNA
atgagcagaagaaagcagggcaacccccagcacctgagccagagagagctgatcacccccgaggccgaccacgtggaggccgccatcctggaggaggacgagggcctggagatcgaggagcccagcggcctgggcctgatggtgggcggccccgaccccgacctgctgacctgcggccagtgccagatgaacttccccctgggcgacatcctggtgttcatcgagcacaagagaaagcagtgcggcggcagcctgggcgcctgctacgacaaggccctggacaaggacagccccccccccagcagcagaagcgagctgagaaaggtgagcgagcccgtggagatcggcatccaggtgacccccgacgaggacgaccacctgctgagccccaccaagggcatctgccccaagcaggagaacatcgccggcaaggacgagcccagcagctacatctgcaccacctgcaagcagcccttcaacagcgcctggttcctgctgcagcacgcccagaacacccacggcttcagaatctacctggagcccggccccgccagcagcagcctgacccccagactgaccatccccccccccctgggccccgaggccgtggcccagagccccctgatgaacttcctgggcgacagcaaccccttcaacctgctgagaatgaccggccccatcctgagagaccaccccggcttcggcgagggcagactgcccggcaccccccccctgttcagccccccccccagacaccacctggacccccacagactgagcgccgaggagatgggcctggtggcccagcaccccagcgccttcgacagagtgatgagactgaaccccatggccatcgacagccccgccatggacttcagcagaagactgagagagctggccggcaacagcagcacccccccccccgtgagccccggcagaggcaaccccatgcacagactgctgaaccccttccagcccagccccaagagccccttcctgagcaccccccccctgccccccatgccccccggcggcaccccccccccccagccccccgccaagagcaagagctgcgagttctgcggcaagaccttcaagttccagagcaacctgatcgtgcacagaagaagccacaccggcgagaagccctacaagtgccagctgtgcgaccacgcctgcagccaggccagcaagctgaagagacacatgaagacccacatgcacaaggccggcagcctggccggcagaagcgacgacggcctgagcgccgccagcagccccgagcccggcaccagcgagctggccggcgagggcctgaaggccgccgacggcgacttcagacaccacgagagcgaccccagcctgggccacgagcccgaggaggaggacgaggaggaggaggaggaggaggaggagctgctgctggagaacgagagcagacccgagagcagcttcagcatggacagcgagctgagcagaaacagagagaacggcggcggcggcgtgcccggcgtgcccggcgccggcggcggcgccgccaaggccctggccgacgagaaggccctggtgctgggcaaggtgatggagaacgtgggcctgggcgccctgccccagtacggcgagctgctggccgacaagcagaagagaggcgccttcctgaagagagccgccggcggcggcgacgccggcgacgacgacgacgccggcggctgcggcgacgccggcgccggcggcgccgtgaacggcagaggcggcggcttcgcccccggcaccgagcccttccccggcctgttccccagaaagcccgcccccctgcccagccccggcctgaacagcgccgccaagagaatcaaggtggagaaggacctggagctgccccccgccgccctgatccccagcgagaacgtgtacagccagtggctggtgggctacgccgccagcagacacttcatgaaggaccccttcctgggcttcaccgacgccagacagagccccttcgccaccagcagcgagcacagcagcgagaacggcagcctgagattcagcaccccccccggcgacctgctggacggcggcctgagcggcagaagcggcaccgccagcggcggcagcaccccccacctgggcggccccggccccggcagacccagcagcaaggagggcagaagaagcgacacctgcgagtactgcggcaaggtgttcaagaactgcagcaacctgaccgtgcacagaagaagccacaccggcgagagaccctacaagtgcgagctgtgcaactacgcctgcgcccagagcagcaagctgaccagacacatgaagacccacggccagatcggcaaggaggtgtacagatgcgacatctgccagatgcccttcagcgtgtacagcaccctggagaagcacatgaagaagtggcacggcgagcacctgctgaccaacgacgtgaagatcgagcaggccgagagaagctag

SEQ ID NO: 74060 - DNA, 2685 bp, synthetic construct
  misc_feature 1..2685: note = Description of Artificial Sequence: Synthetic coding sequence
  source 1..2685: mol_type = other DNA
atgagcagaagaaagcagggcaacccccagcacctgagccagagagagctgatcacccccgaggccgaccacgtggaggccgccatcctggaggaggacgagggcctggagatcgaggagcccagcggcctgggcctgatggtgggcggccccgaccccgacctgctgacctgcggccagtgccagatgaacttccccctgggcgacatcctggtgttcatcgagcacaagagaaagcagtgcggcggcagcctgggcgcctgctacgacaaggccctggacaaggacagccccccccccagcagcagaagcgagctgagaaaggtgagcgagcccgtggagatcggcatccaggtgacccccgacgaggacgaccacctgctgagccccaccaagggcatctgccccaagcaggagaacatcgccggcccctgcagacccgcccagctgcccgccgtggcccccatcgccgccagcagccacccccacagcagcgtgatcaccagccccctgagagccctgggcgccctgcccccctgcctgcccctgccctgctgcagcgccagacccgtgagcggcgacggcacccagggcgagggccagaccgaggcccccttcggctgccagtgccagctgagcggcaaggacgagcccagcagctacatctgcaccacctgcaagcagcccttcaacagcgcctggttcctgctgcagcacgcccagaacacccacggcttcagaatctacctggagcccggccccgccagcagcagcctgacccccagactgaccatccccccccccctgggccccgaggccgtggcccagagccccctgatgaacttcctgggcgacagcaaccccttcaacctgctgagaatgaccggccccatcctgagagaccaccccggcttcggcgagggcagactgcccggcaccccccccctgttcagccccccccccagacaccacctggacccccacagactgagcgccgaggagatgggcctggtggcccagcaccccagcgccttcgacagagtgatgagactgaaccccatggccatcgacagccccgccatggacttcagcagaagactgagagagctggccggcaacagcagcacccccccccccgtgagccccggcagaggcaaccccatgcacagactgctgaaccccttccagcccagccccaagagccccttcctgagcaccccccccctgccccccatgccccccggcggcaccccccccccccagccccccgccaagagcaagagctgcgagttctgcggcaagaccttcaagttccagagcaacctgatcgtgcacagaagaagccacaccggcgagaagccctacaagtgccagctgtgcgaccacgcctgcagccaggccagcaagctgaagagacacatgaagacccacatgcacaaggccggcagcctggccggcagaagcgacgacggcctgagcgccgccagcagccccgagcccggcaccagcgagctggccggcgagggcctgaaggccgccgacggcgacttcagacaccacgagagcgaccccagcctgggccacgagcccgaggaggaggacgaggaggaggaggaggaggaggaggagctgctgctggagaacgagagcagacccgagagcagcttcagcatggacagcgagctgagcagaaacagagagaacggcggcggcggcgtgcccggcgtgcccggcgccggcggcggcgccgccaaggccctggccgacgagaaggccctggtgctgggcaaggtgatggagaacgtgggcctgggcgccctgccccagtacggcgagctgctggccgacaagcagaagagaggcgccttcctgaagagagccgccggcggcggcgacgccggcgacgacgacgacgccggcggctgcggcgacgccggcgccggcggcgccgtgaacggcagaggcggcggcttcgcccccggcaccgagcccttccccggcctgttccccagaaagcccgcccccctgcccagccccggcctgaacagcgccgccaagagaatcaaggtggagaaggacctggagctgccccccgccgccctgatccccagcgagaacgtgtacagccagtggctggtgggctacgccgccagcagacacttcatgaaggaccccttcctgggcttcaccgacgccagacagagccccttcgccaccagcagcgagcacagcagcgagaacggcagcctgagattcagcaccccccccggcgacctgctggacggcggcctgagcggcagaagcggcaccgccagcggcggcagcaccccccacctgggcggccccggccccggcagacccagcagcaaggagggcagaagaagcgacacctgcgagtactgcggcaaggtgttcaagaactgcagcaacctgaccgtgcacagaagaagccacaccggcgagagaccctacaagtgcgagctgtgcaactacgcctgcgcccagagcagcaagctgaccagacacatgaagacccacggccagatcggcaaggaggtgtacagatgcgacatctgccagatgcccttcagcgtgtacagcaccctggagaagcacatgaagaagtggcacggcgagcacctgctgaccaacgacgtgaagatcgagcaggccgagagaagctag

SEQ ID NO: 74061 - DNA, 1365 bp, synthetic construct
  misc_feature 1..1365: note = Description of Artificial Sequence: Synthetic coding sequence
  source 1..1365: mol_type = other DNA
atgcccagatgccccgccggcgccatggacgagggccccgtggacctgagaaccagacccaaggccgccggcctgcccggcgccgccctgcccctgagaaagagacccctgagagcccccagccccgagcccgccgcccccagaggcgccgccggcctggtggtgcccctggaccccctgagaggcggctgcgacctgcccgccgtgcccggccccccccacggcctggccagacccgaggccctgtactaccccggcgccctgctgcccctgtaccccaccagagccatgggcagccccttccccctggtgaacctgcccacccccctgtaccccatgatgtgccccatggagcaccccctgagcgccgacatcgccatggccaccagagccgacgaggacggcgacacccccctgcacatcgccgtggtgcagggcaacctgcccgccgtgcacagactggtgaacctgttccagcagggcggcagagagctggacatctacaacaacctgagacagacccccctgcacctggccgtgatcaccaccctgcccagcgtggtgagactgctggtgaccgccggcgccagccccatggccctggacagacacggccagaccgccgcccacctggcctgcgagcacagaagccccacctgcctgagagccctgctggacagcgccgcccccggcaccctggacctggaggccagaaactacgacggcctgaccgccctgcacgtggccgtgaacaccgagtgccaggagaccgtgcagctgctgctggagagaggcgccgacatcgacgccgtggacatcaagagcggcagaagccccctgatccacgccgtggagaacaacagcctgagcatggtgcagctgctgctgcagcacggcgccaacgtgaacgcccagatgtacagcggcagcagcgccctgcacagcgccagcggcagaggcctgctgcccctggtgagaaccctggtgagaagcggcgccgacagcagcctgaagaactgccacaacgacacccccctgatggtggccagaagcagaagagtgatcgacatcctgagaggcaaggccaccagacccgccagcaccagccagcccgaccccagccccgacagaagcgccaacaccagccccgagagcagcagcagactgagcagcaacggcctgctgagcgccagccccagcagcagccccagccagagcccccccagagacccccccggcttccccatggccccccccaacttcttcctgcccagccccagcccccccgccttcctgcccttcgccggcgtgctgagaggccccggcagacccgtgccccccagccccgcccccggcggcagctag

SEQ ID NO: 74062 - DNA, 1071 bp, synthetic construct
  misc_feature 1..1071: note = Description of Artificial Sequence: Synthetic coding sequence
  source 1..1071: mol_type = other DNA
atggaggagggcagagagagaaacagaagctggccccccgccgagtgccagagcctgcccagagtgagactgttcacccccaccaaggaggagaccgcccagagaggcgaggtgttcggccagggccaccccgccagagccctgctgcccctgtaccccaccagagccatgggcagccccttccccctggtgaacctgcccacccccctgtaccccatgatgtgccccatggagcaccccctgagcgccgacatcgccatggccaccagagccgacgaggacggcgacacccccctgcacatcgccgtggtgcagggcaacctgcccgccgtgcacagactggtgaacctgttccagcagggcggcagagagctggacatctacaacaacctgagacagacccccctgcacctggccgtgatcaccaccctgcccagcgtggtgagactgctggtgaccgccggcgccagccccatggccctggacagacacggccagaccgccgcccacctggcctgcgagcacagaagccccacctgcctgagagccctgctggacagcgccgcccccggcaccctggacctggaggccagaaactacgacggcctgaccgccctgcacgtggccgtgaacaccgagtgccaggagaccgtgcagctgctgctggagagaggcgccgacatcgacgccgtggacatcaagagcggcagaagccccctgatccacgccgtggagaacaacagcctgagcatggtgcagctgctgctgcagcacggcgccaacgtgaacgcccagatgtacagcggcagcagcgccctgcacagcgccagcggcagaggcctgctgcccctggtgagaaccctggtgagaagcggcgccgacagcagcctgaagaactgccacaacgacacccccctgatggtggccagaagcagaagagtgagcagaggcagctgcggccacgccccctgcaccagagtgagcgccggctggctgcaggccagcgtgcccgagagaagaggcgtgagagtgagcgtgcccctgagaggcggcgagtgggtgagcctgtag

SEQ ID NO: 74063 - DNA, 1440 bp, synthetic construct
  misc_feature 1..1440: note = Description of Artificial Sequence: Synthetic coding sequence
  source 1..1440: mol_type = other DNA
atgggcagccccgccgcccccgagggcgccctgggctacgtgagagagttcaccagacacagcagcgacgtgctgggcaacctgaacgagctgagactgagaggcatcctgaccgacgtgaccctgctggtgggcggccagcccctgagagcccacaaggccgtgctgatcgcctgcagcggcttcttctacagcatcttcagaggcagagccggcgtgggcgtggacgtgctgagcctgcccggcggccccgaggccagaggcttcgcccccctgctggacttcatgtacaccagcagactgagactgagccccgccaccgcccccgccgtgctggccgccgccacctacctgcagatggagcacgtggtgcaggcctgccacagattcatccaggccagctacgagcccctgggcatcagcctgagacccctggaggccgagccccccaccccccccaccgcccccccccccggcagccccagaagaagcgagggccaccccgacccccccaccgagagcagaagctgcagccagggcccccccagccccgccagccccgaccccaaggcctgcaactggaagaagtacaagtacatcgtgctgaacagccaggccagccaggccggcagcctggtgggcgagagaagcagcggccagccctgcccccaggccagactgcccagcggcgacgaggccagcagcagcagcagcagcagcagcagcagcagcgaggagggccccatccccggcccccagagcagactgagccccaccgccgccaccgtgcagttcaagtgcggcgcccccgccagcaccccctacctgctgaccagccaggcccaggacaccagcggcagccccagcgagagagccagacccctgcccggcagcgagttcttcagctgccagaactgcgaggccgtggccggctgcagcagcggcctggacagcctggtgcccggcgacgaggacaagccctacaagtgccagctgtgcagaagcagcttcagatacaagggcaacctggccagccacagaaccgtgcacaccggcgagaagccctaccactgcagcatctgcggcgccagattcaacagacccgccaacctgaagacccacagcagaatccacagcggcgagaagccctacaagtgcgagacctgcggcagcagattcgtgcaggtggcccacctgagagcccacgtgctgatccacaccggcgagaagccctacccctgccccacctgcggcaccagattcagacacctgcagaccctgaagagccacgtgagaatccacaccggcgagaagccctaccactgcgacccctgcggcctgcacttcagacacaagagccagctgagactgcacctgagacagaagcacggcgccgccaccaacaccaaggtgcactaccacatcctgggcggcccctag

SEQ ID NO: 74064 - DNA, 129 bp, synthetic construct
  misc_feature 1..129: note = Description of Artificial Sequence: Synthetic coding sequence
  source 1..129: mol_type = other DNA
atccacaccggcgagaagccctacccctgccccacctgcggcaccagattcagacacctgcagaccctgaagagccacgtgagaatccacaccggcgagaagccctaccacgagcccgtgaccagctag

SEQ ID NO: 74065 - DNA, 633 bp, synthetic construct
  misc_feature 1..633: note = Description of Artificial Sequence: Synthetic coding sequence
  source 1..633: mol_type = other DNA
atgagcggcagaagcgtgagagccgagaccagaagcagagccaaggacgacatcaagagagtgatggccgccatcgagaaggtgagaaagtgggagaagaagtgggtgaccgtgggcgacaccagcctgagaatctacaagtgggtgcccgtgaccgagcccaaggtggacgacaagaacaagaacaagaagaagggcaaggacgagaagtgcggcagcgaggtgaccacccccgagaacagcagcagccccggcatgatggacatgcacgacgacaacagcaaccagagcagcatcgccgacgccagccccatcaagcaggagaacagcagcaacagcagccccgcccccgagcccaacagcgccgtgcccagcgacggcaccgaggccaaggtggacgaggcccaggccgacggcaaggagcaccccggcgccgaggacgccagcgacgagcagaacagccagagcagcatggagcacagcatgaacagcagcgagaaggtggacagacagcccagcggcgacagcggcctggccgccgagaccagcgccatcagccaggacctggagggcgtgccccccagcaagaagatgaagctggaggccagccagcagaacagcgaggagatgtag

SEQ ID NO: 74066 - DNA, 696 bp, synthetic construct
  misc_feature 1..696: note = Description of Artificial Sequence: Synthetic coding sequence
  source 1..696: mol_type = other DNA
atgagcggcagaagcgtgagagccgagaccagaagcagagccaaggacgacatcaagagagtgatggccgccatcgagaaggtgagaaagtgggagaagaagtgggtgaccgtgggcgacaccagcctgagaatctacaagtgggtgcccgtgaccgagcccaaggtggacgacaagaacaagaacaagaagaagggcaaggacgagaagtgcggcagcgaggtgaccacccccgagaacagcagcagccccggcatgatggacatgcacgacgacaacagcaaccagagcagcatcgccgacgccagccccatcaagcaggagaacagcagcaacagcagccccgcccccgagcccaacagcgccgtgcccagcgacggcaccgaggccaaggtggacgaggcccaggccgacggcaaggagcaccccggcgccgaggacgccagcgacgagcagaacagccagagcagcatggagcacagcatgaacagcagcgagaaggtggacagacagcccagcggcgacagcggcctggccgccgagaccagcgccatcagccaggtgcccagaagcagaagccagagaggcagccagatcggcagagagcccatcggcctgagcggcgacctggagggcgtgccccccagcaagaagatgaagctggaggccagccagcagaacagcgaggagatgtag

SEQ ID NO: 74067 - DNA, 528 bp, synthetic construct
  misc_feature 1..528: note = Description of Artificial Sequence: Synthetic coding sequence
  source 1..528: mol_type = other DNA
atggccagcagaaaggccggcaccagaggcaaggtggccgccaccaagcaggcccagagaggcagcagcaacgtgttcagcatgttcgagcaggcccagatccaggagttcaaggaggccttcagctgcatcgaccagaacagagacggcatcatctgcaaggccgacctgagagagacctacagccagctgggcaaggtgagcgtgcccgaggaggagctggacgccatgctgcaggagggcaagggccccatcaacttcaccgtgttcctgaccctgttcggcgagaagctgaacggcaccgaccccgaggaggccatcctgagcgccttcagaatgttcgaccccagcggcaagggcgtggtgaacaaggacgagttcaagcagctgctgctgacccaggccgacaagttcagccccgccgaggtggagcagatgttcgccctgacccccatggacctggccggcaacatcgactacaagagcctgtgctacatcatcacccacggcgacgagaaggaggagtag

SEQ ID NO: 74068 - DNA, 438 bp, synthetic construct
  misc_feature 1..438: note = Description of Artificial Sequence: Synthetic coding sequence
  source 1..438: mol_type = other DNA
atgagcggcagaagcgtgagagccgagaccagaagcagagccaaggacgacatcaagaaggtgatggccgccatcgagaaggtgagaaagtgggagaagaagtgggtgaccgtgggcgacaccagcctgagaatcttcaagtgggtgcccgtgaccgacagcaaggagaaggagaagagcaagagcaacagcagcgccgccagagagcccaacggcttccccagcgacgccagcgccaacagcagcctgctgctggagttccaggagcccagcctgcccagcagcgaggtggccgacgagccccccaccctgaccaaggaggagcccgtgcccctggagacccaggtggtggaggaggaggaggacagcggcgccccccccctgaagagattctgcgtggaccagcccaccgtgccccagaccgccagcgagagctag

SEQ ID NO: 74069 - DNA, 867 bp, synthetic construct
  misc_feature 1..867: note = Description of Artificial Sequence: Synthetic coding sequence
  source 1..867: mol_type = other DNA
atgaaggacagaacccaggagctgagaagcgccaaggacagcgacgacgaggaggaggtggtgcacgtggacagagaccacttcatggacgagttcttcgagcaggtggaggagatcagaggctgcatcgagaagctgagcgaggacgtggagcaggtgaagaagcagcacagcgccatcctggccgcccccaaccccgacgagaagaccaagcaggagctggaggacctgaccgccgacatcaagaagaccgccaacaaggtgagaagcaagctgaaggccatcgagcagagcatcgagcaggaggagggcctgaacagaagcagcgccgacctgagaatcagaaagacccagcacagcaccctgagcagaaagttcgtggaggtgatgaccgagtacaacgccacccagagcaagtacagagacagatgcaaggacagaatccagagacagctggagatcaccggcagaaccaccaccaacgaggagctggaggacatgctggagagcggcaagctggccatcttcaccgacgacatcaagatggacagccagatgaccaagcaggccctgaacgagatcgagaccagacacaacgagatcatcaagctggagaccagcatcagagagctgcacgacatgttcgtggacatggccatgctggtggagagccagggcgagatgatcgacagaatcgagtacaacgtggagcacagcgtggactacgtggagagagccgtgagcgacaccaagaaggccgtgaagtaccagagcaaggccagaagaaagaagatcatgatcatcatctgctgcgtggtgctgggcgtggtgctggccagcagcatcggcggcaccctgggcctgtag

SEQ ID NO: 74070 - DNA, 729 bp, synthetic construct
  misc_feature 1..729: note = Description of Artificial Sequence: Synthetic coding sequence
  source 1..729: mol_type = other DNA
atggccggcagaaccgtgagagccgagaccagaagcagagccaaggacgacatcaagaaggtgatggccaccatcgagaaggtgagaagatgggagaagagatgggtgaccgtgggcgacaccagcctgagaatcttcaagtgggtgcccgtggtggacccccaggaggaggagagaagaagagccggcggcggcgccgagagaagcagaggcagagagagaagaggcagaggcgccagccccagaggcggcggccccctgatcctgctggacctgaacgacgagaacagcaaccagagcttccacagcgagggcagcctgcagaagggcaccgagcccagccccggcggcaccccccagcccagcagacccgtgagccccgccggcccccccgagggcgtgcccgaggaggcccagccccccagactgggccaggagagagaccccggcggcatcaccgccggcagcaccgacgagccccccatgctgaccaaggaggagcccgtgcccgagctgctggaggccgaggacagcggcgtgagaatgaccagaagagccctgcacgagaagggcctgaagaccgagcccctgagaagactgctgcccagaagaggcctgagaaccaacgtgagacccagcagcatggccgtgcccgacaccagagcccccggcggcggcagcaaggcccccagagcccccagaaccatcccccagggcaagggcagatag

SEQ ID NO: 74071 - DNA, 1680 bp, synthetic construct
  misc_feature 1..1680: note = Description of Artificial Sequence: Synthetic coding sequence
  source 1..1680: mol_type = other DNA
atgcacagcttcatccacgccgccatgggcatggtgatggcctggtgcgccgccgtgatcacccagggccagtacagcttcctggtggtgccctgcaccggcaccaacagcttcggcagccccgccgcccagacctgcctgaacgagtaccacctgttcttcctgctgaccggcgccttcatgggctacagctacagcctgctgtacttcgtgaacaacatgaactacctgcccttccccatcatccagcagtacaagttcctgagattcagaagaagcctgctgctgctggtgaagcacagctgcgtggagagcctgttcctggtgagaaacttctgcatcctgtactacttcctgggctacatccccaaggcctggatcagcaccgccatgaacctgcacatcgacgagcaggtgcacagacccctggacaccgtgagcggcctgctgaacctgagcctgctgtaccacgtgtggctgtgcggcgtgttcctgctgaccacctggtacgtgagctggatcctgttcaagatctacgccaccgaggcccacgtgttccccgtgcagccccccttcgccgagggcagcgacgagtgcctgcccaaggtgctgaacagcaaccccccccccatcatcaagtacctggccctgcaggacctgatgctgctgagccagtacagccccagcagaagacaggaggtgttcagcctgagccagcccggcggccacccccacaactggaccgccatcagcagagagtgcctgaacctgctgaacggcatgacccagaagctgatcctgtaccaggaggccgccgccaccaacggcagagtgagcagcagctaccccgtggagcccaagaagctgaacagccccgaggagaccgccttccagacccccaagagcagccagatgcccagacccagcgtgccccccctggtgaagaccagcctgttcagcagcaagctgagcacccccgacgtggtgagccccttcggcacccccttcggcagcagcgtgatgaacagaatggccggcatcttcgacgtgaacacctgctacggcagcccccagagcccccagctgatcagaagaggccccagactgtggaccagcgccagcgaccagcagatgaccgagttcagcaaccccagccccagcaccagcatcagcgccgagggcaagaccatgagacagcccagcgtgatctacagctggatccagaacaagagagagcagatcaagaacttcctgagcaagagagtgctgatcatgtacttcttcagcaagcaccccgaggccagcatccaggccgtgttcagcgacgcccagatgcacatctgggccctggagggcctgagccacctggtggccgccagcttcaccgaggacagattcggcgtggtgcagaccaccctgcccgccatcctgaacaccctgctgaccctgcaggaggccgtggacaagtacttcaagctgccccacgccagcagcaagccccccagaatcagcggcagcctggtggacaccagctacaagaccctgagattcgccttcagagccagcctgaagaccgccatctacagaatcaccaccaccttcggcgagcacctgaacgccgtgcaggccagcgccgagcaccagaagagactgcagcagttcctggagttcaaggagtag

SEQ ID NO: 74072 - DNA, 4500 bp, synthetic construct
  misc_feature 1..4500: note = Description of Artificial Sequence: Synthetic coding sequence
  source 1..4500: mol_type = other DNA
atgagaatcctggccaacaagaccagactgccccaccccagaagaagagaggcccccggcagcccccccctgagccccagaggccactgcccccccgcccccgccaagcccatgcaccccgagaacaagctgaccaaccacggcaagaccggcaacggcggcgcccagagccagcaccagaacgtgaaccagggccccacctgcaacgtgggcagcaagggcgtgggcgccggcaaccacggcgccaaggccaaccagatcagccccagcaacagcagcctgaagaacccccaggccggcgtgccccccttcagcagcctgaagggcaaggtgaagagagacagaagcgtgagcgtggacagcggcgagcagagagaggccggcacccccagcctggacagcgaggccaaggaggtggcccccagaagcaagagaagatgcgtgctggagagaaagcagccctacagcggcgacgagtggtgcagcggccccgacagcgaggaggacgacaagcccatcggcgccacccacaactgcaacgtggccgaccccgccatggccgccccccagctgggccccggccagaccacccagctgcccctgagcgagagcagcgtgcccggcgccccccacggccccccccccggcctgagacccgacgcccccggcggcggcggcggcggcggcggcgtgcccggcaagccccccagccagttcgtgtacgtgttcaccacccacctggccaacaccgccgccgaggccgtgctgcagggcagagccgacagcatcctggcctaccaccagcagaacgtgcccagagccaagctggaccaggcccccaaggtgccccccacccccgagcccctgcccctgagcacccccagcgccggcaccccccagagccagcccccccccctgccccccccccccccccccgcccccggcagcgccccccccgccctgccccccgagggcccccccgaggacagcagccaggacctggcccccaacagcgtgggcgccgccagcaccggcggcggcaccggcggcacccaccccaacacccccaccgccaccaccgccaacaaccccctgccccccggcggcgaccccagcagcgcccccggccccgccctgctgggcgaggccgccgcccccggcaacggccagagaagcctggtgggcagcgagggcctgagcaaggagcagctggagcacagagagagaagcctgcagaccctgagagacatcgagagactgctgctgagaagcggcgagaccgagcccttcctgaagggcccccccggcggcgccggcgagggcggcccccccgcccaggcccccccccccccccagcagccccccaccgccccccccagcggcctgaagaagtacgaggagcccctgcagagcatgatcagccagacccagagcctgggcggcccccccctggagcacgaggtgcccggccacccccccggcggcgacatgggccagcagatgaacatgatgatccagagactgggccaggacagcctgacccccgagcaggtggcctggagaaagctgcaggaggagtactacgaggagaagagaagaaaggaggagcagatcggcctgcacggcagcagacccctgcaggacatgatgggcatgggcggcatgatggtgagaggccccccccccccctaccacagcaagcccggcgaccagtggccccccggcatgggcgcccagctgagaggccccatggacgtgcaggaccccatgcagctgagaggcggcccccccttccccggccccagattccccggcaaccagatccagagagtgcccggcttcggcggcatgcagagcatgcccatggaggtgcccatgaacgccatgcagagacccgtgagacccggcatgggctggaccgaggacctgccccccatgggcggccccagcaacttcgcccagaacaccatgccctaccccggcggccagggcgaggccgagagattcatgacccccagagtgagagaggagctgctgagacaccagctgctggagaagagaagcatgggcatgcagagacccctgggcatggccggcagcggcatgggccagagcatggagatggagagaatgatgcaggcccacagacagatggaccccgccatgttccccggccagatggccggcggcgagggcctggccggcacccccatgggcatggagttcggcggcggcagaggcctgctgagcccccccatgggccagagcggcctgagagaggtggacccccccatgggccccggcaacctgaacatgaacatgaacgtgaacatgaacatgaacatgaacctgaacgtgcagatgaccccccagcagcagatgctgatgagccagaagatgagaggccccggcgacctgatgggcccccagggcctgagccccgaggagatggccagagtgagagcccagaacagcagcggcgtgatgggcggcccccagaagatgctgatgcccagccagttccccaaccagggccagcagggcttcagcggcggccagggcccctaccaggccatgagccaggacatgggcaacacccaggacatgttcagccccgaccagagcagcatgcccatgagcaacgtgggcaccaccagactgagccacatgcccctgccccccgccagcaacccccccggcaccgtgcacagcgcccccaacagaggcctgggcagaagacccagcgacctgaccatcagcatcaaccagatgggcagccccggcatgggccacctgaagagccccaccctgagccaggtgcacagccccctggtgaccagccccagcgccaacctgaagagcccccagacccccagccagatggtgcccctgcccagcgccaacccccccggccccctgaagagcccccaggtgctgggcagcagcctgagcgtgagaagccccaccggcagccccagcagactgaagagccccagcatggccgtgcccagccccggctgggtggccagccccaagaccgccatgcccagccccggcgtgagccagaacaagcagccccccctgaacatgaacagcagcaccaccctgagcaacatggagcagggcaccctgccccccagcggccccagaagcagcagcagcgccccccccgccaacccccccagcggcctgatgaaccccagcctgcccttcaccagcagccccgaccccacccccagccagaaccccctgagcctgatgatgacccagatgagcaagtacgccatgcccagcagcacccccctgtaccacaacgccatcaagaccatcgccaccagcgacgacgagctgctgcccgacagacccctgctgcccccccccccccccccccagggcagcggccccggcatcagcaacagccagcccagccagatgcacctgaacagcgccgccgcccagagccccatgggcatgaacctgcccggccagcagcccctgagccacgagcccccccccgccatgctgcccagccccacccccctgggcagcaacatccccctgcaccccaacgcccagggcaccggcggccccccccagaacagcatgatgatggcccccggcggccccgacagcctgaacgccccctgcggccccgtgcccagcagcagccagatgatgcccttcccccccagactgcagcagccccacggcgccatggcccccaccggcggcggcggcggcggccccggcctgcagcagcactaccccagcggcatggccctgccccccgaggacctgcccaaccagccccccggccccatgcccccccagcagcacctgatgggcaaggccatggccggcagaatgggcgacgcctacccccccggcgtgctgcccggcgtggccagcgtgctgaacgaccccgagctgagcgaggtgatcagacccacccccaccggcatccccgagttcgacctgagcagaatcatccccagcgagaagcccagcagcaccctgcagtacttccccaagagcgagaaccagccccccaaggcccagccccccaacctgcacctgatgaacctgcagaacatgatggccgagcagacccccagcagaccccccaacctgcccggccagcagggcgtgcagagaggcctgaacatgagcatgtgccaccccggccagatgagcctgctgggcagaaccggcgtgcccccccagcagggcatggtgccccacggcctgcaccagggcgtgatgagccccccccagggcctgatgacccagcagaacttcatgctgatgaagcagagaggcgtgggcggcgaggtgtacagccagcccccccacatgctgagcccccagggcagcctgatgggcccccccccccagcagaacctgatggtgagccaccccctgagacagagaagcgtgagcctggacagccagatgggctacctgcccgcccccggcggcatggccaacctgcccttctag

SEQ ID NO: 74073 - DNA, 4188 bp, synthetic construct
  misc_feature 1..4188: note = Description of Artificial Sequence: Synthetic coding sequence
  source 1..4188: mol_type = other DNA
atgagaatcctggccaacaagaccagactgccccaccccagaagaagagaggcccccggcagcccccccctgagccccagaggccactgcccccccgcccccgccaagcccatgcaccccgagaacaagctgaccaaccacggcaagaccggcaacggcggcgcccagagccagcaccagaacgtgaaccagggccccacctgcaacgtgggcagcaagggcgtgggcgccggcaaccacggcgccaaggccaaccagatcagccccagcaacagcagcctgaagaacccccaggccggcgtgccccccttcagcagcctgaagggcaaggtgaagagagacagaagcgtgagcgtggacagcggcgagcagagagaggccggcacccccagcctggacagcgaggccaaggaggtggcccccagaagcaagagaagatgcgtgctggagagaaagcagccctacagcggcgacgagtggtgcagcggccccgacagcgaggaggacgacaagcccatcggcgccacccacaactgcaacgtggccgaccccgccatggccgccccccagctgggccccggccagaccacccagctgcccctgagcgagagcagcgtgcccggcgccccccacggccccccccccggcctgagacccgacgcccccggcggcggcggcggcggcggcggcgtgcccggcaagccccccagccagttcgtgtacgtgttcaccacccacctggccaacaccgccgccgaggccgtgctgcagggcagagccgacagcatcctggcctaccaccagcagaacgtgcccagagccaagctggaccaggcccccaaggtgccccccacccccgagcccctgcccctgagcacccccagcgccggcaccccccagagccagcccccccccctgccccccccccccccccccgcccccggcagcgccccccccgccctgccccccgagggcccccccgaggacagcagccaggacctggcccccaacagcgtgggcgccgccagcaccggcggcggcaccggcggcacccaccccaacacccccaccgccaccaccgccaacaaccccctgccccccggcggcgaccccagcagcgcccccggccccgccctgctgggcgaggccgccgcccccggcaacggccagagaagcctggtgggcagcgagggcctgagcaaggagcagctggagcacagagagagaagcctgcagaccctgagagacatcgagagactgctgctgagaagcggcgagaccgagcccttcctgaagggcccccccggcggcgccggcgagggcggcccccccgcccaggcccccccccccccccagcagccccccaccgccccccccagcggcctgaagaagtacgaggagcccctgcagagcatgatcagccagacccagagcctgggcggcccccccctggagcacgaggtgcccggccacccccccggcggcgacatgggccagcagatgaacatgatgatccagagactgggccaggacagcctgacccccgagcaggtggcctggagaaagctgcaggaggagtactacgaggagaagagaagaaaggaggagcagatcggcctgcacggcagcagacccctgcaggacatgatgggcatgggcggcatgatggtgagaggccccccccccccctaccacagcaagcccggcgaccagtggccccccggcatgggcgcccagctgagaggccccatggacgtgcaggaccccatgcagctgagaggcggcccccccttccccggccccagattccccggcaaccagatccagagagtgcccggcttcggcggcatgcagagcatgcccatggaggtgcccatgaacgccatgcagagacccgtgagacccggcatgggctggaccgaggacctgccccccatgggcggccccagcaacttcgcccagaacaccatgccctaccccggcggccagggcgaggccgagagattcatgacccccagagtgagagaggagctgctgagacaccagctgctggagaagagaagcatgggcatgcagagacccctgggcatggccggcagcggcatgggccagagcatggagatggagagaatgatgcaggcccacagacagatggaccccgccatgttccccggccagatggccggcggcgagggcctggccggcacccccatgggcatggagttcggcggcggcagaggcctgctgagcccccccatgggccagagcggcctgagagaggtggacccccccatgggccccggcaacctgaacatgaacatgaacgtgaacatgaacatgaacatgaacctgaacgtgcagatgaccccccagcagcagatgctgatgagccagaagatgagaggccccggcgacctgatgggcccccagggcctgagccccgaggagatggccagagtgagagcccagaacagcagcggcgtgatgggcggcccccagaagatgctgatgcccagccagttccccaaccagggccagcagggcttcagcggcggccagggcccctaccaggccatgagccaggacatgggcaacacccaggacatgttcagccccgaccagagcagcatgcccatgagcaacgtgggcaccaccagactgagccacatgcccctgccccccgccagcaacccccccggcaccgtgcacagcgcccccaacagaggcctgggcagaagacccagcgacctgaccatcagcatcaaccagatgggcagccccggcatgggccacctgaagagccccaccctgagccaggtgcacagccccctggtgaccagccccagcgccaacctgaagagcccccagacccccagccagatggtgcccctgcccagcgccaacccccccggccccctgaagagcccccaggtgctgggcagcagcctgagcgtgagaagccccaccggcagccccagcagactgaagagccccagcatggccgtgcccagccccggctgggtggccagccccaagaccgccatgcccagccccggcgtgagccagaacaagcagccccccctgaacatgaacagcagcaccaccctgagcaacatggagcagggcaccctgccccccagcggccccagaagcagcagcagcgccccccccgccaacccccccagcggcctgatgaaccccagcctgcccttcaccagcagccccgaccccacccccagccagaaccccctgagcctgatgatgacccagatgagcaagtacgccatgcccagcagcacccccctgtaccacaacgccatcaagaccatcgccaccagcgacgacgagctgctgcccgacagacccctgctgcccccccccccccccccccagggcagcggccccggcatcagcaacagccagcccagccagatgcacctgaacagcgccgccgcccagagccccatgggcatgaacctgcccggccagcagcccctgagccacgagcccccccccgccatgctgcccagccccacccccctgggcagcaacatccccctgcaccccaacgcccagggcaccggcggccccccccagaacagcatgatgatggcccccggcggccccgacagcctgaacgccccctgcggccccgtgcccagcagcagccagatgatgcccttcccccccagactgcagcagccccacggcgccatggcccccaccggcggcggcggcggcggccccggcctgcagcagcactaccccagcggcatggccctgccccccgaggacctgcccaaccagccccccggccccatgcccccccagcagcacctgatgggcaaggccatggccggcagaatgggcgacgcctacccccccggcgtgctgcccggcgtggccagcgtgctgaacgaccccgagctgagcgaggtgatcagacccacccccaccggcatccccgagttcgacctgagcagaatcatccccagcgagttcctgagaaccagacccttcagcttctgcctgtacctgctgagaatcctgagcctgctgatgtggctgacccccctgccccccctgcccgccggcggctggcccggcggccaggtgcccgccggcgccgtgaacagagccctgagattctgcgccggcctgtgcgtgtgctgcatcagcgtgttctag

SEQ ID NO: 74074 - DNA, 4365 bp, synthetic construct
  misc_feature 1..4365: note = Description of Artificial Sequence: Synthetic coding sequence
  source 1..4365: mol_type = other DNA
atgagaatcctggccaacaagaccagactgccccaccccagaagaagagaggcccccggcagcccccccctgagccccagaggccactgcccccccgcccccgccaagcccatgcaccccgagaacaagctgaccaaccacggcaagaccggcaacggcggcgcccagagccagcaccagaacgtgaaccagggccccacctgcaacgtgggcagcaagggcgtgggcgccggcaaccacggcgccaaggccaaccagatcagccccagcaacagcagcctgaagaacccccaggccggcgtgccccccttcagcagcctgaagggcaaggtgaagagagacagaagcgtgagcgtggacagcggcgagcagagagaggccggcacccccagcctggacagcgaggccaaggaggtggcccccagaagcaagagaagatgcgtgctggagagaaagcagccctacagcggcgacgagtggtgcagcggccccgacagcgaggaggacgacaagcccatcggcgccacccacaactgcaacgtggccgaccccgccatggccgccccccagctgggccccggccagaccacccagctgcccctgagcgagagcagcgtgcccggcgccccccacggccccccccccggcctgagacccgacgcccccggcggcggcggcggcggcggcggcgtgcccggcaagccccccagccagttcgtgtacgtgttcaccacccacctggccaacaccgccgccgaggccgtgctgcagggcagagccgacagcatcctggcctaccaccagcagaacgtgcccagagccaagctggaccaggcccccaaggtgccccccacccccgagcccctgcccctgagcacccccagcgccggcaccccccagagccagcccccccccctgccccccccccccccccccgcccccggcagcgccccccccgccctgccccccgagggcccccccgaggacagcagccaggacctggcccccaacagcgtgggcgccgccagcaccggcggcggcaccggcggcacccaccccaacacccccaccgccaccaccgccaacaaccccctgccccccggcggcgaccccagcagcgcccccggccccgccctgctgggcgaggccgccgcccccggcaacggccagagaagcctggtgggcagcgagggcctgagcaaggagcagctggagcacagagagagaagcctgcagaccctgagagacatcgagagactgctgctgagaagcggcgagaccgagcccttcctgaagggcccccccggcggcgccggcgagggcggcccccccgcccaggcccccccccccccccagcagccccccaccgccccccccagcggcctgaagaagtacgaggagcccctgcagagcatgatcagccagacccagagcctgggcggcccccccctggagcacgaggtgcccggccacccccccggcggcgacatgggccagcagatgaacatgatgatccagagactgggccaggacagcctgacccccgagcaggtggcctggagaaagctgcaggaggagtactacgaggagaagagaagaaaggaggagcagatcggcctgcacggcagcagacccctgcaggacatgatgggcatgggcggcatgatggtgagaggccccccccccccctaccacagcaagcccggcgaccagtggccccccggcatgggcgcccagctgagaggccccatggacgtgcaggaccccatgcagctgagaggcggcccccccttccccggccccagattccccggcaaccagatccagagagtgcccggcttcggcggcatgcagagcatgcccatggaggtgcccatgaacgccatgcagagacccgtgagacccggcatgggctggaccgaggacctgccccccatgggcggccccagcaacttcgcccagaacaccatgccctaccccggcggccagggcgaggccgagagattcatgacccccagagtgagagaggagctgctgagacaccagctgctggagaagagaagcatgggcatgcagagacccctgggcatggccggcagcggcatgggccagagcatggagatggagagaatgatgcaggcccacagacagatggaccccgccatgttccccggccagatggccggcggcgagggcctggccggcacccccatgggcatggagttcggcggcggcagaggcctgctgagcccccccatgggccagagcggcctgagagaggtggacccccccatgggccccggcaacctgaacatgaacatgaacgtgaacatgaacatgaacatgaacctgaacgtgcagatgaccccccagcagcagatgctgatgagccagaagatgagaggccccggcgacctgatgggcccccagggcctgagccccgaggagatggccagagtgagagcccagaacagcagcggcgtgatgggcggcccccagaagatgctgatgcccagccagttccccaaccagggccagcagggcttcagcggcggccagggcccctaccaggccatgagccaggacatgggcaacacccaggacatgttcagccccgaccagagcagcatgcccatgagcaacgtgggcaccaccagactgagccacatgcccctgccccccgccagcaacccccccggcaccgtgcacagcgcccccaacagaggcctgggcagaagacccagcgacctgaccatcagcatcaaccagatgggcagccccggcatgggccacctgaagagccccaccctgagccaggtgcacagccccctggtgaccagccccagcgccaacctgaagagcccccagacccccagccagatggtgcccctgcccagcgccaacccccccggccccctgaagagcccccaggtgctgggcagcagcctgagcgtgagaagccccaccggcagccccagcagactgaagagccccagcatggccgtgcccagccccggctgggtggccagccccaagaccgccatgcccagccccggcgtgagccagaacaagcagccccccctgaacatgaacagcagcaccaccctgagcaacatggagcagggcaccctgccccccagcggccccagaagcagcagcagcgccccccccgccaacccccccagcggcctgatgaaccccagcctgcccttcaccagcagccccgaccccacccccagccagaaccccctgagcctgatgatgacccagatgagcaagtacgccatgcccagcagcacccccctgtaccacaacgccatcaagaccatcgccaccagcgacgacgagctgctgcccgacagacccctgctgcccccccccccccccccccagggcagcggccccggcatcagcaacagccagcccagccagatgcacctgaacagcgccgccgcccagagccccatgggcatgaacctgcccggccagcagcccctgagccacgagcccccccccgccatgctgcccagccccacccccctgggcagcaacatccccctgcaccccaacgcccagggcaccggcggccccccccagaacagcatgatgatggcccccggcggccccgacagcctgaacgccccctgcggccccgtgcccagcagcagccagatgatgcccttcccccccagactgcagcagccccacggcgccatgatggccggcagaatgggcgacgcctacccccccggcgtgctgcccggcgtggccagcgtgctgaacgaccccgagctgagcgaggtgatcagacccacccccaccggcatccccgagttcgacctgagcagaatcatccccagcgagaagcccagcagcaccctgcagtacttccccaagagcgagaaccagccccccaaggcccagccccccaacctgcacctgatgaacctgcagaacatgatggccgagcagacccccagcagaccccccaacctgcccggccagcagggcgtgcagagaggcctgaacatgagcatgtgccaccccggccagatgagcctgctgggcagaaccggcgtgcccccccagcagggcatggtgccccacggcctgcaccagggcgtgatgagccccccccagggcctgatgacccagcagaacttcatgctgatgaagcagagaggcgtgggcggcgaggtgtacagccagcccccccacatgctgagcccccagggcagcctgatgggcccccccccccagcagaacctgatggtgagccaccccctgagacagagaagcgtgagcctggacagccagatgggctacctgcccgcccccggcggcatggccaacctgcccttctag

SEQ ID NO: 74075 - DNA, 1401 bp, synthetic construct
  misc_feature 1..1401: note = Description of Artificial Sequence: Synthetic coding sequence
  source 1..1401: mol_type = other DNA
atgagcaccagaagcgtgagcagcagcagctacagaagaatgttcggcggccccggcaccgccagcagacccagcagcagcagaagctacgtgaccaccagcaccagaacctacagcctgggcagcgccctgagacccagcaccagcagaagcctgtacgccagcagccccggcggcgtgtacgccaccagaagcagcgccgtgagactgagaagcagcgtgcccggcgtgagactgctgcaggacagcgtggacttcagcctggccgacgccatcaacaccgagttcaagaacaccagaaccaacgagaaggtggagctgcaggagctgaacgacagattcgccaactacatcgacaaggtgagattcctggagcagcagaacaagatcctgctggccgagctggagcagctgaagggccagggcaagagcagactgggcgacctgtacgaggaggagatgagagagctgagaagacaggtggaccagctgaccaacgacaaggccagagtggaggtggagagagacaacctggccgaggacatcatgagactgagagagaagctgcaggaggagatgctgcagagagaggaggccgagaacaccctgcagagcttcagacaggacgtggacaacgccagcctggccagactggacctggagagaaaggtggagagcctgcaggaggagatcgccttcctgaagaagctgcacgaggaggagatccaggagctgcaggcccagatccaggagcagcacgtgcagatcgacgtggacgtgagcaagcccgacctgaccgccgccctgagagacgtgagacagcagtacgagagcgtggccgccaagaacctgcaggaggccgaggagtggtacaagagcaagttcgccgacctgagcgaggccgccaacagaaacaacgacgccctgagacaggccaagcaggagagcaccgagtacagaagacaggtgcagagcctgacctgcgaggtggacgccctgaagggcaccaacgagagcctggagagacagatgagagagatggaggagaacttcgccgtggaggccgccaactaccaggacaccatcggcagactgcaggacgagatccagaacatgaaggaggagatggccagacacctgagagagtaccaggacctgctgaacgtgaagatggccctggacatcgagatcgccacctacagaaagctgctggagggcgaggagagcagaatcagcctgcccctgcccaacttcagcagcctgaacctgagagagaccaacctggacagcctgcccctggtggacacccacagcaagagaaccctgctgatcaagaccgtggagaccagagacggccaggtgatcaacgagaccagccagcaccacgacgacctggagtag

SEQ ID NO: 74076 - DNA, 1302 bp, synthetic construct
  misc_feature 1..1302: note = Description of Artificial Sequence: Synthetic coding sequence
  source 1..1302: mol_type = other DNA
atggacaagctgaacaagatcaccgtgcccgccagccagaagctgagacagctgcagaagatggtgcacgacatcaagaacaacgagggcggcatcatgaacaagatcaagaagctgaaggtgaaggccccccccagcgtgcccagaagagactacgccagcgagagccccgccgacgaggaggagcagtggagcgacgacttcgacagcgactacgagaaccccgacgagcacagcgacagcgagatgtacgtgatgcccgccgaggagaacgccgacgacagctacgagcccccccccgtggagcaggagaccagacccgtgcaccccgccctgcccttcgccagaggcgagtacatcgacaacagaagcagccagagacacagcccccccttcagcaagaccctgcccagcaagcccagctggcccagcgagaaggccagactgaccagcaccctgcccgccctgaccgccctgcagaagccccaggtgccccccaagcccaagggcctgctggaggacgaggccgactacgtggtgcccgtggaggacaacgacgagaactacatccaccccaccgagagcagcagccccccccccgagaagggcagaaacagcggcgcctgggagaccaagagccccccccccgccgcccccagccccctgcccagagccggcaagaagcccaccacccccctgaagaccacccccgtggccagccagcagaacgccagcagcgtgtgcgaggagaagcccatccccgccgagagacacagaggcagcagccacagacaggaggccgtgcagagccccgtgttcccccccgcccagaagcagatccaccagaagcccatccccctgcccagattcaccgagggcggcaaccccaccgtggacggccccctgcccagcttcagcagcaacagcaccatcagcgagcaggaggccggcgtgctgtgcaagccctggtacgccggcgcctgcgacagaaagagcgccgaggaggccctgcacagaagcaacaaggacggcagcttcctgatcagaaagagcagcggccacgacagcaagcagccctacaccctggtggtgttcttcaacaagagagtgtacaacatccccgtgagattcatcgaggccaccaagcagtacgccctgggcagaaagaagaacggcgaggagtacttcggcagcgtggccgagatcatcagaaaccaccagcacagccccctggtgctgatcgacagccagaacaacaccaaggacagcaccagactgaagtacgccgtgaaggtgagctag

SEQ ID NO: 74077 - DNA, 525 bp, synthetic construct
  misc_feature 1..525: note = Description of Artificial Sequence: Synthetic coding sequence
  source 1..525: mol_type = other DNA
atggacaagctgaacaagatcaccgtgcccgccagccagaagctgagacagctgcagaagatggtgcacgacatcaagaacaacgagggcggcatcatgaacaagatcaagaagctgaaggtgaaggccccccccagcgtgcccagaagagactacgccagcgagagccccgccgacgaggaggagcagtggagcgacgacttcgacagcgactacgagaaccccgacgagcacagcgacagcgagatgtacgtgatgcccgccgaggagaacgccgacgacagctacgagcccccccccgtggagcaggagaccagacccgtgcaccccgccctgcccttcgccagaggcgagtacatcatcttcctgtgcgacctgctgaagcagcagaacaacatgccctgggccgagagaaagatggtgaagagcaccctggaggtgctgctgaagagcagcggcatcatcaacatcgtgctgtggttcctgctgaccgtgagaatcacccagaagatcccccccgactag

SEQ ID NO: 74078 - DNA, 558 bp, synthetic construct
  misc_feature 1..558: note = Description of Artificial Sequence: Synthetic coding sequence
  source 1..558: mol_type = other DNA
atggacaagctgaacaagatcaccgtgcccgccagccagaagctgagacagctgcagaagatggtgcacgacatcaagaacaacgagggcggcatcatgaacaagatcaagaagctgaaggtgaaggccccccccagcgtgcccagaagagactacgccagcgagagccccgccgacgaggaggagcagtggagcgacgacttcgacagcgactacgagaaccccgacgagcacagcgacagcgagatgtacgtgatgcccgccgaggagaacgccgacgacagctacgagcccccccccgtggagcaggagaccagacccgtgcaccccgccctgcccttcgccagaggcgagtacatcgacaacagaagcagccagagacacagcccccccttcagcaagaccctgcccagcaagcccagctggcccagcgagaagtacttcggcagcgtggccgagatcatcagaaaccaccagcacagccccctggtgctgatcgacagccagaacaacaccaaggacagcaccagactgaagtacgccgtgaaggtgagctag

SEQ ID NO: 74079 - DNA, 204 bp, synthetic construct
  misc_feature 1..204: note = Description of Artificial Sequence: Synthetic coding sequence
  source 1..204: mol_type = other DNA
ctggacagctacagctgcctgctgcagctgcccaacagaatggacaagctgaacaagatcaccgtgcccgccagccagaagctgagacagctgcagaagatggtgcacgacatcaagaacaacgagggcggcatcatgaacaagatcaagaagaccgccaccatgaagatccagatgagcaccagaacccagagatgcacctag

SEQ ID NO: 74080 - DNA, 1215 bp, synthetic construct
  misc_feature 1..1215: note = Description of Artificial Sequence: Synthetic coding sequence
  source 1..1215: mol_type = other DNA
atggacaagctgaacaagatcaccgtgcccgccagccagaagctgagacagctgcagaagatggtgcacgacatcaagaacaacgagggcggcatcatgaacaagatcaagaagctgaaggtgaaggccccccccagcgtgcccagaagagactacgccagcgagagccccgccgacgaggaggagcagtggagcgacgacttcgacagcgactacgagaaccccgacgagcacagcgacagcgagatgtacgtgatgcccgccgaggagaacgccgacgacagctacgagcccccccccgtggagcaggagaccagacccgtgcaccccgccctgcccttcgccagaggcgagtacatcgacaacagaagcagccagagacacagcccccccttcagcaagaccctgcccagcaagcccagctggcccagcgagaaggccagactgaccagcaccctgcccgccctgaccgccctgcagaagccccaggtgccccccaagcccaagggcctgctggaggacgaggccgactacgtggtgcccgtggaggacaacgacgagaactacatccaccccaccgagagcagcagccccccccccgagaaggcccccatggtgaacagaagcaccaagcccaacagcagcacccccgccagcccccccggcaccgccagcggcagaaacagcggcgcctgggagaccaagagccccccccccgccgcccccagccccctgcccagagccggcaagaagcccaccacccccctgaagaccacccccgtggccagccagcagaacgccagcagcgtgtgcgaggagaagcccatccccgccgagagacacagaggcagcagccacagacaggaggccgtgcagagccccgtgttcccccccgcccagaagcagatccaccagaagcccatccccctgcccagattcaccgagggcggcaaccccaccgtggacggccccctgcccagcttcagcagcaacagcaccatcagcgagcaggaggccggcgtgctgtgcaagccctggtacgccggcgcctgcgacagaaagagcgccgaggaggccctgcacagaagcaacaagtacttcggcagcgtggccgagatcatcagaaaccaccagcacagccccctggtgctgatcgacagccagaacaacaccaaggacagcaccagactgaagtacgccgtgaaggtgagctag

SEQ ID NO: 74081 - DNA, 1266 bp, synthetic construct
  misc_feature 1..1266: note = Description of Artificial Sequence: Synthetic coding sequence
  source 1..1266: mol_type = other DNA
atggacaagctgaacaagatcaccgtgcccgccagccagaagctgagacagctgcagaagatggtgcacgacatcaagaacaacgagggcggcatcatgaacaagatcaagaagctgaaggtgaaggccccccccagcgtgcccagaagagactacgccagcgagagccccgccgacgaggaggagcagtggagcgacgacttcgacagcgactacgagaaccccgacgagcacagcgacagcgagatgtacgtgatgcccgccgaggagaacgccgacgacagctacgagcccccccccgtggagcaggagaccagacccgtgcaccccgccctgcccttcgccagaggcgagtacatcgacaacagaagcagccagagacacagcccccccttcagcaagaccctgcccagcaagcccagctggcccagcgagaaggccagactgaccagcaccctgcccgccctgaccgccctgcagaagccccaggtgccccccaagcccaagggcctgctggaggacgaggccgactacgtggtgcccgtggaggacaacgacgagaactacatccaccccaccgagagcagcagccccccccccgagaaggcccccatggtgaacagaagcaccaagcccaacagcagcacccccgccagcccccccggcaccgccagcggcagaaacagcggcgcctgggagaccaagagccccccccccgccgcccccagccccctgcccagagccggcaagaagcccaccacccccctgaagaccacccccgtggccagccagcagaacgccagcagcgtgtgcgaggagaagcccatccccgccgagagacacagaggcagcagccacagacaggaggccgtgcagagccccgtgttcccccccgcccagaagcagatccaccagaagcccatccccctgcccagattcaccgagggcggcaaccccaccgtggacggccccctgcccagcttcagcagcaacagcaccatcagcgagcaggaggccggcgtgctgtgcaagccctggtacgccggcgcctgcgacagaaagagcgccgaggaggccctgcacagaagcaacaaggacccccagccccccctgcccagcaagcagtgggagaccagaaagctgcagtacttcggcagcgtggccgagatcatcagaaaccaccagcacagccccctggtgctgatcgacagccagaacaacaccaaggacagcaccagactgaagtacgccgtgaaggtgagctag

SEQ ID NO: 74082 - DNA, 630 bp, synthetic construct
  misc_feature 1..630: note = Description of Artificial Sequence: Synthetic coding sequence
  source 1..630: mol_type = other DNA
atggacaagctgaacaagatcaccgtgcccgccagccagaagctgagacagctgcagaagatggtgcacgacatcaagaacaacgagggcggcatcatgaacaagatcaagaagctgaaggtgaaggccccccccagcgtgcccagaagagactacgccagcgagagccccgccgacgaggaggagcagtggagcgacgacttcgacagcgactacgagaaccccgacgagcacagcgacagcgagatgtacgtgatgcccgccgaggagaacgccgacgacagctacgagcccccccccgtggagcaggagaccagacccgtgcaccccgccctgcccttcgccagaggcgagtacatcgacaacagaagcagccagagacacagcccccccttcagcaagaccctgcccagcaagcccagctggcccagcgagaaggccagactgaccagcaccctgcccgccctgaccgccctgcagaagccccaggtgccccccaagcccaagggcctgctggaggacgaggccgactacgtggtgcccgtggaggacaacgacgagaactacatccaccccaccgagagcagcagccccccccccgagaagggcaagaaccagagacaccactag

SEQ ID NO: 74083 - DNA, 900 bp, synthetic construct
  misc_feature 1..900: note = Description of Artificial Sequence: Synthetic coding sequence
  source 1..900: mol_type = other DNA
atggacaagctgaacaagatcaccgtgcccgccagccagaagctgagacagctgcagaagatggtgcacgacatcaagaacaacgagggcggcatcatgaacaagatcaagaagctgaaggtgaaggccccccccagcgtgcccagaagagactacgccagcgagagccccgccgacgaggaggagcagtggagcgacgacttcgacagcgactacgagaaccccgacgagcacagcgacagcgagatgtacgtgatgcccgccgaggagaacgccgacgacagctacgagcccccccccgtggagcaggagaccagacccgtgcaccccgccctgcccttcgccagaggcgagtacatcggcagaaacagcggcgcctgggagaccaagagccccccccccgccgcccccagccccctgcccagagccggcaagaagcccaccacccccctgaagaccacccccgtggccagccagcagaacgccagcagcgtgtgcgaggagaagcccatccccgccgagagacacagaggcagcagccacagacaggaggccgtgcagagccccgtgttcccccccgcccagaagcagatccaccagaagcccatccccctgcccagattcaccgagggcggcaaccccaccgtggacggccccctgcccagcttcagcagcaacagcaccatcagcgagcaggaggccggcgtgctgtgcaagccctggtacgccggcgcctgcgacagaaagagcgccgaggaggccctgcacagaagcaacaagtacttcggcagcgtggccgagatcatcagaaaccaccagcacagccccctggtgctgatcgacagccagaacaacaccaaggacagcaccagactgaagtacgccgtgaaggtgagctag

SEQ ID NO: 74084 - DNA, 2358 bp, synthetic construct
  misc_feature 1..2358: note = Description of Artificial Sequence: Synthetic coding sequence
  source 1..2358: mol_type = other DNA
atgctgcccgccgcccccggcaagggcctgggcagccccgaccccgccccctgcggccccgccccccccggcaacaccaaggacatcatcatgatctacgaggaggacgccgaggagtgggccctgtacctgaccgaggtgttcctgcacgtggtgaagagagaggccatcctgctgtacagactggagaacttcagcttcagacacctggagctgctgaacctgaccagctacaagtgcaagctgctgatcctgagcaacagcctgctgagagacctgacccccaagaagtgccagttcctggagaagatcctgcacagccccaagagcgtggtgaccctgctgtgcggcgtgaagagcagcgaccagctgtacgagctgctgaacatcagccagagcagatgggagatcagcaccgagcaggagcccgaggactacatcagcgtgatccagagcatcatcttcaaggacagcgaggactacttcgaggtgaacatccccaccgacctgagagccaagcacagcggcgagatcagcgagagaaaggagatcgaggagctgagcgaggccagcagaaacaccatccccctggccgtggtgctgcccaccgagatcccctgcgagaaccccggcgagatcttcatcatcctgagagacgaggtgatcggcgacaccgtggaggtggagttcaccagcagcaacaagagaatcagaaccagacccgccctgtggaacaagaaggtgtggtgcatgaaggccctggagttccccgccggcagcgtgcacgtgaacgtgtactgcgacggcatcgtgaaggccaccaccaagatcaagtactaccccaccgccaaggccaaggagtgcctgttcagaatggccgacagcggcgagagcctgtgccagaacagcatcgaggagctggacggcgtgctgaccagcatcttcaagcacgagatcccctactacgagttccagagcctgcagaccgagatctgcagccagaacaagtacacccacttcaaggagctgcccaccctgctgcactgcgccgccaagttcggcctgaagaacctggccatccacctgctgcagtgcagcggcgccacctgggccagcaagatgaagaacatggagggcagcgaccccgcccacatcgccgagagacacggccacaaggagctgaagaagatcttcgaggacttcagcatccaggagatcgacatcaacaacgagcaggagaacgactacgaggaggacatcgccagcttcagcacctacatccccagcacccagaaccccgccttccaccacgagagcagaaagacctacggccagagcgccgacggcgccgaggccaacgagatggagggcgagggcaagcagaacggcagcggcatggagaccaagcacagccccctggaggtgggcagcgagagcagcgaggaccagtacgacgacctgtacgtgttcatccccggcgccgaccccgagaacaacagccaggagcccctgatgagcagcagaccccccctgcccccccccagacccgtggccaacgccttccagctggagagaccccacttcaccctgcccggcaccatggtggagggccagatggagagaagccagaactggggccaccccggcgtgagacaggagaccggcgacgagcccaagggcgagaaggagaagaaggaggaggagaaggagcaggaggaggaggaggacccctacaccttcgccgagatcgacgacagcgagtacgacatgatcctggccaacctgagcatcaagaagaagaccggcagcagaagcttcatcatcaacagaccccccgcccccacccccagacccaccagcatcccccccaaggaggagaccaccccctacatcgcccaggtgttccagcagaagaccgccagaagacagagcgacgacgacaagttctgcggcctgcccaagaagcaggacagagccagaatcgagagccccgccttcagcaccctgagaggctgcctgaccgacggccaggaggagctgatcctgctgcaggagaaggtgaagaacggcaagatgagcatggacgaggccctggagaagttcaagcactggcagatgggcaagagcggcctggagatgatccagcaggagaagctgagacagctgagagactgcatcatcggcaagagacccgaggaggagaacgtgtacaacaagctgaccatcgtgcaccaccccggcggcaaggagaccgcccacaacgagaacaagttctacaacgtgcacttcagcaacaagctgcccgccagaccccaggtggagaaggagttcggcttctgctgcaagaaggaccactag

SEQ ID NO: 74085 - DNA, 1959 bp, synthetic construct
  misc_feature 1..1959: note = Description of Artificial Sequence: Synthetic coding sequence
  source 1..1959: mol_type = other DNA
atgctgcccgccgcccccggcaagggcctgggcagccccgaccccgccccctgcggccccgccccccccgacagcgaggactacttcgaggtgaacatccccaccgacctgagagccaagcacagcggcgagatcagcgagagaaaggagatcgaggagctgagcgaggccagcagaaacaccatccccctggccgtggtgctgcccaccgagatcccctgcgagaaccccggcgagatcttcatcatcctgagagacgaggtgatcggcgacaccgtggaggtggagttcaccagcagcaacaagagaatcagaaccagacccgccctgtggaacaagaaggtgtggtgcatgaaggccctggagttccccgccggcagcgtgcacgtgaacgtgtactgcgacggcatcgtgaaggccaccaccaagatcaagtactaccccaccgccaaggccaaggagtgcctgttcagaatggccgacagcggcgagagcctgtgccagaacagcatcgaggagctggacggcgtgctgaccagcatcttcaagcacgagatcccctactacgagttccagagcctgcagaccgagatctgcagccagaacaagtacacccacttcaaggagctgcccaccctgctgcactgcgccgccaagttcggcctgaagaacctggccatccacctgctgcagtgcagcggcgccacctgggccagcaagatgaagaacatggagggcagcgaccccgcccacatcgccgagagacacggccacaaggagctgaagaagatcttcgaggacttcagcatccaggagatcgacatcaacaacgagcaggagaacgactacgaggaggacatcgccagcttcagcacctacatccccagcacccagaaccccgccttccaccacgagagcagaaagacctacggccagagcgccgacggcgccgaggccaacgagatggagggcgagggcaagcagaacggcagcggcatggagaccaagcacagccccctggaggtgggcagcgagagcagcgaggaccagtacgacgacctgtacgtgttcatccccggcgccgaccccgagaacaacagccaggagcccctgatgagcagcagaccccccctgcccccccccagacccgtggccaacgccttccagctggagagaccccacttcaccctgcccggcaccatggtggagggccagatggagagaagccagaactggggccaccccggcgtgagacaggagaccggcgacgagcccaagggcgagaaggagaagaaggaggaggagaaggagcaggaggaggaggaggacccctacaccttcgccgagatcgacgacagcgagtacgacatgatcctggccaacctgagcatcaagaagaagaccggcagcagaagcttcatcatcaacagaccccccgcccccacccccagacccaccagcatcccccccaaggaggagaccaccccctacatcgcccaggtgttccagcagaagaccgccagaagacagagcgacgacgacaagttctgcggcctgcccaagaagcaggacagagccagaatcgagagccccgccttcagcaccctgagaggctgcctgaccgacggccaggaggagctgatcctgctgcaggagaaggtgaagaacggcaagatgagcatggacgaggccctggagaagttcaagcactggcagatgggcaagagcggcctggagatgatccagcaggagaagctgagacagctgagagactgcatcatcggcaagagacccgaggaggagaacgtgtacaacaagctgaccatcgtgcaccaccccggcggcaaggagaccgcccacaacgagaacaagttctacaacgtgcacttcagcaacaagctgcccgccagaccccaggtggagaaggagttcggcttctgctgcaagaaggaccactag

SEQ ID NO: 74086 - DNA, 2268 bp, synthetic construct
  misc_feature 1..2268: note = Description of Artificial Sequence: Synthetic coding sequence
  source 1..2268: mol_type = other DNA
atgatctacgaggaggacgccgaggagtgggccctgtacctgaccgaggtgttcctgcacgtggtgaagagagaggccatcctgctgtacagactggagaacttcagcttcagacacctggagctgctgaacctgaccagctacaagtgcaagctgctgatcctgagcaacagcctgctgagagacctgacccccaagaagtgccagttcctggagaagatcctgcacagccccaagagcgtggtgaccctgctgtgcggcgtgaagagcagcgaccagctgtacgagctgctgaacatcagccagagcagatgggagatcagcaccgagcaggagcccgaggactacatcagcgtgatccagagcatcatcttcaaggacagcgaggactacttcgaggtgaacatccccaccgacctgagagccaagcacagcggcgagatcagcgagagaaaggagatcgaggagctgagcgaggccagcagaaacaccatccccctggccgtggtgctgcccaccgagatcccctgcgagaaccccggcgagatcttcatcatcctgagagacgaggtgatcggcgacaccgtggaggtggagttcaccagcagcaacaagagaatcagaaccagacccgccctgtggaacaagaaggtgtggtgcatgaaggccctggagttccccgccggcagcgtgcacgtgaacgtgtactgcgacggcatcgtgaaggccaccaccaagatcaagtactaccccaccgccaaggccaaggagtgcctgttcagaatggccgacagcggcgagagcctgtgccagaacagcatcgaggagctggacggcgtgctgaccagcatcttcaagcacgagatcccctactacgagttccagagcctgcagaccgagatctgcagccagaacaagtacacccacttcaaggagctgcccaccctgctgcactgcgccgccaagttcggcctgaagaacctggccatccacctgctgcagtgcagcggcgccacctgggccagcaagatgaagaacatggagggcagcgaccccgcccacatcgccgagagacacggccacaaggagctgaagaagatcttcgaggacttcagcatccaggagatcgacatcaacaacgagcaggagaacgactacgaggaggacatcgccagcttcagcacctacatccccagcacccagaaccccgccttccaccacgagagcagaaagacctacggccagagcgccgacggcgccgaggccaacgagatggagggcgagggcaagcagaacggcagcggcatggagaccaagcacagccccctggaggtgggcagcgagagcagcgaggaccagtacgacgacctgtacgtgttcatccccggcgccgaccccgagaacaacagccaggagcccctgatgagcagcagaccccccctgcccccccccagacccgtggccaacgccttccagctggagagaccccacttcaccctgcccggcaccatggtggagggccagatggagagaagccagaactggggccaccccggcgtgagacaggagaccggcgacgagcccaagggcgagaaggagaagaaggaggaggagaaggagcaggaggaggaggaggacccctacaccttcgccgagatcgacgacagcgagtacgacatgatcctggccaacctgagcatcaagaagaagaccggcagcagaagcttcatcatcaacagaccccccgcccccacccccagacccaccagcatcccccccaaggaggagaccaccccctacatcgcccaggtgttccagcagaagaccgccagaagacagagcgacgacgacaagttctgcggcctgcccaagaagcaggacagagccagaatcgagagccccgccttcagcaccctgagaggctgcctgaccgacggccaggaggagctgatcctgctgcaggagaaggtgaagaacggcaagatgagcatggacgaggccctggagaagttcaagcactggcagatgggcaagagcggcctggagatgatccagcaggagaagctgagacagctgagagactgcatcatcggcaagagacccgaggaggagaacgtgtacaacaagctgaccatcgtgcaccaccccggcggcaaggagaccgcccacaacgagaacaagttctacaacgtgcacttcagcaacaagctgcccgccagaccccaggtggagaaggagttcggcttctgctgcaagaaggaccactag

SEQ ID NO: 74087 - DNA, 2313 bp, synthetic construct
  misc_feature 1..2313: note = Description of Artificial Sequence: Synthetic coding sequence
  source 1..2313: mol_type = other DNA
atggtgaactgccacctgaagatcggcaacaccaaggacatcatcatgatctacgaggaggacgccgaggagtgggccctgtacctgaccgaggtgttcctgcacgtggtgaagagagaggccatcctgctgtacagactggagaacttcagcttcagacacctggagctgctgaacctgaccagctacaagtgcaagctgctgatcctgagcaacagcctgctgagagacctgacccccaagaagtgccagttcctggagaagatcctgcacagccccaagagcgtggtgaccctgctgtgcggcgtgaagagcagcgaccagctgtacgagctgctgaacatcagccagagcagatgggagatcagcaccgagcaggagcccgaggactacatcagcgtgatccagagcatcatcttcaaggacagcgaggactacttcgaggtgaacatccccaccgacctgagagccaagcacagcggcgagatcagcgagagaaaggagatcgaggagctgagcgaggccagcagaaacaccatccccctggccgtggtgctgcccaccgagatcccctgcgagaaccccggcgagatcttcatcatcctgagagacgaggtgatcggcgacaccgtggaggtggagttcaccagcagcaacaagagaatcagaaccagacccgccctgtggaacaagaaggtgtggtgcatgaaggccctggagttccccgccggcagcgtgcacgtgaacgtgtactgcgacggcatcgtgaaggccaccaccaagatcaagtactaccccaccgccaaggccaaggagtgcctgttcagaatggccgacagcggcgagagcctgtgccagaacagcatcgaggagctggacggcgtgctgaccagcatcttcaagcacgagatcccctactacgagttccagagcctgcagaccgagatctgcagccagaacaagtacacccacttcaaggagctgcccaccctgctgcactgcgccgccaagttcggcctgaagaacctggccatccacctgctgcagtgcagcggcgccacctgggccagcaagatgaagaacatggagggcagcgaccccgcccacatcgccgagagacacggccacaaggagctgaagaagatcttcgaggacttcagcatccaggagatcgacatcaacaacgagcaggagaacgactacgaggaggacatcgccagcttcagcacctacatccccagcacccagaaccccgccttccaccacgagagcagaaagacctacggccagagcgccgacggcgccgaggccaacgagatggagggcgagggcaagcagaacggcagcggcatggagaccaagcacagccccctggaggtgggcagcgagagcagcgaggaccagtacgacgacctgtacgtgttcatccccggcgccgaccccgagaacaacagccaggagcccctgatgagcagcagaccccccctgcccccccccagacccgtggccaacgccttccagctggagagaccccacttcaccctgcccggcaccatggtggagggccagatggagagaagccagaactggggccaccccggcgtgagacaggagaccggcgacgagcccaagggcgagaaggagaagaaggaggaggagaaggagcaggaggaggaggaggacccctacaccttcgccgagatcgacgacagcgagtacgacatgatcctggccaacctgagcatcaagaagaagaccggcagcagaagcttcatcatcaacagaccccccgcccccacccccagacccaccagcatcccccccaaggaggagaccaccccctacatcgcccaggtgttccagcagaagaccgccagaagacagagcgacgacgacaagttctgcggcctgcccaagaagcaggacagagccagaatcgagagccccgccttcagcaccctgagaggctgcctgaccgacggccaggaggagctgatcctgctgcaggagaaggtgaagaacggcaagatgagcatggacgaggccctggagaagttcaagcactggcagatgggcaagagcggcctggagatgatccagcaggagaagctgagacagctgagagactgcatcatcggcaagagacccgaggaggagaacgtgtacaacaagctgaccatcgtgcaccaccccggcggcaaggagaccgcccacaacgagaacaagttctacaacgtgcacttcagcaacaagctgcccgccagaccccaggtggagaaggagttcggcttctgctgcaagaaggaccactag

SEQ ID NO: 74088 - DNA, 1959 bp, synthetic construct; identical to SEQ ID NO: 74085
  misc_feature 1..1959: note = Description of Artificial Sequence: Synthetic coding sequence
  source 1..1959: mol_type = other DNA

SEQ ID NO: 74089 - DNA, 516 bp, synthetic construct
  misc_feature 1..516: note = Description of Artificial Sequence: Synthetic coding sequence
  source 1..516: mol_type = other DNA
atgcaccccttctacaccagagccgccaccatgatcggcgagatcgccgccgccgtgagcttcatcagcaagttcctgagaaccaagggcctgaccagcgagagacagctgcagaccttcagccagagcctgcaggagctgctggccgagcactacaagcaccactggttccccgagaagccctgcaagggcagcggctacagatgcatcagaatcaaccacaagatggaccccctgatcggccaggccgcccagagaatcggcctgagcagccaggagctgttcagactgctgcccagcgagctgaccctgtgggtggacccctacgaggtgagctacagaatcggcgaggacggcagcatctgcgtgctgtacgaggccagccccgccggcggcagcacccagaacagcaccaacgtgcagatggtggacagcagaatcagctgcaaggaggagctgctgctgggcagaaccagccccagcaagaactacaacatgatgaccgtgagcggctag

SEQ ID NO: 74090 - DNA, 672 bp, synthetic construct
  misc_feature 1..672: note = Description of Artificial Sequence: Synthetic coding sequence
  source 1..672: mol_type = other DNA
atgagagacgagatcgccaccaccgtgttcttcgtgaccagactggtgaagaagcacgacaagctgagcaagcagcagatcgaggacttcgccgagaagctgatgaccatcctgttcgagacctacagaagccactggcacagcgactgccccagcaagggccaggccttcagatgcatcagaatcaacaacaaccagaacaaggaccccatcctggagagagcctgcgtggagagcaacgtggacttcagccacctgggcctgcccaaggagatgaccatctgggtggaccccttcgaggtgtgctgcagatacggcgagaagaaccaccccttcaccgtggccagcttcaagggcagatgggaggagtgggagctgtaccagcagatcagctacgccgtgagcagagccagcagcgacgtgagcagcggcaccagctgcgacgaggagagctgcagcaaggagcccagagtgatccccaaggtgagcaaccccaagagcatctaccaggtggagaacctgaagcagcccttccagagctggctgcagatccccagaaagaagaacgtggtggacggcagagtgggcctgctgggcaacacctaccacggcagccagaagcaccccaagtgctacagacccgccatgcacagactggacagaatcctgtag

SEQ ID NO: 74091 - DNA, 483 bp, synthetic construct
  misc_feature 1..483: note = Description of Artificial Sequence: Synthetic coding sequence
  source 1..483: mol_type = other DNA
atgagagacgagatcgccaccaccgtgttcttcgtgaccagactggtgaagaagcacgacaagctgagcaagcagcagatcgaggacttcgccgagaagctgatgaccatcctgttcgagacctacagaagccactggcacagcgactgccccagcaagggccaggccttcagatgcatcagaatcaacaacaaccagaacaaggaccccatcctggagagagcctgcgtggagagcaacgtggacttcagccacctgggcctgcccaaggagatgaccatctgggtggaccccttcgaggtgtgctgcagatacggcgagaagaaccaccccttcaccgtggccagcttcaagggcagatgggaggagtgggagctgtaccagcagatcagctacgccgtgagcagagccagcagcgacgtgagcagcggcaccagctgcgacgaggagagctgcagcaaggagcccagagtgatcccctag

SEQ ID NO: 74092 - DNA, 1188 bp, synthetic construct
  misc_feature 1..1188: note = Description of Artificial Sequence: Synthetic coding sequence
  source 1..1188: mol_type = other DNA
atgagcctggtggacctgggcaagaagctgctggaggccgccagagccggccaggacgacgaggtgagaatcctgatggccaacggcgcccccttcaccaccgactggctgggcaccagccccctgcacctggccgcccagtacggccactacagcaccaccgaggtgctgctgagagccggcgtgagcagagacgccagaaccaaggtggacagaacccccctgcacatggccgccagcgagggccacgccagcatcgtggaggtgctgctgaagcacggcgccgacgtgaacgccaaggacatgctgaagatgaccgccctgcactgggccaccgagcacaaccaccaggaggtggtggagctgctgatcaagtacggcgccgacgtgcacacccagagcaagttctgcaagaccgccttcgacatcagcatcgacaacggcaacgaggacctggccgagatcctgcagatcgccatgcagaaccagatcaacaccaaccccgagagccccgacaccgtgaccatccacgccgccaccccccagttcatcatcggccccggcggcgtggtgaacctgaccggcctggtgagcagcgagaacagcagcaaggccaccgacgagaccggcgtgagcgccgtgcagttcggcaacagcagcaccagcgtgctggccaccctggccgccctggccgaggccagcgcccccctgagcaacagcagcgagacccccgtggtggccaccgaggaggtggtgaccgccgagagcgtggacggcgccatccagcaggtggtgagcagcggcggccagcaggtgatcaccatcgtgaccgacggcatccagctgggcaacctgcacagcatccccaccagcggcatcggccagcccatcatcgtgaccatgcccgacggccagcaggtgctgaccgtgcccgccaccgacatcgccgaggagaccgtgatcagcgaggagccccccgccaagagacagtgcatcgagatcatcgagaacagagtggagagcgccgagatcgaggagagagaggccctgcagaagcagctggacgaggccaacagagaggcccagaagtacagacagcagctgctgaagaaggagcaggaggccgaggcctacagacagaagctggaggccatgaccagactgcagaccaacaaggaggccgtgtag

SEQ ID NO: 74093 - DNA, 555 bp, synthetic construct
  misc_feature 1..555: note = Description of Artificial Sequence: Synthetic coding sequence
  source 1..555: mol_type = other DNA
atggagcccagccagtgcgtggaggagctggaggacgacgtgttccagcccgaggacggcgagcccgtgacccagcccggcagcctgctgagcgccgacctgttcgcccagagcctgctggactgccccctgagcagactgcagctgttccccctgacccactgctgcggccccggcctgagacccaccagccaggaggacaaggccacccagaccctgagccccgccagccccagccagggcgtgatgctgccctgcggcgtgaccgaggagccccagagactgttctacggcaacgccggctacagactgcccctgcccgccagcttccccgccgtgctgcccatcggcgagcagccccccgagggccagtggcagcaccaggccgaggtgcagatcgccagaaagctgcagtgcatcgccgaccagttccacagactgcacgtgcagcagcaccagcagaaccagaacagagtgtggtggcagatcctgctgttcctgcacaacctggccctgaacggcgaggagaacagaaacggcgccggccccagatag

SEQ ID NO: 74094 - DNA, 555 bp, synthetic construct; identical to SEQ ID NO: 74093
  misc_feature 1..555: note = Description of Artificial Sequence: Synthetic coding sequence
  source 1..555: mol_type = other DNA

SEQ ID NO: 74095 - DNA, 492 bp, synthetic construct
  misc_feature 1..492: note = Description of Artificial Sequence: Synthetic coding sequence
  source 1..492: mol_type = other DNA
atggagcccagccagtgcgtggaggagctggaggacgacgtgttccagcccgaggacggcgagcccgtgacccagcccggcagcctgctgagcgccgacctgttcgcccagagcctgctggactgccccctgagcagactgcagctgttccccctgacccactgctgcggccccggcctgagacccaccagccaggaggacaaggccacccagaccctgagccccgccagccccagccagggcgtgatgctgccctgcggcgtgaccgaggagccccagagactgttctacggcaacgccggctacagactgcccctgcccgccagcttccccgccgtgctgcccatcggcgagcagccccccgagggccagtggcagcaccaggccgagcaccagcagaaccagaacagagtgtggtggcagatcctgctgttcctgcacaacctggccctgaacggcgaggagaacagaaacggcgccggccccagatag

SEQ ID NO: 74096 - DNA, 186 bp, synthetic construct
  misc_feature 1..186: note = Description of Artificial Sequence: Synthetic coding sequence
  source 1..186: mol_type = other DNA
atggagcccagccagtgcgtggaggagctggaggacgacgtgttccagcccgaggacggcgagcccgtgacccagcccggcagcctgctgagcgccgacctgttcgcccagagcctgctggactgccccctgagcagactgcagctgttccccctgacccactgctgcggccccggcctgagatag

SEQ ID NO: 74097 - DNA, 390 bp, synthetic construct
  misc_feature 1..390: note = Description of Artificial Sequence: Synthetic coding sequence
  source 1..390: mol_type = other DNA
atggagcccagccagtgcgtggaggagctggaggacgacgtgttccagcccgaggacggcgagcccgtgacccagcccggcagcctgctgagcgccgacctgttcgcccagagcctgctggactgccccctgagcagactgcagctgttccccctgacccactgctgcggccccggcctgagacccaccagccaggaggacaaggccacccagaccctgagccccgccagccccagccagggcgtgatgctgccctgcggcgtgaccgaggagccccagagactgttctacgcccccgccgagcccaagagctgcgtggtggccgacccccccctgcccgcccagccctgcttcgagtggagaagagagcaggagagaggcagaccctag

SEQ ID NO: 74098 - DNA, 42 bp, synthetic construct
  misc_feature 1..42: note = Description of Artificial Sequence: Synthetic coding sequence
  source 1..42: mol_type = other DNA
atggagcccagccagtgcgtggaggagctggaggacgactag

SEQ ID NO: 74099 - DNA, 555 bp, synthetic construct; identical to SEQ ID NO: 74093
  misc_feature 1..555: note = Description of Artificial Sequence: Synthetic coding sequence
  source 1..555: mol_type = other DNA

SEQ ID NO: 74100 - DNA, 555 bp, synthetic construct; identical to SEQ ID NO: 74093
  misc_feature 1..555: note = Description of Artificial Sequence: Synthetic coding sequence
  source 1..555: mol_type = other DNA

SEQ ID NO: 74101 - DNA, 585 bp, synthetic construct
  misc_feature 1..585: note = Description of Artificial Sequence: Synthetic coding sequence
  source 1..585: mol_type = other DNA
atgagccagaacggcgcccccggcatgcaggaggagagcctgcagggcagctgggtggagctgcacttcagcaacaacggcaacggcggcagcgtgcccgccagcgtgagcatctacaacggcgacatggagaagatcctgctggacgcccagcacgagagcggcagaagcagcagcaagagcagccactgcgacagcccccccagaagccagaccccccaggacaccaacagagccagcgagaccgacacccacagcatcggcgagaagaacagcagccagagcgaggaggacgacatcgagagaagaaaggaggtggagagcatcctgaagaagaacagcgactggatctgggactggagcagcagacccgagaacatcccccccaaggagttcctgttcaagcaccccaagagaaccgccaccctgagcatgagaaacaccagcgtgatgaagaagggcggcatcttcagcgccgagttcctgaaggtgttcctgcccagcctgctgctgagccacctgctggccatcggcctgggcatctacatcggcagaagactgaccaccagcaccagcaccttctag

SEQ ID NO: 74102 - DNA, 543 bp, synthetic construct
  misc_feature 1..543: note = Description of Artificial Sequence: Synthetic coding sequence
  source 1..543: mol_type = other DNA
atgagccagaacggcgcccccggcatgcaggaggagagcctgcagggcagctgggtggagctgcacttcagcaacaacggcaacggcggcagcgtgcccgccagcgtgagcatctacaacggcgacatggagaagatcctgctggacgcccagcacgagagcggcagaagcagcagcaagagcagccactgcgacagcccccccagaagccagaccccccaggacaccaacagagccagcgagaccgacacccacagcatcggcgagaagaacagcagccagagcgaggaggacgacatcgagagaagaaaggaggtggagagcatcctgaagaagaacagcgactggatctgggactggagcagcagacccgagaacatcccccccaaggagttcctgttcaagcaccccaagagaaccgccaccctgagcatgagaaacaccagcgtgatgaagaagggcggcatcttcagcgccgagttcctgaaggtgttcctgcccagcctgctgctgagccacctgctggccatcggcctgggctag

SEQ ID NO: 74103 - DNA, 1071 bp, synthetic construct
  misc_feature 1..1071: note = Description of Artificial Sequence: Synthetic coding sequence
  source 1..1071: mol_type = other DNA
atgagcagacccctgctgatcaccttcacccccgccaccgaccccagcgacctgtggaaggacggccagcagcagccccagcccgagaagcccgagagcaccctggacggcgccgccgccctggccttctacgaggccctgatcggcgacgagagcagcgcccccgacagccagagaagccagaccgagcccgccagagagagaaagagaaagaagagaagaatcatgaaggcccccgccgccgaggccgtggccgagggcgccagcggcagacacggccagggcagaagcctggaggccgaggacaagatgacccacagaatcctgagagccgcccaggagggcgacctgcccgagctgagaagactgctggagccccacgaggccggcggcgccggcggcaacatcaacgccagagacgccttctggtggacccccctgatgtgcgccgccagagccggccagggcgccgccgtgagctacctgctgggcagaggcgccgcctgggtgggcgtgtgcgagctgagcggcagagacgccgcccagctggccgaggaggccggcttccccgaggtggccagaatggtgagagagagccacggcgagaccagaagccccgagaacagaagccccacccccagcctgcagtactgcgagaactgcgacacccacttccaggacagcaaccacagaaccagcaccgcccacctgctgagcctgagccagggcccccagccccccaacctgcccctgggcgtgcccatcagcagccccggcttcaagctgctgctgagaggcggctgggagcccggcatgggcctgggccccagaggcgagggcagagccaaccccatccccaccgtgctgaagagagaccaggagggcctgggctacagaagcgccccccagcccagagtgacccacttccccgcctgggacaccagagccgtggccggcagagagagaccccccagagtggccaccctgagctggagagaggagagaagaagagaggagaaggacagagcctgggagagagacctgagaacctacatgaacctggagttctag

SEQ ID NO: 74104 - DNA, 3399 bp, synthetic construct
  misc_feature 1..3399: note = Description of Artificial Sequence: Synthetic coding sequence
  source 1..3399: mol_type = other DNA
atggagcccaacgacagcaccagcaccgccgtggaggagcccgacagcctggaggtgctggtgaagaccctggacagccagaccagaaccttcatcgtgggcgcccagatgaacgtgaaggagttcaaggagcacatcgccgccagcgtgagcatccccagcgagaagcagagactgatctaccagggcagagtgctgcaggacgacaagaagctgcaggagtacaacgtgggcggcaaggtgatccacctggtggagagagcccccccccagacccacctgcccagcggcgccagcagcggcaccggcagcgccagcgccacccacggcggcggcagcccccccggcaccagaggccccggcgccagcgtgcacgacagaaacgccaacagctacgtgatggtgggcaccttcaacctgcccagcgacggcagcgccgtggacgtgcacatcaacatggagcaggcccccatccagagcgagcccagagtgagactggtgatggcccagcacatgatcagagacatccagaccctgctgagcagaatggagaccctgccctacctgcagtgcagaggcggcccccagccccagcacagccagccccccccccagccccccgccgtgacccccgagcccgtggccctgagcagccagaccagcgagcccgtggagagcgaggccccccccagagagcccatggaggccgaggaggtggaggagagagcccccgcccagaaccccgagctgacccccggccccgcccccgccggccccacccccgcccccgagaccaacgcccccaaccaccccagccccgccgagtacgtggaggtgctgcaggagctgcagagactggagagcagactgcagcccttcctgcagagatactacgaggtgctgggcgccgccgccaccaccgactacaacaacaaccacgagggcagagaggaggaccagagactgatcaacctggtgggcgagagcctgagactgctgggcaacaccttcgtggccctgagcgacctgagatgcaacctggcctgcaccccccccagacacctgcacgtggtgagacccatgagccactacaccacccccatggtgctgcagcaggccgccatccccatccagatcaacgtgggcaccaccgtgaccatgaccggcaacggcaccagacccccccccacccccaacgccgaggcccccccccccggccccggccaggccagcagcgtggcccccagcagcaccaacgtggagagcagcgccgagggcgcccccccccccggccccgcccccccccccgccaccagccaccccagagtgatcagaatcagccaccagagcgtggagcccgtggtgatgatgcacatgaacatccaggacagcggcacccagcccggcggcgtgcccagcgcccccaccggccccctgggcccccccggccacggccagaccctgggccagcaggtgcccggcttccccaccgcccccaccagagtggtgatcgccagacccacccccccccaggccagacccagccaccccggcggcccccccgtgagcggcaccctgcagggcgccggcctgggcaccaacgccagcctggcccagatggtgagcggcctggtgggccagctgctgatgcagcccgtgctggtggcccagggcacccccggcatggcccccccccccgcccccgccaccgccagcgccagcgccggcaccaccaacaccgccaccaccgccggccccgcccccggcggccccgcccagcccccccccaccccccagcccagcatggccgacctgcagttcagccagctgctgggcaacctgctgggccccgccggccccggcgccggcggcagcggcgtggccagccccaccatcaccgtggccatgcccggcgtgcccgccttcctgcagggcatgaccgacttcctgcaggccacccagaccgccccccccccccccccccccccccccccccccccccccgcccccgagcagcagaccatgcccccccccggcagccccagcggcggcgccggcagccccggcggcctgggcctggagagcctgagccccgagttcttcaccagcgtggtgcagggcgtgctgagcagcctgctgggcagcctgggcgccagagccggcagcagcgagagcatcgccgccttcatccagagactgagcggcagcagcaacatcttcgagcccggcgccgacggcgccctgggcttcttcggcgccctgctgagcctgctgtgccagaacttcagcatggtggacgtggtgatgctgctgcacggccacttccagcccctgcagagactgcagccccagctgagaagcttcttccaccagcactacctgggcggccaggagcccacccccagcaacatcagaatggccacccacaccctgatcaccggcctggaggagtacgtgagagagagcttcagcctggtgcaggtgcagcccggcgtggacatcatcagaaccaacctggagttcctgcaggagcagttcaacagcatcgccgcccacgtgctgcactgcaccgacagcggcttcggcgccagactgctggagctgtgcaaccagggcctgttcgagtgcctggccctgaacctgcactgcctgggcggccagcagatggagctggccgccgtgatcaacggcagaatcagaagaatgagcagaggcgtgaaccccagcctggtgagctggctgaccaccatgatgggcctgagactgcaggtggtgctggagcacatgcccgtgggccccgacgccatcctgagatacgtgagaagagtgggcgaccccccccagcccctgcccgaggagcccatggaggtgcagggcgccgagagagccagccccgagccccagagagagaacgccagccccgcccccggcaccaccgccgaggaggccatgagcagaggccccccccccgcccccgagggcggcagcagagacgagcaggacggcgccagcgccgagaccgagccctgggccgccgccgtgccccccgagtgggtgcccatcatccagcaggacatccagagccagagaaaggtgaagccccagccccccctgagcgacgcctacctgagcggcatgcccgccaagagaagaaagaccatgcagggcgagggcccccagctgctgctgagcgaggccgtgagcagagccgccaaggccgccggcgccagacccctgaccagccccgagagcctgagcagagacctggaggcccccgaggtgcaggagagctacagacagcagctgagaagcgacatccagaagagactgcaggaggaccccaactacagcccccagagattccccaacgcccagagagccttcgccgacgacccctag

SEQ ID NO: 74105 - DNA, 3234 bp, synthetic construct
  misc_feature 1..3234: note = Description of Artificial Sequence: Synthetic coding sequence
  source 1..3234: mol_type = other DNA
atggagcccaacgacagcaccagcaccgccgtggaggagcccgacagcctggaggtgctggtgaagaccctggacagccagaccagaaccttcatcgtgggcgcccagatgaacgtgaaggagttcaaggagcacatcgccgccagcgtgagcatccccagcgagaagcagagactgatctaccagggcagagtgctgcaggacgacaagaagctgcaggagtacaacgtgggcggcaaggtgatccacctggtggagagagcccccccccagacccacctgcccagcggcgccagcagcggcaccggcagcgccagcgccacccacggcggcggcagcccccccggcaccagaggccccggcgccagcgtgcacgacagaaacgccaacagctacgtgatggtgggcaccttcaacctgcccagcgacggcagcgccgtggacgtgcacatcaacatggagcaggcccccatccagagcgagcccagagtgagactggtgatggcccagcacatgatcagagacatccagaccctgctgagcagaatggagtgcagaggcggcccccagccccagcacagccagccccccccccagccccccgccgtgacccccgagcccgtggccctgagcagccagaccagcgagcccgtggagagcgaggccccccccagagagcccatggaggccgaggaggtggaggagagagcccccgcccagaaccccgagctgacccccggccccgcccccgccggccccacccccgcccccgagaccaacgcccccaaccaccccagccccgccgagtacgtggaggtgctgcaggagctgcagagactggagagcagactgcagcccttcctgcagagatactacgaggtgctgggcgccgccgccaccaccgactacaacaacaaccacgagggcagagaggaggaccagagactgatcaacctggtgggcgagagcctgagactgctgggcaacaccttcgtggccctgagcgacctgagatgcaacctggcctgcaccccccccagacacctgcacgtggtgagacccatgagccactacaccacccccatggtgctgcagcaggccgccatccccatccagatcaacgtgggcaccaccgtgaccatgaccggcaacggcaccagacccccccccacccccaacgccgaggcccccccccccggccccggccaggccagcagcgtggcccccagcagcaccaacgtggagagcagcgccgagggcgcccccccccccggccccgcccccccccccgccaccagccaccccagagtgatcagaatcagccaccagagcgtggagcccgtggtgatgatgcacatgaacatccaggacagcggcacccagcccggcggcgtgcccagcgcccccaccggccccctgggcccccccggccacggccagaccctgggccagcaggtgcccggcttccccaccgcccccaccagagtggtgatcgccagacccacccccccccaggccagacccagccaccccggcggcccccccgtgagcggcaccctgcagggcgccggcctgggcaccaacgccagcctggcccagatggtgagcggcctggtgggccagctgctgatgcagcccgtgctggtggcccagggcacccccggcatggcccccccccccgcccccgccaccgccagcgccagcgccggcaccaccaacaccgccaccaccgccggccccgcccccggcggccccgcccagcccccccccaccccccagcccagcatggccgacctgcagttcagccagctgctgggcaacctgctgggccccgccggccccggcgccggcggcagcggcgtggccagccccaccatcaccgtggccatgcccggcgtgcccgccttcctgcagggcatgaccgacttcctgcaggccacccagaccgccccccccccccccccccccccccccccccccccccccgcccccgagcagcagaccatgcccccccccggcagccccagcggcggcgccggcagccccggcggcctgggcctggagagcctgagccccgagttcttcaccagcgtggtgcagggcgtgctgagcagcctgctgggcagcctgggcgccagagccggcagcagcgagagcatcgccgccttcatccagagactgagcggcagcagcaacatcttcgagcccggcgccgacggcgccctgggcttcttcggcgccctgctgagcctgctgtgccagaacttcagcatggtggacgtggtgatgctgctgcacggccacttccagcccctgcagagactgcagccccagctgagaagcttcttccaccagcactacctgggcggccaggagcccacccccagcaacatcagaatggccacccacaccctgatcaccggcctggaggagtacgtgagagagagcttcagcctggtgcaggtgcagcccggcgtggacatcatcagaaccaacctggagttcctgcaggagcagttcaacagcatcgccgcccacgtgctgcactgcaccgacagcggcttcggcgccagactgctggagctgtgcaaccagggcctgttcgagtgcctggccctgaacctgcactgcctgggcggccagcagatggagctggccgccgtgatcaacggcagaatcagaagaatgagcagaggcgtgaaccccagcctggtgagctggctgaccaccatgatgggcctgagactgcaggtggtgctggagcacatgcccgtgggccccgacgccatcctgagatacgtgagaagagtgggcgaccccccccagcccctgcccgaggagcccatggaggtgcagggcgccgagagagccagccccgagccccagagagagaacgccagccccgcccccggcaccaccgccgaggaggccatgagcagaggccccccccccgcccccgagggcggcagcagagacgagcaggacggcgccagcgccgagaccgagccctgggccgccgccgtgccccccgagtgggtgcccatcatccagcaggacatccagagccagagaaaggtgaagccccagccccccctgagcgacgcctacctgagcggcatgcccgccaagagaagaaagctgagaagcgacatccagaagagactgcaggaggaccccaactacagcccccagagattccccaacgcccagagagccttcgccgacgacccctag

SEQ ID NO: 74106 - DNA, 3399 bp, synthetic construct; identical to SEQ ID NO: 74104
  misc_feature 1..3399: note = Description of Artificial Sequence: Synthetic coding sequence
  source 1..3399: mol_type = other DNA

SEQ ID NO: 74107 - DNA, 3381 bp, synthetic construct
  misc_feature 1..3381: note = Description of Artificial Sequence: Synthetic coding sequence
  source 1..3381: mol_type = other DNA
atggagcccaacgacagcaccagcaccgccgtggaggagcccgacagcctggaggtgctggtgaagaccctggacagccagaccagaaccttcatcgtgggcgcccagatgaacgtgaaggagttcaaggagcacatcgccgccagcgtgagcatccccagcgagaagcagagactgatctaccagggcagagtgctgcaggacgacaagaagctgcaggagtacaacgtgggcggcaaggtgatccacctggtggagagagcccccccccagacccacctgcccagcggcgccagcagcggcaccggcagcgccagcgccacccacggcggcggcagcccccccggcaccagaggccccggcgccagcgtgcacgacagaaacgccaacagctacgtgatggtgggcaccttcaacctgcccagcgacggcagcgccgtggacgtgcacatcaacatggagcaggcccccatccagagcgagcccagagtgagactggtgatggcccagcacatgatcagagacatccagaccctgctgagcagaatggagtgcagaggcggcccccagccccagcacagccagccccccccccagccccccgccgtgacccccgagcccgtggccctgagcagccagaccagcgagcccgtggagagcgaggccccccccagagagcccatggaggccgaggaggtggaggagagagcccccgcccagaaccccgagctgacccccggccccgcccccgccggccccacccccgcccccgagaccaacgcccccaaccaccccagccccgccgagtacgtggaggtgctgcaggagctgcagagactggagagcagactgcagcccttcctgcagagatactacgaggtgctgggcgccgccgccaccaccgactacaacaacaaccacgagggcagagaggaggaccagagactgatcaacctggtgggcgagagcctgagactgctgggcaacaccttcgtggccctgagcgacctgagatgcaacctggcctgcaccccccccagacacctgcacgtggtgagacccatgagccactacaccacccccatggtgctgcagcaggccgccatccccatccagatcaacgtgggcaccaccgtgaccatgaccggcaacggcaccagacccccccccacccccaacgccgaggcccccccccccggccccggccaggccagcagcgtggcccccagcagcaccaacgtggagagcagcgccgagggcgcccccccccccggccccgcccccccccccgccaccagccaccccagagtgatcagaatcagccaccagagcgtggagcccgtggtgatgatgcacatgaacatccaggacagcggcacccagcccggcggcgtgcccagcgcccccaccggccccctgggcccccccggccacggccagaccctgggccagcaggtgcccggcttccccaccgcccccaccagagtggtgatcgccagacccacccccccccaggccagacccagccaccccggcggcccccccgtgagcggcaccctgcagggcgccggcctgggcaccaacgccagcctggcccagatggtgagcggcctggtgggccagctgctgatgcagcccgtgctggtggcccagggcacccccggcatggcccccccccccgcccccgccaccgccagcgccagcgccggcaccaccaacaccgccaccaccgccggccccgcccccggcggccccgcccagcccccccccaccccccagcccagcatggccgacctgcagttcagccagctgctgggcaacctgctgggccccgccggccccggcgccggcggcagcggcgtggccagccccaccatcaccgtggccatgcccggcgtgcccgccttcctgcagggcatgaccgacttcctgcaggccacccagaccgccccccccccccccccccccccccccccccccccccccgcccccgagcagcagaccatgcccccccccggcagccccagcggcggcgccggcagccccggcggcctgggcctggagagcctgagccccgagttcttcaccagcgtggtgcagggcgtgctgagcagcctgctgggcagcctgggcgccagagccggcagcagcgagagcatcgccgccttcatccagagactgagcggcagcagcaacatcttcgagcccggcgccgacggcgccctgggcttcttcggcgccctgctgagcctgctgtgccagaacttcagcatggtggacgtggtgatgctgctgcacggccacttccagcccctgcagagactgcagccccagctgagaagcttcttccaccagcactacctgggcggccaggagcccacccccagcaacatcagaatggccacccacaccctgatcaccggcctggaggagtacgtgagagagagcttcagcctggtgcaggtgcagcccggcgtggacatcatcagaaccaacctggagttcctgcaggagcagttcaacagcatcgccgcccacgtgctgcactgcaccgacagcggcttcggcgccagactgctggagctgtgcaaccagggcctgttcgagtgcctggccctgaacctgcactgcctgggcggccagcagatggagctggccgccgtgatcaacggcagaatcagaagaatgagcagaggcgtgaaccccagcctggtgagctggctgaccaccatgatgggcctgagactgcaggtggtgctggagcacatgcccgtgggccccgacgccatcctgagatacgtgagaagagtgggcgaccccccccagcccctgcccgaggagcccatggaggtgcagggcgccgagagagccagccccgagccccagagagagaacgccagccccgcccccggcaccaccgccgaggaggccatgagcagaggccccccccccgcccccgagggcggcagcagagacgagcaggacggcgccagcgccgagaccgagccctgggccgccgccgtgccccccgagtgggtgcccatcatccagcaggacatccagagccagagaaaggtgaagccccagccccccctgagcgacgcctacctgagcggcatgcccgccaagagaagaaagaccatgcagggcgagggcccccagctgctgctgagcgaggccgtgagcagagccgccaaggccgccggcgccagacccctgaccagccccgagagcctgagcagagacctggaggcccccgaggtgcaggagagctacagacagcagctgagaagcgacatccagaagagactgcaggaggaccccaactacagcccccagagattccccaacgcccagagagccttcgccgacgacccctag

SEQ ID NO: 74108 - DNA, 3381 bp, synthetic construct; identical to SEQ ID NO: 74107
  misc_feature 1..3381: note = Description of Artificial Sequence: Synthetic coding sequence
  source 1..3381: mol_type = other DNA

SEQ ID NO: 74109 - DNA, 3381 bp, synthetic construct; identical to SEQ ID NO: 74107
  misc_feature 1..3381: note = Description of Artificial Sequence: Synthetic coding sequence
  source 1..3381: mol_type = other DNA

SEQ ID NO: 74110 - DNA, 3489 bp, synthetic construct
  misc_feature 1..3489: note = Description of Artificial Sequence: Synthetic coding sequence
  source 1..3489: mol_type = other DNA
atggagcccaacgacagcaccagcaccgccgtggaggagcccgacagcctggaggtgctggtgaagaccctggacagccagaccagaaccttcatcgtgggcgcccagatgaacgtgaaggagttcaaggagcacatcgccgccagcgtgagcatccccagcgagaagcagagactgatctaccagggcagagtgctgcaggacgacaagaagctgcaggagtacaacgtgggcggcaaggtgatccacctggtggagagagcccccccccagacccacctgcccagcggcgccagcagcggcaccggcagcgccagcgccacccacggcggcggcagcccccccggcaccagaggccccggcgccagcgtgcacgacagaaacgccaacagctacgtgatggtgggcaccttcaacctgcccagcgacggcagcgccgtggacgtgcacatcaacatggagcaggcccccatccagagcgagcccagagtgagactggtgatggcccagcacatgatcagagacatccagaccctgctgagcagaatggagtgcagaggcggcccccagccccagcacagccagccccccccccagccccccgccgtgacccccgagcccgtggccctgagcagccagaccagcgagcccgtggagagcgaggccccccccagagagcccatggaggccgaggaggtggaggagagagcccccgcccagaaccccgagctgacccccggccccgcccccgccggccccacccccgcccccgagaccaacgcccccaaccaccccagccccgccgagtacgtggaggtgctgcaggagctgcagagactggagagcagactgcagcccttcctgcagagatactacgaggtgctgggcgccgccgccaccaccgactacaacaacaaccacgagggcagagaggaggaccagagactgatcaacctggtgggcgagagcctgagactgctgggcaacaccttcgtggccctgagcgacctgagatgcaacctggcctgcaccccccccagacacctgcacgtggtgagacccatgagccactacaccacccccatggtgctgcagcaggccgccatccccatccagatcaacgtgggcaccaccgtgaccatgaccggcaacggcaccagacccccccccacccccaacgccgaggcccccccccccggccccggccaggccagcagcgtggcccccagcagcaccaacgtggagagcagcgccgagggcgcccccccccccggccccgcccccccccccgccaccagccaccccagagtgatcagaatcagccaccagagcgtggagcccgtggtgatgatgcacatgaacatccaggacagcggcacccagcccggcggcgtgcccagcgcccccaccggccccctgggcccccccggccacggccagaccctgggcagcaccctgatccagctgcccagcctgccccccgagttcatgcacgccgtggcccaccagatcacccaccaggccatggtggccgccgtggccagcgccgccgccggccagcaggtgcccggcttccccaccgcccccaccagagtggtgatcgccagacccacccccccccaggccagacccagccaccccggcggcccccccgtgagcggcaccctgcagggcgccggcctgggcaccaacgccagcctggcccagatggtgagcggcctggtgggccagctgctgatgcagcccgtgctggtggcccagggcacccccggcatggcccccccccccgcccccgccaccgccagcgccagcgccggcaccaccaacaccgccaccaccgccggccccgcccccggcggccccgcccagcccccccccaccccccagcccagcatggccgacctgcagttcagccagctgctgggcaacctgctgggccccgccggccccggcgccggcggcagcggcgtggccagccccaccatcaccgtggccatgcccggcgtgcccgccttcctgcagggcatgaccgacttcctgcaggccacccagaccgccccccccccccccccccccccccccccccccccccccgcccccgagcagcagaccatgcccccccccggcagccccagcggcggcgccggcagccccggcggcctgggcctggagagcctgagccccgagttcttcaccagcgtggtgcagggcgtgctgagcagcctgctgggcagcctgggcgccagagccggcagcagcgagagcatcgccgccttcatccagagactgagcggcagcagcaacatcttcgagcccggcgccgacggcgccctgggcttcttcggcgccctgctgagcctgctgtgccagaacttcagcatggtggacgtggtgatgctgctgcacggccacttccagcccctgcagagactgcagccccagctgagaagcttcttccaccagcactacctgggcggccaggagcccacccccagcaacatcagaatggccacccacaccctgatcaccggcctggaggagtacgtgagagagagcttcagcctggtgcaggtgcagcccggcgtggacatcatcagaaccaacctggagttcctgcaggagcagttcaacagcatcgccgcccacgtgctgcactgcaccgacagcggcttcggcgccagactgctggagctgtgcaaccagggcctgttcgagtgcctggccctgaacctgcactgcctgggcggccagcagatggagctggccgccgtgatcaacggcagaatcagaagaatgagcagaggcgtgaaccccagcctggtgagctggctgaccaccatgatgggcctgagactgcaggtggtgctggagcacatgcccgtgggccccgacgccatcctgagatacgtgagaagagtgggcgaccccccccagcccctgcccgaggagcccatggaggtgcagggcgccgagagagccagccccgagccccagagagagaacgccagccccgcccccggcaccaccgccgaggaggccatgagcagaggccccccccccgcccccgagggcggcagcagagacgagcaggacggcgccagcgccgagaccgagccctgggccgccgccgtgccccccgagtgggtgcccatcatccagcaggacatccagagccagagaaaggtgaagccccagccccccctgagcgacgcctacctgagcggcatgcccgccaagagaagaaagaccatgcagggcgagggcccccagctgctgctgagcgaggccgtgagcagagccgccaaggccgccggcgccagacccctgaccagccccgagagcctgagcagagacctggaggcccccgaggtgcaggagagctacagacagcagctgagaagcgacatccagaagagactgcaggaggaccccaactacagcccccagagattccccaacgcccagagagccttcgccgacgacccctag

SEQ ID NO: 74111 - DNA, 738 bp, synthetic construct
  misc_feature 1..738: note = Description of Artificial Sequence: Synthetic coding sequence
  source 1..738: mol_type = other DNA
ccccccagacacctgcacgtggtgagacccatgagccactacaccacccccatggtgctgcagcaggccgccatccccatccagatcaacgtgggcaccaccgtgaccatgaccggccccgcccccccccccgccaccagccaccccagagtgatcagaatcagccaccagagcgtggagcccgtggtgatgatgcacatgaacatccaggacagcggcacccagcccggcggcgtgcccagcgcccccaccggccccctgggcccccccggccacggccagaccctgggccagcaggtgcccggcttccccaccgcccccaccagagtggtgatcgccagacccacccccccccaggccagacccagccaccccggcggcccccccgtgagcggcaccctgcagggcgccggcctgggcaccaacgccagcctggcccagatggtgagcggcctggtgggccagctgctgatgcagcccgtgctggtggcccagggcacccccggcatggcccccccccccgcccccgccaccgccagcgccagcgccggcaccaccaacaccgccaccaccgccggccccgcccccggcggccccgcccagcccccccccaccccccagcccagcatggccgacctgcagttcagccagctgctgggcaacctgctgggccccgccggccccggcgccggcggcagcggcgtggccagccccaccatcaccgtggccatgccctag

SEQ ID NO: 74112 - DNA, 3381 bp, synthetic construct
  misc_feature 1..3381: note = Description of Artificial Sequence: Synthetic coding sequence
  source 1..3381: mol_type = other DNA
atggagcccaacgacagcaccagcaccgccgtggaggagcccgacagcctggaggtgctggtgaagaccctggacagccagaccagaaccttcatcgtgggcgcccagatgaacgtgaaggagttcaaggagcacatcgccgccagcgtgagcatccccagcgagaagcagagactgatctaccagggcagagtgctgcaggacgacaagaagctgcaggagtacaacgtgggcggcaaggtgatccacctggtggagagagcccccccccagacccacctgcccagcggcgccagcagcggcaccggcagcgccagcgccacccacggcggcggcagcccccccggcaccagaggccccggcgccagcgtgcacgacagaaacgccaacagctacgtgatggtgggcaccttcaacctgcccagcgacggcagcgccgtggacgtgcacatcaacatggagcaggcccccatccagagcgagcccagagtgagactggtgatggcccagcacatgatcagagacatccagaccctgctgagcagaatggagtgcagaggcggcccccagccccagcacagccagccccccccccagccccccgccgtgacccccgagcccgtggccctgagcagccagaccagcgagcccgtggagagcgaggccccccccagagagcccatggaggccgaggaggtggaggagagagcccccgcccagaaccccgagctgacccccggccccgcccccgccggccccacccccgcccccgagaccaacgcccccaaccaccccagccccgccgagtacgtggaggtgctgcaggagctgcagagactggagagcagactgcagcccttcctgcagagatactacgaggtgctgggcgccgccgccaccaccgactacaacaacaaccacgagggcagagaggaggaccagagactgatcaacctggtgggcgagagcctgagactgctgggcaacaccttcgtggccctgagcgacctgagatgcaacctggcctgcaccccccccagacacctgcacgtggtgagacccatgagccactacaccacccccatggtgctgcagcaggccgccatccccatccagatcaacgtgggcaccaccgtgaccatgaccggcaacggcaccagacccccccccacccccaacgccgaggcccccccccccggccccggccaggccagcagcgtggcccccagcagcaccaacgtggagagcagcgccgagggcgcccccccccccggccccgcccccccccccgccaccagccaccccagagtgatcagaatcagccaccagagcgtggagcccgtggtgatgatgcacatgaacatccaggacagcggcacccagcccggcggcgtgcccagcgcccccaccggccccctgggcccccccggccacggccagaccctgggccagcaggtgcccggcttccccaccgcccccaccagagtggtgatcgccagacccacccccccccaggccagacccagccaccccggcggcccccccgtgagcggcaccctgcagggcgccggcctgggcaccaacgccagcctggcccagatggtgagcggcctggtgggccagctgctgatgcagcccgtgctggtggcccagggcacccccggcatggcccccccccccgcccccgccaccgccagcgccagcgccggcaccaccaacaccgccaccaccgccggccccgcccccggcggccccgcccagcccccccccaccccccagcccagcatggccgacctgcagttcagccagctgctgggcaacctgctgggccccgccggccccggcgccggcggccccggcgtggccagccccaccatcaccgtggccatgcccggcgtgcccgccttcctgcagggcatgaccgacttcctgcaggccacccagaccgccccccccccccccccccccccccccccccccccccccgcccccgagcagcagaccatgcccccccccggcagccccagcggcggcgccggcagccccggcggcctgggcctggagagcctgagccccgagttcttcaccagcgtggtgcagggcgtgctgagcagcctgctgggcagcctgggcgccagagccggcagcagcgagagcatcgccgccttcatccagagactgagcggcagcagcaacatcttcgagcccggcgccgacggcgccctgggcttcttcggcgccctgctgagcctgctgtgccagaacttcagcatggtggacgtggtgatgctgctgcacggccacttccagcccctgcagagactgcagccccagctgagaagcttcttccaccagcactacctgggcggccaggagcccacccccagcaacatcagaatggccacccacaccctgatcaccggcctggaggagtacgtgagagagagcttcagcctggtgcaggtgcagcccggcgtggacatcatcagaaccaacctggagttcctgcaggagcagttcaacagcatcgccgcccacgtgctgcactgcaccgacagcggcttcggcgccagactgctggagctgtgcaaccagggcctgttcgagtgcctggccctgaacctgcactgcctgggcggccagcagatggagctggccgccgtgatcaacggcagaatcagaagaatgagcagaggcgtgaaccccagcctggtgagctggctgaccaccatgatgggcctgagactgcaggtggtgctggagcacatgcccgtgggccccgacgccatcctgagatacgtgagaagagtgggcgaccccccccagcccctgcccgaggagcccatggaggtgcagggcgccgagagagccagccccgagccccagagagagaacgccagccccgcccccggcaccaccgccgaggaggccatgagcagaggccccccccccgcccccgagggcggcagcagagacgagcaggacggcgccagcgccgagaccgagccctgggccgccgccgtgccccccgagtgggtgcccatcatccagcaggacatccagagccagagaaaggtgaagccccagccccccctgagcgacgcctacctgagcggcatgcccgccaagagaagaaagaccatgcagggcgagggcccccagctgctgctgagcgaggccgtgagcagagccgccaaggccgccggcgccagacccctgaccagccccgagagcctgagcagagacctggaggcccccgaggtgcaggagagctacagacagcagctgagaagcgacatccagaagagactgcaggaggaccccaactacagcccccagagattccccaacgcccagagagccttcgccgacgacccctag

SEQ ID NO: 74113 - DNA, 789 bp, synthetic construct
  misc_feature 1..789: note = Description of Artificial Sequence: Synthetic coding sequence
  source 1..789: mol_type = other DNA
atggagcccaacgacagcaccagcaccgccgtggaggagcccgacagcctggaggtgctggtgaagaccctggacagccagaccagaaccttcatcgtgggcgcccagatgaacgtgaaggagttcaaggagcacatcgccgccagcgtgagcatccccagcgagaagcagagactgatctaccagggcagagtgctgcaggacgacaagaagctgcaggagtacaacgtgggcggcaaggtgatccacctggtggagagagcccccccccagacccacctgcccagcggcgccagcagcggcaccggcagcgccagcgccacccacggcggcggcagcccccccggcaccagaggccccggcgccagcgtgcacgacagaaacgccaacagctacgtgatggtgggcaccttcaacctgcccagcgacggcagcgccgtggacgtgcacatcaacatggagcaggcccccatccagagcgagcccagagtgagactggtgatggcccagcacatgatcagagacatccagaccctgctgagcagaatggagtgcagaggcggcccccagccccagcacagccagccccccccccagccccccgccgtgacccccgagcccgtggccctgagcagccagaccagcgagcccgtggagagcgaggccccccccagagagcccatggaggccgaggaggtggaggagagagcccccgcccagaaccccgagctgacccccggccccgcccccgccggccccacccccgcccccgagaccaacgccccctag

SEQ ID NO: 74114 - DNA, 717 bp, synthetic construct
  misc_feature 1..717: note = Description of Artificial Sequence: Synthetic coding sequence
  source 1..717: mol_type = other DNA
agcagcgccgagggcgcccccccccccggccccgcccccccccccgccaccagccaccccagagtgatcagaatcagccaccagagcgtggagcccgtggtgatgatgcacatgaacatccagggccccctgagcctgagcccctgccccgacagcggcacccagcccggcggcgtgcccagcgcccccaccggccccctgggcccccccggccacggccagaccctgggccagcaggtgcccggcttccccaccgcccccaccagagtggtgatcgccagacccacccccccccaggccagacccagccaccccggcggcccccccgtgagcggcaccctgcagggcgccggcctgggcaccaacgccagcctggcccagatggtgagcggcctggtgggccagctgctgatgcagcccgtgctggtggcccagggcacccccggcatggcccccccccccgcccccgccaccgccagcgccagcgccggcaccaccaacaccgccaccaccgccggccccgcccccggcggccccgcccagcccccccccaccccccagcccagcatggccgacctgcagttcagccagctgctgggcaacctgctgggccccgccggccccggcgccggcggccccggcgtggccagccccaccatcaccgtggccatgcccggcgtgcccgccttcctgcagggcatgaccgacttcctgtag

SEQ ID NO: 74115 - DNA, 3381 bp, synthetic construct; identical to SEQ ID NO: 74112
  misc_feature 1..3381: note = Description of Artificial Sequence: Synthetic coding sequence
  source 1..3381: mol_type = other DNA

SEQ ID NO: 74116 - DNA, 648 bp, synthetic construct
  misc_feature 1..648: note = Description of Artificial Sequence: Synthetic coding sequence
  source 1..648: mol_type = other DNA
atggagcccaacgacagcaccagcaccgccgtggaggagcccgacagcctggaggtgctggtgaagaccctggacagccagaccagaaccttcatcgtgggcgcccagatgaacgtgaaggagttcaaggagcacatcgccgccagcgtgagcatccccagcgagaagcagagactgatctaccagggcagagtgctgcaggacgacaagaagctgcaggagtacaacgtgggcggcaaggtgatccacctggtggagagagcccccccccagacccacctgcccagcggcgccagcagcggcaccggcagcgccagcgccacccacggcggcggcagcccccccggcaccagaggccccggcgccagcgtgcacgacagaaacgccaacagctacgtgatggtgggcaccttcaacctgcccagcgagcccagagtgagactggtgatggcccagcacatgatcagagacatccagaccctgctgagcagaatggagtgcagaggcggcccccagccccagcacagccagccccccccccagccccccgccgtgacccccgagcccgtggccctgagcagccagaccagcgagcccgtggagagcgaggccccccccagagagcccatggaggccgaggaggtgtag

SEQ ID NO: 74117 - DNA, 789 bp, synthetic construct; identical to SEQ ID NO: 74113
  misc_feature 1..789: note = Description of Artificial Sequence: Synthetic coding sequence
  source 1..789: mol_type = other DNA

SEQ ID NO: 74118 - DNA, 2232 bp, synthetic construct
  misc_feature 1..2232: note = Description of Artificial Sequence: Synthetic coding sequence
  source 1..2232: mol_type = other DNA
atggagcccaacgacagcaccagcaccgccgtggaggagcccgacagcctggaggtgctggtgaagaccctggacagccagaccagaaccttcatcgtgggcgcccagatgaacgtgaaggagttcaaggagcacatcgccgccagcgtgagcatccccagcgagaagcagagactgatctaccagggcagagtgctgcaggacgacaagaagctgcaggagtacaacgtgggcggcaaggtgatccacctggtggagagagcccccccccagacccacctgcccagcggcgccagcagcggcaccggcagcgccagcgccacccacggcggcggcagcccccccggcaccagaggccccggcgccagcgtgcacgacagaaacgccaacagctacgtgatggtgggcaccttcaacctgcccagcgacggcagcgccgtggacgtgcacatcaacatggagcaggcccccatccagagcgagcccagagtgagactggtgatggcccagcacatgatcagagacatccagaccctgctgagcagaatggagtgcagaggcggcccccagccccagcacagccagccccccccccagccccccgccgtgacccccgagcccgtggccctgagcagccagaccagcgagcccgtggagagcgaggccccccccagagagcccatggaggccgaggaggtggaggagagagcccccgcccagaaccccgagctgacccccggccccgcccccgccggccccacccccgcccccgagaccaacgcccccaaccaccccagccccgccgagtacgtggaggtgctgcaggagctgcagagactggagagcagactgcagcccttcctgcagagatactacgaggtgctgggcgccgccgccaccaccgactacaacaacaaccacgagggcagagaggaggaccagagactgatcaacctggtgggcgagagcctgagactgctgggcaacaccttcgtggccctgagcgacctgagatgcaacctggcctgcaccccccccagacacctgcacgtggtgagacccatgagccactacaccacccccatggtgctgcagcaggccgccatccccatccagatcaacgtgggcaccaccgtgaccatgaccggcaacggcaccagacccccccccacccccaacgccgaggcccccccccccggccccggccaggccagcagcgtggcccccagcagcaccaacgtggagagcagcgccgagggcgcccccccccccggccccgcccccccccccgccaccagccaccccagagtgatcagaatcagccaccagagcgtggagcccgtggtgatgatgcacatgaacatccaggacagcggcacccagcccggcggcgtgcccagcgcccccaccggccccctgggcccccccggccacggccagaccctgggcagcaccctgatccagctgcccagcctgccccccgagttcatgcacgccgtggcccaccagatcacccaccaggccatggtggccgccgtggccagcgccgccgccggccagcaggtgcccggcttccccaccgcccccaccagagtggtgatcgccagacccacccccccccaggccagacccagccaccccggcggcccccccgtgagcggcaccctgcagggcgccggcctgggcaccaacgccagcctggcccagatggtgagcggcctggtgggccagctgctgatgcagcccgtgctggtggcccagggcacccccggcatggcccccccccccgcccccgccaccgccagcgccagcgccggcaccaccaacaccgccaccaccgccggccccgcccccggcggccccgcccagcccccccccaccccccagcccagcatggccgacctgcagttcagccagctgctgggcaacctgctgggccccgccggccccggcgccggcggccccggcgtggccagccccaccatcaccgtggccatgcccggcgtgcccgccttcctgcagggcatgaccgacttcctgcaggccacccagaccgccccccccccccccccccccccccccccccccccccccgcccccgagcagcagaccatgcccccccccggcagccccagcggcggcgccggcagccccggcggcctgggcctggagagcctgagccccgagttcttcaccagcgtggtgcagggcgtgctgagcagcctgctgtag

SEQ ID NO: 74119 - DNA, 3381 bp, synthetic construct; identical to SEQ ID NO: 74112
  misc_feature 1..3381: note = Description of Artificial Sequence: Synthetic coding sequence
  source 1..3381: mol_type = other DNA

SEQ ID NO: 74120 - DNA, 3381 bp, synthetic construct; identical to SEQ ID NO: 74112
  misc_feature 1..3381: note = Description of Artificial Sequence: Synthetic coding sequence
  source 1..3381: mol_type = other DNA

SEQ ID NO: 74121 - DNA, 411 bp, synthetic construct
  misc_feature 1..411: note = Description of Artificial Sequence: Synthetic coding sequence
  source 1..411: mol_type = other DNA
tgaagaatgagcagaggcgtgaaccccagcctggtgagctggctgaccaccatgatgggcctgagactgcaggtggtgctggagcacatgcccgtgggccccgacgccatcctgagatacgtgagaagagtgggcgaccccccccagcccctgcccgaggagcccatggaggtgcagggcgccgagagagccagccccgagccccaggagtgggtgcccatcatccagcaggacatccagagccagagaaaggtgaagccccagccccccctgagcgacgcctacctgagcggcatgcccgccaagagaagaaagctgagaagcgacatccagaagagactgcaggaggaccccaactacagcccccagagattccccaacgcccagagagccttcgccgacgacccctag

SEQ ID NO: 74122 - DNA, 789 bp, synthetic construct; identical to SEQ ID NO: 74113
  misc_feature 1..789: note = Description of Artificial Sequence: Synthetic coding sequence
  source 1..789: mol_type = other DNA

SEQ ID NO: 74123 - DNA, 735 bp, synthetic construct
  misc_feature 1..735: note = Description of Artificial Sequence: Synthetic coding sequence
  source 1..735: mol_type = other DNA
atggagcccaacgacagcaccagcaccgccgtggaggagcccgacagcctggaggtgctggtgaagaccctggacagccagaccagaaccttcatcgtgggcgcccagatgaacgtgaaggagttcaaggagcacatcgccgccagcgtgagcatccccagcgagaagcagagactgatctaccagggcagagtgctgcaggacgacaagaagctgcaggagtacaacgtgggcggcaaggtgatccacctggtggagagagcccccccccagacccacctgcccagcggcgccagcagcggcaccggcagcgccagcgccacccacggcggcggcagcccccccggcaccagaggccccggcgccagcgtgcacgacagaaacgccaacagctacgtgatggtgggcaccttcaacctgcccagcgagcccagagtgagactggtgatggcccagcacatgatcagagacatccagaccctgctgagcagaatggagtgcagaggcggcccccagccccagcacagccagccccccccccagccccccgccgtgacccccgagcccgtggccctgagcagccagaccagcgagcccgtggagagcgaggccccccccagagagcccatggaggccgaggaggtggaggagagagcccccgcccagaaccccgagctgacccccggccccgcccccgccggccccacccccgcccccgagaccaacgccccctag

SEQ ID NO: 74124 - DNA, 594 bp, synthetic construct
  misc_feature 1..594: note = Description of Artificial Sequence: Synthetic coding sequence
  source 1..594: mol_type = other DNA
atggagcccaacgacagcaccagcaccgccgtggaggagcccgacagcctggaggtgctggtgaagaccctggacagccagaccagaaccttcatcgtgggcgcccagatgaacgtgaaggagttcaaggagcacatcgccgccagcgtgagcatccccagcgagaagcagagactgatctaccagggcagagtgctgcaggacgacaagaagctgcaggagtacaacgtgggcggcaaggtgatccacctggtggagagagcccccccccagacccacctgcccagcggcgccagcagcggcaccggcagcgccagcgccacccacggcggcggcagcccccccggcaccagaggccccggcgccagcgtgcacgacagaaacgccaacagctacgtgatggtgggcaccttcaacctgcccagcgacggcagcgccgtggacgtgcacatcaacatggagcaggcccccatccagagcgagcccagagtgagactggtgatggcccagcacatgatcagagacatccagaccctgctgagcagaatggagtgcagaggcggcccccagccccagcacagccagcccccctag

SEQ ID NO: 74125 - DNA, 621 bp, synthetic construct
  misc_feature 1..621: note = Description of Artificial Sequence: Synthetic coding sequence
  source 1..621: mol_type = other DNA
atggagcccaacgacagcaccagcaccgccgtggaggagcccgacagcctggaggtgctggtgaagaccctggacagccagaccagaaccttcatcgtgggcgcccagatgaacgtgaaggagttcaaggagcacatcgccgccagcgtgagcatccccagcgagaagcagagactgatctaccagggcagagtgctgcaggacgacaagaagctgcaggagtacaacgtgggcggcaaggtgatccacctggtggagagagcccccccccagacccacctgcccagcggcgccagcagcggcaccggcagcgccagcgccacccacggcggcggcagcccccccggcaccagaggccccggcgccagcgtgcacgacagaaacgccaacagctacgtgatggtgggcaccttcaacctgcccagcgagcccagagtgagactggtgatggcccagcacatgatcagagacatccagaccctgctgagcagaatggagtgcagaggcggcccccagccccagcacagccagccccccccccagccccccgccgtgacccccgagcccgtggccctgagcagccagaccagcgagcccgtggagagcgaggcccccccctag

SEQ ID NO: 74126 - DNA, 735 bp, synthetic construct; identical to SEQ ID NO: 74123
  misc_feature 1..735: note = Description of Artificial Sequence: Synthetic coding sequence
  source 1..735: mol_type = other DNA

SEQ ID NO: 74127 - DNA, 3381 bp, synthetic construct; identical to SEQ ID NO: 74107
  misc_feature 1..3381: note = Description of Artificial Sequence: Synthetic coding sequence
  source 1..3381: mol_type = other DNA

SEQ ID NO: 74128 - DNA, 735 bp, synthetic construct; identical to SEQ ID NO: 74123
  misc_feature 1..735: note = Description of Artificial Sequence: Synthetic coding sequence
  source 1..735: mol_type = other DNA

SEQ ID NO: 74129 - DNA, 717 bp, synthetic construct
  misc_feature 1..717: note = Description of Artificial Sequence: Synthetic coding sequence
  source 1..717: mol_type = other DNA
agcagcgccgagggcgcccccccccccggccccgcccccccccccgccaccagccaccccagagtgatcagaatcagccaccagagcgtggagcccgtggtgatgatgcacatgaacatccagggccccctgagcctgagcccctgccccgacagcggcacccagcccggcggcgtgcccagcgcccccaccggccccctgggcccccccggccacggccagaccctgggccagcaggtgcccggcttccccaccgcccccaccagagtggtgatcgccagacccacccccccccaggccagacccagccaccccggcggcccccccgtgagcggcaccctgcagggcgccggcctgggcaccaacgccagcctggcccagatggtgagcggcctggtgggccagctgctgatgcagcccgtgctggtggcccagggcacccccggcatggcccccccccccgcccccgccaccgccagcgccagcgccggcaccaccaacaccgccaccaccgccggccccgcccccggcggccccgcccagcccccccccaccccccagcccagcatggccgacctgcagttcagccagctgctgggcaacctgctgggccccgccggccccggcgccggcggcagcggcgtggccagccccaccatcaccgtggccatgcccggcgtgcccgccttcctgcagggcatgaccgacttcctgtag

SEQ ID NO: 74130 - DNA, 735 bp, synthetic construct; identical to SEQ ID NO: 74123
  misc_feature 1..735: note = Description of Artificial Sequence: Synthetic coding sequence
  source 1..735: mol_type = other DNA

SEQ ID NO: 74131 - DNA, 2232 bp, synthetic construct
  misc_feature 1..2232: note = Description of Artificial Sequence: Synthetic coding sequence
  source 1..2232: mol_type = other DNA
atggagcccaacgacagcaccagcaccgccgtggaggagcccgacagcctggaggtgctggtgaagaccctggacagccagaccagaaccttcatcgtgggcgcccagatgaacgtgaaggagttcaaggagcacatcgccgccagcgtgagcatccccagcgagaagcagagactgatctaccagggcagagtgctgcaggacgacaagaagctgcaggagtacaacgtgggcggcaaggtgatccacctggtggagagagcccccccccagacccacctgcccagcggcgccagcagcggcaccggcagcgccagcgccacccacggcggcggcagcccccccggcaccagaggccccggcgccagcgtgcacgacagaaacgccaacagctacgtgatggtgggcaccttcaacctgcccagcgacggcagcgccgtggacgtgcacatcaacatggagcaggcccccatccagagcgagcccagagtgagactggtgatggcccagcacatgatcagagacatccagaccctgctgagcagaatggagtgcagaggcggcccccagccccagcacagccagccccccccccagccccccgccgtgacccccgagcccgtggccctgagcagccagaccagcgagcccgtggagagcgaggccccccccagagagcccatggaggccgaggaggtggaggagagagcccccgcccagaaccccgagctgacccccggccccgcccccgccggccccacccccgcccccgagaccaacgcccccaaccaccccagccccgccgagtacgtggaggtgctgcaggagctgcagagactggagagcagactgcagcccttcctgcagagatactacgaggtgctgggcgccgccgccaccaccgactacaacaacaaccacgagggcagagaggaggaccagagactgatcaacctggtgggcgagagcctgagactgctgggcaacaccttcgtggccctgagcgacctgagatgcaacctggcctgcaccccccccagacacctgcacgtggtgagacccatgagccactacaccacccccatggtgctgcagcaggccgccatccccatccagatcaacgtgggcaccaccgtgaccatgaccggcaacggcaccagacccccccccacccccaacgccgaggcccccccccccggccccggccaggccagcagcgtggcccccagcagcaccaacgtggagagcagcgccgagggcgcccccccccccggccccgcccccccccccgccaccagccaccccagagtgatcagaatcagccaccagagcgtggagcccgtggtgatgatgcacatgaacatccaggacagcggcacccagcccggcggcgtgcccagcgcccccaccggccccctgggcccccccggccacggccagaccctgggcagcaccctgatccagctgcccagcctgccccccgagttcatgcacgccgtggcccaccagatcacccaccaggccatggtggccgccgtggccagcgccgccgccggccagcaggtgcccggcttccccaccgcccccaccagagtggtgatcgccagacccacccccccccaggccagacccagccaccccggcggcccccccgtgagcggcaccctgcagggcgccggcctgggcaccaacgccagcctggcccagatggtgagcggcctggtgggccagctgctgatgcagcccgtgctggtggcccagggcacccccggcatggcccccccccccgcccccgccaccgccagcgccagcgccggcaccaccaacaccgccaccaccgccggccccgcccccggcggccccgcccagcccccccccaccccccagcccagcatggccgacctgcagttcagccagctgctgggcaacctgctgggccccgccggccccggcgccggcggcagcggcgtggccagccccaccatcaccgtggccatgcccggcgtgcccgccttcctgcagggcatgaccgacttcctgcaggccacccagaccgccccccccccccccccccccccccccccccccccccccgcccccgagcagcagaccatgcccccccccggcagccccagcggcggcgccggcagccccggcggcctgggcctggagagcctgagccccgagttcttcaccagcgtggtgcagggcgtgctgagcagcctgctgtag

SEQ ID NO: 74132 - DNA, 477 bp, synthetic construct
  misc_feature 1..477: note = Description of Artificial Sequence: Synthetic coding sequence
  source 1..477: mol_type = other DNA
atggagcccaacgacagcaccagcaccgccgtggaggagcccgacagcctggaggtgctggtgaagaccctggacagccagaccagaaccttcatcgtgggcgcccagatgaacgtgaaggagttcaaggagcacatcgccgccagcgtgagcatccccagcgagaagcagagactgatctaccagggcagagtgctgcaggacgacaagaagctgcaggagtacaacgtgggcggcaaggtgatccacctggtggagagagcccccccccagacccacctgcccagcggcgccagcagcggcaccggcagcgccagcgccacccacggcggcggcagcccccccggcaccagaggccccggcgccagcgtgcacgacagaaacgccaacagctacgtgatggtgggcaccttcaacctgcccagcgacggcagcgccgtggacgtgcacatcaacatggagcaggcccccatctag

SEQ ID NO: 74133 - DNA, 681 bp, synthetic construct
  misc_feature 1..681: note = Description of Artificial Sequence: Synthetic coding sequence
  source 1..681: mol_type = other DNA
tgaagcggcttcggcgccagactgctggagctgtgcaaccagggcctgttcgagtgcctggccctgaacctgcactgcctgggcggccagcagatggagctggccgccgtgatcaacggcagaatcagaagaatgagcagaggcgtgaaccccagcctggtgagctggctgaccaccatgatgggcctgagactgcaggtggtgctggagcacatgcccgtgggccccgacgccatcctgagatacgtgagaagagtgggcgaccccccccagcccctgcccgaggagcccatggaggtgcagggcgccgagagagccagccccgagccccagagagagaacgccagccccgcccccggcaccaccgccgaggaggccatgagcagaggccccccccccgcccccgagggcggcagcagagacgagcaggacggcgccagcgccgagaccgagccctgggccgccgccgtgccccccgagtgggtgcccatcatccagcaggacatccagagccagagaaaggtgaagccccagccccccctgagcgacgcctacctgagcggcatgcccgccaagagaagaaagctgagaagcgacatccagaagagactgcaggaggaccccaactacagcccccagagattccccaacgcccagagagccttcgccgacgacccctag

SEQ ID NO: 74134 - DNA, 717 bp, synthetic construct; identical to SEQ ID NO: 74114
  misc_feature 1..717: note = Description of Artificial Sequence: Synthetic coding sequence
  source 1..717: mol_type = other DNA

SEQ ID NO: 74135 - DNA, 3381 bp, synthetic construct; identical to SEQ ID NO: 74107
  misc_feature 1..3381: note = Description of Artificial Sequence: Synthetic coding sequence
  source 1..3381: mol_type = other DNA

SEQ ID NO: 74136 - DNA, 789 bp, synthetic construct; identical to SEQ ID NO: 74113
  misc_feature 1..789: note = Description of Artificial Sequence: Synthetic coding sequence
  source 1..789: mol_type = other DNA

SEQ ID NO: 74137 - DNA, 477 bp, synthetic construct; identical to SEQ ID NO: 74132
  misc_feature 1..477: note = Description of Artificial Sequence: Synthetic coding sequence
  source 1..477: mol_type = other DNA

SEQ ID NO: 74138 - DNA, 777 bp, synthetic construct
  misc_feature 1..777: note = Description of Artificial Sequence: Synthetic coding sequence
  source 1..777: mol_type = other DNA
atggagcccaacgacagcaccagcaccgccgtggaggagcccgacagcctggaggtgctggtgaagaccctggacagccagaccagaaccttcatcgtgggcgcccagatgaacgtgaaggagttcaaggagcacatcgccgccagcgtgagcatccccagcgagaagcagagactgatctaccagggcagagtgctgcaggacgacaagaagctgcaggagtacaacgtgggcggcaaggtgatccacctggtggagagagcccccccccagacccacctgcccagcggcgccagcagcggcaccggcagcgccagcgccacccacggcggcggcagcccccccggcaccagaggccccggcgccagcgtgcacgacagaaacgccaacagctacgtgatggtgggcaccttcaacctgcccagcgacggcagcgccgtggacgtgcacatcaacatggagcaggcccccatccagagcgagcccagagtgagactggtgatggcccagcacatgatcagagacatccagaccctgctgagcagaatggagtgcagaggcggcccccagccccagcacagccagccccccccccagccccccgccgtgacccccgagcccgtggccctgagcagccagaccagcgagcccgtggagagcgaggccccccccagagagcccatggaggccgaggaggtggaggagagagcccccgcccagaaccccgagctgacccccggccccgcccccgccggccccacccccgcccccgagtag

SEQ ID NO: 74139 - DNA, 735 bp, synthetic construct; identical to SEQ ID NO: 74123
  misc_feature 1..735: note = Description of Artificial Sequence: Synthetic coding sequence
  source 1..735: mol_type = other DNA

SEQ ID NO: 74140 - DNA, 1548 bp, synthetic construct
  misc_feature 1..1548: note = Description of Artificial Sequence: Synthetic coding sequence
  source 1..1548: mol_type = other DNA
atggagcccaacgacagcaccagcaccgccgtggaggagcccgacagcctggaggtgctggtgaagaccctggacagccagaccagaaccttcatcgtgggcgcccagatgaacgtgaaggagttcaaggagcacatcgccgccagcgtgagcatccccagcgagaagcagagactgatctaccagggcagagtgctgcaggacgacaagaagctgcaggagtacaacgtgggcggcaaggtgatccacctggtggagagagcccccccccagacccacctgcccagcggcgccagcagcggcaccggcagcgccagcgccacccacggcggcggcagcccccccggcaccagaggccccggcgccagcgtgcacgacagaaacgccaacagctacgtgatggtgggcaccttcaacctgcccagcgacggcagcgccgtggacgtgcacatcaacatggagcaggcccccatccagagcgagcccagagtgagactggtgatggcccagcacatgatcagagacatccagaccctgctgagcagaatggagtgcagaggcggcccccagccccagcacagccagccccccccccagccccccgccgtgacccccgagcccgtggccctgagcagccagaccagcgagcccgtggagagcgaggccccccccagagagcccatggaggccgaggaggtggaggagagagcccccgcccagaaccccgagctgacccccggccccgcccccgccggccccacccccgcccccgagaccaacgcccccaaccaccccagccccgccgagtacgtggaggtgctgcaggagctgcagagactggagagcagactgcagcccttcctgcagagatactacgaggtgctgggcgccgccgccaccaccgactacaacaacaaccacgagggcagagaggaggaccagagactgatcaacctggtgggcgagagcctgagactgctgggcaacaccttcgtggccctgagcgacctgagatgcaacctggcctgcaccccccccagacacctgcacgtggtgagacccatgagccactacaccacccccatggtgctgcagcaggccgccatccccatccagatcaacgtgggcaccaccgtgaccatgaccggcaacggcaccagacccccccccacccccaacgccgaggcccccccccccggccccggccaggccagcagcgtggcccccagcagcaccaacgtggagagcagcgccgagggcgcccccccccccggccccgcccccccccccgccaccagccaccccagagtgatcagaatcagccaccagagcgtggagcccgtggtgatgatgcacatgaacatccaggacagcggcacccagcccggcggcgtgcccagcgcccccaccggccccctgggcccccccggccacggccagaccctgggcagcaccctgatccagctgcccagcctgccccccgagttcatgcacgccgtggcccaccagatcacccaccaggccatggtggccgccgtggccagctag

SEQ ID NO: 74141 - DNA, 702 bp, synthetic construct
  misc_feature 1..702: note = Description of Artificial Sequence: Synthetic coding sequence
  source 1..702: mol_type = other DNA
atggagcccaacgacagcaccagcaccgccgtggaggagcccgacagcctggaggtgctggtgaagaccctggacagccagaccagaaccttcatcgtgggcgcccagatgaacgtgaaggagttcaaggagcacatcgccgccagcgtgagcatccccagcgagaagcagagactgatctaccagggcagagtgctgcaggacgacaagaagctgcaggagtacaacgtgggcggcaaggtgatccacctggtggagagagcccccccccagacccacctgcccagcggcgccagcagcggcaccggcagcgccagcgccacccacggcggcggcagcccccccggcaccagaggccccggcgccagcgtgcacgacagaaacgccaacagctacgtgatggtgggcaccttcaacctgcccagcgacggcagcgccgtggacgtgcacatcaacatggagcaggcccccatccagagcgagcccagagtgagactggtgatggcccagcacatgatcagagacatccagaccctgctgagcagaatggagaccctgccctacctgcagtgcagaggcggcccccagccccagcacagccagccccccccccagccccccgccgtgacccccgagcccgtggccctgagcagccagaccagcgagcccgtggagagcgaggccccccccagagagccctag

SEQ ID NO: 74142 - DNA, 3381 bp, synthetic construct; identical to SEQ ID NO: 74112
  misc_feature 1..3381: note = Description of Artificial Sequence: Synthetic coding sequence
  source 1..3381: mol_type = other DNA

SEQ ID NO: 74143 - DNA, 789 bp, synthetic construct; identical to SEQ ID NO: 74113
  misc_feature 1..789: note = Description of Artificial Sequence: Synthetic coding sequence
  source 1..789: mol_type = other DNA

SEQ ID NO: 74144 - DNA, 411 bp, synthetic construct; identical to SEQ ID NO: 74121
  misc_feature 1..411: note = Description of Artificial Sequence: Synthetic coding sequence
  source 1..411: mol_type = other DNA

SEQ ID NO: 74145 - DNA, 558 bp, synthetic construct
  misc_feature 1..558: note = Description of Artificial Sequence: Synthetic coding sequence
  source 1..558: mol_type = other DNA
tgactggcctgcaccccccccagacacctgcacgtggtgagacccatgagccactacaccacccccatggtgctgcagcaggccgccatccccatccagatcaacgtgggcaccaccgtgaccatgaccggcaacggcaccagacccccccccacccccaacgccgaggcccccccccccggccccggccaggccagcagcgtggcccccagcagcaccaacgtggagagcagcgccgagggcgcccccccccccggccccgcccccccccccgccaccagccaccccagagtgatcagaatcagccaccagagcgtggagcccgtggtgatgatgcacatgaacatccagggccagcaggtgcccggcttccccaccgcccccaccagagtggtgatcgccagacccacccccccccaggccagacccagccaccccggcggcccccccgtgagcggcaccctgcagggcgccggcctgggcaccaacgccagcctggcccagatggtgagcggcctggtgggccagctgctgatgcagcccgtgctggtggcctag

SEQ ID NO: 74146 - DNA, 681 bp, synthetic construct; identical to SEQ ID NO: 74133
  misc_feature 1..681: note = Description of Artificial Sequence: Synthetic coding sequence
  source 1..681: mol_type = other DNA

SEQ ID NO: 74147 - DNA, 594 bp, synthetic construct; identical to SEQ ID NO: 74124
  misc_feature 1..594: note = Description of Artificial Sequence: Synthetic coding sequence
  source 1..594: mol_type = other DNA

SEQ ID NO: 74148 - DNA, 648 bp, synthetic construct; identical to SEQ ID NO: 74116
  misc_feature 1..648: note = Description of Artificial Sequence: Synthetic coding sequence
  source 1..648: mol_type = other DNA

SEQ ID NO: 74149 - DNA, 702 bp, synthetic construct; identical to SEQ ID NO: 74141
  misc_feature 1..702: note = Description of Artificial Sequence: Synthetic coding sequence
  source 1..702: mol_type = other DNA

SEQ ID NO: 74150 - DNA, 777 bp, synthetic construct; identical to SEQ ID NO: 74138
  misc_feature 1..777: note = Description of Artificial Sequence: Synthetic coding sequence
  source 1..777: mol_type = other DNA

SEQ ID NO: 74151 - DNA, 411 bp, synthetic construct; identical to SEQ ID NO: 74121
  misc_feature 1..411: note = Description of Artificial Sequence: Synthetic coding sequence
  source 1..411: mol_type = other DNA

SEQ ID NO: 74152 - DNA, 780 bp, synthetic construct
  misc_feature 1..780: note = Description of Artificial Sequence: Synthetic coding sequence
  source 1..780: mol_type = other DNA
atggagcccaacgacagcaccagcaccgccgtggaggagcccgacagcctggaggtgctggtgaagaccctggacagccagaccagaaccttcatcgtgggcgcccagatgaacgtgaaggagttcaaggagcacatcgccgccagcgtgagcatccccagcgagaagcagagactgatctaccagggcagagtgctgcaggacgacaagaagctgcaggagtacaacgtgggcggcaaggtgatccacctggtggagagagcccccccccagacccacctgcccagcggcgccagcagcggcaccggcagcgccagcgccacccacggcggcggcagcccccccggcaccagaggccccggcgccagcgtgcacgacagaaacgccaacagctacgtgatggtgggcaccttcaacctgcccagcgacggcagcgccgtggacgtgcacatcaacatggagcaggcccccatccagagcgagcccagagtgagactggtgatggcccagcacatgatcagagacatccagaccctgctgagcagaatggagtgcagaggcggcccccagccccagcacagccagccccccccccagccccccgccgtgacccccgagcccgtggccctgagcagccagaccagcgagcccgtggagagcgaggccccccccagagagcccatggaggccgaggaggtggaggagagagcccccgcccagaaccccgagctgacccccggccccgcccccgccggccccacccccgcccccgagacctag

SEQ ID NO: 74153 - DNA, 2232 bp, synthetic construct; identical to SEQ ID NO: 74131
  misc_feature 1..2232: note = Description of Artificial Sequence: Synthetic coding sequence
  source 1..2232: mol_type = other DNA

SEQ ID NO: 74154 - DNA, 3399 bp, synthetic construct
  misc_feature 1..3399: note = Description of Artificial Sequence: Synthetic coding sequence
  source 1..3399: mol_type = other DNA
atggagcccaacgacagcaccagcaccgccgtggaggagcccgacagcctggaggtgctggtgaagaccctggacagccagaccagaaccttcatcgtgggcgcccagatgaacgtgaaggagttcaaggagcacatcgccgccagcgtgagcatccccagcgagaagcagagactgatctaccagggcagagtgctgcaggacgacaagaagctgcaggagtacaacgtgggcggcaaggtgatccacctggtggagagagcccccccccagacccacctgcccagcggcgccagcagcggcaccggcagcgccagcgccacccacggcggcggcagcccccccggcaccagaggccccggcgccagcgtgcacgacagaaacgccaacagctacgtgatggtgggcaccttcaacctgcccagcgacggcagcgccgtggacgtgcacatcaacatggagcaggcccccatccagagcgagcccagagtgagactggtgatggcccagcacatgatcagagacatccagaccctgctgagcagaatggagaccctgccctacctgcagtgcagaggcggcccccagccccagcacagccagccccccccccagccccccgccgtgacccccgagcccgtggccctgagcagccagaccagcgagcccgtggagagcgaggccccccccagagagcccatggaggccgaggaggtggaggagagagcccccgcccagaaccccgagctgacccccggccccgcccccgccggccccacccccgcccccgagaccaacgcccccaaccaccccagccccgccgagtacgtggaggtgctgcaggagctgcagagactggagagcagactgcagcccttcctgcagagatactacgaggtgctgggcgccgccgccaccaccgactacaacaacaaccacgagggcagagaggaggaccagagactgatcaacctggtgggcgagagcctgagactgctgggcaacaccttcgtggccctgagcgacctgagatgcaacctggcctgcaccccccccagacacctgcacgtggtgagacccatgagccactacaccacccccatggtgctgcagcaggccgccatccccatccagatcaacgtgggcaccaccgtgaccatgaccggcaacggcaccagacccccccccacccccaacgccgaggcccccccccccggccccggccaggccagcagcgtggcccccagcagcaccaacgtggagagcagcgccgagggcgcccccccccccggccccgcccccccccccgccaccagccaccccagagtgatcagaatcagccaccagagcgtggagcccgtggtgatgatgcacatgaacatccaggacagcggcacccagcccggcggcgtgcccagcgcccccaccggccccctgggcccccccggccacggccagaccctgggccagcaggtgcccggcttccccaccgcccccaccagagtggtgatcgccagacccacccccccccaggccagacccagccaccccggcggcccccccgtgagcggcaccctgcagggcgccggcctgggcaccaacgccagcctggcccagatggtgagcggcctggtgggccagctgctgatgcagcccgtgctggtggcccagggcacccccggcatggcccccccccccgcccccgccaccgccagcgccagcgccggcaccaccaacaccgccaccaccgccggccccgcccccggcggccccgcccagcccccccccaccccccagcccagcatggccgacctgcagttcagccagctgctgggcaacctgctgggccccgccggccccggcgccggcggccccggcgtggccagccccaccatcaccgtggccatgcccggcgtgcccgccttcctgcagggcatgaccgacttcctgcaggccacccagaccgccccccccccccccccccccccccccccccccccccccgcccccgagcagcagaccatgcccccccccggcagccccagcggcggcgccggcagccccggcggcctgggcctggagagcctgagccccgagttcttcaccagcgtggtgcagggcgtgctgagcagcctgctgggcagcctgggcgccagagccggcagcagcgagagcatcgccgccttcatccagagactgagcggcagcagcaacatcttcgagcccggcgccgacggcgccctgggcttcttcggcgccctgctgagcctgctgtgccagaacttcagcatggtggacgtggtgatgctgctgcacggccacttccagcccctgcagagactgcagccccagctgagaagcttcttccaccagcactacctgggcggccaggagcccacccccagcaacatcagaatggccacccacaccctgatcaccggcctggaggagtacgtgagagagagcttcagcctggtgcaggtgcagcccggcgtggacatcatcagaaccaacctggagttcctgcaggagcagttcaacagcatcgccgcccacgtgctgcactgcaccgacagcggcttcggcgccagactgctggagctgtgcaaccagggcctgttcgagtgcctggccctgaacctgcactgcctgggcggccagcagatggagctggccgccgtgatcaacggcagaatcagaagaatgagcagaggcgtgaaccccagcctggtgagctggctgaccaccatgatgggcctgagactgcaggtggtgctggagcacatgcccgtgggccccgacgccatcctgagatacgtgagaagagtgggcgaccccccccagcccctgcccgaggagcccatggaggtgcagggcgccgagagagccagccccgagccccagagagagaacgccagccccgcccccggcaccaccgccgaggaggccatgagcagaggccccccccccgcccccgagggcggcagcagagacgagcaggacggcgccagcgccgagaccgagccctgggccgccgccgtgccccccgagtgggtgcccatcatccagcaggacatccagagccagagaaaggtgaagccccagccccccctgagcgacgcctacctgagcggcatgcccgccaagagaagaaagaccatgcagggcgagggcccccagctgctgctgagcgaggccgtgagcagagccgccaaggccgccggcgccagacccctgaccagccccgagagcctgagcagagacctggaggcccccgaggtgcaggagagctacagacagcagctgagaagcgacatccagaagagactgcaggaggaccccaactacagcccccagagattccccaacgcccagagagccttcgccgacgacccctag

SEQ ID NO: 74155 - DNA, 594 bp, synthetic construct; identical to SEQ ID NO: 74124
  misc_feature 1..594: note = Description of Artificial Sequence: Synthetic coding sequence
  source 1..594: mol_type = other DNA

SEQ ID NO: 74156 - DNA, 735 bp, synthetic construct; identical to SEQ ID NO: 74123
  misc_feature 1..735: note = Description of Artificial Sequence: Synthetic coding sequence
  source 1..735: mol_type = other DNA

SEQ ID NO: 74157 - DNA, 594 bp, synthetic construct; identical to SEQ ID NO: 74124
  misc_feature 1..594: note = Description of Artificial Sequence: Synthetic coding sequence
  source 1..594: mol_type = other DNA

SEQ ID NO: 74158 - DNA, 1548 bp, synthetic construct; identical to SEQ ID NO: 74140
  misc_feature 1..1548: note = Description of Artificial Sequence: Synthetic coding sequence
  source 1..1548: mol_type = other DNA

SEQ ID NO: 74159 - DNA, 735 bp, synthetic construct; identical to SEQ ID NO: 74123
  misc_feature 1..735: note = Description of Artificial Sequence: Synthetic coding sequence
  source 1..735: mol_type = other DNA

SEQ ID NO: 74160 - DNA, 789 bp, synthetic construct; identical to SEQ ID NO: 74113
  misc_feature 1..789: note = Description of Artificial Sequence: Synthetic coding sequence
  source 1..789: mol_type = other DNA

SEQ ID NO: 74161 - DNA, 789 bp, synthetic construct; identical to SEQ ID NO: 74113
  misc_feature 1..789: note = Description of Artificial Sequence: Synthetic coding sequence
  source 1..789: mol_type = other DNA

SEQ ID NO: 74162 - DNA, 717 bp, synthetic construct; identical to SEQ ID NO: 74129
  misc_feature 1..717: note = Description of Artificial Sequence: Synthetic coding sequence
  source 1..717: mol_type = other DNA

SEQ ID NO: 74163 - DNA, 735 bp, synthetic construct; identical to SEQ ID NO: 74123
  misc_feature 1..735: note = Description of Artificial Sequence: Synthetic coding sequence
  source 1..735: mol_type = other DNA

SEQ ID NO: 74164 - DNA, 621 bp, synthetic construct; identical to SEQ ID NO: 74125
  misc_feature 1..621: note = Description of Artificial Sequence: Synthetic coding sequence
  source 1..621: mol_type = other DNA

SEQ ID NO: 74165 - DNA, 735 bp, synthetic construct; identical to SEQ ID NO: 74123
  misc_feature 1..735: note = Description of Artificial Sequence: Synthetic coding sequence
  source 1..735: mol_type = other DNA

SEQ ID NO: 74166 - DNA, 780 bp, synthetic construct; identical to SEQ ID NO: 74152
  misc_feature 1..780: note = Description of Artificial Sequence: Synthetic coding sequence
  source 1..780: mol_type = other DNA

SEQ ID NO: 74167 - DNA, 558 bp, synthetic construct; identical to SEQ ID NO: 74145
  misc_feature 1..558: note = Description of Artificial Sequence: Synthetic coding sequence
  source 1..558: mol_type = other DNA

SEQ ID NO: 74168 - DNA, 621 bp, synthetic construct; identical to SEQ ID NO: 74125
  misc_feature 1..621: note = Description of Artificial Sequence: Synthetic coding sequence
  source 1..621: mol_type = other DNA

SEQ ID NO: 74169 - DNA, 735 bp, synthetic construct; identical to SEQ ID NO: 74123
  misc_feature 1..735: note = Description of Artificial Sequence: Synthetic coding sequence
  source 1..735: mol_type = other DNA

SEQ ID NO: 74170 - DNA, 1548 bp, synthetic construct; identical to SEQ ID NO: 74140
  misc_feature 1..1548: note = Description of Artificial Sequence: Synthetic coding sequence
  source 1..1548: mol_type = other DNA

SEQ ID NO: 74171 - DNA, 717 bp, synthetic construct; identical to SEQ ID NO: 74114
  misc_feature 1..717: note = Description of Artificial Sequence: Synthetic coding sequence
  source 1..717: mol_type = other DNA

SEQ ID NO: 74172 - DNA, 648 bp, synthetic construct; identical to SEQ ID NO: 74116
  misc_feature 1..648: note = Description of Artificial Sequence: Synthetic coding sequence
  source 1..648: mol_type = other DNA

SEQ ID NO: 74173 - DNA, 477 bp, synthetic construct; identical to SEQ ID NO: 74132
  misc_feature 1..477: note = Description of Artificial Sequence: Synthetic coding sequence
  source 1..477: mol_type = other DNA

SEQ ID NO: 74174 - DNA, 702 bp, synthetic construct; identical to SEQ ID NO: 74141
  misc_feature 1..702: note = Description of Artificial Sequence: Synthetic coding sequence
  source 1..702: mol_type = other DNA

SEQ ID NO: 74175 - DNA, 780 bp, synthetic construct; identical to SEQ ID NO: 74152
  misc_feature 1..780: note = Description of Artificial Sequence: Synthetic coding sequence
  source 1..780: mol_type = other DNA

SEQ ID NO: 74176 - DNA, 411 bp, synthetic construct; identical to SEQ ID NO: 74121
  misc_feature 1..411: note = Description of Artificial Sequence: Synthetic coding sequence
  source 1..411: mol_type = other DNA

SEQ ID NO: 74177 - DNA, 735 bp, synthetic construct; identical to SEQ ID NO: 74123
  misc_feature 1..735: note = Description of Artificial Sequence: Synthetic coding sequence
  source 1..735: mol_type = other DNA

SEQ ID NO: 74178 - DNA, 3381 bp, synthetic construct; identical to SEQ ID NO: 74112
  misc_feature 1..3381: note = Description of Artificial Sequence: Synthetic coding sequence
  source 1..3381: mol_type = other DNA

SEQ ID NO: 74179 - DNA, 411 bp, synthetic construct; identical to SEQ ID NO: 74121
  misc_feature 1..411: note = Description of Artificial Sequence: Synthetic coding sequence
  source 1..411: mol_type = other DNA

SEQ ID NO: 74180 - DNA, 648 bp, synthetic construct; identical to SEQ ID NO: 74116
  misc_feature 1..648: note = Description of Artificial Sequence: Synthetic coding sequence
  source 1..648: mol_type = other DNA

SEQ ID NO: 74181 - DNA, 594 bp, synthetic construct; identical to SEQ ID NO: 74124
  misc_feature 1..594: note = Description of Artificial Sequence: Synthetic coding sequence
  source 1..594: mol_type = other DNA

SEQ ID NO: 74182 - DNA, 1548 bp, synthetic construct; identical to SEQ ID NO: 74140
  misc_feature 1..1548: note = Description of Artificial Sequence: Synthetic coding sequence
  source 1..1548: mol_type = other DNA

SEQ ID NO: 74183 - DNA, 738 bp, synthetic construct
  misc_feature 1..738: note = Description of Artificial Sequence: Synthetic coding sequence
  source 1..738: mol_type = other DNA
ccccccagacacctgcacgtggtgagacccatgagccactacaccacccccatggtgctgcagcaggccgccatccccatccagatcaacgtgggcaccaccgtgaccatgaccggccccgcccccccccccgccaccagccaccccagagtgatcagaatcagccaccagagcgtggagcccgtggtgatgatgcacatgaacatccaggacagcggcacccagcccggcggcgtgcccagcgcccccaccggccccctgggcccccccggccacggccagaccctgggccagcaggtgcccggcttccccaccgcccccaccagagtggtgatcgccagacccacccccccccaggccagacccagccaccccggcggcccccccgtgagcggcaccctgcagggcgccggcctgggcaccaacgccagcctggcccagatggtgagcggcctggtgggccagctgctgatgcagcccgtgctggtggcccagggcacccccggcatggcccccccccccgcccccgccaccgccagcgccagcgccggcaccaccaacaccgccaccaccgccggccccgcccccggcggccccgcccagcccccccccaccccccagcccagcatggccgacctgcagttcagccagctgctgggcaacctgctgggccccgccggccccggcgccggcggccccggcgtggccagccccaccatcaccgtggccatgccctag

SEQ ID NO: 74184 - DNA, 738 bp, synthetic construct; identical to SEQ ID NO: 74111
  misc_feature 1..738: note = Description of Artificial Sequence: Synthetic coding sequence
  source 1..738: mol_type = other DNA

SEQ ID NO: 74185 - DNA, 777 bp, synthetic construct; identical to SEQ ID NO: 74138
  misc_feature 1..777: note = Description of Artificial Sequence: Synthetic coding sequence
  source 1..777: mol_type = other DNA

SEQ ID NO: 74186 - DNA, 789 bp, synthetic construct; identical to SEQ ID NO: 74113
  misc_feature 1..789: note = Description of Artificial Sequence: Synthetic coding sequence
  source 1..789: mol_type = other DNA

SEQ ID NO: 74187 - DNA, 2232 bp, synthetic construct; identical to SEQ ID NO: 74131
  misc_feature 1..2232: note = Description of Artificial Sequence: Synthetic coding sequence
  source 1..2232: mol_type = other DNA

SEQ ID NO: 74188 - DNA, 777 bp, synthetic construct; identical to SEQ ID NO: 74138
  misc_feature 1..777: note = Description of Artificial Sequence: Synthetic coding sequence
  source 1..777: mol_type = other DNA

SEQ ID NO: 74189 - DNA, 558 bp, synthetic construct; identical to SEQ ID NO: 74145
  misc_feature 1..558: note = Description of Artificial Sequence: Synthetic coding sequence
  source 1..558: mol_type = other DNA

SEQ ID NO: 74190 - DNA, 648 bp, synthetic construct; identical to SEQ ID NO: 74116
  misc_feature 1..648: note = Description of Artificial Sequence: Synthetic coding sequence
  source 1..648: mol_type = other DNA

SEQ ID NO: 74191 - DNA, 780 bp, synthetic construct; identical to SEQ ID NO: 74152
  misc_feature 1..780: note = Description of Artificial Sequence: Synthetic coding sequence
  source 1..780: mol_type = other DNA

SEQ ID NO: 74192 - DNA, 477 bp, synthetic construct; identical to SEQ ID NO: 74132
  misc_feature 1..477: note = Description of Artificial Sequence: Synthetic coding sequence
  source 1..477: mol_type = other DNA

SEQ ID NO: 74193 - DNA, 621 bp, synthetic construct; identical to SEQ ID NO: 74125
  misc_feature 1..621: note = Description of Artificial Sequence: Synthetic coding sequence
  source 1..621: mol_type = other DNA

SEQ ID NO: 74194 - DNA, 2232 bp, synthetic construct; identical to SEQ ID NO: 74131
  misc_feature 1..2232: note = Description of Artificial Sequence: Synthetic coding sequence
  source 1..2232: mol_type = other DNA

SEQ ID NO: 74195 - DNA, 681 bp, synthetic construct; identical to SEQ ID NO: 74133
  misc_feature 1..681: note = Description of Artificial Sequence: Synthetic coding sequence
  source 1..681: mol_type = other DNA

SEQ ID NO: 74196 - DNA, 594 bp, synthetic construct; identical to SEQ ID NO: 74124
  misc_feature 1..594: note = Description of Artificial Sequence: Synthetic coding sequence
  source 1..594: mol_type = other DNA

SEQ ID NO: 74197 - DNA, 717 bp, synthetic construct; identical to SEQ ID NO: 74129
  misc_feature 1..717: note = Description of Artificial Sequence: Synthetic coding sequence
  source 1..717: mol_type = other DNA

SEQ ID NO: 74198 - DNA, 735 bp, synthetic construct; identical to SEQ ID NO: 74123
  misc_feature 1..735: note = Description of Artificial Sequence: Synthetic coding sequence
  source 1..735: mol_type = other DNA

SEQ ID NO: 74199 - DNA, 789 bp, synthetic construct; identical to SEQ ID NO: 74113
  misc_feature 1..789: note = Description of Artificial Sequence: Synthetic coding sequence
  source 1..789: mol_type = other DNA

SEQ ID NO: 74200 - DNA, 2232 bp, synthetic construct; identical to SEQ ID NO: 74118
  misc_feature 1..2232: note = Description of Artificial Sequence: Synthetic coding sequence
  source 1..2232: mol_type = other DNA

SEQ ID NO: 74201 - DNA, 735 bp, synthetic construct; identical to SEQ ID NO: 74123
  misc_feature 1..735: note = Description of Artificial Sequence: Synthetic coding sequence
  source 1..735: mol_type = other DNA

SEQ ID NO: 74202 - DNA, 789 bp, synthetic construct; identical to SEQ ID NO: 74113
  misc_feature 1..789: note = Description of Artificial Sequence: Synthetic coding sequence
  source 1..789: mol_type = other DNA

SEQ ID NO: 74203 - DNA, 2712 bp, synthetic construct
  misc_feature 1..2712: note = Description of Artificial Sequence: Synthetic coding sequence
  source 1..2712: mol_type = other DNA
atggagcccaacgacagcaccagcaccgccgtggaggagcccgacagcctggaggtgctggtgaagaccctggacagccagaccagaaccttcatcgtgggcgcccagatgaacgtgaaggagttcaaggagcacatcgccgccagcgtgagcatccccagcgagaagcagagactgatctaccagggcagagtgctgcaggacgacaagaagctgcaggagtacaacgtgggcggcaaggtgatccacctggtggagagagcccccccccagacccacctgcccagcggcgccagcagcggcaccggcagcgccagcgccacccacggcggcggcagcccccccggcaccagaggccccggcgccagcgtgcacgacagaaacgccaacagctacgtgatggtgggcaccttcaacctgcccagcgacggcagcgccgtggacgtgcacatcaacatggagcaggcccccatccagagcgagcccagagtgagactggtgatggcccagcacatgatcagagacatccagaccctgctgagcagaatggagtgcagaggcggcccccagccccagcacagccagccccccccccagccccccgccgtgacccccgagcccgtggccctgagcagccagaccagcgagcccgtggagagcgaggccccccccagagagcccatggaggccgaggaggtggaggagagagcccccgcccagaaccccgagctgacccccggccccgcccccgccggccccacccccgcccccgagaccaacgcccccaaccaccccagccccgccgagtacgtggaggtgctgcaggagctgcagagactggagagcagactgcagcccttcctgcagagatactacgaggtgctgggcgccgccgccaccaccgactacaacaacaaccacgagggcagagaggaggaccagagactgatcaacctggtgggcgagagcctgagactgctgggcaacaccttcgtggccctgagcgacctgagatgcaacctggcctgcaccccccccagacacctgcacgtggtgagacccatgagccactacaccacccccatggtgctgcagcaggccgccatccccatccagatcaacgtgggcaccaccgtgaccatgaccggcaacggcaccagacccccccccacccccaacgccgaggcccccccccccggccccggccaggccagcagcgtggcccccagcagcaccaacgtggagagcagcgccgagggcgcccccccccccggccccgcccccccccccgccaccagccaccccagagtgatcagaatcagccaccagagcgtggagcccgtggtgatgatgcacatgaacatccaggacagcggcacccagcccggcggcgtgcccagcgcccccaccggccccctgggcccccccggccacggccagaccctgggccagcaggtgcccggcttccccaccgcccccaccagagtggtgatcgccagacccacccccccccaggccagacccagccaccccggcggcccccccgtgagcggcaccctgggcgccggcctgggcaccaacgccagcctggcccagatggtgagcggcctggtgggccagctgctgatgcagcccgtgctggtggcccagggcacccccggcagccccggcggcctgggcctggagagcctgagccccgagttcttcaccagcgtggtgcagggcgtgctgagcagcctgctgggcagcctgggcgccagagccggcagcagcgagagcatcgccgccttcatccagagactgagcggcagcagcaacatcttcgagcccggcgccgacggcgccctgggcttcttcggcgccctgctgagcctgctgtgccagaacttcagcatggtggacgtggtgatgctgctgcacggccacttccagcccctgcagagactgcagccccagctgagaagcttcttccaccagcactacctgggcggccaggagcccacccccagcaacatcagaatggccacccacaccctgatcaccggcctggaggagtacgtgagagagagcttcagcctggtgcaggtgcagcccggcgtggacatcatcagaaccaacctggagttcctgcaggagcagttcaacagcatcgccgcccacgtgctgcactgcaccgacagcggcttcggcgccagactgctggagctgtgcaaccagggcctgttcgagtgcctggccctgaacctgcactgcctgggcggccagcagatggagctggccgccgtgatcaacggcagaatcagaagaatgagcagaggcgtgaaccccagcctggtgagctggctgaccaccatgatgggcctgagactgcaggtggtgctggagcacatgcccgtgggccccgacgccatcctgagatacgtgagaagagtgggcgaccccccccagcccctgcccgaggagcccatggaggtgcagggcgccgagagagccagccccgagccccaggagtgggtgcccatcatccagcaggacatccagagccagagaaaggtgaagccccagccccccctgagcgacgcctacctgagcggcatgcccgccaagagaagaaagctgagaagcgacatccagaagagactgcaggaggaccccaactacagcccccagagattccccaacgcccagagagccttcgccgacgacccctag

SEQ ID NO: 74204 - DNA, 558 bp, synthetic construct; identical to SEQ ID NO: 74145
  misc_feature 1..558: note = Description of Artificial Sequence: Synthetic coding sequence
  source 1..558: mol_type = other DNA

SEQ ID NO: 74205 - DNA, 789 bp, synthetic construct; identical to SEQ ID NO: 74113
  misc_feature 1..789: note = Description of Artificial Sequence: Synthetic coding sequence
  source 1..789: mol_type = other DNA

SEQ ID NO: 74206 - DNA, 621 bp, synthetic construct; identical to SEQ ID NO: 74125
  misc_feature 1..621: note = Description of Artificial Sequence: Synthetic coding sequence
  source 1..621: mol_type = other DNA

SEQ ID NO: 74207 - DNA, 681 bp, synthetic construct; identical to SEQ ID NO: 74133
  misc_feature 1..681: note = Description of Artificial Sequence: Synthetic coding sequence
  source 1..681: mol_type = other DNA

SEQ ID NO: 74208 - DNA, 780 bp, synthetic construct; identical to SEQ ID NO: 74152
  misc_feature 1..780: note = Description of Artificial Sequence: Synthetic coding sequence
  source 1..780: mol_type = other DNA

SEQ ID NO: 74209 - DNA, 777 bp, synthetic construct; identical to SEQ ID NO: 74138
  misc_feature 1..777: note = Description of Artificial Sequence: Synthetic coding sequence
  source 1..777: mol_type = other DNA

SEQ ID NO: 74210 - DNA, 477 bp, synthetic construct; identical to SEQ ID NO: 74132
  misc_feature 1..477: note = Description of Artificial Sequence: Synthetic coding sequence
  source 1..477: mol_type = other DNA

SEQ ID NO: 74211 - DNA, 735 bp, synthetic construct; identical to SEQ ID NO: 74123
  misc_feature 1..735: note = Description of Artificial Sequence: Synthetic coding sequence
  source 1..735: mol_type = other DNA

SEQ ID NO: 74212 - DNA, 3381 bp, synthetic construct; identical to SEQ ID NO: 74107
  misc_feature 1..3381: note = Description of Artificial Sequence: Synthetic coding sequence
  source 1..3381: mol_type = other DNA

SEQ ID NO: 74213 - DNA, 735 bp, synthetic construct; identical to SEQ ID NO: 74123
  misc_feature 1..735: note = Description of Artificial Sequence: Synthetic coding sequence
  source 1..735: mol_type = other DNA

SEQ ID NO: 74214 - DNA, 1548 bp, synthetic construct; identical to SEQ ID NO: 74140
  misc_feature 1..1548: note = Description of Artificial Sequence: Synthetic coding sequence
  source 1..1548: mol_type = other DNA

SEQ ID NO: 74215 - DNA, 3381 bp, synthetic construct; identical to SEQ ID NO: 74107
  misc_feature 1..3381: note = Description of Artificial Sequence: Synthetic coding sequence
  source 1..3381: mol_type = other DNA

SEQ ID NO: 74216 - DNA, 411 bp, synthetic construct; identical to SEQ ID NO: 74121
  misc_feature 1..411: note = Description of Artificial Sequence: Synthetic coding sequence
  source 1..411: mol_type = other DNA

SEQ ID NO: 74217 - DNA, 3399 bp, synthetic construct; identical to SEQ ID NO: 74154
  misc_feature 1..3399: note = Description of Artificial Sequence: Synthetic coding sequence
  source 1..3399: mol_type = other DNA

SEQ ID NO: 74218 - DNA, 702 bp, synthetic construct; identical to SEQ ID NO: 74141
  misc_feature 1..702: note = Description of Artificial Sequence: Synthetic coding sequence
  source 1..702: mol_type = other DNA

SEQ ID NO: 74219 - DNA, 558 bp, synthetic construct; identical to SEQ ID NO: 74145
  misc_feature 1..558: note = Description of Artificial Sequence: Synthetic coding sequence
  source 1..558: mol_type = other DNA

SEQ ID NO: 74220 - DNA, 738 bp, synthetic construct; identical to SEQ ID NO: 74183
  misc_feature 1..738: note = Description of Artificial Sequence: Synthetic coding sequence
  source 1..738: mol_type = other DNA

SEQ ID NO: 74221 - DNA, 702 bp, synthetic construct; identical to SEQ ID NO: 74141
  misc_feature 1..702: note = Description of Artificial Sequence: Synthetic coding sequence
  source 1..702: mol_type = other DNA

SEQ ID NO: 74222 - DNA, 780 bp, synthetic construct; identical to SEQ ID NO: 74152
  misc_feature 1..780: note = Description of Artificial Sequence: Synthetic coding sequence
  source 1..780: mol_type = other DNA

SEQ ID NO: 74223 - DNA, 702 bp, synthetic construct; identical to SEQ ID NO: 74141
  misc_feature 1..702: note = Description of Artificial Sequence: Synthetic coding sequence
  source 1..702: mol_type = other DNA

SEQ ID NO: 74224 - DNA, 1548 bp, synthetic construct; identical to SEQ ID NO: 74140
  misc_feature 1..1548: note = Description of Artificial Sequence: Synthetic coding sequence
  source 1..1548: mol_type = other DNA

SEQ ID NO: 74225 - DNA, 477 bp, synthetic construct; identical to SEQ ID NO: 74132
  misc_feature 1..477: note = Description of Artificial Sequence: Synthetic coding sequence
  source 1..477: mol_type = other DNA

SEQ ID NO: 74226 - DNA, 702 bp, synthetic construct; identical to SEQ ID NO: 74141
  misc_feature 1..702: note = Description of Artificial Sequence: Synthetic coding sequence
  source 1..702: mol_type = other DNA

SEQ ID NO: 74227 - DNA, 735 bp, synthetic construct; identical to SEQ ID NO: 74123
  misc_feature 1..735: note = Description of Artificial Sequence: Synthetic coding sequence
  source 1..735: mol_type = other DNA

SEQ ID NO: 74228 - DNA, 3399 bp, synthetic construct; identical to SEQ ID NO: 74104
  misc_feature 1..3399: note = Description of Artificial Sequence: Synthetic coding sequence
  source 1..3399: mol_type = other DNA

SEQ ID NO: 74229 - DNA, 1548 bp, synthetic construct; identical to SEQ ID NO: 74140
  misc_feature 1..1548: note = Description of Artificial Sequence: Synthetic coding sequence
  source 1..1548: mol_type = other DNA

SEQ ID NO: 74230 - DNA, 735 bp, synthetic construct; identical to SEQ ID NO: 74123
  misc_feature 1..735: note = Description of Artificial Sequence: Synthetic coding sequence
  source 1..735: mol_type = other DNA

SEQ ID NO: 74231 - DNA, 2232 bp, synthetic construct; identical to SEQ ID NO: 74118
  misc_feature 1..2232: note = Description of Artificial Sequence: Synthetic coding sequence
  source 1..2232: mol_type = other DNA

SEQ ID NO: 74232 - DNA, 735 bp, synthetic construct; identical to SEQ ID NO: 74123
  misc_feature 1..735: note = Description of Artificial Sequence: Synthetic coding sequence
  source 1..735: mol_type = other DNA

SEQ ID NO: 74233 - DNA, 735 bp, synthetic construct; identical to SEQ ID NO: 74123
  misc_feature 1..735: note = Description of Artificial Sequence: Synthetic coding sequence
  source 1..735: mol_type = other DNA

SEQ ID NO: 74234 - DNA, 3399 bp, synthetic construct; identical to SEQ ID NO: 74104
  misc_feature 1..3399: note = Description of Artificial Sequence: Synthetic coding sequence
  source 1..3399: mol_type = other DNA

SEQ ID NO: 74235 - DNA, 738 bp, synthetic construct; identical to SEQ ID NO: 74183
  misc_feature 1..738: note = Description of Artificial Sequence: Synthetic coding sequence
  source 1..738: mol_type = other DNA

SEQ ID NO: 74236 - DNA, 777 bp, synthetic construct; identical to SEQ ID NO: 74138
  misc_feature 1..777: note = Description of Artificial Sequence: Synthetic coding sequence
  source 1..777: mol_type = other DNA

SEQ ID NO: 74237 - DNA, 789 bp, synthetic construct; identical to SEQ ID NO: 74113
  misc_feature 1..789: note = Description of Artificial Sequence: Synthetic coding sequence
  source 1..789: mol_type = other DNA

SEQ ID NO: 74238 - DNA, 789 bp, synthetic construct; identical to SEQ ID NO: 74113
  misc_feature 1..789: note = Description of Artificial Sequence: Synthetic coding sequence
  source 1..789: mol_type = other DNA

SEQ ID NO: 74239 - DNA, 738 bp, synthetic construct; identical to SEQ ID NO: 74111
  misc_feature 1..738: note = Description of Artificial Sequence: Synthetic coding sequence
  source 1..738: mol_type = other DNA

SEQ ID NO: 74240 - DNA, 648 bp, synthetic construct; identical to SEQ ID NO: 74116
  misc_feature 1..648: note = Description of Artificial Sequence: Synthetic coding sequence
  source 1..648: mol_type = other DNA

SEQ ID NO: 74241 - DNA, 735 bp, synthetic construct; identical to SEQ ID NO: 74123
  misc_feature 1..735: note = Description of Artificial Sequence: Synthetic coding sequence
  source 1..735: mol_type = other DNA

SEQ ID NO: 74242 - DNA, 558 bp, synthetic construct; identical to SEQ ID NO: 74145
  misc_feature 1..558: note = Description of Artificial Sequence: Synthetic coding sequence
  source 1..558: mol_type = other DNA

SEQ ID NO: 74243 - DNA, 780 bp, synthetic construct; identical to SEQ ID NO: 74152
  misc_feature 1..780: note = Description of Artificial Sequence: Synthetic coding sequence
  source 1..780: mol_type = other DNA

SEQ ID NO: 74244 - DNA, 477 bp, synthetic construct; identical to SEQ ID NO: 74132
  misc_feature 1..477: note = Description of Artificial Sequence: Synthetic coding sequence
  source 1..477: mol_type = other DNA

SEQ ID NO: 74245 - DNA, 621 bp, synthetic construct; identical to SEQ ID NO: 74125
  misc_feature 1..621: note = Description of Artificial Sequence: Synthetic coding sequence
  source 1..621: mol_type = other DNA

SEQ ID NO: 74246 - DNA, 3399 bp, synthetic construct; identical to SEQ ID NO: 74154
  misc_feature 1..3399: note = Description of Artificial Sequence: Synthetic coding sequence
  source 1..3399: mol_type = other DNA

SEQ ID NO: 74247 - DNA, 717 bp, synthetic construct; identical to SEQ ID NO: 74129
  misc_feature 1..717: note = Description of Artificial Sequence: Synthetic coding sequence
  source 1..717: mol_type = other DNA

SEQ ID NO: 74248 - DNA, 621 bp, synthetic construct; identical to SEQ ID NO: 74125
  misc_feature 1..621: note = Description of Artificial Sequence: Synthetic coding sequence
  source 1..621: mol_type = other DNA

SEQ ID NO: 74249 - DNA, 558 bp, synthetic construct; identical to SEQ ID NO: 74145
  misc_feature 1..558: note = Description of Artificial Sequence: Synthetic coding sequence
  source 1..558: mol_type = other DNA

SEQ ID NO: 74250 - DNA, 648 bp, synthetic construct; identical to SEQ ID NO: 74116
  misc_feature 1..648: note = Description of Artificial Sequence: Synthetic coding sequence
  source 1..648: mol_type = other DNA

SEQ ID NO: 74251 - DNA, 789 bp, synthetic construct; identical to SEQ ID NO: 74113
  misc_feature 1..789: note = Description of Artificial Sequence: Synthetic coding sequence
  source 1..789: mol_type = other DNA

SEQ ID NO: 74252 - DNA, 594 bp, synthetic construct; identical to SEQ ID NO: 74124
  misc_feature 1..594: note = Description of Artificial Sequence: Synthetic coding sequence
  source 1..594: mol_type = other DNA

SEQ ID NO: 74253 - DNA, 735 bp, synthetic construct; identical to SEQ ID NO: 74123
  misc_feature 1..735: note = Description of Artificial Sequence: Synthetic coding sequence
  source 1..735: mol_type = other DNA

SEQ ID NO: 74254 - DNA, 681 bp, synthetic construct; identical to SEQ ID NO: 74133
  misc_feature 1..681: note = Description of Artificial Sequence: Synthetic coding sequence
  source 1..681: mol_type = other DNA

SEQ ID NO: 74255 - DNA, 738 bp, synthetic construct; identical to SEQ ID NO: 74111
  misc_feature 1..738: note = Description of Artificial Sequence: Synthetic coding sequence
  source 1..738: mol_type = other DNA

SEQ ID NO: 74256 - DNA, 681 bp, synthetic construct; identical to SEQ ID NO: 74133
  misc_feature 1..681: note = Description of Artificial Sequence: Synthetic coding sequence
  source 1..681: mol_type = other DNA

SEQ ID NO: 74257 - DNA, 681 bp, synthetic construct; identical to SEQ ID NO: 74133
  misc_feature 1..681: note = Description of Artificial Sequence: Synthetic coding sequence
  source 1..681: mol_type = other DNA

SEQ ID NO: 74258 - DNA, 777 bp, synthetic construct; identical to SEQ ID NO: 74138
  misc_feature 1..777: note = Description of Artificial Sequence: Synthetic coding sequence
  source 1..777: mol_type = other DNA

SEQ ID NO: 74259 - DNA, 411 bp, synthetic construct; identical to SEQ ID NO: 74121
  misc_feature 1..411: note = Description of Artificial Sequence: Synthetic coding sequence
  source 1..411: mol_type = other DNA

SEQ ID NO: 74260 - DNA, 3489 bp, synthetic construct
  misc_feature 1..3489: note = Description of Artificial Sequence: Synthetic coding sequence
  source 1..3489: mol_type = other DNA
atggagcccaacgacagcaccagcaccgccgtggaggagcccgacagcctggaggtgctggtgaagaccctggacagccagaccagaaccttcatcgtgggcgcccagatgaacgtgaaggagttcaaggagcacatcgccgccagcgtgagcatccccagcgagaagcagagactgatctaccagggcagagtgctgcaggacgacaagaagctgcaggagtacaacgtgggcggcaaggtgatccacctggtggagagagcccccccccagacccacctgcccagcggcgccagcagcggcaccggcagcgccagcgccacccacggcggcggcagcccccccggcaccagaggccccggcgccagcgtgcacgacagaaacgccaacagctacgtgatggtgggcaccttcaacctgcccagcgacggcagcgccgtggacgtgcacatcaacatggagcaggcccccatccagagcgagcccagagtgagactggtgatggcccagcacatgatcagagacatccagaccctgctgagcagaatggagtgcagaggcggcccccagccccagcacagccagccccccccccagccccccgccgtgacccccgagcccgtggccctgagcagccagaccagcgagcccgtggagagcgaggccccccccagagagcccatggaggccgaggaggtggaggagagagcccccgcccagaaccccgagctgacccccggccccgcccccgccggccccacccccgcccccgagaccaacgcccccaaccaccccagccccgccgagtacgtggaggtgctgcaggagctgcagagactggagagcagactgcagcccttcctgcagagatactacgaggtgctgggcgccgccgccaccaccgactacaacaacaaccacgagggcagagaggaggaccagagactgatcaacctggtgggcgagagcctgagactgctgggcaacaccttcgtggccctgagcgacctgagatgcaacctggcctgcaccccccccagacacctgcacgtggtgagacccatgagccactacaccacccccatggtgctgcagcaggccgccatccccatccagatcaacgtgggcaccaccgtgaccatgaccggcaacggcaccagacccccccccacccccaacgccgaggcccccccccccggccccggccaggccagcagcgtggcccccagcagcaccaacgtggagagcagcgccgagggcgcccccccccccggccccgcccccccccccgccaccagccaccccagagtgatcagaatcagccaccagagcgtggagcccgtggtgatgatgcacatgaacatccaggacagcggcacccagcccggcggcgtgcccagcgcccccaccggccccctgggcccccccggccacggccagaccctgggcagcaccctgatccagctgcccagcctgccccccgagttcatgcacgccgtggcccaccagatcacccaccaggccatggtggccgccgtggccagcgccgccgccggccagcaggtgcccggcttccccaccgcccccaccagagtggtgatcgccagacccacccccccccaggccagacccagccaccccggcggcccccccgtgagcggcaccctgcagggcgccggcctgggcaccaacgccagcctggcccagatggtgagcggcctggtgggccagctgctgatgcagcccgtgctggtggcccagggcacccccggcatggcccccccccccgcccccgccaccgccagcgccagcgccggcaccaccaacaccgccaccaccgccggccccgcccccggcggccccgcccagcccccccccaccccccagcccagcatggccgacctgcagttcagccagctgctgggcaacctgctgggccccgccggccccggcgccggcggccccggcgtggccagccccaccatcaccgtggccatgcccggcgtgcccgccttcctgcagggcatgaccgacttcctgcaggccacccagaccgccccccccccccccccccccccccccccccccccccccgcccccgagcagcagaccatgcccccccccggcagccccagcggcggcgccggcagccccggcggcctgggcctggagagcctgagccccgagttcttcaccagcgtggtgcagggcgtgctgagcagcctgctgggcagcctgggcgccagagccggcagcagcgagagcatcgccgccttcatccagagactgagcggcagcagcaacatcttcgagcccggcgccgacggcgccctgggcttcttcggcgccctgctgagcctgctgtgccagaacttcagcatggtggacgtggtgatgctgctgcacggccacttccagcccctgcagagactgcagccccagctgagaagcttcttccaccagcactacctgggcggccaggagcccacccccagcaacatcagaatggccacccacaccctgatcaccggcctggaggagtacgtgagagagagcttcagcctggtgcaggtgcagcccggcgtggacatcatcagaaccaacctggagttcctgcaggagcagttcaacagcatcgccgcccacgtgctgcactgcaccgacagcggcttcggcgccagactgctggagctgtgcaaccagggcctgttcgagtgcctggccctgaacctgcactgcctgggcggccagcagatggagctggccgccgtgatcaacggcagaatcagaagaatgagcagaggcgtgaaccccagcctggtgagctggctgaccaccatgatgggcctgagactgcaggtggtgctggagcacatgcccgtgggccccgacgccatcctgagatacgtgagaagagtgggcgaccccccccagcccctgcccgaggagcccatggaggtgcagggcgccgagagagccagccccgagccccagagagagaacgccagccccgcccccggcaccaccgccgaggaggccatgagcagaggccccccccccgcccccgagggcggcagcagagacgagcaggacggcgccagcgccgagaccgagccctgggccgccgccgtgccccccgagtgggtgcccatcatccagcaggacatccagagccagagaaaggtgaagccccagccccccctgagcgacgcctacctgagcggcatgcccgccaagagaagaaagaccatgcagggcgagggcccccagctgctgctgagcgaggccgtgagcagagccgccaaggccgccggcgccagacccctgaccagccccgagagcctgagcagagacctggaggcccccgaggtgcaggagagctacagacagcagctgagaagcgacatccagaagagactgcaggaggaccccaactacagcccccagagattccccaacgcccagagagccttcgccgacgacccctag

SEQ ID NO: 74261 - DNA, 2712 bp, synthetic construct; identical to SEQ ID NO: 74203
  misc_feature 1..2712: note = Description of Artificial Sequence: Synthetic coding sequence
  source 1..2712: mol_type = other DNA

SEQ ID NO: 74262 - DNA, 2712 bp, synthetic construct; identical to SEQ ID NO: 74203
  misc_feature 1..2712: note = Description of Artificial Sequence: Synthetic coding sequence
  source 1..2712: mol_type = other DNA

SEQ ID NO: 74263 - DNA, 3234 bp, synthetic construct; identical to SEQ ID NO: 74105
  misc_feature 1..3234: note = Description of Artificial Sequence: Synthetic coding sequence
  source 1..3234: mol_type = other DNA

SEQ ID NO: 74264 - DNA, 3234 bp, synthetic construct
  misc_feature 1..3234: note = Description of Artificial Sequence: Synthetic coding sequence
  source 1..3234: mol_type = other DNA
atggagcccaacgacagcaccagcaccgccgtggaggagcccgacagcctggaggtgctggtgaagaccctggacagccagaccagaaccttcatcgtgggcgcccagatgaacgtgaaggagttcaaggagcacatcgccgccagcgtgagcatccccagcgagaagcagagactgatctaccagggcagagtgctgcaggacgacaagaagctgcaggagtacaacgtgggcggcaaggtgatccacctggtggagagagcccccccccagacccacctgcccagcggcgccagcagcggcaccggcagcgccagcgccacccacggcggcggcagcccccccggcaccagaggccccggcgccagcgtgcacgacagaaacgccaacagctacgtgatggtgggcaccttcaacctgcccagcgacggcagcgccgtggacgtgcacatcaacatggagcaggcccccatccagagcgagcccagagtgagactggtgatggcccagcacatgatcagagacatccagaccctgctgagcagaatggagtgcagaggcggcccccagccccagcacagccagccccccccccagccccccgccgtgacccccgagcccgtggccctgagcagccagaccagcgagcccgtggagagcgaggccccccccagagagcccatggaggccgaggaggtggaggagagagcccccgcccagaaccccgagctgacccccggccccgcccccgccggccccacccccgcccccgagaccaacgcccccaaccaccccagccccgccgagtacgtggaggtgctgcaggagctgcagagactggagagcagactgcagcccttcctgcagagatactacgaggtgctgggcgccgccgccaccaccgactacaacaacaaccacgagggcagagaggaggaccagagactgatcaacctggtgggcgagagcctgagactgctgggcaacaccttcgtggccctgagcgacctgagatgcaacctggcctgcaccccccccagacacctgcacgtggtgagacccatgagccactacaccacccccatggtgctgcagcaggccgccatccccatccagatcaacgtgggcaccaccgtgaccatgaccggcaacggcaccagacccccccccacccccaacgccgaggcccccccccccggccccggccaggccagcagcgtggcccccagcagcaccaacgtggagagcagcgccgagggcgcccccccccccggccccgcccccccccccgccaccagccaccccagagtgatcagaatcagccaccagagcgtggagcccgtggtgatgatgcacatgaacatccaggacagcggcacccagcccggcggcgtgcccagcgcccccaccggccccctgggcccccccggccacggccagaccctgggccagcaggtgcccggcttccccaccgcccccaccagagtggtgatcgccagacccacccccccccaggccagacccagccaccccggcggcccccccgtgagcggcaccctgcagggcgccggcctgggcaccaacgccagcctggcccagatggtgagcggcctggtgggccagctgctgatgcagcccgtgctggtggcccagggcacccccggcatggcccccccccccgcccccgccaccgccagcgccagcgccggcaccaccaacaccgccaccaccgccggccccgcccccggcggccccgcccagcccccccccaccccccagcccagcatggccgacctgcagttcagccagctgctgggcaacctgctgggccccgccggccccggcgccggcggccccggcgtggccagccccaccatcaccgtggccatgcccggcgtgcccgccttcctgcagggcatgaccgacttcctgcaggccacccagaccgccccccccccccccccccccccccccccccccccccccgcccccgagcagcagaccatgcccccccccggcagccccagcggcggcgccggcagccccggcggcctgggcctggagagcctgagccccgagttcttcaccagcgtggtgcagggcgtgctgagcagcctgctgggcagcctgggcgccagagccggcagcagcgagagcatcgccgccttcatccagagactgagcggcagcagcaacatcttcgagcccggcgccgacggcgccctgggcttcttcggcgccctgctgagcctgctgtgccagaacttcagcatggtggacgtggtgatgctgctgcacggccacttccagcccctgcagagactgcagccccagctgagaagcttcttccaccagcactacctgggcggccaggagcccacccccagcaacatcagaatggccacccacaccctgatcaccggcctggaggagtacgtgagagagagcttcagcctggtgcaggtgcagcccggcgtggacatcatcagaaccaacctggagttcctgcaggagcagttcaacagcatcgccgcccacgtgctgcactgcaccgacagcggcttcggcgccagactgctggagctgtgcaaccagggcctgttcgagtgcctggccctgaacctgcactgcctgggcggccagcagatggagctggccgccgtgatcaacggcagaatcagaagaatgagcagaggcgtgaaccccagcctggtgagctggctgaccaccatgatgggcctgagactgcaggtggtgctggagcacatgcccgtgggccccgacgccatcctgagatacgtgagaagagtgggcgaccccccccagcccctgcccgaggagcccatggaggtgcagggcgccgagagagccagccccgagccccagagagagaacgccagccccgcccccggcaccaccgccgaggaggccatgagcagaggccccccccccgcccccgagggcggcagcagagacgagcaggacggcgccagcgccgagaccgagccctgggccgccgccgtgccccccgagtgggtgcccatcatccagcaggacatccagagccagagaaaggtgaagccccagccccccctgagcgacgcctacctgagcggcatgcccgccaagagaagaaagctgagaagcgacatccagaagagactgcaggaggaccccaactacagcccccagagattccccaacgcccagagagccttcgccgacgacccctag

SEQ ID NO: 74265 - DNA, 3489 bp, synthetic construct; identical to SEQ ID NO: 74260
  misc_feature 1..3489: note = Description of Artificial Sequence: Synthetic coding sequence
  source 1..3489: mol_type = other DNA

SEQ ID NO: 74266 - DNA, 3234 bp, synthetic construct; identical to SEQ ID NO: 74105
  misc_feature 1..3234: note = Description of Artificial Sequence: Synthetic coding sequence
  source 1..3234: mol_type = other DNA

SEQ ID NO: 74267 - DNA, 2712 bp, synthetic construct; identical to SEQ ID NO: 74203
  misc_feature 1..2712: note = Description of Artificial Sequence: Synthetic coding sequence
  source 1..2712: mol_type = other DNA

SEQ ID NO: 74268 - DNA, 3489 bp, synthetic construct; identical to SEQ ID NO: 74110
  misc_feature 1..3489: note = Description of Artificial Sequence: Synthetic coding sequence
  source 1..3489: mol_type = other DNA

SEQ ID NO: 74269 - DNA, 3234 bp, synthetic construct; identical to SEQ ID NO: 74264
  misc_feature 1..3234: note = Description of Artificial Sequence: Synthetic coding sequence
  source 1..3234: mol_type = other DNA

SEQ ID NO: 74270 - DNA, 2712 bp, synthetic construct; identical to SEQ ID NO: 74203
  misc_feature 1..2712: note = Description of Artificial Sequence: Synthetic coding sequence
  source 1..2712: mol_type = other DNA

SEQ ID NO: 74271 - DNA, 2712 bp, synthetic construct; identical to SEQ ID NO: 74203
  misc_feature 1..2712: note = Description of Artificial Sequence: Synthetic coding sequence
  source 1..2712: mol_type = other DNA

SEQ ID NO: 74272 - DNA, 3489 bp, synthetic construct; identical to SEQ ID NO: 74110
  misc_feature 1..3489: note = Description of Artificial Sequence: Synthetic coding sequence
  source 1..3489: mol_type = other DNA

SEQ ID NO: 74273 - DNA, 3489 bp, synthetic construct; identical to SEQ ID NO: 74260
  misc_feature 1..3489: note = Description of Artificial Sequence: Synthetic coding sequence
  source 1..3489: mol_type = other DNA

SEQ ID NO: 74274 - DNA, 3489 bp, synthetic construct; identical to SEQ ID NO: 74110
  misc_feature 1..3489: note = Description of Artificial Sequence: Synthetic coding sequence
  source 1..3489: mol_type = other DNA

SEQ ID NO: 74275 - DNA, 3234 bp, synthetic construct; identical to SEQ ID NO: 74264
  misc_feature 1..3234: note = Description of Artificial Sequence: Synthetic coding sequence
  source 1..3234: mol_type = other DNA

SEQ ID NO: 74276 - DNA, 3234 bp, synthetic construct; identical to SEQ ID NO: 74105
  misc_feature 1..3234: note = Description of Artificial Sequence: Synthetic coding sequence
  source 1..3234: mol_type = other DNA

SEQ ID NO: 74277 - DNA, 2712 bp, synthetic construct; identical to SEQ ID NO: 74203
  misc_feature 1..2712: note = Description of Artificial Sequence: Synthetic coding sequence
  source 1..2712: mol_type = other DNA

SEQ ID NO: 74278 - DNA, 417 bp, synthetic construct
  misc_feature 1..417: note = Description of Artificial Sequence: Synthetic coding sequence
  source 1..417: mol_type = other DNA
atgaaggagtacagcggcttcgccggcgtgagcagacccagaggcaccttcttcagaatcagaggcagaggcagagccagaggcgtgttcgccggcaccaacaccggccccaacaacagcaacaccaccttccagaagagacccaaggaggaggagtgggaccccgagtacacccccaagagcaagaagtacttcctgcacgacgacagagacgacggcgtggactactgggccaagagaggcagaggcagaggcaccttccagagaggcagaggcagattcaacttcaagaagagcggcagcagccccaagtggacccacgacaagtaccagggcgacggcatcgtggaggacgaggaggagaccatggagaacaacgaggagaagaaggacagaagaaaggaggagaaggagtag

SEQ ID NO: 74279 - DNA, 2610 bp, synthetic construct
  misc_feature 1..2610: note = Description of Artificial Sequence: Synthetic coding sequence
  source 1..2610: mol_type = other DNA
atgggcagaagcaacagcagaagccacagcagcagaagcaagagcagaagccagagcagcagcagaagcagaagcagaagccacagcagaaagaagagatacagaagcagaagcagaacctacagcagaagcagaagcagagacagaatgtacagcagagactacagaagagactacagaaacaacagaggcatgagaagaccctacggctacagaggcagaggcagaggctactaccagggcggcggcggcagataccacagaggcggctacagacccgtgtggaacagaagacacagcagaagccccagaagaggcagaagcagaagcagaagccccaagagaagaagcgtgagcagccagagaagcagaagcagaagcagaagaagctacagaagcagcagaagccccagaagcagcagcagcagaagcagcagcccctacagcaagagccccgtgagcaagagaagaggcagccaggagaagcagaccaagaaggccgagggcgagccccaggaggagagccccctgaagagcaagagccaggaggagcccaaggacaccttcgagcacgaccccagcgagagcatcgacgagttcaacaagagcagcgccaccagcggcgacatctggcccggcctgagcgcctacgacaacagccccagaagcccccacagccccagccccatcgccaccccccccagccagagcagcagctgcagcgacgcccccatgctgagcaccgtgcacagcgccaagaacacccccagccagcacagccacagcatccagcacagccccgagagaagcggcagcggcagcgtgggcaacggcagcagcagatacagccccagccagaacagccccatccaccacatccccagcagaagaagccccgccaagaccatcgccccccagaacgcccccagagacgagagcagaggcagaagcagcttctaccccgacggcggcgaccaggagaccgccaagaccggcaagttcctgaagagattcaccgacgaggagagcagagtgttcctgctggacagaggcaacaccagagacaaggaggccagcaaggagaagggcagcgagaagggcagagccgagggcgagtgggaggaccaggaggccctggactacttcagcgacaaggagagcggcaagcagaagttcaacgacagcgagggcgacgacaccgaggagaccgaggactacagacagttcagaaagagcgtgctggccgaccagggcaagagcttcgccaccgccagccacagaaacaccgaggaggagggcctgaagtacaagagcaaggtgagcctgaagggcaacagagagagcgacggcttcagagaggagaagaactacaagctgaaggagaccggctacgtggtggagagacccagcaccaccaaggacaagcacaaggaggaggacaagaacagcgagagaatcaccgtgaagaaggagacccagagccccgagcaggtgaagagcgagaagctgaaggacctgttcgactacagcccccccctgcacaagaacctggacgccagagagaagagcaccttcagagaggagagccccctgagaatcaagatgatcgccagcgacagccacagacccgaggtgaagctgaagatggcccccgtgcccctggacgacagcaacagacccgccagcctgaccaaggacagactgctggccagcaccctggtgcacagcgtgaagaaggagcaggagttcagaagcatcttcgaccacatcaagctgccccaggccagcaagagcaccagcgagagcttcatccagcacatcgtgagcctggtgcaccacgtgaaggagcagtacttcaagagcgccgccatgaccctgaacgagagattcaccagctaccagaaggccaccgaggagcacagcaccagacagaagagccccgagatccacagaagaatcgacatcagccccagcaccctgagaaagcacaccagactggccggcgaggagagagtgttcaaggaggagaaccagaagggcgacaagaagctgagatgcgacagcgccgacctgagacacgacatcgacagaagaagaaaggagagaagcaaggagagaggcgacagcaagggcagcagagagagcagcggcagcagaaagcaggagaagacccccaaggactacaaggagtacaagagctacaaggacgacagcaagcacaagagagagcaggaccacagcagaagcagcagcagcagcgccagccccagcagccccagcagcagagaggagaaggagagcaagaaggagagagaggaggagttcaagacccaccacgagatgaaggagtacagcggcttcgccggcgtgagcagacccagaggcaccttccacgacgacagagacgacggcgtggactactgggccaagagaggcagaggcagaggcaccttccagagaggcagaggcagattcaacttcaagaagagcggcagcagccccaagtggacccacgacaagtaccagggcgacggcatcgtggaggacgaggaggagaccatggagaacaacgaggagaagaaggacagaagaaaggaggagaaggagtag

SEQ ID NO: 74280 - DNA, 2610 bp, synthetic construct; identical to SEQ ID NO: 74279
  misc_feature 1..2610: note = Description of Artificial Sequence: Synthetic coding sequence
  source 1..2610: mol_type = other DNA

SEQ ID NO: 74281 - DNA, 2757 bp, synthetic construct
  misc_feature 1..2757: note = Description of Artificial Sequence: Synthetic coding sequence
  source 1..2757: mol_type = other DNA
atgggcagaagcaacagcagaagccacagcagcagaagcaagagcagaagccagagcagcagcagaagcagaagcagaagccacagcagaaagaagagatacagaagcagaagcagaacctacagcagaagcagaagcagagacagaatgtacagcagagactacagaagagactacagaaacaacagaggcatgagaagaccctacggctacagaggcagaggcagaggctactaccagggcggcggcggcagataccacagaggcggctacagacccgtgtggaacagaagacacagcagaagccccagaagaggcagaagcagaagcagaagccccaagagaagaagcgtgagcagccagagaagcagaagcagaagcagaagaagctacagaagcagcagaagccccagaagcagcagcagcagaagcagcagcccctacagcaagagccccgtgagcaagagaagaggcagccaggagaagcagaccaagaaggccgagggcgagccccaggaggagagccccctgaagagcaagagccaggaggagcccaaggacaccttcgagcacgaccccagcgagagcatcgacgagttcaacaagagcagcgccaccagcggcgacatctggcccggcctgagcgcctacgacaacagccccagaagcccccacagccccagccccatcgccaccccccccagccagagcagcagctgcagcgacgcccccatgctgagcaccgtgcacagcgccaagaacacccccagccagcacagccacagcatccagcacagccccgagagaagcggcagcggcagcgtgggcaacggcagcagcagatacagccccagccagaacagccccatccaccacatccccagcagaagaagccccgccaagaccatcgccccccagaacgcccccagagacgagagcagaggcagaagcagcttctaccccgacggcggcgaccaggagaccgccaagaccggcaagttcctgaagagattcaccgacgaggagagcagagtgttcctgctggacagaggcaacaccagagacaaggaggccagcaaggagaagggcagcgagaagggcagagccgagggcgagtgggaggaccaggaggccctggactacttcagcgacaaggagagcggcaagcagaagttcaacgacagcgagggcgacgacaccgaggagaccgaggactacagacagttcagaaagagcgtgctggccgaccagggcaagagcttcgccaccgccagccacagaaacaccgaggaggagggcctgaagtacaagagcaaggtgagcctgaagggcaacagagagagcgacggcttcagagaggagaagaactacaagctgaaggagaccggctacgtggtggagagacccagcaccaccaaggacaagcacaaggaggaggacaagaacagcgagagaatcaccgtgaagaaggagacccagagccccgagcaggtgaagagcgagaagctgaaggacctgttcgactacagcccccccctgcacaagaacctggacgccagagagaagagcaccttcagagaggagagccccctgagaatcaagatgatcgccagcgacagccacagacccgaggtgaagctgaagatggcccccgtgcccctggacgacagcaacagacccgccagcctgaccaaggacagactgctggccagcaccctggtgcacagcgtgaagaaggagcaggagttcagaagcatcttcgaccacatcaagctgccccaggccagcaagagcaccagcgagagcttcatccagcacatcgtgagcctggtgcaccacgtgaaggagcagtacttcaagagcgccgccatgaccctgaacgagagattcaccagctaccagaaggccaccgaggagcacagcaccagacagaagagccccgagatccacagaagaatcgacatcagccccagcaccctgagaaagcacaccagactggccggcgaggagagagtgttcaaggaggagaaccagaagggcgacaagaagctgagatgcgacagcgccgacctgagacacgacatcgacagaagaagaaaggagagaagcaaggagagaggcgacagcaagggcagcagagagagcagcggcagcagaaagcaggagaagacccccaaggactacaaggagtacaagagctacaaggacgacagcaagcacaagagagagcaggaccacagcagaagcagcagcagcagcgccagccccagcagccccagcagcagagaggagaaggagagcaagaaggagagagaggaggagttcaagacccaccacgagatgaaggagtacagcggcttcgccggcgtgagcagacccagaggcaccttcttcagaatcagaggcagaggcagagccagaggcgtgttcgccggcaccaacaccggccccaacaacagcaacaccaccttccagaagagacccaaggaggaggagtgggaccccgagtacacccccaagagcaagaagtacttcctgcacgacgacagagacgacggcgtggactactgggccaagagaggcagaggcagaggcaccttccagagaggcagaggcagattcaacttcaagaagagcggcagcagccccaagtggacccacgacaagtaccagggcgacggcatcgtggaggacgaggaggagaccatggagaacaacgaggagaagaaggacagaagaaaggaggagaaggagtag

SEQ ID NO: 74282 - DNA, 2244 bp, synthetic construct
  misc_feature 1..2244: note = Description of Artificial Sequence: Synthetic coding sequence
  source 1..2244: mol_type = other DNA
atgggcagaagcaacagcagaagccacagcagcagaagcaagagcagaagccagagcagcagcagaagcagaagcagaagccacagcagaaagaagagatacagcagcagaagcagaagcagaacctacagcagaagcagaagcagagacagaatgtacagcagagactacagaagagactacagaaacaacagaggcatgagaagaccctacggctacagaggcagaggcagaggctactaccagggcggcggcggcagataccacagaggcggctacagacccgtgtggaacagaagacacagcagaagccccagaagaggcagaagcagaagcagaagccccaagagaagaagcgtgagcagccagagaagcagaagcagaagcagaagaagctacagaagcagcagaagccccagaagcagcagcagcagaagcagcagcccctacagcaagagccccgtgagcaagagaagaggcagccaggagaagcagaccaagaaggccgagggcgagccccaggaggagagccccctgaagagcaagagccaggaggagcccaaggacaccttcgagcacgaccccagcgagagcatcgacgagttcaacaagagcagcgccaccagcggcgacatctggcccggcctgagcgcctacgacaacagccccagaagcccccacagccccagccccatcgccaccccccccagccagagcagcagctgcagcgacgcccccatgctgagcaccgtgcacagcgccaagaacacccccagccagcacagccacagcatccagcacagccccgagagaagcggcagcggcagcgtgggcaacggcagcagcagatacagccccagccagaacagccccatccaccacatccccagcagaagaagccccgccaagaccatcgccccccagaacgcccccagagacgagagcagaggcagaagcagcttctaccccgacggcggcgaccaggagaccgccaagaccggcaagttcctgaagagcccccccctgcacaagaacctggacgccagagagaagagcaccttcagagaggagagccccctgagaatcaagatgatcgccagcgacagccacagacccgaggtgaagctgaagatggcccccgtgcccctggacgacagcaacagacccgccagcctgaccaaggacagactgctggccagcaccctggtgcacagcgtgaagaaggagcaggagttcagaagcatcttcgaccacatcaagctgccccaggccagcaagagcaccagcgagagcttcatccagcacatcgtgagcctggtgcaccacgtgaaggagcagtacttcaagagcgccgccatgaccctgaacgagagattcaccagctaccagaaggccaccgaggagcacagcaccagacagaagagccccgagatccacagaagaatcgacatcagccccagcaccctgagaaagcacaccagactggccggcgaggagagagtgttcaaggaggagaaccagaagggcgacaagaagctgagatgcgacagcgccgacctgagacacgacatcgacagaagaagaaaggagagaagcaaggagagaggcgacagcaagggcagcagagagagcagcggcagcagaaagcaggagaagacccccaaggactacaaggagtacaagagctacaaggacgacagcaagcacaagagagagcaggaccacagcagaagcagcagcagcagcgccagccccagcagccccagcagcagagaggagaaggagagcaagaaggagagagaggaggagttcaagacccaccacgagatgaaggagtacagcggcttcgccggcgtgagcagacccagaggcaccttcttcagaatcagaggcagaggcagagccagaggcgtgttcgccggcaccaacaccggccccaacaacagcaacaccaccttccagaagagacccaaggaggaggagtgggaccccgagtacacccccaagagcaagaagtacttcctgcacgacgacagagacgacggcgtggactactgggccaagagaggcagaggcagaggcaccttccagagaggcagaggcagattcaacttcaagaagagcggcagcagccccaagtggacccacgacaagtaccagggcgacggcatcgtggaggacgaggaggagaccatggagaacaacgaggagaagaaggacagaagaaaggaggagaaggagtag

SEQ ID NO: 74283 - DNA, 2763 bp, synthetic construct
  misc_feature 1..2763: note = Description of Artificial Sequence: Synthetic coding sequence
  source 1..2763: mol_type = other DNA
atgggcagaagcaacagcagaagccacagcagcagaagcaagagcagaagccagagcagcagcagaagcagaagcagaagccacagcagaaagaagagatacagcagcagaagcagaagcagaacctacagcagaagcagaagcagagacagaatgtacagcagagactacagaagagactacagaaacaacagaggcatgagaagaccctacggctacagaggcagaggcagaggctactaccagggcggcggcggcagataccacagaggcggctacagacccgtgtggaacagaagacacagcagaagccccagaagaggcagaagcagaagcagaagccccaagagaagaagcgtgagcagccagagaagcagaagcagaagcagaagaagctacagaagcagcagaagccccagaagcagcagcagcagaagcagcagcccctacagcaagagccccgtgagcaagagaagaggcagccaggagaagcagaccaagaaggccgagggcgagccccaggaggagagccccctgaagagcaagagccaggaggagcccaaggacaccttcgagcacgaccccagcgagagcatcgacgagttcaacaagagcagcgccaccagcggcgacatctggcccggcctgagcgcctacgacaacagccccagaagcccccacagccccagccccatcgccaccccccccagccagagcagcagctgcagcgacgcccccatgctgagcaccgtgcacagcgccaagaacacccccagccagcacagccacagcatccagcacagccccgagagaagcggcagcggcagcgtgggcaacggcagcagcagatacagccccagccagaacagccccatccaccacatccccagcagaagaagccccgccaagaccatcgccccccagaacgcccccagagacgagagcagaggcagaagcagcttctaccccgacggcggcgaccaggagaccgccaagaccggcaagttcctgaagagattcaccgacgaggagagcagagtgttcctgctggacagaggcaacaccagagacaaggaggccagcaaggagaagggcagcgagaagggcagagccgagggcgagtgggaggaccaggaggccctggactacttcagcgacaaggagagcggcaagcagaagttcaacgacagcgagggcgacgacaccgaggagaccgaggactacagacagttcagaaagagcgtgctggccgaccagggcaagagcttcgccaccgccagccacagaaacaccgaggaggagggcctgaagtacaagagcaaggtgagcctgaagggcaacagagagagcgacggcttcagagaggagaagaactacaagctgaaggagaccggctacgtggtggagagacccagcaccaccaaggacaagcacaaggaggaggacaagaacagcgagagaatcaccgtgaagaaggagacccagagccccgagcaggtgaagagcgagaagctgaaggacctgttcgactacagcccccccctgcacaagaacctggacgccagagagaagagcaccttcagagaggagagccccctgagaatcaagatgatcgccagcgacagccacagacccgaggtgaagctgaagatggcccccgtgcccctggacgacagcaacagacccgccagcctgaccaaggacagactgctggccagcaccctggtgcacagcgtgaagaaggagcaggagttcagaagcatcttcgaccacatcaagctgccccaggccagcaagagcaccagcgagagcttcatccagcacatcgtgagcctggtgcaccacgtgaaggagcagtacttcaagagcgccgccatgaccctgaacgagagattcaccagctaccagaaggccaccgaggagcacagcaccagacagaagagccccgagatccacagaagaatcgacatcagccccagcaccctgagaaagcacaccagactggccggcgaggagagagtgttcaaggaggagaaccagaagggcgacaagaagctgagatgcgacagcgccgacctgagacacgacatcgacagaagaagaaaggagagaagcaaggagagaggcgacagcaagggcagcagagagagcagcggcagcagaaagcaggagaagacccccaaggactacaaggagtacaagagctacaaggacgacagcaagcacaagagagagcaggaccacagcagaagcagcagcagcagcgccagccccagcagccccagcagcagagaggagaaggagagcaagaaggagagagaggaggagttcaagacccaccacgagatgaaggagtacagcggcttcgccggcgtgagcagacccagaggcaccttcttcagaatcagaggcagaggcagagccagaggcgtgttcgccggcaccaacaccggccccaacaacagcaacaccaccttccagaagagacccaaggaggaggagtgggaccccgagtacacccccaagagcaagaagtacttcctgcacgacgacagagacgacggcgtggactactgggccaagagaggcagaggcagaggcaccttccagagaggcagaggcagattcaacttcaagaagagcggcagcagccccaagtggacccacgacaagtaccagggcgacggcatcgtggaggacgaggaggagaccatggagaacaacgaggagaagaaggacagaagaaaggaggagaaggagtag

SEQ ID NO: 74284 - DNA, 531 bp, synthetic construct
  misc_feature 1..531: note = Description of Artificial Sequence: Synthetic coding sequence
  source 1..531: mol_type = other DNA
atgggcagacccgccggcctgttcccccccctgtgccccttcctgggcttcagacccgaggcctgctgggagagacacatgcagatcgagagagcccccagcgtgccccccttcctgagatgggccggctacagacccggccccgtgagaagaagaggcaaggtggagctgatcaagttcgtgagagtgcagtggagaagaccccaggtggagtggagaagaagaagatggggccccggccccggcgccagcatggccggcagcgaggagctgggcctgagagaggacaccctgagagtgctggccgccttcctgagaagaggcgaggccgccggcagccccgtgcccaccccccccagacccagctacagcagactgctgtgcttcggcggccccgccgccggcaccgccggccccagagccgccgagatcagcgcccagcccagaatcaccggcagccccatcgacagagagggcagccacaccgccgaggccggcggccccgccggcggcggcggcagaagccactag

SEQ ID NO: 74285 - DNA, 1005 bp, synthetic construct
  misc_feature 1..1005: note = Description of Artificial Sequence: Synthetic coding sequence
  source 1..1005: mol_type = other DNA
atgggcagacccgccggcctgttcccccccctgtgccccttcctgggcttcagacccgaggcctgctgggagagacacatgcagatcgagagagcccccagcgtgccccccttcctgagatgggccggctacagacccggccccgtgagaagaagaggcaaggtggagctgatcaagttcgtgagagtgcagtggagaagaccccaggtggagtggagaagaagaagatggggccccggccccggcgccagcatggccggcagcgaggagctgggcctgagagaggacaccctgagagtgctggccgccttcctgagaagaggcgaggccgccggcagccccgtgcccaccccccccagaagccccgcccaggaggagcccaccgacttcctgagcagactgagaagatgcctgccctgcagcctgggcagaggcgccgcccccagcgagagccccagaccctgcagcctgcccatcagaccctgctacggcctggagcccggccccgccacccccgacttctacgccctggtggcccagagactggagcagctggtgcaggagcagctgaagagcccccccagccccgagctgcagggcccccccagcaccgagaaggaggccatcctgagaagactggtggccctgctggaggaggaggccgaggtgatcaaccagaagctggccagcgaccccgccctgagaagcaagctggtgagactgagcagcgacagcttcgccagactggtggagctgttctgcagcagagacgacagcagcagacccagcagagcctgccccggcccccccccccccagccccgagcccctggccagactggccctggccatggagctgagcagaagagtggccggcctgggcggcaccctggccggcctgagcgtggagcacgtgcacagcttcaccccctggatccaggcccacggcggctgggagggcatcctggccgtgagccccgtggacctgaacctgcccctggactag

SEQ ID NO: 74286 - DNA, 1002 bp, synthetic construct
  misc_feature 1..1002: note = Description of Artificial Sequence: Synthetic coding sequence
  source 1..1002: mol_type = other DNA
atgggcagacccgccggcctgttcccccccctgtgccccttcctgggcttcagacccgaggcctgctgggagagacacatgcagatcgagagagcccccagcgtgccccccttcctgagatgggccggctacagacccggccccgtgagaagaagaggcaaggtggagctgatcaagttcgtgagagtgcagtggagaagaccccaggtggagtggagaagaagaagatggggccccggccccggcgccagcatggccggcagcgaggagctgggcctgagagaggacaccctgagagtgctggccgccttcctgagaagaggcgaggccgccggcagccccgtgcccaccccccccagccccgcccaggaggagcccaccgacttcctgagcagactgagaagatgcctgccctgcagcctgggcagaggcgccgcccccagcgagagccccagaccctgcagcctgcccatcagaccctgctacggcctggagcccggccccgccacccccgacttctacgccctggtggcccagagactggagcagctggtgcaggagcagctgaagagcccccccagccccgagctgcagggcccccccagcaccgagaaggaggccatcctgagaagactggtggccctgctggaggaggaggccgaggtgatcaaccagaagctggccagcgaccccgccctgagaagcaagctggtgagactgagcagcgacagcttcgccagactggtggagctgttctgcagcagagacgacagcagcagacccagcagagcctgccccggcccccccccccccagccccgagcccctggccagactggccctggccatggagctgagcagaagagtggccggcctgggcggcaccctggccggcctgagcgtggagcacgtgcacagcttcaccccctggatccaggcccacggcggctgggagggcatcctggccgtgagccccgtggacctgaacctgcccctggactag

SEQ ID NO: 74287 - DNA, 5166 bp, synthetic construct
  misc_feature 1..5166: note = Description of Artificial Sequence: Synthetic coding sequence
  source 1..5166: mol_type = other DNA
atgctgagcgccacccccctgtacggcaacgtgcacagctggatgaacagcgagagagtgagaatgtgcggcgccagcgaggacagaaagatcctggtgaacgacggcgacgccagcaaggccagactggagctgagagaggagaaccccctgaaccacaacgtggtggacgccagcaccgcccacagaatcgacggcctggccgccctgagcatggacagaaccggcctgatcagagagggcctgagagtgcccggcaacatcgtgtacagcagcctgtgcggcctgggcagcgagaagggcagagaggccgccaccagcaccctgggcggcctgggcttcagcagcgagagaaaccccgagatgcagttcaagcccaacacccccgagaccgtggaggccagcgccgtgagcggcaagccccccaacggcttcagcgccatctacaagaccccccccggcatccagaagagcgccgtggccaccgccgaggccctgggcctggacagacccgccagcgacaagcagagccccctgaacatcaacggcgccagctacctgagactgccctgggtgaacccctacatggagggcgccacccccgccatctaccccttcctggacagccccaacaagtacagcctgaacatgtacaaggccctgctgccccagcagagctacagcctggcccagcccctgtacagccccgtgtgcaccaacggcgagagattcctgtacctgccccccccccactacgtgggcccccacatccccagcagcctggccagccccatgagactgagcacccccagcgccagccccgccatcccccccctggtgcactgcgccgacaagagcctgccctggaagatgggcgtgagccccggcaaccccgtggacagccacgcctacccccacatccagaacagcaagcagcccagagtgcccagcgccaaggccgtgaccagcggcctgcccggcgacaccgccctgctgctgccccccagccccagacccagccccagagtgcacctgcccacccagcccgccgccgacacctacagcgagttccacaagcactacgccagaatcagcaccagccccagcgtggccctgagcaagccctacatgaccgtgagcagcgagttccccgccgccagactgagcaacggcaagtaccccaaggcccccgagggcggcgagggcgcccagcccgtgcccggccacgccagaaagaccgccgtgcaggacagaaaggacggcagcagcccccccctgctggagaagcagaccgtgaccaaggacgtgaccgacaagcccctggacctgagcagcaaggtggtggacgtggacgccagcaaggccgaccacatgaagaagatggcccccaccgtgctggtgcacagcagagccggcagcggcctggtgctgagcggcagcgagatccccaaggagaccctgagcccccccggcaacggctgcgccatctacagaagcgagatcatcagcaccgcccccagcagctgggtggtgcccggccccagccccaacgaggagaacaacggcaagagcatgagcctgaagaacaaggccctggactgggccatcccccagcagagaagcagcagctgccccagaatgggcggcaccgacgccgtgatcaccaacgtgagcggcagcgtgagcagcgccggcagacccgccagcgccagccccgcccccaacgccaacgccgacggcaccaagaccagcagaagcagcgtggagaccacccccagcgtgatccagcacgtgggccagccccccgccacccccgccaagcacagcagcagcaccagcagcaagggcgccaaggccagcaaccccgagcccagcttcaaggccaacgagaacggcctgccccccagcagcatcttcctgagccccaacgaggccttcagaagcccccccatcccctaccccagaagctacctgccctaccccgcccccgagggcatcgccgtgagccccctgagcctgcacggcaagggccccgtgtacccccaccccgtgctgctgcccaacggcagcctgttccccggccacctggcccccaagcccggcctgccctacggcctgcccaccggcagacccgagttcgtgacctaccaggacgccctgggcctgggcatggtgcaccccatgctgatcccccacacccccatcgagatcaccaaggaggagaagcccgagagaagaagcagaagccacgagagagccagatacgaggaccccaccctgagaaacagattcagcgagatcctggagaccagcagcaccaagctgcaccccgacgtgcccaccgacaagaacctgaagcccaaccccaactggaaccagggcaagaccgtggtgaagagcgacaagctggtgtacgtggacctgctgagagaggagcccgacgccaagaccgacaccaacgtgagcaagcccagcttcgccgccgagagcgtgggccagagcgccgagccccccaagcccagcgtggagcccgccctgcagcagcacagagacttcatcgccctgagagaggagctgggcagaatcagcgacttccacgagacctacaccttcaagcagcccgtgttcaccgtgagcaaggacagcgtgctggccggcaccaacaaggagaacctgggcctgcccgtgagcacccccttcctggagccccccctgggcagcgacggccccgccgtgaccttcggcaagacccaggaggaccccaagcccttctgcgtgggcagcgccccccccagcgtggacgtgacccccacctacaccaaggacggcgccgacgaggccgagagcaacgacggcaaggtgctgaagcccaagcccagcaagctggccaagagaatcgccaacagcgccggctacgtgggcgacagattcaagtgcgtgaccaccgagctgtacgccgacagcagccagctgagcagagagcagagagccctgcagatggagggcctgcaggaggacagcatcctgtgcctgcccgccgcctactgcgagagagccatgatgagattcagcgagctggagatgaaggagagagagggcggccaccccgccaccaaggacagcgagatgtgcaagttcagccccgccgactgggagagactgaagggcaaccaggacaagaagcccaagagcgtgaccctggaggaggccatcgccgagcagaacgagagcgagagatgcgagtacagcgtgggcaacaagcacagagaccccttcgaggcccccgaggacaaggacctgcccgtggagaagtacttcgtggagagacagcccgtgagcgagccccccgccgaccaggtggccagcgacatgccccacagccccaccctgagagtggacagaaagagaaaggtgagcggcgacagcagccacaccgagaccaccgccgaggaggtgcccgaggaccccctgctgaaggccaagagaagaagagtgagcaagggcctgcaccccaagaagcagagacacctgctgcacctgagagagagatgggagcagcaggtgagcgccgccgacggcaagcccggcagacagagcagaaaggaggtgacccaggccacccagcccgaggccatcccccagggcaccaacatcaccgaggagaagcccggcagaaagagagccgaggccaagggcaacagaagctggagcgaggagagcctgaagcccagcgacaacgagcagggcctgcccgtgttcagcggcagcccccccatgaagagcctgagcagcaccagcgccggcggcaagaagcaggcccagcccagctgcgcccccgccagcagaccccccgccaagcagcagaagatcaaggagaaccagaagaccgacgtgctgtgcgccgacgaggaggaggactgccaggccgccagcctgctgcagaagtacaccgacaacagcgagaagcccagcggcaagagactgtgcaagaccaagcacctgatcccccaggagagcagaagaggcctgcccctgaccggcgagtactacgtggagaacgccgacggcaaggtgaccgtgagaagattcagaaagagacccgagcccagcagcgactacgacctgagccccgccaagcaggagcccaagcccttcgacagactgcagcagctgctgcccgccagccagagcacccagctgccctgcagcagcagcccccaggagaccacccagagcagacccatgccccccgaggccagaagactgatcgtgaacaagaacgccggcgagaccctgctgcagagagccgccagactgggctacgaggaggtggtgctgtactgcctggagaacaagatctgcgacgtgaaccacagagacaacgccggctactgcgccctgcacgaggcctgcgccagaggctggctgaacatcgtgagacacctgctggagtacggcgccgacgtgaactgcagcgcccaggacggcaccagacccctgcacgacgccgtggagaacgaccacctggagatcgtgagactgctgctgagctacggcgccgaccccaccctggccacctacagcggcagaaccatcatgaagatgacccacagcgagctgatggagaagttcctgaccgactacctgaacgacctgcagggcagaaacgacgacgacgccagcggcacctgggacttctacggcagcagcgtgtgcgagcccgacgacgagagcggctacgacgtgctggccaacccccccggccccgaggaccaggacgacgacgacgacgcctacagcgacgtgttcgagttcgagttcagcgagacccccctgctgccctgctacaacatccaggtgagcgtggcccagggccccagaaactggctgctgctgagcgacgtgctgaagaagctgaagatgagcagcagaatcttcagatgcaacttccccaacgtggagatcgtgaccatcgccgaggccgagttctacagacaggtgagcgccagcctgctgttcagctgcagcaaggacctggaggccttcaaccccgagagcaaggagctgctggacctggtggagttcaccaacgagatccagaccctgctgggcagcagcgtggagtggctgcaccccagcgacctggccagcgacaactactggtag

SEQ ID NO: 74288 - DNA, 5268 bp, synthetic construct
  misc_feature 1..5268: note = Description of Artificial Sequence: Synthetic coding sequence
  source 1..5268: mol_type = other DNA
atgctgagcgccacccccctgtacggcaacgtgcacagctggatgaacagcgagagagtgagaatgtgcggcgccagcgaggacagaaagatcctggtgaacgacggcgacgccagcaaggccagactggagctgagagaggagaaccccctgaaccacaacgtggtggacgccagcaccgcccacagaatcgacggcctggccgccctgagcatggacagaaccggcctgatcagagagggcctgagagtgcccggcaacatcgtgtacagcagcctgtgcggcctgggcagcgagaagggcagagaggccgccaccagcaccctgggcggcctgggcttcagcagcgagagaaaccccgagatgcagttcaagcccaacacccccgagaccgtggaggccagcgccgtgagcggcaagccccccaacggcttcagcgccatctacaagaccccccccggcatccagaagagcgccgtggccaccgccgaggccctgggcctggacagacccgccagcgacaagcagagccccctgaacatcaacggcgccagctacctgagactgccctgggtgaacccctacatggagggcgccacccccgccatctaccccttcctggacagccccaacaagtacagcctgaacatgtacaaggccctgctgccccagcagagctacagcctggcccagcccctgtacagccccgtgtgcaccaacggcgagagattcctgtacctgccccccccccactacgtgggcccccacatccccagcagcctggccagccccatgagactgagcacccccagcgccagccccgccatcccccccctggtgcactgcgccgacaagagcctgccctggaagatgggcgtgagccccggcaaccccgtggacagccacgcctacccccacatccagaacagcaagcagcccagagtgcccagcgccaaggccgtgaccagcggcctgcccggcgacaccgccctgctgctgccccccagccccagacccagccccagagtgcacctgcccacccagcccgccgccgacacctacagcgagttccacaagcactacgccagaatcagcaccagccccagcgtggccctgagcaagccctacatgaccgtgagcagcgagttccccgccgccagactgagcaacggcaagtaccccaaggcccccgagggcggcgagggcgcccagcccgtgcccggccacgccagaaagaccgccgtgcaggacagaaaggacggcagcagcccccccctgctggagaagcagaccgtgaccaaggacgtgaccgacaagcccctggacctgagcagcaaggtggtggacgtggacgccagcaaggccgaccacatgaagaagatggcccccaccgtgctggtgcacagcagagccggcagcggcctggtgctgagcggcagcgagatccccaaggagaccctgagcccccccggcaacggctgcgccatctacagaagcgagatcatcagcaccgcccccagcagctgggtggtgcccggccccagccccaacgaggagaacaacggcaagagcatgagcctgaagaacaaggccctggactgggccatcccccagcagagaagcagcagctgccccagaatgggcggcaccgacgccgtgatcaccaacgtgagcggcagcgtgagcagcgccggcagacccgccagcgccagccccgcccccaacgccaacgccgacggcaccaagaccagcagaagcagcgtggagaccacccccagcgtgatccagcacgtgggccagccccccgccacccccgccaagcacagcagcagcaccagcagcaagggcgccaaggccagcaaccccgagcccagcttcaaggccaacgagaacggcctgccccccagcagcatcttcctgagccccaacgaggccttcagaagcccccccatcccctaccccagaagctacctgccctaccccgcccccgagggcatcgccgtgagccccctgagcctgcacggcaagggccccgtgtacccccaccccgtgctgctgcccaacggcagcctgttccccggccacctggcccccaagcccggcctgccctacggcctgcccaccggcagacccgagttcgtgacctaccaggacgccctgggcctgggcatggtgcaccccatgctgatcccccacacccccatcgagatcaccaaggaggagaagcccgagagaagaagcagaagccacgagagagccagatacgaggaccccaccctgagaaacagattcagcgagatcctggagaccagcagcaccaagctgcaccccgacgtgcccaccgacaagaacctgaagcccaaccccaactggaaccagggcaagaccgtggtgaagagcgacaagctggtgtacgtggacctgctgagagaggagcccgacgccaagaccgacaccaacgtgagcaagcccagcttcgccgccgagagcgtgggccagagcgccgagccccccaagcccagcgtggagcccgccctgcagcagcacagagacttcatcgccctgagagaggagctgggcagaatcagcgacttccacgagacctacaccttcaagcagcccgtgttcaccgtgagcaaggacagcgtgctggccggcaccaacaaggagaacctgggcctgcccgtgagcacccccttcctggagccccccctgggcagcgacggccccgccgtgaccttcggcaagacccaggaggaccccaagcccttctgcgtgggcagcgccccccccagcgtggacgtgacccccacctacaccaaggacggcgccgacgaggccgagagcaacgacggcaaggtgctgaagcccaagcccagcaagctggccaagagaatcgccaacagcgccggctacgtgggcgacagattcaagtgcgtgaccaccgagctgtacgccgacagcagccagctgagcagagagcagagagccctgcagatggagggcctgcaggaggacagcatcctgtgcctgcccgccgcctactgcgagagagccatgatgagattcagcgagctggagatgaaggagagagagggcggccaccccgccaccaaggacagcgagatgtgcaagttcagccccgccgactgggagagactgaagggcaaccaggacaagaagcccaagagcgtgaccctggaggaggccatcgccgagcagaacgagagcgagagatgcgagtacagcgtgggcaacaagcacagagaccccttcgaggcccccgaggacaaggacctgcccgtggagaagtacttcgtggagagacagcccgtgagcgagccccccgccgaccaggtggccagcgacatgccccacagccccaccctgagagtggacagaaagagaaaggtgagcggcgacagcagccacaccgagaccaccgccgaggaggtgcccgaggaccccctgctgaaggccaagagaagaagagtgagcaaggacgactggcccgagagagagatgaccaacagcagcagcaaccacctggaggacccccactacagcgagctgaccaacctgaaggtgtgcatcgagctgaccggcctgcaccccaagaagcagagacacctgctgcacctgagagagagatgggagcagcaggtgagcgccgccgacggcaagcccggcagacagagcagaaaggaggtgacccaggccacccagcccgaggccatcccccagggcaccaacatcaccgaggagaagcccggcagaaagagagccgaggccaagggcaacagaagctggagcgaggagagcctgaagcccagcgacaacgagcagggcctgcccgtgttcagcggcagcccccccatgaagagcctgagcagcaccagcgccggcggcaagaagcaggcccagcccagctgcgcccccgccagcagaccccccgccaagcagcagaagatcaaggagaaccagaagaccgacgtgctgtgcgccgacgaggaggaggactgccaggccgccagcctgctgcagaagtacaccgacaacagcgagaagcccagcggcaagagactgtgcaagaccaagcacctgatcccccaggagagcagaagaggcctgcccctgaccggcgagtactacgtggagaacgccgacggcaaggtgaccgtgagaagattcagaaagagacccgagcccagcagcgactacgacctgagccccgccaagcaggagcccaagcccttcgacagactgcagcagctgctgcccgccagccagagcacccagctgccctgcagcagcagcccccaggagaccacccagagcagacccatgccccccgaggccagaagactgatcgtgaacaagaacgccggcgagaccctgctgcagagagccgccagactgggctacgaggaggtggtgctgtactgcctggagaacaagatctgcgacgtgaaccacagagacaacgccggctactgcgccctgcacgaggcctgcgccagaggctggctgaacatcgtgagacacctgctggagtacggcgccgacgtgaactgcagcgcccaggacggcaccagacccctgcacgacgccgtggagaacgaccacctggagatcgtgagactgctgctgagctacggcgccgaccccaccctggccacctacagcggcagaaccatcatgaagatgacccacagcgagctgatggagaagttcctgaccgactacctgaacgacctgcagggcagaaacgacgacgacgccagcggcacctgggacttctacggcagcagcgtgtgcgagcccgacgacgagagcggctacgacgtgctggccaacccccccggccccgaggaccaggacgacgacgacgacgcctacagcgacgtgttcgagttcgagttcagcgagacccccctgctgccctgctacaacatccaggtgagcgtggcccagggccccagaaactggctgctgctgagcgacgtgctgaagaagctgaagatgagcagcagaatcttcagatgcaacttccccaacgtggagatcgtgaccatcgccgaggccgagttctacagacaggtgagcgccagcctgctgttcagctgcagcaaggacctggaggccttcaaccccgagagcaaggagctgctggacctggtggagttcaccaacgagatccagaccctgctgggcagcagcgtggagtggctgcaccccagcgacctggccagcgacaactactggtag

SEQ ID NO: 74289 - DNA, 5112 bp, synthetic construct
  misc_feature 1..5112: note = Description of Artificial Sequence: Synthetic coding sequence
  source 1..5112: mol_type = other DNA
atgctgagcgccacccccctgtacggcaacgtgcacagctggatgaacagcgagagagtgagaatgtgcggcgccagcgaggacagaaagatcctggtgaacgacggcgacgccagcaaggccagactggagctgagagaggagaaccccctgaaccacaacgtggtggacgccagcaccgcccacagaatcgacggcctggccgccctgagcatggacagaaccggcctgatcagagagggcctgagagtgcccggcaacatcgtgtacagcagcctgtgcggcctgggcagcgagaagggcagagaggccgccaccagcaccctgggcggcctgggcttcagcagcgagagaaaccccgagatgcagttcaagcccaacacccccgagaccgtggaggccagcgccgtgagcggcaagccccccaacggcttcagcgccatctacaagaccccccccggcatccagaagagcgccgtggccaccgccgaggccctgggcctggacagacccgccagcgacaagcagagccccctgaacatcaacggcgccagctacctgagactgccctgggtgaacccctacatggagggcgccacccccgccatctaccccttcctggacagccccaacaagtacagcctgaacatgtacaaggccctgctgccccagcagagctacagcctggcccagcccctgtacagccccgtgtgcaccaacggcgagagattcctgtacctgccccccccccactacgtgggcccccacatccccagcagcctggccagccccatgagactgagcacccccagcgccagccccgccatcccccccctggtgcactgcgccgacaagagcctgccctggaagatgggcgtgagccccggcaaccccgtggacagccacgcctacccccacatccagaacagcaagcagcccagagtgcccagcgccaaggccgtgaccagcggcctgcccggcgacaccgccctgctgctgccccccagccccagacccagccccagagtgcacctgcccacccagcccgccgccgacacctacagcgagttccacaagcactacgccagaatcagcaccagccccagcgtggccctgagcaagccctacatgaccgtgagcagcgagttccccgccgccagactgagcaacggcaagtaccccaaggcccccgagggcggcgagggcgcccagcccgtgcccggccacgccagaaagaccgccgtgcaggacagaaaggacggcagcagcccccccctgctggagaagcagaccgtgaccaaggacgtgaccgacaagcccctggacctgagcagcaaggtggtggacgtggacgccagcaaggccgaccacatgaagaagatggcccccaccgtgctggtgcacagcagagccggcagcggcctggtgctgagcggcagcgagatccccaaggagaccctgagcccccccggcaacggctgcgccatctacagaagcgagatcatcagcaccgcccccagcagctgggtggtgcccggccccagccccaacgaggagaacaacggcaagagcatgagcctgaagaacaaggccctggactgggccatcccccagcagagaagcagcagctgccccagaatgggcggcaccgacgccgtgatcaccaacgtgagcggcagcgtgagcagcgccggcagacccgccagcgccagccccgcccccaacgccaacgccgacggcaccaagaccagcagaagcagcgtggagaccacccccagcgtgatccagcacgtgggccagccccccgccacccccgccaagcacagcagcagcaccagcagcaagggcgccaaggccagcaaccccgagcccagcttcaaggccaacgagaacggcctgccccccagcagcatcttcctgagccccaacgaggccttcagaagcccccccatcccctaccccagaagctacctgccctaccccgcccccgagggcatcgccgtgagccccctgagcctgcacggcaagggccccgtgtacccccaccccgtgctgctgcccaacggcagcctgttccccggccacctggcccccaagcccggcctgccctacggcctgcccaccggcagacccgagttcgtgacctaccaggacgccctgggcctgggcatggtgcaccccatgctgatcccccacacccccatcgagatcaccaaggaggagaagcccgagagaagaagcagaagccacgagagagccagatacgaggaccccaccctgagaaacagattcagcgagatcctggagaccagcagcaccaagctgcaccccgacgtgcccaccgacaagaacctgaagcccaaccccaactggaaccagggcaagaccgtggtgaagagcgacaagctggtgtacgtggacctgctgagagaggagcccgacgccaagaccgacaccaacgtgagcaagcccagcttcgccgccgagagcgtgggccagagcgccgagccccccaagcccagcgtggagcccgccctgcagcagcacagagacttcatcgccctgagagaggagctgggcagaatcagcgacttccacgagacctacaccttcaagcagcccgtgttcaccgtgagcaaggacagcgtgctggccggcaccaacaaggagaacctgggcctgcccgtgagcacccccttcctggagccccccctgggcagcgacggccccgccgtgaccttcggcaagacccaggaggaccccaagcccttctgcgtgggcagcgccccccccagcgtggacgtgacccccacctacaccaaggacggcgccgacgaggccgagagcaacgacggcaaggtgctgaagcccaagcccagcaagctggccaagagaatcgccaacagcgccggctacgtgggcgacagattcaagtgcgtgaccaccgagctgtacgccgacagcagccagctgagcagagagcagagagccctgcagagagccatgatgagattcagcgagctggagatgaaggagagagagggcggccaccccgccaccaaggacagcgagatgtgcaagttcagccccgccgactgggagagactgaagggcaaccaggacaagaagcccaagagcgtgaccctggaggaggccatcgccgagcagaacgagagcgagagatgcgagtacagcgtgggcaacaagcacagagaccccttcgaggcccccgaggacaaggacctgcccgtggagaagtacttcgtggagagacagcccgtgagcgagccccccgccgaccaggtggccagcgacatgccccacagccccaccctgagagtggacagaaagagaaaggtgagcggcgacagcagccacaccgagaccaccgccgaggaggtgcccgaggaccccctgctgaaggccaagagaagaagagtgagcaagggcctgcaccccaagaagcagagacacctgctgcacctgagagagagatgggagcagcaggtgagcgccgccgacggcaagcccggcagacagagcagaaaggaggtgacccaggccacccagcccgaggccatcccccagggcaccaacatcaccgaggagaagcccggcagaaagagagccgaggccaagggcaacagaagctggagcgaggagagcctgaagcccagcgacaacgagcagggcctgcccgtgttcagcggcagcccccccatgaagagcctgagcagcaccagcgccggcggcaagaagcaggcccagcccagctgcgcccccgccagcagaccccccgccaagcagcagaagatcaaggagaaccagaagaccgacgtgctgtgcgccgacgaggaggaggactgccaggccgccagcctgctgcagaagtacaccgacaacagcgagaagcccagcggcaagagactgtgcaagaccaagcacctgatcccccaggagagcagaagaggcctgcccctgaccggcgagtactacgtggagaacgccgacggcaaggtgaccgtgagaagattcagaaagagacccgagcccagcagcgactacgacctgagccccgccaagcaggagcccaagcccttcgacagactgcagcagctgctgcccgccagccagagcacccagctgccctgcagcagcagcccccaggagaccacccagagcagacccatgccccccgaggccagaagactgatcgtgaacaagaacgccggcgagaccctgctgcagagagccgccagactgggctacgaggaggtggtgctgtactgcctggagaacaagatctgcgacgtgaaccacagagacaacgccggctactgcgccctgcacgaggcctgcgccagaggctggctgaacatcgtgagacacctgctggagtacggcgccgacgtgaactgcagcgcccaggacggcaccagacccctgcacgacgccgtggagaacgaccacctggagatcgtgagactgctgctgagctacggcgccgaccccaccctggccacctacagcggcagaaccatcatgaagatgacccacagcgagctgatggagaagttcctgaccgactacctgaacgacctgcagggcagaaacgacgacgacgccagcggcacctgggacttctacggcagcagcgtgtgcgagcccgacgacgagagcggctacgacgtgctggccaacccccccggccccgaggaccaggacgacgacgacgacgcctacagcgacgtgttcgagttcgagttcagcgagacccccctgctgccctgctacaacatccaggtgagcgtggcccagggccccagaaactggctgctgctgagcgacgtgctgaagaagctgaagatgagcagcagaatcttcagatgcaacttccccaacgtggagatcgtgaccatcgccgaggccgagttctacagacaggtgagcgccagcctgctgttcagctgcagcaaggacctggaggccttcaaccccgagagcaaggagctgctggacctggtggagttcaccaacgagatccagaccctgctgggcagcagcgtggagtggctgcaccccagcgacctggccagcgacaactactggtag

SEQ ID NO: 74290 - DNA, 1869 bp, synthetic construct
  misc_feature 1..1869: note = Description of Artificial Sequence: Synthetic coding sequence
  source 1..1869: mol_type = other DNA
atgccccacagccccaccctgagagtggacagaaagagaaaggtgagcggcgacagcagccacaccgagaccaccgccgaggaggtgcccgaggaccccctgctgaaggccaagagaagaagagtgagcaagggcctgcaccccaagaagcagagacacctgctgcacctgagagagagatgggagcagcaggtgagcgccgccgacggcaagcccggcagacagagcagaaaggaggtgacccaggccacccagcccgaggccatcccccagggcaccaacatcaccgaggagaagcccggcagaaagagagccgaggccaagggcaacagaagctggagcgaggagagcctgaagcccagcgacaacgagcagggcctgcccgtgttcagcggcagcccccccatgaagagcctgagcagcaccagcgccggcggcaagaagcaggcccagcccagctgcgcccccgccagcagaccccccgccaagcagcagaagatcaaggagaaccagaagaccgacgtgctgtgcgccgacgaggaggaggactgccaggccgccagcctgctgcagaagtacaccgacaacagcgagaagcccagcggcaagagactgtgcaagaccaagcacctgatcccccaggagagcagaagaggcctgcccctgaccggcgagtactacgtggagaacgccgacggcaaggtgaccgtgagaagattcagaaagagacccgagcccagcagcgactacgacctgagccccgccaagcaggagcccaagcccttcgacagactgcagcagctgctgcccgccagccagagcacccagctgccctgcagcagcagcccccaggagaccacccagagcagacccatgccccccgaggccagaagactgatcgtgaacaagaacgccggcgagaccctgctgcagagagccgccagactgggctacgaggaggtggtgctgtactgcctggagaacaagatctgcgacgtgaaccacagagacaacgccggctactgcgccctgcacgaggcctgcgccagaggctggctgaacatcgtgagacacctgctggagtacggcgccgacgtgaactgcagcgcccaggacggcaccagacccctgcacgacgccgtggagaacgaccacctggagatcgtgagactgctgctgagctacggcgccgaccccaccctggccacctacagcggcagaaccatcatgaagatgacccacagcgagctgatggagaagttcctgaccgactacctgaacgacctgcagggcagaaacgacgacgacgccagcggcacctgggacttctacggcagcagcgtgtgcgagcccgacgacgagagcggctacgacgtgctggccaacccccccggccccgaggaccaggacgacgacgacgacgcctacagcgacgtgttcgagttcgagttcagcgagacccccctgctgccctgctacaacatccaggtgagcgtggcccagggccccagaaactggctgctgctgagcgacgtgctgaagaagctgaagatgagcagcagaatcttcagatgcaacttccccaacgtggagatcgtgaccatcgccgaggccgagttctacagacaggtgagcgccagcctgctgttcagctgcagcaaggacctggaggccttcaaccccgagagcaaggagctgctggacctggtggagttcaccaacgagatccagaccctgctgggcagcagcgtggagtggctgcaccccagcgacctggccagcgacaactactggaagagcccccagatcgccagaggcagcgtggagggcaagaagaccgacgacaagaccagcaagaccgacctgtag

SEQ ID NO: 74291 - DNA, 5166 bp, synthetic construct; identical to SEQ ID NO: 74287
  misc_feature 1..5166: note = Description of Artificial Sequence: Synthetic coding sequence
  source 1..5166: mol_type = other DNA

SEQ ID NO: 74292 - DNA, 87 bp, synthetic construct
  misc_feature 1..87: note = Description of Artificial Sequence: Synthetic coding sequence
  source 1..87: mol_type = other DNA
atgctgagcgccacccccctgtacggcaacgtgcacagctggatgaacagcgagagagtgagaatgtgcggcgccagcgaggactag

SEQ ID NO: 74293 - DNA, 1236 bp, synthetic construct
  misc_feature 1..1236: note = Description of Artificial Sequence: Synthetic coding sequence
  source 1..1236: mol_type = other DNA
atgaccagacccgccttccagccccccgccacccccgccaagcacagcagcagcaccagcagcaagggcgccaaggccagcaaccccgagcccagcttcaaggccaacgagaacggcctgccccccagcagcatcttcctgagccccaacgaggccttcagaagcccccccatcccctaccccagaagctacctgccctaccccgcccccgagggcatcgccgtgagccccctgagcctgcacggcaagggccccgtgtacccccaccccgtgctgctgcccaacggcagcctgttccccggccacctggcccccaagcccggcctgccctacggcctgcccaccggcagacccgagttcgtgacctaccaggacgccctgggcctgggcatggtgcaccccatgctgatcccccacacccccatcgagatcaccaaggaggagaagcccgagagaagaagcagaagccacgagagagccagatacgaggaccccaccctgagaaacagattcagcgagatcctggagaccagcagcaccaagctgcaccccgacgtgcccaccgacaagaacctgaagcccaaccccaactggaaccagggcaagaccgtggtgaagagcgacaagctggtgtacgtggacctgctgagagaggagcccgacgccaagaccgacaccaacgtgagcaagcccagcttcgccgccgagagcgtgggccagagcgccgagccccccaagcccagcgtggagcccgccctgcagcagcacagagacttcatcgccctgagagaggagctgggcagaatcagcgacttccacgagacctacaccttcaagcagcccgtgttcaccgtgagcaaggacagcgtgctggccggcaccaacaaggagaacctgggcctgcccgtgagcacccccttcctggagccccccctgggcagcgacggccccgccgtgaccttcggcaagacccaggaggaccccaagcccttctgcgtgggcagcgccccccccagcgtggacgtgacccccacctacaccaaggacggcgccgacgaggccgagagcaacgacggcaaggtgctgaagcccaagcccagcaagctggccaagagaatcgccaacagcgccggctacgtgggcgacagattcaagtgcgtgaccaccgagctgtacgccgacagcagccagctgagcagagagcagagagccctgcaggtgagcccccccacctag

SEQ ID NO: 74294 - DNA, 2238 bp, synthetic construct
  misc_feature 1..2238: note = Description of Artificial Sequence: Synthetic coding sequence
  source 1..2238: mol_type = other DNA
atgcccgtgctgagcagacccagaccctggagaggcaacaccctgaagagaaccgccgtgctgctggccctggccgcctacggcgcccacaaggtgtaccccctggtgagacagtgcctggcccccgccagaggcctgcaggcccccgccggcgagcccacccaggaggccagcggcgtggccgccgccaaggccggcatgaacagagtgttcctgcagagactgctgtggctgctgagactgctgttccccagagtgctgtgcagagagaccggcctgctggccctgcacagcgccgccctggtgagcagaaccttcctgagcgtgtacgtggccagactggacggcagactggccagatgcatcgtgagaaaggaccccagagccttcggctggcagctgctgcagtggctgctgatcgccctgcccgccaccttcgtgaacagcgccatcagatacctggagggccagctggccctgagcttcagaagcagactggtggcccacgcctacagactgtacttcagccagcagacctactacagagtgagcaacatggacggcagactgagaaaccccgaccagagcctgaccgaggacgtggtggccttcgccgccagcgtggcccacctgtacagcaacctgaccaagcccctgctggacgtggccgtgaccagctacaccctgctgagagccgccagaagcagaggcgccggcaccgcctggcccagcgccatcgccggcctggtggtgttcctgaccgccaacgtgctgagagccttcagccccaagttcggcgagctggtggccgaggaggccagaagaaagggcgagctgagatacatgcacagcagagtggtggccaacagcgaggagatcgccttctacggcggccacgaggtggagctggccctgctgcagagaagctaccaggacctggccagccagatcaacctgatcctgctggagagactgtggtacgtgatgctggagcagttcctgatgaagtacgtgtggagcgccagcggcctgctgatggtggccgtgcccatcatcaccgccaccggctacagcgagagcgacgccgaggccgtgaagaaggccgccctggagaagaaggaggaggagctggtgagcgagagaaccgaggccttcaccatcgccagaaacctgctgaccgccgccgccgacgccatcgagagaatcatgagcagctacaaggaggtgaccgagctggccggctacaccgccagagtgcacgagatgttccaggtgttcgaggacgtgcagagatgccacttcaagagacccagagagctggaggacgcccaggccggcagcggcaccatcggcagaagcggcgtgagagtggagggccccctgaagatcagaggccaggtggtggacgtggagcagggcatcatctgcgagaacatccccatcgtgacccccagcggcgaggtggtggtggccagcctgaacatcagagtggaggagggcatgcacctgctgatcaccggccccaacggctgcggcaagagcagcctgttcagaatcctgggcggcctgtggcccacctacggcggcgtgctgtacaagccccccccccagagaatgttctacatcccccagagaccctacatgagcgtgggcagcctgagagaccaggtgatctaccccgacagcgtggaggacatgcagagaaagggctacagcgagcaggacctggaggccatcctggacgtggtgcacctgcaccacatcctgcagagagagggcggctgggaggccatgtgcgactggaaggacgtgctgagcggcggcgagaagcagagaatcggcatggccagaatgttctaccacagacccaagtacgccctgctggacgagtgcaccagcgccgtgagcatcgacgtggagggcaagatcttccaggccgccaaggacgccggcatcgccctgctgagcatcacccacagacccagcctgtggaagtaccacacccacctgctgcagttcgacggcgagggcggctggaagttcgagaagctggacagcgccgccagactgagcctgaccgaggagaagcagagactggagcagcagctggccggcatccccaagatgcagagaagactgcaggagctgtgccagatcctgggcgaggccgtggcccccgcccacgtgcccgcccccagcccccagggccccggcggcctgcagggcgccagcacctag

SEQ ID NO: 74295 - DNA, 5358 bp, synthetic construct
  misc_feature 1..5358: note = Description of Artificial Sequence: Synthetic coding sequence
  source 1..5358: mol_type = other DNA
atgatcagcaccgcccccctgtacagcggcgtgcacaactggaccagcagcgacagaatcagaatgtgcggcatcaacgaggagagaagagcccccctgagcgacgaggagagcaccaccggcgactgccagcacttcggcagccaggagttctgcgtgagcagcagcttcagcaaggtggagctgaccgccgtgggcagcggcagcaacgccagaggcgccgaccccgacggcagcgccaccgagaagctgggccacaagagcgaggacaagcccgacgacccccagcccaagatggactacgccggcaacgtggccgaggccgagggcttcctggtgcccctgagcagccccggcgacggcctgaagctgcccgccagcgacagcgccgaggccagcaacagcagagccgactgcagctggacccccctgaacacccagatgagcaagcaggtggactgcagccccgccggcgtgaaggccctggacagcagacagggcgtgggcgagaagaacaccttcatcctggccaccctgggcaccggcgtgcccgtggagggcaccctgcccctggtgaccaccaacttcagccccctgcccgcccccatctgcccccccgcccccggcagcgccagcgtgccccacagcgtgcccgacgccttccaggtgcccctgagcgtgcccgcccccgtgccccacagcggcctggtgcccgtgcaggtggccaccagcgtgcccgcccccagcccccccctggcccccgtgcccgccctggcccccgccccccccagcgtgcccaccctgatcagcgacagcaaccccctgagcgtgagcgccagcgtgctggtgcccgtgcccgccagcgccccccccagcggccccgtgcccctgagcgcccccgcccccgcccccctgagcgtgcccgtgagcgccccccccctggccctgatccaggcccccgtgccccccagcgcccccaccctggtgctggcccccgtgcccacccccgtgctggcccccatgcccgccagcaccccccccgccgcccccgccccccccagcgtgcccatgcccacccccacccccagcagcggcccccccagcacccccaccctgatccccgccttcgcccccacccccgtgcccgcccccacccccgcccccatcttcacccccgcccccacccccatgcccgccgccacccccgccgccatccccaccagcgcccccatccccgccagcttcagcctgagcagagtgtgcttccccgccgcccaggcccccgccatgcagaaggtgcccctgagcttccagcccggcaccgtgctgacccccagccagcccctggtgtacatccccccccccagctgcggccagcccctgagcgtggccaccctgcccaccaccctgggcgtgagcagcaccctgaccctgcccgtgctgcccagctacctgcaggacagatgcctgcccggcgtgctggccagccccgagctgagaagctacccctacgccttcagcgtggccagacccctgaccagcgacagcaagctggtgagcctggaggtgaacagactgccctgcaccagccccagcggcagcaccaccacccagcccgcccccgacggcgtgcccggccccctggccgacaccagcctggtgaccgccagcgccaaggtgctgcccaccccccagcccctgctgcccgcccccagcggcagcagcgcccccccccaccccgccaagatgcccagcggcaccgagcagcagaccgagggcaccagcgtgaccttcagccccctgaagagccccccccagctggagagagagatggccagcccccccgagtgcagcgagatgcccctggacctgagcagcaagagcaacagacagaagctgcccctgcccaaccagagaaagaccccccccatgcccgtgctgacccccgtgcacaccagcagcaaggccctgctgagcaccgtgctgagcagaagccagagaaccacccaggccgccggcggcaacgtgaccagctgcctgggcagcaccagcagccccttcgtgatcttccccgagatcgtgagaaacggcgaccccagcacctgggtgaagaacagcaccgccctgatcagcaccatccccggcacctacgtgggcgtggccaaccccgtgcccgccagcctgctgctgaacaaggaccccaacctgggcctgaacagagaccccagacacctgcccaagcaggagcccatcagcatcatcgaccagggcgagcccaagggcaccggcgccacctgcggcaagaagggcagccaggccggcgccgagggccagcccagcaccgtgaagagatacacccccgccagaatcgcccccggcctgcccggctgccagaccaaggagctgagcctgtggaagcccaccggccccgccaacatctaccccagatgcagcgtgaacggcaagcccaccagcacccaggtgctgcccgtgggctggagcccctaccaccaggccagcctgctgagcatcggcatcagcagcgccggccagctgacccccagccagggcgcccccatcagacccaccagcgtggtgagcgagttcagcggcgtgcccagcctgagcagcagcgaggccgtgcacggcctgcccgagggccagcccagacccggcggcagcttcgtgcccgagcaggaccccgtgaccaagaacaagacctgcagaatcgccgccaagccctacgaggagcaggtgaaccccgtgctgctgaccctgagcccccagaccggcaccctggccctgagcgtgcagcccagcggcggcgacatcagaatgaaccagggccccgaggagagcgagagccacctgtgcagcgacagcacccccaagatggagggcccccagggcgcctgcggcctgaagctggccggcgacaccaagcccaagaaccaggtgctggccacctacatgagccacgagctggtgctggccaccccccagaacctgcccaagatgcccgagctgcccctgctgccccacgacagccaccccaaggagctgatcctggacgtggtgcccagcagcagaagaggcagcagcaccgagagaccccagctgggcagccaggtggacctgggcagagtgaagatggagaaggtggacggcgacgtggtgttcaacctggccacctgcttcagagccgacggcctgcccgtggccccccagagaggccaggccgaggtgagagccaaggccggccaggccagagtgaagcaggagagcgtgggcgtgttcgcctgcaagaacaagtggcagcccgacgacgtgaccgagagcctgccccccaagaagatgaagtgcggcaaggagaaggacagcgaggagcagcagctgcagccccaggccaaggccgtggtgagaagcagccacagacccaagtgcagaaagctgcccagcgacccccaggagagcaccaagaagagccccagaggcgccagcgacagcggcaaggagcacaacggcgtgagaggcaagcacaagcacagaaagcccaccaagcccgagagccagagccccggcaagagagccgacagccacgaggagggcagcctggagaagaaggccaagagcagcttcagagacttcatccccgtggtgctgagcaccagaaccagaagccagagcggcagcatctgcagcagcttcgccggcatggccgacagcgacatgggcagccaggaggtgttccccaccgaggaggaggaggaggtgacccccacccccgccaagagaagaaaggtgagaaagacccagagagacacccagtacagaagccaccacgcccaggacaagagcctgctgagccagggcagaagacacctgtggagagccagagagatgccctggagaaccgaggccgccagacagatgtgggacaccaacgaggaggaggaggaggaggaggaggagggcctgctgaagagaaagaagagaagaagacagaagagcagaaagtaccagaccggcgagtacctgaccgagcaggaggacgagcagagaagaaagggcagagccgacctgaaggccagaaagcagaagaccagcagcagccagagcctggagcacagactgagaaacagaaacctgctgctgcccaacaaggtgcagggcatcagcgacagccccaacggcttcctgcccaacaacctggaggagcccgcctgcctggagaacagcgagaagcccagcggcaagagaaagtgcaagaccaagcacatggccaccgtgagcgaggaggccaagggcaagggcagatggagccagcagaagaccagaagccccaagagccccacccccgtgaagcccaccgagccctgcacccccagcaagagcagaagcgccagcagcgaggaggccagcgagagccccaccgccagacagatcccccccgaggccagaagactgatcgtgaacaagaacgccggcgagaccctgctgcagagagccgccagactgggctacaaggacgtggtgctgtactgcctgcagaaggacagcgaggacgtgaaccacagagacaacgccggctacaccgccctgcacgaggcctgcagcagaggctggaccgacatcctgaacatcctgctggagcacggcgccaacgtgaactgcagcgcccaggacggcaccagacccgtgcacgacgccgtggtgaacgacaacctggagaccatctggctgctgctgagctacggcgccgaccccaccctggccacctacagcggccagaccgccatgaagctggccagcagcgacaccatgaagagattcctgagcgaccacctgagcgacctgcagggcagagccgagggcgaccccggcgtgagctgggacttctacagcagcagcgtgctggaggagaaggacggcttcgcctgcgacctgctgcacaacccccccggcagcagcgaccaggagggcgacgaccccatggaggaggacgacttcatgttcgagctgagcgacaagcccctgctgccctgctacaacctgcaggtgagcgtgagcagaggcccctgcaactggttcctgttcagcgacgtgctgaagagactgaagctgagcagcagaatcttccaggccagattcccccacttcgagatcaccaccatgcccaaggccgagttctacagacaggtggccagcagccagctgctgacccccgccgagagacccggcggcctggacgacagaagcccccccggcagcagcgagaccgtggagctggtgagatacgagcccgacctgctgagactgctgggcagcgaggtggagttccagagctgcaacagctag

SEQ ID NO: 74296 - DNA, 4746 bp, synthetic construct
  misc_feature 1..4746: note = Description of Artificial Sequence: Synthetic coding sequence
  source 1..4746: mol_type = other DNA
atgatcagcaccgcccccctgtacagcggcgtgcacaactggaccagcagcgacagaatcagaatgtgcggcatcaacgaggagagaagagcccccctgagcgacgaggagagcaccaccggcgactgccagcacttcggcagccaggagttctgcgtgagcagcagcttcagcaaggtggagctgaccgccgtgggcagcggcagcaacgccagaggcgccgaccccgacggcagcgccaccgagaagctgggccacaagagcgaggacaagcccgacgacccccagcccaagatggactacgccggcaacgtggccgaggccgagggcttcctggtgcccctgagcagccccggcgacggcctgaagctgcccgccagcgacagcgccgaggccagcaacagcagagccgactgcagctggacccccctgaacacccagatgagcaagcaggtggactgcagccccgccggcgtgaaggccctggacagcagacagggcgtgggcgagaagaacaccttcatcctggccaccctgggcaccggcgtgcccgtggagggcaccctgcccctggtgaccaccaacttcagccccctgcccgcccccatctgcccccccgcccccggcagcgccagcgtgccccacagcgtgcccgacgccttccaggtgcccctgagcgtgcccgcccccgtgccccacagcggcctggtgcccgtgcaggtggccaccagcgtgcccgcccccagcccccccctggcccccgtgcccgccctggcccccgccccccccagcgtgcccaccctgatcagcgacagcaaccccctgagcgtgagcgccagcgtgctggtgcccgtgcccgccagcgccccccccagcggccccgtgcccctgagcgcccccgcccccgcccccctgagcgtgcccgtgagcgccccccccctggccctgatccaggcccccgtgccccccagcgcccccaccctggtgctggcccccgtgcccacccccgtgctggcccccatgcccgccagcaccccccccgccgcccccgccccccccagcgtgcccatgcccacccccacccccagcagcggcccccccagcacccccaccctgatccccgccttcgcccccacccccgtgcccgcccccacccccgcccccatcttcacccccgcccccacccccatgcccgccgccacccccgccgccatccccaccagcgcccccatccccgccagcttcagcctgagcagagtgtgcttccccgccgcccaggcccccgccatgcagaaggtgcccctgagcttccagcccggcaccgtgctgacccccagccagcccctggtgtacatccccccccccagctgcggccagcccctgagcgtggccaccctgcccaccaccctgggcgtgagcagcaccctgaccctgcccgtgctgcccagctacctgcaggacagatgcctgcccggcgtgctggccagccccgagctgagaagctacccctacgccttcagcgtggccagacccctgaccagcgacagcaagctggtgagcctggaggtgaacagactgccctgcaccagccccagcggcagcaccaccacccagcccgcccccgacggcgtgcccggccccctggccgacaccagcctggtgaccgccagcgccaaggtgctgcccaccccccagcccctgctgcccgcccccagcggcagcagcgcccccccccaccccgccaagatgcccagcggcaccgagcagcagaccgagggcaccagcgtgaccttcagccccctgaagagccccccccagctggagagagagatggccagcccccccgagtgcagcgagatgcccctggacctgagcagcaagagcaacagacagaagctgcccctgcccaaccagagaaagaccccccccatgcccgtgctgacccccgtgcacaccagcagcaaggccctgctgagcaccgtgctgagcagaagccagagaaccacccaggccgccggcggcaacgtgaccagctgcctgggcagcaccagcagccccttcgtgatcttccccgagatcgtgagaaacggcgaccccagcacctgggtgaagaacagcaccgccctgatcagcaccatccccggcacctacgtgggcgtggccaaccccgtgcccgccagcctgctgctgaacaaggaccccaacctgggcctgaacagagaccccagacacctgcccaagcaggagcccatcagcatcatcgaccagggcgagcccaagggcaccggcgccacctgcggcaagaagggcagccaggccggcgccgagggccagcccagcaccgtgaagagatacacccccgccagaatcgcccccggcctgcccggctgccagaccaaggagctgagcctgtggaagcccaccggccccgccaacatctaccccagatgcagcgtgaacggcaagcccaccagcacccaggtgctgcccgtgggctggagcccctaccaccaggccagcctgctgagcatcggcatcagcagcgccggccagctgacccccagccagggcgcccccatcagacccaccagcgtggtgagcgagttcagcggcgtgcccagcctgagcagcagcgaggccgtgcacggcctgcccgagggccagcccagacccggcggcagcttcgtgcccgagcaggaccccgtgaccaagaacaagacctgcagaatcgccgccaagccctacgaggagcaggtgaaccccgtgctgctgaccctgagcccccagaccggcaccctggccctgagcgtgcagcccagcggcggcgacatcagaatgaaccagggccccgaggagagcgagagccacctgtgcagcgacagcacccccaagatggagggcccccagggcgcctgcggcctgaagctggccggcgacaccaagcccaagaaccaggtgctggccacctacatgagccacgagctggtgctggccaccccccagaacctgcccaagatgcccgagctgcccctgctgccccacgacagccaccccaaggagctgatcctggacgtggtgcccagcagcagaagaggcagcagcaccgagagaccccagctgggcagccaggtggacctgggcagagtgaagatggagaaggtggacggcgacgtggtgttcaacctggccacctgcttcagagccgacggcctgcccgtggccccccagagaggccaggccgaggtgagagccaaggccggccaggccagagtgaagcaggagagcgtgggcgtgttcgcctgcaagaacaagtggcagcccgacgacgtgaccgagagcctgccccccaagaagatgaagtgcggcaaggagaaggacagcgaggagcagcagctgcagccccaggccaaggccgtggtgagaagcagccacagacccaagtgcagaaagctgcccagcgacccccaggagagcaccaagaagagccccagaggcgccagcgacagcggcaaggagcacaacggcgtgagaggcaagcacaagcacagaaagcccaccaagcccgagagccagagccccggcaagagagccgacagccacgaggagggcagcctggagaagaaggccaagagcagcttcagagacttcatccccgtggtgctgagcaccagaaccagaagccagagcgacctgaaggccagaaagcagaagaccagcagcagccagagcctggagcacagactgagaaacagaaacctgctgctgcccaacaaggtgcagggcatcagcgacagccccaacggcttcctgcccaacaacctggaggagcccgcctgcctggagaacagcgagaagcccagcggcaagagaaagtgcaagaccaagcacatggccaccgtgagcgaggaggccaaggacgtggtgctgtactgcctgcagaaggacagcgaggacgtgaaccacagagacaacgccggctacaccgccctgcacgaggcctgcagcagaggctggaccgacatcctgaacatcctgctggagcacggcgccaacgtgaactgcagcgcccaggacggcaccagacccgtgcacgacgccgtggtgaacgacaacctggagaccatctggctgctgctgagctacggcgccgaccccaccctggccacctacagcggccagaccgccatgaagctggccagcagcgacaccatgaagagattcctgagcgaccacctgagcgacctgcagggcagagccgagggcgaccccggcgtgagctgggacttctacagcagcagcgtgctggaggagaaggacggcttcgcctgcgacctgctgcacaacccccccggcagcagcgaccaggagggcgacgaccccatggaggaggacgacttcatgttcgagctgagcgacaagcccctgctgccctgctacaacctgcaggtgagcgtgagcagaggcccctgcaactggttcctgttcagcgacgtgctgaagagactgaagctgagcagcagaatcttccaggccagattcccccacttcgagatcaccaccatgcccaaggccgagttctacagacaggtggccagcagccagctgctgacccccgccgagagacccggcggcctggacgacagaagcccccccggcagcagcgagaccgtggagctggtgagatacgagcccgacctgctgagactgctgggcagcgaggtggagttccagagctgcaacagctag

SEQ ID NO: 74297 - DNA, 2226 bp, synthetic construct
  misc_feature 1..2226: note = Description of Artificial Sequence: Synthetic coding sequence
  source 1..2226: mol_type = other DNA
tgacccctgctgcccgcccccagcggcagcagcgcccccccccaccccgccaagatgcccagcggcaccgagcagcagaccgagggcaccagcgtgaccttcagccccctgaagagccccccccagctggagagagagatggccagcccccccgagtgcagcgagatgcccctggacctgagcagcaagagcaacagacagaagctgcccctgcccaaccagagaaagaccccccccatgcccgtgctgacccccgtgcacaccagcagcaaggccctgctgagcaccgtgctgagcagaagccagagaaccacccaggccgccggcggcaacgtgaccagctgcctgggcagcaccagcagccccttcgtgatcttccccgagatcgtgagaaacggcgaccccagcacctgggtgaagaacagcaccgccctgatcagcaccatccccggcacctacgtgggcgtggccaaccccgtgcccgccagcctgctgctgaacaaggaccccaacctgggcctgaacagagaccccagacacctgcccaagcaggagcccatcagcatcatcgaccagggcgagcccaagggcaccggcgccacctgcggcaagaagggcagccaggccggcgccgagggccagcccagcaccgtgaagagatacacccccgccagaatcgcccccggcctgcccggctgccagaccaaggagctgagcctgtggaagcccaccggccccgccaacatctaccccagatgcagcgtgaacggcaagcccaccagcacccaggtgctgcccgtgggctggagcccctaccaccaggccagcctgctgagcatcggcatcagcagcgccggccagctgacccccagccagggcgcccccatcagacccaccagcgtggtgagcgagttcagcggcgtgcccagcctgagcagcagcgaggccgtgcacggcctgcccgagggccagcccagacccggcggcagcttcgtgcccgagcaggaccccgtgaccaagaacaagacctgcagaatcgccgccaagccctacgaggagcaggtgaaccccgtgctgctgaccctgagcccccagaccggcaccctggccctgagcgtgcagcccagcggcggcgacatcagaatgaaccagggccccgaggagagcgagagccacctgtgcagcgacagcacccccaagatggagggcccccagggcgcctgcggcctgaagctggccggcgacaccaagcccaagaaccaggtgctggccacctacatgagccacgagctggtgctggccaccccccagaacctgcccaagatgcccgagctgcccctgctgccccacgacagccaccccaaggagctgatcctggacgtggtgcccagcagcagaagaggcagcagcaccgagagaccccagctgggcagccaggtggacctgggcagagtgaagatggagaaggtggacggcgacgtggtgttcaacctggccacctgcttcagagccgacggcctgcccgtggccccccagagaggccaggccgaggtgagagccaaggccggccaggccagagtgaagcaggagagcgtgggcgtgttcgcctgcaagaacaagtggcagcccgacgacgtgaccgagagcctgccccccaagaagatgaagtgcggcaaggagaaggacagcgaggagcagcagctgcagccccaggccaaggccgtggtgagaagcagccacagacccaagtgcagaaagctgcccagcgacccccaggagagcaccaagaagagccccagaggcgccagcgacagcggcaaggagcacaacggcgtgagaggcaagcacaagcacagaaagcccaccaagcccgagagccagagccccggcaagagagccgacagccacgaggagggcagcctggagaagaaggccaagagcagcttcagagacttcatccccgtggtgctgagcaccagaaccagaagccagagcgacctgaaggccagaaagcagaagaccagcagcagccagagcctggagcacagactgagaaacagaaacctgctgctgcccaacaaggtgcagggcatcagcgacagccccaacggcttcctgcccaacaacctggaggagcccgcctgcctggagaacagcgagaagcccagcggcaagagaaagtgcaagaccaagcacatggccaccgtgagcgaggaggccaagtag

SEQ ID NO: 74298 - DNA, 4158 bp, synthetic construct
  misc_feature 1..4158: note = Description of Artificial Sequence: Synthetic coding sequence
  source 1..4158: mol_type = other DNA
acccccgccgccatccccaccagcgcccccatccccgccagcttcagcctgagcagagtgtgcttccccgccgcccaggcccccgccatgcagaaggtgcccctgagcttccagcccggcaccgtgctgacccccagccagcccctggtgtacatccccccccccagctgcggccagcccctgagcgtggccaccctgcccaccaccctgggcgtgagcagcaccctgaccctgcccgtgctgcccagctacctgcaggacagatgcctgcccggcgtgctggccagccccgagctgagaagctacccctacgccttcagcgtggccagacccctgaccagcgacagcaagctggtgagcctggaggtgaacagactgccctgcaccagccccagcggcagcaccaccacccagcccgcccccgacggcgtgcccggccccctggccgacaccagcctggtgaccgccagcgccaaggtgctgcccaccccccagcccctgctgcccgcccccagcggcagcagcgcccccccccaccccgccaagatgcccagcggcaccgagcagcagaccgagggcaccagcgtgaccttcagccccctgaagagccccccccagctggagagagagatggccagcccccccgagtgcagcgagatgcccctggacctgagcagcaagagcaacagacagaagctgcccctgcccaaccagagaaagaccccccccatgcccgtgctgacccccgtgcacaccagcagcaaggccctgctgagcaccgtgctgagcagaagccagagaaccacccaggccgccggcggcaacgtgaccagctgcctgggcagcaccagcagccccttcgtgatcttccccgagatcgtgagaaacggcgaccccagcacctgggtgaagaacagcaccgccctgatcagcaccatccccggcacctacgtgggcgtggccaaccccgtgcccgccagcctgctgctgaacaaggaccccaacctgggcctgaacagagaccccagacacctgcccaagcaggagcccatcagcatcatcgaccagggcgagcccaagggcaccggcgccacctgcggcaagaagggcagccaggccggcgccgagggccagcccagcaccgtgaagagatacacccccgccagaatcgcccccggcctgcccggctgccagaccaaggagctgagcctgtggaagcccaccggccccgccaacatctaccccagatgcagcgtgaacggcaagcccaccagcacccaggtgctgcccgtgggctggagcccctaccaccaggccagcctgctgagcatcggcatcagcagcgccggccagctgacccccagccagggcgcccccatcagacccaccagcgtggtgagcgagttcagcggcgtgcccagcctgagcagcagcgaggccgtgcacggcctgcccgagggccagcccagacccggcggcagcttcgtgcccgagcaggaccccgtgaccaagaacaagacctgcagaatcgccgccaagccctacgaggagcaggtgaaccccgtgctgctgaccctgagcccccagaccggcaccctggccctgagcgtgcagcccagcggcggcgacatcagaatgaaccagggccccgaggagagcgagagccacctgtgcagcgacagcacccccaagatggagggcccccagggcgcctgcggcctgaagctggccggcgacaccaagcccaagaaccaggtgctggccacctacatgagccacgagctggtgctggccaccccccagaacctgcccaagatgcccgagctgcccctgctgccccacgacagccaccccaaggagctgatcctggacgtggtgcccagcagcagaagaggcagcagcaccgagagaccccagctgggcagccaggtggacctgggcagagtgaagatggagaaggtggacggcgacgtggtgttcaacctggccacctgcttcagagccgacggcctgcccgtggccccccagagaggccaggccgaggtgagagccaaggccggccaggccagagtgaagcaggagagcgtgggcgtgttcgcctgcaagaacaagtggcagcccgacgacgtgaccgagagcctgccccccaagaagatgaagtgcggcaaggagaaggacagcgaggagcagcagctgcagccccaggccaaggccgtggtgagaagcagccacagacccaagtgcagaaagctgcccagcgacccccaggagagcaccaagaagagccccagaggcgccagcgacagcggcaaggagcacaacggcgtgagaggcaagcacaagcacagaaagcccaccaagcccgagagccagagccccggcaagagagccgacagccacgaggagggcagcctggagaagaaggccaagagcagcttcagagacttcatccccgtggtgctgagcaccagaaccagaagccagagcggcagcatctgcagcagcttcgccggcatggccgacagcgacatgggcagccaggaggtgttccccaccgaggaggaggaggaggtgacccccacccccgccaagagaagaaaggtgagaaagacccagagagacacccagtacagaagccaccacgcccaggacaagagcctgctgagccagggcagaagacacctgtggagagccagagagatgccctggagaaccgaggccgccagacagatgtgggacaccaacgaggaggaggaggaggaggaggaggagggcctgctgaagagaaagaagagaagaagacagaagagcagaaagtaccagaccggcgagtacctgaccgagcaggaggacgagcagagaagaaagggcagagccgacctgaaggccagaaagcagaagaccagcagcagccagagcctggagcacagactgagaaacagaaacctgctgctgcccaacaaggtgcagggcatcagcgacagccccaacggcttcctgcccaacaacctggaggagcccgcctgcctggagaacagcgagaagcccagcggcaagagaaagtgcaagaccaagcacatggccaccgtgagcgaggaggccaagggcaagggcagatggagccagcagaagaccagaagccccaagagccccacccccgtgaagcccaccgagccctgcacccccagcaagagcagaagcgccagcagcgaggaggccagcgagagccccaccgccagacagatcccccccgaggccagaagactgatcgtgaacaagaacgccggcgagaccctgctgcagagagccgccagactgggctacaaggacgtggtgctgtactgcctgcagaaggacagcgaggacgtgaaccacagagacaacgccggctacaccgccctgcacgaggcctgcagcagaggctggaccgacatcctgaacatcctgctggagcacggcgccaacgtgaactgcagcgcccaggacggcaccagacccgtgcacgacgccgtggtgaacgacaacctggagaccatctggctgctgctgagctacggcgccgaccccaccctggccacctacagcggccagaccgccatgaagctggccagcagcgacaccatgaagagattcctgagcgaccacctgagcgacctgcagggcagagccgagggcgaccccggcgtgagctgggacttctacagcagcagcgtgctggaggagaaggacggcttcgcctgcgacctgctgcacaacccccccggcagcagcgaccaggagggcgacgaccccatggaggaggacgacttcatgttcgagctgagcgacaagcccctgctgccctgctacaacctgcaggtgagcgtgagcagaggcccctgcaactggttcctgttcagcgacgtgctgaagagactgaagctgagcagcagaatcttccaggccagattcccccacttcgagatcaccaccatgcccaaggccgagttctacagacaggtggccagcagccagctgctgacccccgccgagagacccggcggcctggacgacagaagcccccccggcagcagcgagaccgtggagctggtgagatacgagcccgacctgctgagactgctgggcagcgaggtggagttccagagctgcaacagctag

SEQ ID NO: 74299 - DNA, 5136 bp, synthetic construct
  misc_feature 1..5136: note = Description of Artificial Sequence: Synthetic coding sequence
  source 1..5136: mol_type = other DNA
atgatcagcaccgcccccctgtacagcggcgtgcacaactggaccagcagcgacagaatcagaatgtgcggcatcaacgaggagagaagagcccccctgagcgacgaggagagcaccaccggcgactgccagcacttcggcagccaggagttctgcgtgagcagcagcttcagcaaggtggagctgaccgccgtgggcagcggcagcaacgccagaggcgccgaccccgacggcagcgccaccgagaagctgggccacaagagcgaggacaagcccgacgacccccagcccaagatggactacgccggcaacgtggccgaggccgagggcttcctggtgcccctgagcagccccggcgacggcctgaagctgcccgccagcgacagcgccgaggccagcaacagcagagccgactgcagctggacccccctgaacacccagatgagcaagcaggtggactgcagccccgccggcgtgaaggccctggacagcagacagggcgtgggcgagaagaacaccttcatcctggccaccctgggcaccggcgtgcccgtggagggcaccctgcccctggtgaccaccaacttcagccccctgcccgcccccatctgcccccccgcccccggcagcgccagcgtgccccacagcgtgcccgacgccttccaggtgcccctgagcgtgcccgcccccgtgccccacagcggcctggtgcccgtgcaggtggccaccagcgtgcccgcccccagcccccccctggcccccgtgcccgccctggcccccgccccccccagcgtgcccaccctgatcagcgacagcaaccccctgagcgtgagcgccagcgtgctggtgcccgtgcccgccagcgccccccccagcggccccgtgcccctgagcgcccccgcccccgcccccctgagcgtgcccgtgagcgccccccccctggccctgatccaggcccccgtgccccccagcgcccccaccctggtgctggcccccgtgcccacccccgtgctggcccccatgcccgccagcaccccccccgccgcccccgccccccccagcgtgcccatgcccacccccacccccagcagcggcccccccagcacccccaccctgatccccgccttcgcccccacccccgtgcccgcccccacccccgcccccatcttcacccccgcccccacccccatgcccgccgccacccccgccgccatccccaccagcgcccccatccccgccagcttcagcctgagcagagtgtgcttccccgccgcccaggcccccgccatgcagaaggtgcccctgagcttccagcccggcaccgtgctgacccccagccagcccctggtgtacatccccccccccagctgcggccagcccctgagcgtggccaccctgcccaccaccctgggcgtgagcagcaccctgaccctgcccgtgctgcccagctacctgcaggacagatgcctgcccggcgtgctggccagccccgagctgagaagctacccctacgccttcagcgtggccagacccctgaccagcgacagcaagctggtgagcctggaggtgaacagactgccctgcaccagccccagcggcagcaccaccacccagcccgcccccgacggcgtgcccggccccctggccgacaccagcctggtgaccgccagcgccaaggtgctgcccaccccccagcccctgctgcccgcccccagcggcagcagcgcccccccccaccccgccaagatgcccagcggcaccgagcagcagaccgagggcaccagcgtgaccttcagccccctgaagagccccccccagctggagagagagatggccagcccccccgagtgcagcgagatgcccctggacctgagcagcaagagcaacagacagaagctgcccctgcccaaccagagaaagaccccccccatgcccgtgctgacccccgtgcacaccagcagcaaggccctgctgagcaccgtgctgagcagaagccagagaaccacccaggccgccggcggcaacgtgaccagctgcctgggcagcaccagcagccccttcgtgatcttccccgagatcgtgagaaacggcgaccccagcacctgggtgaagaacagcaccgccctgatcagcaccatccccggcacctacgtgggcgtggccaaccccgtgcccgccagcctgctgctgaacaaggaccccaacctgggcctgaacagagaccccagacacctgcccaagcaggagcccatcagcatcatcgaccagggcgagcccaagggcaccggcgccacctgcggcaagaagggcagccaggccggcgccgagggccagcccagcaccgtgaagagatacacccccgccagaatcgcccccggcctgcccggctgccagaccaaggagctgagcctgtggaagcccaccggccccgccaacatctaccccagatgcagcgtgaacggcaagcccaccagcacccaggtgctgcccgtgggctggagcccctaccaccaggccagcctgctgagcatcggcatcagcagcgccggccagctgacccccagccagggcgcccccatcagacccaccagcgtggtgagcgagttcagcggcgtgcccagcctgagcagcagcgaggccgtgcacggcctgcccgagggccagcccagacccggcggcagcttcgtgcccgagcaggaccccgtgaccaagaacaagacctgcagaatcgccgccaagccctacgaggagcaggtgaaccccgtgctgctgaccctgagcccccagaccggcaccctggccctgagcgtgcagcccagcggcggcgacatcagaatgaaccagggccccgaggagagcgagagccacctgtgcagcgacagcacccccaagatggagggcccccagggcgcctgcggcctgaagctggccggcgacaccaagcccaagaaccaggtgctggccacctacatgagccacgagctggtgctggccaccccccagaacctgcccaagatgcccgagctgcccctgctgccccacgacagccaccccaaggagctgatcctggacgtggtgcccagcagcagaagaggcagcagcaccgagagaccccagctgggcagccaggtggacctgggcagagtgaagatggagaaggtggacggcgacgtggtgttcaacctggccacctgcttcagagccgacggcctgcccgtggccccccagagaggccaggccgaggtgagagccaaggccggccaggccagagtgaagcaggagagcgtgggcgtgttcgcctgcaagaacaagtggcagcccgacgacgtgaccgagagcctgccccccaagaagatgaagtgcggcaaggagaaggacagcgaggagcagcagctgcagccccaggccaaggccgtggtgagaagcagccacagacccaagtgcagaaagctgcccagcgacccccaggagagcaccaagaagagccccagaggcgccagcgacagcggcaaggagcacaacggcgtgagaggcaagcacaagcacagaaagcccaccaagcccgagagccagagccccggcaagagagccgacagccacgaggagggcagcctggagaagaaggccaagagcagcttcagagacttcatccccgtggtgctgagcaccagaaccagaagccagagcggcagcatctgcagcagcttcgccggcatggccgacagcgacatgggcagccaggaggtgttccccaccgaggaggaggaggaggtgacccccacccccgccaagagaagaaaggtgagaaagacccagagagacacccagtacagaagccaccacgcccaggacaagagcctgctgagccagggcagaagacacctgtggagagccagagagatgccctggagaaccgaggccgccagacagatgtgggacaccaacgaggaggaggaggaggaggaggaggagggcctgctgaagagaaagaagagaagaagacagaagagcagaaagtaccagaccggcgagtacctgaccgagcaggaggacgagcagagaagaaagggcagagccgacctgaaggccagaaagcagaagaccagcagcagccagagcctggagcacagactgagaaacagaaacctgctgctgcccaacaaggtgcagggcatcagcgacagccccaacggcttcctgcccaacaacctggaggagcccgcctgcctggagaacagcgagaagcccagcggcaagagaaagtgcaagaccaagcacatggccaccgtgagcgaggaggccaaggacgtggtgctgtactgcctgcagaaggacagcgaggacgtgaaccacagagacaacgccggctacaccgccctgcacgaggcctgcagcagaggctggaccgacatcctgaacatcctgctggagcacggcgccaacgtgaactgcagcgcccaggacggcaccagacccgtgcacgacgccgtggtgaacgacaacctggagaccatctggctgctgctgagctacggcgccgaccccaccctggccacctacagcggccagaccgccatgaagctggccagcagcgacaccatgaagagattcctgagcgaccacctgagcgacctgcagggcagagccgagggcgaccccggcgtgagctgggacttctacagcagcagcgtgctggaggagaaggacggcttcgcctgcgacctgctgcacaacccccccggcagcagcgaccaggagggcgacgaccccatggaggaggacgacttcatgttcgagctgagcgacaagcccctgctgccctgctacaacctgcaggtgagcgtgagcagaggcccctgcaactggttcctgttcagcgacgtgctgaagagactgaagctgagcagcagaatcttccaggccagattcccccacttcgagatcaccaccatgcccaaggccgagttctacagacaggtggccagcagccagctgctgacccccgccgagagacccggcggcctggacgacagaagcccccccggcagcagcgagaccgtggagctggtgagatacgagcccgacctgctgagactgctgggcagcgaggtggagttccagagctgcaacagctag

SEQ ID NO: 74300 - DNA, 1260 bp, synthetic construct
  misc_feature 1..1260: note = Description of Artificial Sequence: Synthetic coding sequence
  source 1..1260: mol_type = other DNA
atgcccctgagcgacttcatcctggccctgaaggacaacccctacttcggcgccggcttcggcctggtgggcgtgggcaccgccctggccctggccagaaagggcgtgcagctgggcctggtggccttcagaagacactacatgatcaccctggaggtgcccgccagagacagaagctacgcctggctgctgagctggctgaccagacacagcaccagaacccagcacctgagcgtggagaccagctacctgcagcacgagagcggcagaatcagcaccaagttcgagttcgtgcccagccccggcaaccacttcatctggtacagaggcaagtggatcagagtggagagaagcagagagatgcagatgatcgacctgcagaccggcaccccctgggagagcgtgaccttcaccgccctgggcaccgacagaaaggtgttcttcaacatcctggaggaggccagagagctggccctgcagcaggaggagggcaagaccgtgatgtacaccgccgtgggcagcgagtggagacccttcggctaccccagaagaagaagacccctgaacagcgtggtgctgcagcagggcctggccgacagaatcgtgagagacgtgcaggagttcatcgacaaccccaagtggtacaccgacagaggcatcccctacagaagaggctacctgctgtacggcccccccggctgcggcaagagcagcttcatcaccgccctggccggcgagctggagcacagcatctgcctgctgagcctgaccgacagcagcctgagcgacgacagactgaaccacctgctgagcgtggccccccagcagagcctggtgctgctggaggacgtggacgccgccttcctgagcagagacctggccgtggagaaccccgtgaagtaccagggcctgggcagactgaccttcagcggcctgctgaacgccctggacggcgtggccagcaccgaggccagaatcgtgttcatgaccaccaaccacgtggacagactggaccccgccctgatcagacccggcagagtggacctgaaggagtacgtgggctactgcagccactggcagctgacccagatgttccagagattctaccccggccaggcccccagcctggccgagaacttcgccgagcacgtgctgagagccaccaaccagatcagccccgcccaggtgcagggctacttcatgctgtacaagaacgaccccgtgggcgccatccacaacgccgagagcctgagaagatag

SEQ ID NO: 74301 - DNA, 1260 bp, synthetic construct; identical to SEQ ID NO: 74300
  misc_feature 1..1260: note = Description of Artificial Sequence: Synthetic coding sequence
  source 1..1260: mol_type = other DNA

SEQ ID NO: 74302 - DNA, 1260 bp, synthetic construct; identical to SEQ ID NO: 74300
  misc_feature 1..1260: note = Description of Artificial Sequence: Synthetic coding sequence
  source 1..1260: mol_type = other DNA

SEQ ID NO: 74303 - DNA, 1260 bp, synthetic construct; identical to SEQ ID NO: 74300
  misc_feature 1..1260: note = Description of Artificial Sequence: Synthetic coding sequence
  source 1..1260: mol_type = other DNA

SEQ ID NO: 74304 - DNA, 1260 bp, synthetic construct; identical to SEQ ID NO: 74300
  misc_feature 1..1260: note = Description of Artificial Sequence: Synthetic coding sequence
  source 1..1260: mol_type = other DNA

SEQ ID NO: 74305 - DNA, 333 bp, synthetic construct
  misc_feature 1..333: note = Description of Artificial Sequence: Synthetic coding sequence
  source 1..333: mol_type = other DNA
atgcccctgagcgacttcatcctggccctgaaggacaacccctacttcggcgccggcttcggcctggtgggcgtgggcaccgccctggccctggccagaaagggcgtgcagctgggcctggtggccttcagaagacactacatgatcaccctggaggtgcccgccagagacagaagctacgcctggctgctgagctggctgaccagacacagcaccagaacccagcacctgagcgtggagaccagctacctgcagcacgagagcggcagaatcagcaccaagttcgagttcgtgcccagccccggcaaccacttcatctggtacagaggctag

SEQ ID NO: 74306 - DNA, 234 bp, synthetic construct
  misc_feature 1..234: note = Description of Artificial Sequence: Synthetic coding sequence
  source 1..234: mol_type = other DNA
atgcccctgagcgacttcatcctggccctgaaggacaacccctacttcggcgccggcttcggcctggtgggcgtgggcaccgccctggccctggccagaaagggcgtgcagctgggcctggtggccttcagaagacactacatgatcaccctggaggtgcccgccagagacagaagctacgcctggctgctgagctggctgaccagacacagcaccagaacccagcacctgtag

SEQ ID NO: 74307 - DNA, 621 bp, synthetic construct
  misc_feature 1..621: note = Description of Artificial Sequence: Synthetic coding sequence
  source 1..621: mol_type = other DNA
atgcccctgagcgacttcatcctggccctgaaggacaacccctacttcggcgccggcttcggcctggtgggcgtgggcaccgccctggccctggccagaaagggcgtgcagctgggcctggtggccttcagaagacactacatgatcaccctggaggtgcccgccagagacagaagctacgcctggctgctgagctggctgaccagacacagcaccagaacccagcacctgagcgtggagaccagctacctgcagcacgagagcggcagaatcagcaccaagttcgagttcgtgcccagccccggcaaccacttcatctggtacagaggcaagtggatcagagtggagagaagcagagagatgcagatgatcgacctgcagaccggcaccccctgggagagcgtgaccttcaccgccctgggcaccgacagaaaggtgttcttcaacatcctggaggaggccagagagctggccctgcagcaggaggagggcaagaccgtgatgtacaccgccgtgggcagcgagtggagacccttcggctaccccagaagaagaagacccctgaacagcgtggtgctgcagcagggcctggccgacagaatcgtgagagacgtgcagtag

SEQ ID NO: 74308 - DNA, 1260 bp, synthetic construct; identical to SEQ ID NO: 74300
  misc_feature 1..1260: note = Description of Artificial Sequence: Synthetic coding sequence
  source 1..1260: mol_type = other DNA

SEQ ID NO: 74309 - DNA, 1260 bp, synthetic construct; identical to SEQ ID NO: 74300
  misc_feature 1..1260: note = Description of Artificial Sequence: Synthetic coding sequence
  source 1..1260: mol_type = other DNA

SEQ ID NO: 74310 - DNA, 621 bp, synthetic construct; identical to SEQ ID NO: 74307
  misc_feature 1..621: note = Description of Artificial Sequence: Synthetic coding sequence
  source 1..621: mol_type = other DNA

SEQ ID NO: 74311 - DNA, 1623 bp, synthetic construct
  misc_feature 1..1623: note = Description of Artificial Sequence: Synthetic coding sequence
  source 1..1623: mol_type = other DNA
atgtacgagaacgagtgcgagtgccagctgctgctgaaggagatgctggagagactgaacaaggaggccgacgaggccctgctgcacaacctgagactgcagctggaggcccagttcctgcaggacgacatcagcgccgccaaggacagacacaagaagaacctgctggaggtgcagacctacatcagcatcctgcagcagatcatccacaccaccccccccgccagcatcgtgaccagcggcatgagagaggagaagctgctgaccgagagagaggtggccgccctgagaagccagctggaggagggcagagaggtgctgagccacctgcaggcccagagagtggagctgcaggcccagaccaccaccctggagcaggccatcaagagcgcccacgagtgctacgacgacgagatccagctgtacaacgagcagatcgagaccctgagaaaggagatcgaggagaccgagagagtgctggagaagagcagctacgactgcagacagctggccgtggcccagcagaccctgaagaacgagctggacagataccacagaatcatcgagatcgagggcaacagactgaccagcgccttcatcgagacccccatccccctgttcacccagagccacggcgtgagcctgagcaccggcagcggcggcaaggacctgaccagagccctgcaggacatcaccgccgccaagcccagacagaaggccctgcccaagaacgtgcccagaagaaaggagatcatcaccaaggacaagaccaacggcgccctggaggacgcccccctgaagggcctggaggacaccaagctggtgcaggtggtgctgaaggaggagagcgagagcaagttcgagagcgagagcaaggaggtgagccccctgacccaggagggcgcccccgaggacgtgcccgacggcggccagatcagcaagggcttcggcaagctgtacagaaaggtgaaggagaaggtgagaagccccaaggagcccgagacccccaccgagctgtacaccaaggagagacacgtgctggtgaccggcgacgccaactacgtggaccccagattctacgtgagcagcatcaccgccaagggcggcgtggccgtgagcgtggccgaggacagcgtgctgtacgacggccaggtggagcccagccccgagagccccaagccccccctggagaacggccaggtgggcctgcaggagaaggaggacggccagcccatcgaccagcagcccatcgacaaggagatcgagcccgacggcgccgagctggagggccccgaggagaagagagagggcgaggagagagacgaggagagcagaagaccctgcgccatggtgacccccggcgccgaggagcccagcatccccgagccccccaagcccgccgccgaccaggacggcgccgaggtgctgggcaccagaagcagaagcctgcccgagaagggcccccccaaggccctggcctacaagaccgtggaggtggtggagagcatcgagaagatcagcaccgagagcatccagacctacgaggagaccgccgtgatcgtggagaccatgatcggcaagaccaagagcgacaagaagaagagcggcgagaagagcagctag

SEQ ID NO: 74312 - DNA, 1998 bp, synthetic construct
  misc_feature 1..1998: note = Description of Artificial Sequence: Synthetic coding sequence
  source 1..1998: mol_type = other DNA
atgtacagaagaagctacgtgttccagaccagaaaggagcagtacgagcacgccgacgaggccagcagagccgccgagcccgagagacccgccgacgagggctgggccggcgccaccagcctggccgccctgcagggcctgggcgagagagtggccgcccacgtgcagagagccagagccctggagcagagacacgccggcctgagaagacagctggacgccttccagagactgggcgagctggccggccccgaggacgccctggccagacaggtggagagcaacagacagagagtgagagacctggaggccgagagagccagactggagagacagggcaccgaggcccagagagccctggacgagttcagaagcaagtacgagaacgagtgcgagtgccagctgctgctgaaggagatgctggagagactgaacaaggaggccgacgaggccctgctgcacaacctgagactgcagctggaggcccagttcctgcaggacgacatcagcgccgccaaggacagacacaagaagaacctgctggaggtgcagacctacatcagcatcctgcagcagatcatccacaccaccccccccgccagcatcgtgaccagcggcatgagagaggagaagctgctgaccgagagagaggtggccgccctgagaagccagctggaggagggcagagaggtgctgagccacctgcaggcccagagagtggagctgcaggcccagaccaccaccctggagcaggccatcaagagcgcccacgagtgctacgacgacgagatccagctgtacaacgagcagatcgagaccctgagaaaggagatcgaggagaccgagagagtgctggagaagagcagctacgactgcagacagctggccgtggcccagcagaccctgaagaacgagctggacagataccacagaatcatcgagatcgagggcaacagactgaccagcgccttcatcgagacccccatccccctgttcacccagagccacggcgtgagcctgagcaccggcagcggcggcaaggacctgaccagagccctgcaggacatcaccgccgccaagcccagacagaaggccctgcccaagaacgtgcccagaagaaaggagatcatcaccaaggacaagaccaacggcgccctggaggacgcccccctgaagggcctggaggacaccaagctggtgcaggtggtgctgaaggaggagagcgagagcaagttcgagagcgagagcaaggaggtgagccccctgacccaggagggcgcccccgaggacgtgcccgacggcggccagatcagcaagggcttcggcaagctgtacagaaaggtgaaggagaaggtgagaagccccaaggagcccgagacccccaccgagctgtacaccaaggagagacacgtgctggtgaccggcgacgccaactacgtggaccccagattctacgtgagcagcatcaccgccaagggcggcgtggccgtgagcgtggccgaggacagcgtgctgtacgacggccaggtggagcccagccccgagagccccaagccccccctggagaacggccaggtgggcctgcaggagaaggaggacggccagcccatcgaccagcagcccatcgacaaggagatcgagcccgacggcgccgagctggagggccccgaggagaagagagagggcgaggagagagacgaggagagcagaagaccctgcgccatggtgacccccggcgccgaggagcccagcatccccgagccccccaagcccgccgccgaccaggacggcgccgaggtgctgggcaccagaagcagaagcctgcccgagaagggcccccccaaggccctggcctacaagaccgtggaggtggtggagagcatcgagaagatcagcaccgagagcatccagacctacgaggagaccgccgtgatcgtggagaccatgatcggcaagaccaagagcgacaagaagaagagcggcgagaagagcagctag

SEQ ID NO: 74313 - DNA, 1581 bp, synthetic construct
  misc_feature 1..1581: note = Description of Artificial Sequence: Synthetic coding sequence
  source 1..1581: mol_type = other DNA
atgctggagagactgaacaaggaggccgacgaggccctgctgcacaacctgagactgcagctggaggcccagttcctgcaggacgacatcagcgccgccaaggacagacacaagaagaacctgctggaggtgcagacctacatcagcatcctgcagcagatcatccacaccaccccccccgccagcatcgtgaccagcggcatgagagaggagaagctgctgaccgagagagaggtggccgccctgagaagccagctggaggagggcagagaggtgctgagccacctgcaggcccagagagtggagctgcaggcccagaccaccaccctggagcaggccatcaagagcgcccacgagtgctacgacgacgagatccagctgtacaacgagcagatcgagaccctgagaaaggagatcgaggagaccgagagagtgctggagaagagcagctacgactgcagacagctggccgtggcccagcagaccctgaagaacgagctggacagataccacagaatcatcgagatcgagggcaacagactgaccagcgccttcatcgagacccccatccccctgttcacccagagccacggcgtgagcctgagcaccggcagcggcggcaaggacctgaccagagccctgcaggacatcaccgccgccaagcccagacagaaggccctgcccaagaacgtgcccagaagaaaggagatcatcaccaaggacaagaccaacggcgccctggaggacgcccccctgaagggcctggaggacaccaagctggtgcaggtggtgctgaaggaggagagcgagagcaagttcgagagcgagagcaaggaggtgagccccctgacccaggagggcgcccccgaggacgtgcccgacggcggccagatcagcaagggcttcggcaagctgtacagaaaggtgaaggagaaggtgagaagccccaaggagcccgagacccccaccgagctgtacaccaaggagagacacgtgctggtgaccggcgacgccaactacgtggaccccagattctacgtgagcagcatcaccgccaagggcggcgtggccgtgagcgtggccgaggacagcgtgctgtacgacggccaggtggagcccagccccgagagccccaagccccccctggagaacggccaggtgggcctgcaggagaaggaggacggccagcccatcgaccagcagcccatcgacaaggagatcgagcccgacggcgccgagctggagggccccgaggagaagagagagggcgaggagagagacgaggagagcagaagaccctgcgccatggtgacccccggcgccgaggagcccagcatccccgagccccccaagcccgccgccgaccaggacggcgccgaggtgctgggcaccagaagcagaagcctgcccgagaagggcccccccaaggccctggcctacaagaccgtggaggtggtggagagcatcgagaagatcagcaccgagagcatccagacctacgaggagaccgccgtgatcgtggagaccatgatcggcaagaccaagagcgacaagaagaagagcggcgagaagagcagctag

SEQ ID NO: 74314 - DNA, 1581 bp, synthetic construct; identical to SEQ ID NO: 74313
  misc_feature 1..1581: note = Description of Artificial Sequence: Synthetic coding sequence
  source 1..1581: mol_type = other DNA

SEQ ID NO: 74315 - DNA, 1248 bp, synthetic construct
  misc_feature 1..1248: note = Description of Artificial Sequence: Synthetic coding sequence
  source 1..1248: mol_type = other DNA
atgagcgagagaagagtggtggtggacctgcccaccagcgccagcagcagcatgcccctgcagagaagaagagccagcttcagaggccccagaagcagcagcagcctggagagcccccccgccagcagaaccaacgccatgagcggcctggtgagagcccccggcgtgtacgtgggcaccgcccccagcggctgcatcggcggcctgggcgccagagtgaccagaagagccctgggcatcagcagcgtgttcctgcagggcctgagaagcagcggcctggccaccgtgcccgcccccggcctggagagagaccacggcgccgtggaggacctgggcggctgcctggtggagtacatggccaaggtgcacgccctggagcaggtgagccaggagctggagacccagctgagaatgcacctggagagcaaggccaccagaagcggcaactggggcgccctgagagccagctgggccagcagctgccagcaggtgggcgaggccgtgctggagaacgccagactgatgctgcagaccgagaccatccaggccggcgccgacgacttcaaggagagatacgagaacgagcagcccttcagaaaggccgccgaggaggagatcaacagcctgtacaaggtgatcgacgaggccaacctgaccaagatggacctggagagccagatcgagagcctgaaggaggagctgggcagcctgagcagaaactacgaggaggacgtgaagctgctgcacaagcagctggccggctgcgagctggagcagatggacgcccccatcggcaccggcctggacgacatcctggagaccatcagaatccagtgggagagagacgtggagaagaacagagtggaggccggcgccctgctgcaggccaagcagcaggccgaggtggcccacatgagccagacccaggaggagaagctggccgccgccctgagagtggagctgcacaacaccagctgccaggtgcagagcctgcaggccgagaccgagagcctgagagccctgaagagaggcctggagaacaccctgcacgacgccaagcactggcacgacatggagctgcagaacctgggcgccgtggtgggcagactggaggccgagctgagagagatcagagccgaggccgagcagcagcagcaggagagagcccacctgctggccagaaagtgccagctgcagaaggacgtggccagctaccacgccctgctggacagagaggagagcggctag

SEQ ID NO: 74316 - DNA, 1353 bp, synthetic construct
  misc_feature 1..1353: note = Description of Artificial Sequence: Synthetic coding sequence
  source 1..1353: mol_type = other DNA
atggagggcagcaagaccagcaacaacagcaccatgcaggtgagcttcgtgtgccagagatgcagccagcccctgaagctggacaccagcttcaagatcctggacagagtgaccatccaggagctgaccgcccccctgctgaccaccgcccaggccaagcccggcgagacccaggaggaggagaccaacagcggcgaggagcccttcatcgagacccccagacaggacggcgtgagcagaagattcatcccccccgccagaatgatgagcaccgagagcgccaacagcttcaccctgatcggcgaggccagcgacggcggcaccatggagaacctgagcagaagactgaaggtgaccggcgacctgttcgacatcatgagcggccagaccgacgtggaccaccccctgtgcgaggagtgcaccgacaccctgctggaccagctggacacccagctgaacgtgaccgagaacgagtgccagaactacaagagatgcctggagatcctggagcagatgaacgaggacgacagcgagcagctgcagatggagctgaaggagctggccctggaggaggagagactgatccaggagctggaggacgtggagaagaacagaaagatcgtggccgagaacctggagaaggtgcaggccgaggccgagagactggaccaggaggaggcccagtaccagagagagtacagcgagttcaagagacagcagctggagctggacgacgagctgaagagcgtggagaaccagatgagatacgcccagacccagctggacaagctgaagaagaccaacgtgttcaacgccaccttccacatctggcacagcggccagttcggcaccatcaacaacttcagactgggcagactgcccagcgtgcccgtggagtggaacgagatcaacgccgcctggggccagaccgtgctgctgctgcacgccctggccaacaagatgggcctgaagttccagagatacagactggtgccctacggcaaccacagctacctggagagcctgaccgacaagagcaaggagctgcccctgtactgcagcggcggcctgagattcttctgggacaacaagttcgaccacgccatggtggccttcctggactgcgtgcagcagttcaaggaggaggtggagaagggcgagaccagattctgcctgccctacagaatggacgtggagaagggcaagatcgaggacaccggcggcagcggcggcagctacagcatcaagacccagttcaacagcgaggagcagtggaccaaggccctgaagttcatgctgaccaacctgaagtggggcctggcctgggtgagcagccagttctacaacaagtag

SEQ ID NO: 74317 - DNA, 840 bp, synthetic construct
  misc_feature 1..840: note = Description of Artificial Sequence: Synthetic coding sequence
  source 1..840: mol_type = other DNA
atggagggcagcaagaccagcaacaacagcaccatgcaggtgagcttcgtgtgccagagatgcagccagcccctgaagctggacaccagcttcaagatcctggacagagtgaccatccaggagctgaccgcccccctgctgaccaccgcccaggccaagcccggcgagacccaggaggaggagaccaacagcggcgaggagcccttcatcgagacccccagacaggacggcgtgagcagaagattcatcccccccgccagaagatgcctggagatcctggagcagatgaacgaggacgacagcgagcagctgcagatggagctgaaggagctggccctggaggaggagagactgatccaggagctggaggacgtggagaagaacagaaagatcgtggccgagaacctggagaaggtgcaggccgaggccgagagactggaccaggaggaggcccagtaccagagagagtacagcgagttcaagagacagcagctggagctggacgacgagctgaagagcgtggagaaccagatgagatacgcccagacccagctggacaagctgaagaagaccaacgtgttcaacgccaccttccacatctggcacagcggccagttcggcaccatcaacaacttcagactgggcagactgcccagcgtgcccgtggagtggaacgagatcaacgccgcctggggccagaccgtgctgctgctgcacgccctggccaacaagatgggcctgaagttccagagatacagactggtgccctacggcaaccacagctacctggagagcctgaccgacaagagcaaggacggctgcggcgagagacaggactag

SEQ ID NO: 74318 - DNA, 1092 bp, synthetic construct
  misc_feature 1..1092: note = Description of Artificial Sequence: Synthetic coding sequence
  source 1..1092: mol_type = other DNA
atgatgagcaccgagagcgccaacagcttcaccctgatcggcgaggccagcgacggcggcaccatggagaacctgagcagaagactgaaggtgaccggcgacctgttcgacatcatgagcggccagaccgacgtggaccaccccctgtgcgaggagtgcaccgacaccctgctggaccagctggacacccagctgaacgtgaccgagaacgagtgccagaactacaagagatgcctggagatcctggagcagatgaacgaggacgacagcgagcagctgcagatggagctgaaggagctggccctggaggaggagagactgatccaggagctggaggacgtggagaagaacagaaagatcgtggccgagaacctggagaaggtgcaggccgaggccgagagactggaccaggaggaggcccagtaccagagagagtacagcgagttcaagagacagcagctggagctggacgacgagctgaagagcgtggagaaccagatgagatacgcccagacccagctggacaagctgaagaagaccaacgtgttcaacgccaccttccacatctggcacagcggccagttcggcaccatcaacaacttcagactgggcagactgcccagcgtgcccgtggagtggaacgagatcaacgccgcctggggccagaccgtgctgctgctgcacgccctggccaacaagatgggcctgaagttccagagatacagactggtgccctacggcaaccacagctacctggagagcctgaccgacaagagcaaggagctgcccctgtactgcagcggcggcctgagattcttctgggacaacaagttcgaccacgccatggtggccttcctggactgcgtgcagcagttcaaggaggaggtggagaagggcgagaccagattctgcctgccctacagaatggacgtggagaagggcaagatcgaggacaccggcggcagcggcggcagctacagcatcaagacccagttcaacagcgaggagcagtggaccaaggccctgaagttcatgctgaccaacctgaagtggggcctggcctgggtgagcagccagttctacaacaagtag

SEQ ID NO: 74319 - DNA, 5394 bp, synthetic construct
  misc_feature 1..5394: note = Description of Artificial Sequence: Synthetic coding sequence
  source 1..5394: mol_type = other DNA
atggagcagctgaccaccctgcccagacccggcgaccccggcgccatggagccctgggccctgcccacctggcacagctggacccccggcagaggcggcgagcccagcagcgccgcccccagcatcgccgacaccccccccgccgccctgcagctgcaggagctgagaagcgaggagagcagcaagcccaagggcgacggcagcagcagacccgtgggcggcaccgaccccgagggcgccgaggcctgcctgcccagcctgggccagcaggccagcagcagcggccccgcctgccagagacccgaggacgaggaggtggaggccttcctgaaggccaagctgaacatgagcttcggcgacagacccaacctggagctgctgagagccctgggcgagctgagacagagatgcgccatcctgaaggaggagaaccagatgctgagaaagagcagcttccccgagaccgaggagaaggtgagaagactgaagagaaagaacgccgagctggccgtgatcgccaagagactggaggagagagccagaaagctgcaggagaccaacctgagagtggagggcccccagtggctgcacgtgagagacttcgacagactgctgagagagagccagagagaggtgctgagactgcagagacagatcgccctgagaaaccagagagagaccctgcccctgccccccagctggccccccggccccgccctgcaggccagagccggcgcccccgcccccggcgcccccggcgaggccaccccccaggaggacgccgacaacctgcccgtgatcctgggcgagcccgagaaggagcagagagtgcagcagctggagagcgagctgagcaagaagagaaagaagtgcgagagcctggagcaggaggccagaaagaagcagagaagatgcgaggagctggagctgcagctgagacaggcccagaacgagaacgccagactggtggaggagaacagcagactgagcggcagagccaccgagaaggagcaggtggagtgggagaacgccgagctgagaggccagctgctgggcgtgacccaggagagagacagcgccctgagaaagagccagggcctgcagagcaagctggagagcctggagcaggtgctgaagcacatgagagaggtggcccagagaagacagcagctggaggtggagcacgagcaggccagactgagcctgagagagaagcaggaggaggtgagaagactgcagcaggcccaggccgaggcccagagagagcacgagggcgccgtgcagctgctggagagcaccctggacagcatgcaggccagagtgagagagctggaggagcagtgcagaagccagaccgagcagttcagcctgctggcccaggagctgcaggccttcagactgcaccccggccccctggacctgctgaccagcgccctggactgcggcagcctgggcgactgccccccccccccctgctgctgcagcatcccccagccctgcagaggcagcggccccaaggacctggacctgccccccggcagccccggcagatgcacccccaagagcagcgagcccgcccccgccaccctgaccggcgtgcccagaagaaccgccaagaaggccgagagcctgagcaacagcagccacagcgagagcatccacaacagccccaagagctgccccacccccgaggtggacaccgccagcgaggtggaggagctggaggccgacagcgtgagcctgctgcccgccgcccccgagggcagcagaggcggcgccagaatccaggtgttcctggccagatacagctacaaccccttcgagggccccaacgagaaccccgaggccgagctgcccctgaccgccggcgagtacatctacatctacggcaacatggacgaggacggcttcttcgagggcgagctgatggacggcagaagaggcctggtgcccagcaacttcgtggagagagtgagcgacgacgacctgctgaccagcctgccccccgagctggccgacctgagccacagcagcggccccgagctgagcttcctgagcgtgggcggcggcggcagcagcagcggcggccagagcagcgtgggcagaagccagcccagacccgaggaggaggacgccggcgacgagctgagcctgagccccagccccgagggcctgggcgagccccccgccgtgccctaccccagaagactggtggtgctgaagcagctggcccacagcgtggtgctggcctgggagcccccccccgagcaggtggagctgcacggcttccacatctgcgtgaacggcgagctgagacaggccctgggccccggcgccccccccaaggccgtgctggagaacctggacctgtgggccggccccctgcacatcagcgtgcaggccctgaccagcagaggcagcagcgaccccctgagatgctgcctggccgtgggcgccagagccggcgtggtgcccagccagctgagagtgcacagactgaccgccaccagcgccgagatcacctgggtgcccggcaacagcaacctggcccacgccatctacctgaacggcgaggagtgcccccccgccagccccagcacctactgggccaccttctgccacctgagacccggcaccccctaccaggcccaggtggaggcccagctgcccccccagggcccctgggagcccggctgggagagactggagcagagagccgccaccctgcagttcaccaccctgcccgccggcccccccgacgcccccctggacgtgcagatcgagcccggccccagccccggcatcctgatcatcagctggctgcccgtgaccatcgacgccgccggcaccagcaacggcgtgagagtgaccggctacgccatctacgccgacggccagaagatcatggaggtggccagccccaccgccggcagcgtgctggtggagctgagccagctgcagctgctgcaggtgtgcagagaggtggtggtgagaaccatgagcccccacggcgagagcgccgacagcatccccgcccccatcacccccgccctggcccccgccagcctgcccgccagagtgagctgccccagcccccaccccagccccgaggccagagcccccctggccagcgccagccccggccccggcgaccccagcagccccctgcagcaccccgcccccctgggcacccaggagccccccggcgccccccccgccagccccagcagagagatggccaagggcagccacgaggacccccccgccccctgcagccaggaggaggccggcgccgccgtgctgggcaccagcgaggagagaaccgccagcaccagcaccctgggcgagaaggaccccggccccgccgcccccagcctggccaagcaggaggccgagtggaccgccggcgaggcctgccccgccagcagcagcacccagggcgccagagcccagcaggcccccaacaccgagatgtgccagggcggcgaccccggcagcggcctgagacccagagccgagaaggaggacaccgccgagctgggcgtgcacctggtgaacagcctggtggaccacggcagaaacagcgacctgagcgacatccaggaggaggaggaggaggaggaggaggaggaggaggaggagctgggcagcagaacctgcagcttccagaagcaggtggccggcaacagcatcagagagaacggcgccaagagccagcccgaccccttctgcgagaccgacagcgacgaggagatcctggagcagatcctggagctgcccctgcagcagttctgcagcaagaagctgttcagcatccccgaggaggaggaggaggaggaggaggacgaggaggaggagaagagcggcgccggctgcagcagcagagaccccggcccccccgagcccgccctgctgggcctgggctgcgacagcggccagcccagaagacccggccagtgccccctgagccccgagagcagcagagccggcgactgcctggaggacatgcccggcctggtgggcggcagcagcagaagaagaggcggcggcagccccgagaagccccccagcagaagaagaccccccgaccccagagagcactgcagcagactgctgagcaacaacggcccccaggccagcggcagactgggccccaccagagagagaggcggcctgcccgtgatcgagggccccagaaccggcctggaggccagcggcagaggcagactgggccccagcagaagatgcagcagaggcagagccctggagcccggcctggccagctgcctgagccccaagtgcctggagatcagcatcgagtacgacagcgaggacgagcaggaggccggcagcggcggcatcagcatcaccagcagctgctaccccggcgacggcgaggcctggggcaccgccaccgtgggcagacccagaggcccccccaaggccaacagcggccccaagccctaccccagactgcccgcctgggagaagggcgagcccgagagaagaggcagaagcgccaccggcagagccaaggagcccctgagcagagccaccgagaccggcgaggccagaggccaggacggcagcggcagaagaggcccccagaagagaggcgtgagagtgctgagacccagcaccgccgagctggtgcccgccagaagccccagcgagaccctggcctaccagcacctgcccgtgagaatcttcgtggccctgttcgactacgaccccgtgagcatgagccccaaccccgacgccggcgaggaggagctgcccttcagagagggccagatcctgaaggtgttcggcgacaaggacgccgacggcttctaccagggcgagggcggcggcagaaccggctacatcccctgcaacatggtggccgaggtggccgtggacagccccgccggcagacagcagctgctgcagagaggctacctgagccccgacatcctgctggagggcagcggcaacggccccttcgtgtacagcaccgcccacaccaccggccccccccccaagcccagaagaagcaagaaggccgagagcgagggccccgcccagccctgccccggcccccccaagctggtgcccagcgccgacctgaaggccccccacagcatggtggccgccttcgactacaacccccaggagagcagccccaacatggacgtggaggccgagctgcccttcagagccggcgacgtgatcaccgtgttcggcggcatggacgacgacggcttctactacggcgagctgaacggccagagaggcctggtgcccagcaacttcctggagggccccggccccgaggccggcggcctggacagagagcccagaaccccccaggccgagagccagagaaccagaagaagaagagtgcagtgctag

SEQ ID NO: 74320 - DNA, 5574 bp, synthetic construct
  misc_feature 1..5574: note = Description of Artificial Sequence: Synthetic coding sequence
  source 1..5574: mol_type = other DNA
atggagcagctgaccaccctgcccagacccggcgaccccggcgccatggagccctgggccctgcccacctggcacagctggacccccggcagaggcggcgagcccagcagcgccgcccccagcatcgccgacaccccccccgccgccctgcagctgcaggagctgagaagcgaggagagcagcaagcccaagggcgacggcagcagcagacccgtgggcggcaccgaccccgagggcgccgaggcctgcctgcccagcctgggccagcaggccagcagcagcggccccgcctgccagagacccgaggacgaggaggtggaggccttcctgaaggccaagctgaacatgagcttcggcgacagacccaacctggagctgctgagagccctgggcgagctgagacagagatgcgccatcctgaaggaggagaaccagatgctgagaaagagcagcttccccgagaccgaggagaaggtgagaagactgaagagaaagaacgccgagctggccgtgatcgccaagagactggaggagagagccagaaagctgcaggagaccaacctgagagtggtgagcgcccccctgcccagacccggcaccagcctggagctgtgcagaaaggccctggccagacagagagccagagacctgagcgagaccgccagcgccctgctggccaaggacaagcagatcgccgccctgcagagagagtgcagagagctgcaggccagactgaccctggtgggcaaggagggcccccagtggctgcacgtgagagacttcgacagactgctgagagagagccagagagaggtgctgagactgcagagacagatcgccctgagaaaccagagagagaccctgcccctgccccccagctggccccccggccccgccctgcaggccagagccggcgcccccgcccccggcgcccccggcgaggccaccccccaggaggacgccgacaacctgcccgtgatcctgggcgagcccgagaaggagcagagagtgcagcagctggagagcgagctgagcaagaagagaaagaagtgcgagagcctggagcaggaggccagaaagaagcagagaagatgcgaggagctggagctgcagctgagacaggcccagaacgagaacgccagactggtggaggagaacagcagactgagcggcagagccaccgagaaggagcaggtggagtgggagaacgccgagctgagaggccagctgctgggcgtgacccaggagagagacagcgccctgagaaagagccagggcctgcagagcaagctggagagcctggagcaggtgctgaagcacatgagagaggtggcccagagaagacagcagctggaggtggagcacgagcaggccagactgagcctgagagagaagcaggaggaggtgagaagactgcagcaggcccaggccgaggcccagagagagcacgagggcgccgtgcagctgctggagagcaccctggacagcatgcaggccagagtgagagagctggaggagcagtgcagaagccagaccgagcagttcagcctgctggcccaggagctgcaggccttcagactgcaccccggccccctggacctgctgaccagcgccctggactgcggcagcctgggcgactgccccccccccccctgctgctgcagcatcccccagccctgcagaggcagcggccccaaggacctggacctgccccccggcagccccggcagatgcacccccaagagcagcgagcccgcccccgccaccctgaccggcgtgcccagaagaaccgccaagaaggccgagagcctgagcaacagcagccacagcgagagcatccacaacagccccaagagctgccccacccccgaggtggacaccgccagcgaggtggaggagctggaggccgacagcgtgagcctgctgcccgccgcccccgagggcagcagaggcggcgccagaatccaggtgttcctggccagatacagctacaaccccttcgagggccccaacgagaaccccgaggccgagctgcccctgaccgccggcgagtacatctacatctacggcaacatggacgaggacggcttcttcgagggcgagctgatggacggcagaagaggcctggtgcccagcaacttcgtggagagagtgagcgacgacgacctgctgaccagcctgccccccgagctggccgacctgagccacagcagcggccccgagctgagcttcctgagcgtgggcggcggcggcagcagcagcggcggccagagcagcgtgggcagaagccagcccagacccgaggaggaggacgccggcgacgagctgagcctgagccccagccccgagggcctgggcgagccccccgccgtgccctaccccagaagactggtggtgctgaagcagctggcccacagcgtggtgctggcctgggagcccccccccgagcaggtggagctgcacggcttccacatctgcgtgaacggcgagctgagacaggccctgggccccggcgccccccccaaggccgtgctggagaacctggacctgtgggccggccccctgcacatcagcgtgcaggccctgaccagcagaggcagcagcgaccccctgagatgctgcctggccgtgggcgccagagccggcgtggtgcccagccagctgagagtgcacagactgaccgccaccagcgccgagatcacctgggtgcccggcaacagcaacctggcccacgccatctacctgaacggcgaggagtgcccccccgccagccccagcacctactgggccaccttctgccacctgagacccggcaccccctaccaggcccaggtggaggcccagctgcccccccagggcccctgggagcccggctgggagagactggagcagagagccgccaccctgcagttcaccaccctgcccgccggcccccccgacgcccccctggacgtgcagatcgagcccggccccagccccggcatcctgatcatcagctggctgcccgtgaccatcgacgccgccggcaccagcaacggcgtgagagtgaccggctacgccatctacgccgacggccagaagatcatggaggtggccagccccaccgccggcagcgtgctggtggagctgagccagctgcagctgctgcaggtgtgcagagaggtggtggtgagaaccatgagcccccacggcgagagcgccgacagcatccccgcccccatcacccccgccctggcccccgccagcctgcccgccagagtgagctgccccagcccccaccccagccccgaggccagagcccccctggccagcgccagccccggccccggcgaccccagcagccccctgcagcaccccgcccccctgggcacccaggagccccccggcgccccccccgccagccccagcagagagatggccaagggcagccacgaggacccccccgccccctgcagccaggaggaggccggcgccgccgtgctgggcaccagcgaggagagaaccgccagcaccagcaccctgggcgagaaggaccccggccccgccgcccccagcctggccaagcaggaggccgagtggaccgccggcgaggcctgccccgccagcagcagcacccagggcgccagagcccagcaggcccccaacaccgagatgtgccagggcggcgaccccggcagcggcctgagacccagagccgagaaggaggacaccgccgagctgggcgtgcacctggtgaacagcctggtggaccacggcagaaacagcgacctgagcgacatccaggaggaggaggaggaggaggaggaggaggaggaggaggagctgggcagcagaacctgcagcttccagaagcaggtggccggcaacagcatcagagagaacggcgccaagagccagcccgaccccttctgcgagaccgacagcgacgaggagatcctggagcagatcctggagctgcccctgcagcagttctgcagcaagaagctgttcagcatccccgaggaggaggaggaggaggaggaggacgaggaggaggagaagagcggcgccggctgcagcagcagagaccccggcccccccgagcccgccctgctgggcctgggctgcgacagcggccagcccagaagacccggccagtgccccctgagccccgagagcagcagagccggcgactgcctggaggacatgcccggcctggtgggcggcagcagcagaagaagaggcggcggcagccccgagaagccccccagcagaagaagaccccccgaccccagagagcactgcagcagactgctgagcaacaacggcccccaggccagcggcagactgggccccaccagagagagaggcggcctgcccgtgatcgagggccccagaaccggcctggaggccagcggcagaggcagactgggccccagcagaagatgcagcagaggcagagccctggagcccggcctggccagctgcctgagccccaagtgcctggagatcagcatcgagtacgacagcgaggacgagcaggaggccggcagcggcggcatcagcatcaccagcagctgctaccccggcgacggcgaggcctggggcaccgccaccgtgggcagacccagaggcccccccaaggccaacagcggccccaagccctaccccagactgcccgcctgggagaagggcgagcccgagagaagaggcagaagcgccaccggcagagccaaggagcccctgagcagagccaccgagaccggcgaggccagaggccaggacggcagcggcagaagaggcccccagaagagaggcgtgagagtgctgagacccagcaccgccgagctggtgcccgccagaagccccagcgagaccctggcctaccagcacctgcccgtgagaatcttcgtggccctgttcgactacgaccccgtgagcatgagccccaaccccgacgccggcgaggaggagctgcccttcagagagggccagatcctgaaggtgttcggcgacaaggacgccgacggcttctaccagggcgagggcggcggcagaaccggctacatcccctgcaacatggtggccgaggtggccgtggacagccccgccggcagacagcagctgctgcagagaggctacctgagccccgacatcctgctggagggcagcggcaacggccccttcgtgtacagcaccgcccacaccaccggccccccccccaagcccagaagaagcaagaaggccgagagcgagggccccgcccagccctgccccggcccccccaagctggtgcccagcgccgacctgaaggccccccacagcatggtggccgccttcgactacaacccccaggagagcagccccaacatggacgtggaggccgagctgcccttcagagccggcgacgtgatcaccgtgttcggcggcatggacgacgacggcttctactacggcgagctgaacggccagagaggcctggtgcccagcaacttcctggagggccccggccccgaggccggcggcctggacagagagcccagaaccccccaggccgagagccagagaaccagaagaagaagagtgcagtgctag

SEQ ID NO: 74321 - DNA, 5724 bp, synthetic construct
  misc_feature 1..5724: note = Description of Artificial Sequence: Synthetic coding sequence
  source 1..5724: mol_type = other DNA
atggagcagctgaccaccctgcccagacccggcgaccccggcgccatggagccctgggccctgcccacctggcacagctggacccccggcagaggcggcgagcccagcagcgccgcccccagcatcgccgacaccccccccgccgccctgcagctgcaggagctgagaagcgaggagagcagcaagcccaagggcgacggcagcagcagacccgtgggcggcaccgaccccgagggcgccgaggcctgcctgcccagcctgggccagcaggccagcagcagcggccccgcctgccagagacccgaggacgaggaggtggaggccttcctgaaggccaagctgaacatgagcttcggcgacagacccaacctggagctgctgagagccctgggcgagctgagacagagatgcgccatcctgaaggaggagaaccagatgctgagaaagagcagcttccccgagaccgaggagaaggtgagaagactgaagagaaagaacgccgagctggccgtgatcgccaagagactggaggagagagccagaaagctgcaggagaccaacctgagagtggtgagcgcccccctgcccagacccggcaccagcctggagctgtgcagaaaggccctggccagacagagagccagagacctgagcgagaccgccagcgccctgctggccaaggacaagcagatcgccgccctgcagagagagtgcagagagctgcaggccagactgaccctggtgggcaaggagggcccccagtggctgcacgtgagagacttcgacagactgctgagagagagccagagagaggtgctgagactgcagagacagatcgccctgagaaaccagagagagaccctgcccctgccccccagctggccccccggccccgccctgcaggccagagccggcgcccccgcccccggcgcccccggcgaggccaccccccaggaggacgccgacaacctgcccgtgatcctgggcgagcccgagaaggagcagagagtgcagcagctggagagcgagctgagcaagaagagaaagaagtgcgagagcctggagcaggaggccagaaagaagcagagaagatgcgaggagctggagctgcagctgagacaggcccagaacgagaacgccagactggtggaggagaacagcagactgagcggcagagccaccgagaaggagcaggtggagtgggagaacgccgagctgagaggccagctgctgggcgtgacccaggagagagacagcgccctgagaaagagccagggcctgcagagcaagctggagagcctggagcaggtgctgaagcacatgagagaggtggcccagagaagacagcagctggaggtggagcacgagcaggccagactgagcctgagagagaagcaggaggaggtgagaagactgcagcaggcccaggccgaggcccagagagagcacgagggcgccgtgcagctgctggagagcaccctggacagcatgcaggccagagtgagagagctggaggagcagtgcagaagccagaccgagcagttcagcctgctggcccaggagctgcaggccttcagactgcaccccggccccctggacctgctgaccagcgccctggactgcggcagcctgggcgactgccccccccccccctgctgctgcagcatcccccagccctgcagaggcagcggccccaaggacctggacctgccccccggcagccccggcagatgcacccccaagagcagcgagcccgcccccgccaccctgaccggcgtgcccagaagaaccgccaagaaggccgagagcctgagcaacagcagccacagcgagagcatccacaacagccccaagagctgccccacccccgaggtggacaccgccagcgaggtggaggagctggaggccgacagcgtgagcctgctgcccgccgcccccgagggcagcagaggcggcgccagaatccaggtgttcctggccagatacagctacaaccccttcgagggccccaacgagaaccccgaggccgagctgcccctgaccgccggcgagtacatctacatctacggcaacatggacgaggacggcttcttcgagggcgagctgatggacggcagaagaggcctggtgcccagcaacttcgtggagagagtgagcgacgacgacctgctgaccagcctgccccccgagctggccgacctgagccacagcagcggccccgagctgagcttcctgagcgtgggcggcggcggcagcagcagcggcggccagagcagcgtgggcagaagccagcccagacccgaggaggaggacgccggcgacgagctgagcctgagccccagccccgagggcctgggcgagccccccgccgtgccctaccccagaagactggtggtgctgaagcagctggcccacagcgtggtgctggcctgggagcccccccccgagcaggtggagctgcacggcttccacatctgcgtgaacggcgagctgagacaggccctgggccccggcgccccccccaaggccgtgctggagaacctggacctgtgggccggccccctgcacatcagcgtgcaggccctgaccagcagaggcagcagcgaccccctgagatgctgcctggccgtgggcgccagagccggcgtggtgcccagccagctgagagtgcacagactgaccgccaccagcgccgagatcacctgggtgcccggcaacagcaacctggcccacgccatctacctgaacggcgaggagtgcccccccgccagccccagcacctactgggccaccttctgccacctgagacccggcaccccctaccaggcccaggtggaggcccagctgcccccccagggcccctgggagcccggctgggagagactggagcagagagccgccaccctgcagttcaccaccctgcccgccggcccccccgacgcccccctggacgtgcagatcgagcccggccccagccccggcatcctgatcatcagctggctgcccgtgaccatcgacgccgccggcaccagcaacggcgtgagagtgaccggctacgccatctacgccgacggccagaagatcatggaggtggccagccccaccgccggcagcgtgctggtggagctgagccagctgcagctgctgcaggtgtgcagagaggtggtggtgagaaccatgagcccccacggcgagagcgccgacagcatccccgcccccatcacccccgccctggcccccgccagcctgcccgccagagtgagctgccccagcccccaccccagccccgaggccagagcccccctggccagcgccagccccggccccggcgaccccagcagccccctgcagcaccccgcccccctgggcacccaggagccccccggcgccccccccgccagccccagcagagagatggccaagggcagccacgaggacccccccgccccctgcagccaggaggaggccggcgccgccgtgctgggcaccagcgaggagagaaccgccagcaccagcaccctgggcgagaaggaccccggccccgccgcccccagcctggccaagcaggaggccgagtggaccgccggcgaggcctgccccgccagcagcagcacccagggcgccagagcccagcaggcccccaacaccgagatgtgccagggcggcgaccccggcagcggcctgagacccagagccgagaaggaggacaccgccgagctgggcgtgcacctggtgaacagcctggtggaccacggcagaaacagcgacctgagcgacatccaggaggaggaggaggaggaggaggaggaggaggaggaggagctgggcagcagaacctgcagcttccagaagcaggtggccggcaacagcatcagagagaacggcgccaagagccagcccgaccccttctgcgagaccgacagcgacgaggagatcctggagcagatcctggagctgcccctgcagcagttctgcagcaagaagctgttcagcatccccgaggaggaggaggaggaggaggaggacgaggaggaggagaagagcggcgccggctgcagcagcagagaccccggcccccccgagcccgccctgctgggcctgggctgcgacagcggccagcccagaagacccggccagtgccccctgagccccgagagcagcagagccggcgactgcctggaggacatgcccggcctggtgggcggcagcagcagaagaagaggcggcggcagccccgagaagccccccagcagaagaagaccccccgaccccagagagcactgcagcagactgctgagcaacaacggcccccaggccagcggcagactgggccccaccagagagagaggcggcctgcccgtgatcgagggccccagaaccggcctggaggccagcggcagaggcagactgggccccagcagaagatgcagcagaggcagagccctggagcccggcctggccagctgcctgagccccaagtgcctggagatcagcatcgagtacgacagcgaggacgagcaggaggccggcagcggcggcatcagcatcaccagcagctgctaccccggcgacggcgaggcctggggcaccgccaccgtgggcagacccagaggcccccccaaggccaacagcggccccaagccctaccccagactgcccgcctgggagaagggcgagcccgagagaagaggcagaagcgccaccggcagagccaaggagcccctgagcagagccaccgagaccggcgaggccagaggccaggacggcagcggcagaagaggcccccagaagagaggcgtgagagtgctgagacccagcaccgccgagctggtgcccgccagaagccccagcgagaccctggcctaccagcacctgcccgtgagaatcttcgtggccctgttcgactacgaccccgtgagcatgagccccaaccccgacgccggcgaggaggagctgcccttcagagagggccagatcctgaaggtgttcggcgacaaggacgccgacggcttctaccagggcgagggcggcggcagaaccggctacatcccctgcaacatggtggccgaggtggccgtggacagccccgccggcagacagcagctgctgcagagaggctacctgagccccgacatcctgctggagggcagcggcaacggccccttcgtgtacagcaccgcccacaccaccggccccccccccaagcccagaagaagcaagaaggccgagagcgagggccccgcccagccctgccccggcccccccaagctggtgcccagcgccgacctgaaggccccccacagcatggtggccgccttcgactacaacccccaggagagcagccccaacatggacgtggaggccgagctgcccttcagagccggcgacgtgatcaccgtgttcggcggcatggacgacgacggcttctactacggcgagctgaacggccagagaggcctggtgcccagcaacttcctggagggccccggccccgaggccggcggcctggacagagagcccagaaccccccaggccgagagccaggactggggctgcaccacccagggcagccccggcccccccggcggcccctgcacccccagcagcggcagcgcccccagaatcgagagaggcgagccccagggcagaagcgagaaggtgtggggcttcttcagcaagggcaagcagctgctgagaagactgggcagcggcaagaaggagtag

SEQ ID NO: 74322 - DNA, 864 bp, synthetic construct
  misc_feature 1..864: note = Description of Artificial Sequence: Synthetic coding sequence
  source 1..864: mol_type = other DNA
atggtgaacgacccccccgtgcccgccctgctgtgggcccaggaggtgggccaggtgctggccggcagagccagaagactgctgctgcagttcggcgtgctgttctgcaccatcctgctgctgctgtgggtgagcgtgttcctgtacggcagcttctactacagctacatgcccaccgtgagccacctgagccccgtgcacttctactacagaaccgactgcgacagcagcaccaccagcctgtgcagcttccccgtggccaacgtgagcctgaccaagggcggcagagacagagtgctgatgtacggccagccctacagagtgaccctggagctggagctgcccgagagccccgtgaaccaggacctgggcatgttcctggtgaccatcagctgctacaccagaggcggcagaatcatcagcaccagcagcagaagcgtgatgctgcactacagaagcgacctgctgcagatgctggacaccctggtgttcagcagcctgctgctgttcggcttcgccgagcagaagcagctgctggaggtggagctgtacgccgactacagagagaacagctacgtgcccaccaccggcgccatcatcgagatccacagcaagagaatccagctgtacggcgcctacctgagaatccacgcccacttcaccggcctgagactgaccagcgagaaggagaccatccccggcagaaagagcaacgagggcagcctgctgatcagccagggcctgaaggccagaagaagccagctgagaaaccagatgctgcagagaatggtgagagccctgaagatcccccagggccagagagtgagctgccccagaagaagaaaccagatcagcagcccctag

SEQ ID NO: 74323 - DNA, 1389 bp, synthetic construct
  misc_feature 1..1389: note = Description of Artificial Sequence: Synthetic coding sequence
  source 1..1389: mol_type = other DNA
atgagcaccgagaaggtggaccagaaggaggaggccggcgagaaggaggtgtgcggcgaccagatcaagggccccgacaaggaggaggagccccccgccgccgccagccacggccagggctggagacccggcggcagagccgccagaaacgccagacccgagcccggcgccagacaccccgccctgcccgccatggtgaacgacccccccgtgcccgccctgctgtgggcccaggaggtgggccaggtgctggccggcagagccagaagactgctgctgcagttcggcgtgctgttctgcaccatcctgctgctgctgtgggtgagcgtgttcctgtacggcagcttctactacagctacatgcccaccgtgagccacctgagccccgtgcacttctactacagaaccgactgcgacagcagcaccaccagcctgtgcagcttccccgtggccaacgtgagcctgaccaagggcggcagagacagagtgctgatgtacggccagccctacagagtgaccctggagctggagctgcccgagagccccgtgaaccaggacctgggcatgttcctggtgaccatcagctgctacaccagaggcggcagaatcatcagcaccagcagcagaagcgtgatgctgcactacagaagcgacctgctgcagatgctggacaccctggtgttcagcagcctgctgctgttcggcttcgccgagcagaagcagctgctggaggtggagctgtacgccgactacagagagaacagctacgtgcccaccaccggcgccatcatcgagatccacagcaagagaatccagctgtacggcgcctacctgagaatccacgcccacttcaccggcctgagatacctgctgtacaacttccccatgacctgcgccttcatcggcgtggccagcaacttcaccttcctgagcgtgatcgtgctgttcagctacatgcagtgggtgtggggcggcatctggcccagacacagattcagcctgcaggtgaacatcagaaagagagacaacagcagaaaggaggtgcagagaagaatcagcgcccaccagcccggccccgagggccaggaggagagcaccccccagagcgacgtgaccgaggacggcgagagccccgaggaccccagcggcaccgagggccagctgagcgaggaggagaagcccgaccagcagcccctgagcggcgaggaggagctggagcccgaggccagcgacggcagcggcagctgggaggacgccgccctgctgaccgaggccaacctgcccgcccccgcccccgccagcgccagcgcccccgtgctggagaccctgggcagcagcgagcccgccggcggcgccctgagacagagacccacctgcagcagcagctag

SEQ ID NO: 74324 - DNA, 1197 bp, synthetic construct
  misc_feature 1..1197: note = Description of Artificial Sequence: Synthetic coding sequence
  source 1..1197: mol_type = other DNA
atggtgaacgacccccccgtgcccgccctgctgtgggcccaggaggtgggccaggtgctggccggcagagccagaagactgctgctgcagttcggcgtgctgttctgcaccatcctgctgctgctgtgggtgagcgtgttcctgtacggcagcttctactacagctacatgcccaccgtgagccacctgagccccgtgcacttctactacagaaccgactgcgacagcagcaccaccagcctgtgcagcttccccgtggccaacgtgagcctgaccaagggcggcagagacagagtgctgatgtacggccagccctacagagtgaccctggagctggagctgcccgagagccccgtgaaccaggacctgggcatgttcctggtgaccatcagctgctacaccagaggcggcagaatcatcagcaccagcagcagaagcgtgatgctgcactacagaagcgacctgctgcagatgctggacaccctggtgttcagcagcctgctgctgttcggcttcgccgagcagaagcagctgctggaggtggagctgtacgccgactacagagagaacagctacgtgcccaccaccggcgccatcatcgagatccacagcaagagaatccagctgtacggcgcctacctgagaatccacgcccacttcaccggcctgagatacctgctgtacaacttccccatgacctgcgccttcatcggcgtggccagcaacttcaccttcctgagcgtgatcgtgctgttcagctacatgcagtgggtgtggggcggcatctggcccagacacagattcagcctgcaggtgaacatcagaaagagagacaacagcagaaaggaggtgcagagaagaatcagcgcccaccagcccggccccgagggccaggaggagagcaccccccagagcgacgtgaccgaggacggcgagagccccgaggaccccagcggcaccgagggccagctgagcgaggaggagaagcccgaccagcagcccctgagcggcgaggaggagctggagcccgaggccagcgacggcagcggcagctgggaggacgccgccctgctgaccgaggccaacctgcccgcccccgcccccgccagcgccagcgcccccgtgctggagaccctgggcagcagcgagcccgccggcggcgccctgagacagagacccacctgcagcagcagctag

SEQ ID NO: 74325 - DNA, 1197 bp, synthetic construct; identical to SEQ ID NO: 74324
  misc_feature 1..1197: note = Description of Artificial Sequence: Synthetic coding sequence
  source 1..1197: mol_type = other DNA

SEQ ID NO: 74326 - DNA, 1197 bp, synthetic construct; identical to SEQ ID NO: 74324
  misc_feature 1..1197: note = Description of Artificial Sequence: Synthetic coding sequence
  source 1..1197: mol_type = other DNA

SEQ ID NO: 74327 - DNA, 1389 bp, synthetic construct; identical to SEQ ID NO: 74323
  misc_feature 1..1389: note = Description of Artificial Sequence: Synthetic coding sequence
  source 1..1389: mol_type = other DNA

SEQ ID NO: 74328 - DNA, 672 bp, synthetic construct
  misc_feature 1..672: note = Description of Artificial Sequence: Synthetic coding sequence
  source 1..672: mol_type = other DNA
atggtgaacgacccccccgtgcccgccctgctgtgggcccaggaggtgggccaggtgctggccggcagagccagaagactgctgctgcagttcggcgtgctgttctgcaccatcctgctgctgctgtgggtgagcgtgttcctgtacggcagcttctactacagctacatgcccaccgtgagccacctgagccccgtgcacttctactacagaaccgactgcgacagcagcaccaccagcctgtgcagcttccccgtggccaacgtgagcctgaccaagggcggcagagacagagtgctgatgtacggccagccctacagagtgaccctggagctggagctgcccgagagccccgtgaaccaggacctgggcatgttcctggtgaccatcagctgctacaccagaggcggcagaatcatcagcaccagcagcagaagcgtgatgctgcactacagaagcgacctgctgcagatgctggacaccctggtgttcagcagcctgctgctgttcggcttcgccgagcagaagcagctgctggaggtggagctgtacgccgactacagagagaacagctacgtgcccaccaccggcgccatcatcgagatccacagcaagagaatccagctgtacggcgcctacctgagaatccacgcccacttcaccggcctgtag

SEQ ID NO: 74329 - DNA, 282 bp, synthetic construct
  misc_feature 1..282: note = Description of Artificial Sequence: Synthetic coding sequence
  source 1..282: mol_type = other DNA
atgagcaccgagaaggtggaccagaaggaggaggccggcgagaaggaggtgtgcggcgaccagatcaagggccccgacaaggaggaggagccccccgccgccgccagccacggccagggctggagacccggcggcagagccgccagaaacgccagacccgagcccggcgccagacaccccgccctgcccgccatggtgaacgacccccccgtgcccgccctgctgtgggcccaggaggtgggccaggtgctggccggcagagccagaagactgctgctgtag

SEQ ID NO: 74330 - DNA, 681 bp, synthetic construct
  misc_feature 1..681: note = Description of Artificial Sequence: Synthetic coding sequence
  source 1..681: mol_type = other DNA
atgagcaccgagaaggtggaccagaaggaggaggccggcgagaaggaggtgtgcggcgaccagatcaagggccccgacaaggaggaggagccccccgccgccgccagccacggccagggctggagacccggcggcagagccgccagaaacgccagacccgagcccggcgccagacaccccgccctgcccgccatggtgaacgacccccccgtgcccgccctgctgtgggcccaggaggtgggccaggtgctggccggcagagccagaagactgctgctgcagttcggcgtgctgttctgcaccatcctgctgctgctgtgggtgagcgtgttcctgtacggcagcttctactacagctacatgcccaccgtgagccacctgagccccgtgcacttctactacagaaccgactgcgacagcagcaccaccagcctgtgcagcttccccgtggccaacgtgagcctgaccaagggcggcagagacagagtgctgatgtacggccagccctacagagtgaccctggagctggagctgcccgagagccccgtgaaccaggacctgggcatgttcctggtgaccatcagctgctacaccagaggcggcagaatcatcagcaccagcagcagaagcgtgatgctgcactacagaagcgacctgctgcagatgctggacaccctgtag

SEQ ID NO: 74331 - DNA, 72 bp, synthetic construct
  misc_feature 1..72: note = Description of Artificial Sequence: Synthetic coding sequence
  source 1..72: mol_type = other DNA
atgagcaccgagaaggtggaccagaaggaggaggccggcgagaaggaggtgtgcggcgaccagatcaagtag

SEQ ID NO: 74332 - DNA, 87 bp, synthetic construct
  misc_feature 1..87: note = Description of Artificial Sequence: Synthetic coding sequence
  source 1..87: mol_type = other DNA
atgagcaccgagaaggtggaccagaaggaggaggccggcgagaaggaggtgtgcggcgaccagatcaagggccccgacaaggagtag

SEQ ID NO: 74333 - DNA, 372 bp, synthetic construct
  misc_feature 1..372: note = Description of Artificial Sequence: Synthetic coding sequence
  source 1..372: mol_type = other DNA
atgagcaccgagaaggtggaccagaaggaggaggccggcgagaaggaggtgtgcggcgaccagatcaagggccccgacaaggaggaggagccccccgccgccgccagccacggccagggctggagacccggcggcagagccgccagaaacgccagacccgagcccggcgccagacaccccgccctgcccgccatggtgaacgacccccccgtgcccgccctgctgtgggcccaggaggtgggccaggtgctggccggcagagccagaagactgctgctgcagttcggcgtgctgttctgcaccatcctgctgctgctgtgggtgagcgtgttcctgtacggcagcttctactacagctacatgcccacctag

SEQ ID NO: 74334 - DNA, 300 bp, synthetic construct
  misc_feature 1..300: note = Description of Artificial Sequence: Synthetic coding sequence
  source 1..300: mol_type = other DNA
atggtgaacgacccccccgtgcccgccctgctgtgggcccaggaggtgggccaggtgctggccggcagagccagaagactgctgctgcagttcggcgtgctgttctgcaccatcctgctgctgctgtgggtgagcgtgttcctgtacggcagcttctactacagctacatgcccaccgtgagccacctgagccccgtgcacttctactacagaaccgactgcgacagcagcaccaccagcctgtgcagcttccccgtggccaacgtgagcctgaccaagggcggcagagacagagtgtag

SEQ ID NO: 74335 - DNA, 879 bp, synthetic construct
  misc_feature 1..879: note = Description of Artificial Sequence: Synthetic coding sequence
  source 1..879: mol_type = other DNA
atggagttccagcccaaccaggaggacgaggaggacgcccacgccggcatcatcggcagattcctgggcctgcagagccacgaccaccacccccccagagccaacagcagaaccaagctgctgtggcccaagagagagagcctgctgcacgagggcctgcccaagaaccacaaggccgccaagcagaacgtgagaggccaggaggacaacaaggcctggaagctgaaggccgtggacgccttcaagagcgcccccctgtaccagagacccggctactacagcgccccccagacccccctgagccccacccccatgttcttccccctggagcccagcgcccccagcaagctgcacagcgtgaccggcatcgacaccaaggacaagagcctgaagaccgtgagcagcggcgccaagaagagcttcgagctgctgagcgagagcgacggcgccctgatggagcaccccgaggtgagccaggtgagaagaaagaccgtggagttcaacctgaccgacatgcccgagatccccgagaaccacctgaaggagcccctggagcagagccccaccaacatccacaccaccctgaaggaccacatggacccctactgggccctggagaacagaagcgtgctgcacctgaaccagggccactgcatcgccctgtgccccacccccgccagcctggccctgagcctgcccttcctgcacaacttcctgggcttccaccactgccagagcaccctggacctgagacccgccctggcctggggcatctacctggccaccttcaccggcatcctgggcaagtgcagcggccccttcctgaccagcccctggtaccaccccgaggacttcctgggccccggcgagggcagatag

SEQ ID NO: 74336 - DNA, 1497 bp, synthetic construct
  misc_feature 1..1497: note = Description of Artificial Sequence: Synthetic coding sequence
  source 1..1497: mol_type = other DNA
atgttcgagaagctgaccctgtactgcgacagctacatccagctgatccccatcagcttcgtgctgggcttctacgtgaccctggtggtgaccagatggtggaaccagtacgagaacctgccctggcccgacagactgatgagcctggtgagcggcttcgtggagggcaaggacgagcagggcagactgctgagaagaaccctgatcagatacgccaacctgggcaacgtgctgatcctgagaagcgtgagcaccgccgtgtacaagagattccccagcgcccagcacctggtgcaggccggcttcatgacccccgccgagcacaagcagctggagaagctgagcctgccccacaacatgttctgggtgccctgggtgtggttcgccaacctgagcatgaaggcctggctgggcggcagaatcagagaccccatcctgctgcagagcctgctgaacgagatgaacaccctgagaacccagtgcggccacctgtacgcctacgactggatcagcatccccctggtgtacacccaggtggtgaccgtggccgtgtacagcttcttcctgacctgcctggtgggcagacagttcctgaaccccgccaaggcctaccccggccacgagctggacctggtggtgcccgtgttcaccttcctgcagttcttcttctacgtgggctggctgaaggtgagcctgctggccgtggacgagatgcaccaggacctgcccagaatggagcccgacatgtactggaacaagcccgagccccagcccccctacaccgccgccagcgcccagttcagaagagccagcttcatgggcagcaccttcaacatcagcctgaacaaggaggagatggagttccagcccaaccaggaggacgaggaggacgcccacgccggcatcatcggcagattcctgggcctgcagagccacgaccaccacccccccagagccaacagcagaaccaagctgctgtggcccaagagagagagcctgctgcacgagggcctgcccaagaaccacaaggccgccaagcagaacgtgagaggccaggaggacaacaaggcctggaagctgaaggccgtggacgccttcaagagcgcccccctgtaccagagacccggctactacagcgccccccagacccccctgagccccacccccatgttcttccccctggagcccagcgcccccagcaagctgcacagcgtgaccggcatcgacaccaaggacaagagcctgaagaccgtgagcagcggcgccaagaagagcttcgagctgctgagcgagagcgacggcgccctgatggagcaccccgaggtgagccaggtgagaagaaagaccgtggagttcaacctgaccgacatgcccgagatccccgagaaccacctgaaggagcccctggagcagagccccaccaacatccacaccaccctgaaggaccacatggacccctactgggccctggagaacagagacgaggcccacagctag

SEQ ID NO: 74337 - DNA, 1758 bp, synthetic construct
  misc_feature 1..1758: note = Description of Artificial Sequence: Synthetic coding sequence
  source 1..1758: mol_type = other DNA
atgaccatcacctacaccagccaggtggccaacgccagactgggcagcttcagcagactgctgctgtgctggagaggcagcatctacaagctgctgtacggcgagttcctgatcttcctgctgtgctactacatcatcagattcatctacagactggccctgaccgaggagcagcagctgatgttcgagaagctgaccctgtactgcgacagctacatccagctgatccccatcagcttcgtgctgggcttctacgtgaccctggtggtgaccagatggtggaaccagtacgagaacctgccctggcccgacagactgatgagcctggtgagcggcttcgtggagggcaaggacgagcagggcagactgctgagaagaaccctgatcagatacgccaacctgggcaacgtgctgatcctgagaagcgtgagcaccgccgtgtacaagagattccccagcgcccagcacctggtgcaggccggcttcatgacccccgccgagcacaagcagctggagaagctgagcctgccccacaacatgttctgggtgccctgggtgtggttcgccaacctgagcatgaaggcctggctgggcggcagaatcagagaccccatcctgctgcagagcctgctgaacgagatgaacaccctgagaacccagtgcggccacctgtacgcctacgactggatcagcatccccctggtgtacacccaggtggtgaccgtggccgtgtacagcttcttcctgacctgcctggtgggcagacagttcctgaaccccgccaaggcctaccccggccacgagctggacctggtggtgcccgtgttcaccttcctgcagttcttcttctacgtgggctggctgaaggtggccgagcagctgatcaaccccttcggcgaggacgacgacgacttcgagaccaactggatcgtggacagaaacctgcaggtgagcctgctggccgtggacgagatgcaccaggacctgcccagaatggagcccgacatgtactggaacaagcccgagccccagcccccctacaccgccgccagcgcccagttcagaagagccagcttcatgggcagcaccttcaacatcagcctgaacaaggaggagatggagttccagcccaaccaggaggacgaggaggacgcccacgccggcatcatcggcagattcctgggcctgcagagccacgaccaccacccccccagagccaacagcagaaccaagctgctgtggcccaagagagagagcctgctgcacgagggcctgcccaagaaccacaaggccgccaagcagaacgtgagaggccaggaggacaacaaggcctggaagctgaaggccgtggacgccttcaagagcgcccccctgtaccagagacccggctactacagcgccccccagacccccctgagccccacccccatgttcttccccctggagcccagcgcccccagcaagctgcacagcgtgaccggcatcgacaccaaggacaagagcctgaagaccgtgagcagcggcgccaagaagagcttcgagctgctgagcgagagcgacggcgccctgatggagcaccccgaggtgagccaggtgagaagaaagaccgtggagttcaacctgaccgacatgcccgagatccccgagaaccacctgaaggagcccctggagcagagccccaccaacatccacaccaccctgaaggaccacatggacccctactgggccctggagaacagagacgaggcccacagctag

SEQ ID NO: 74338 - DNA, 813 bp, synthetic construct
  misc_feature 1..813: note = Description of Artificial Sequence: Synthetic coding sequence
  source 1..813: mol_type = other DNA
atgaccatcacctacaccagccaggtggccaacgccagactgggcagcttcagcagactgctgctgtgctggagaggcagcatctacaagctgctgtacggcgagttcctgatcttcctgctgtgctactacatcatcagattcatctacagactggccctgaccgaggagcagcagctgatgttcgagaagctgaccctgtactgcgacagctacatccagctgatccccatcagcttcgtgctgggcttctacgtgaccctggtggtgaccagatggtggaaccagtacgagaacctgccctggcccgacagactgatgagcctggtgagcggcttcgtggagggcaaggacgagcagggcagactgctgagaagaaccctgatcagatacgccaacctgggcaacgtgctgatcctgagaagcgtgagcaccgccgtgtacaagagattccccagcgcccagcacctggtgcaggccggcttcatgacccccgccgagcacaagcagctggagaagctgagcctgccccacaacatgttctgggtgccctgggtgtggttcgccaacctgagcatgaaggcctggctgggcggcagaatcagagaccccatcctgctgcagagcctgctgaacgagatgaacaccctgagaacccagtgcggccacctgtacgcctacgactggatcagcatccccctggtgtacacccagcccgagcagagaggcgacggcgtgcccgcccagagcggcggcagaggcggctgcagcagatggcaccactggcccctgcccagacccgccgtgccctag

SEQ ID NO: 74339 - DNA, 1815 bp, synthetic construct
  misc_feature 1..1815: note = Description of Artificial Sequence: Synthetic coding sequence
  source 1..1815: mol_type = other DNA
atgttcgagaagctgaccctgtactgcgacagctacatccagctgatccccatcagcttcgtgctgggcttctacgtgaccctggtggtgaccagatggtggaaccagtacgagaacctgccctggcccgacagactgatgagcctggtgagcggcttcgtggagggcaaggacgagcagggcagactgctgagaagaaccctgatcagatacgccaacctgggcaacgtgctgatcctgagaagcgtgagcaccgccgtgtacaagagattccccagcgcccagcacctggtgcaggccggcttcatgacccccgccgagcacaagcagctggagaagctgagcctgccccacaacatgttctgggtgccctgggtgtggttcgccaacctgagcatgaaggcctggctgggcggcagaatcagagaccccatcctgctgcagagcctgctgaacgagatgaacaccctgagaacccagtgcggccacctgtacgcctacgactggatcagcatccccctggtgtacacccaggtggtgaccgtggccgtgtacagcttcttcctgacctgcctggtgggcagacagttcctgaaccccgccaaggcctaccccggccacgagctggacctggtggtgcccgtgttcaccttcctgcagttcttcttctacgtgggctggctgaaggtggccgagcagctgatcaaccccttcggcgaggacgacgacgacttcgagaccaactggatcgtggacagaaacctgcaggtgagcctgctggccgtggacgagatgcaccaggacctgcccagaatggagcccgacatgtactggaacaagcccgagccccagcccccctacaccgccgccagcgcccagttcagaagagccagcttcatgggcagcaccttcaacatcagcctgaacaaggaggagatggagttccagcccaaccaggaggacgaggaggacgcccacgccggcatcatcggcagattcctgggcctgcagagccacgaccaccacccccccagagccaacagcagaaccaagctgctgtggcccaagagagagagcctgctgcacgagggcctgcccaagaaccacaaggccgccaagcagaacgtgagaggccaggaggacaacaaggcctggaagctgaaggccgtggacgccttcaagagcgcccccctgtaccagagacccggctactacagcgccccccagacccccctgagccccacccccatgttcttccccctggagcccagcgcccccagcaagctgcacagcgtgaccggcatcgacaccaaggacaagagcctgaagaccgtgagcagcggcgccaagaagagcttcgagctgctgagcgagagcgacggcgccctgatggagcaccccgaggtgagccaggtgagaagaaagaccgtggagttcaacctgaccgacatgcccgagatccccgagaaccacctgaaggagcccctggagcagagccccaccaacatccacaccaccctgaaggaccacatggacccctactgggccctggagaacagaagcgtgctgcacctgaaccagggccactgcatcgccctgtgccccacccccgccagcctggccctgagcctgcccttcctgcacaacttcctgggcttccaccactgccagagcaccctggacctgagacccgccctggcctggggcatctacctggccaccttcaccggcatcctgggcaagtgcagcggccccttcctgaccagcccctggtaccaccccgaggacttcctgggccccggcgagggcagatag

SEQ ID NO: 74340 - DNA, 1530 bp, synthetic construct
  misc_feature 1..1530: note = Description of Artificial Sequence: Synthetic coding sequence
  source 1..1530: mol_type = other DNA
atgaccgtgacctacaccgccagagtggccaacgccagattcggcggcttcagccagctgctgctgctgtggagaggcagcatctacaagctgctgtggagagagctgctgtgcttcctgggcttctacatggccctgagcgccgcctacagattcgtgctgaccgagggccagaagagatacttcgagaagctggtgatctactgcgaccagtacgccagcctgatccccgtgagcttcgtgctgggcttctacgtgaccctggtggtgaacagatggtggagccagtacctgtgcatgcccctgcccgacgccctgatgtgcgtggtggccggcaccgtgcacggcagagacgacagaggcagactgtacagaagaaccctgatgagatacgccggcctgagcgccgtgctgatcctgagaagcgtgagcaccgccgtgttcaagagattccccaccatcgaccacgtggtggaggccggcttcatgaccagagaggagagaaagaagttcgagaacctgaacagcagctacaacaagtactgggtgccctgcgtgtggttcagcaacctggccgcccaggccagaagagagggcagaatcagagacaacagcgccctgaagctgctgctggaggagctgaacgtgttcagaggcaagtgcggcatgctgttccactacgactggatcagcgtgcccctggtgtacacccaggtggtgaccatcgccctgtacagctacttcctggcctgcctgatcggcagacagttcctggaccccgcccagggctacaaggaccacgacctggacctgtgcgtgcccatcttcaccctgctgcagttcttcttctacgccggctggctgaaggtggccgagcagctgatcaaccccttcggcgaggacgacgacgacttcgagaccaacttcctgatcgacagaaacttccaggtgagcatgctggccgtggacgagatgtacgacgacctggccgtgctggagaaggacctgtactgggacgccgccgaggccagagccccctacaccgccgccaccgtgttccagctgagacagcccagcttccagggcagcaccttcgacatcaccctggccaaggaggacatgcagttccagagactggacggcctggacggccccatgggcgaggcccccggcgacttcctgcagagactgctgcccgccggcgccggcatggtggccggcggccccctgggcagaagactgagcttcctgctgagaaagaacagctgcgtgagcgaggccagcaccggcgccagctgcagctgcgccgtggtgcccgagggcgccgcccccgagtgcagctgcggcgaccccctgctggaccccggcctgcccgagcccgaggcccccccccccgccggccccgagcccctgaccctgatccccggccccgtggagcccttcagcatcgtgaccatgcccggccccagaggccccgcccccccctggctgcccagccccatcggcgaggaggaggagaacctggcctag

SEQ ID NO: 74341 - DNA, 1530 bp, synthetic construct; identical to SEQ ID NO: 74340
  misc_feature 1..1530: note = Description of Artificial Sequence: Synthetic coding sequence
  source 1..1530: mol_type = other DNA

SEQ ID NO: 74342 - DNA, 1530 bp, synthetic construct; identical to SEQ ID NO: 74340
  misc_feature 1..1530: note = Description of Artificial Sequence: Synthetic coding sequence
  source 1..1530: mol_type = other DNA

SEQ ID NO: 74343 - DNA, 219 bp, synthetic construct
  misc_feature 1..219: note = Description of Artificial Sequence: Synthetic coding sequence
  source 1..219: mol_type = other DNA
atgttcctgatcagcagcagcgtgcacggcagcgacgagcacggcagactgctgagaagaaccctgatgagatacgtgaacctgaccagcctgctgatcttcagaagcgtgagcaccgccgtgtacaagagattccccaccatggaccacgtggtggaggccgagagaaccggcatgaagcccatcctgcccagcagcttcgagatgcagagcttctag

SEQ ID NO: 74344 - DNA, 2007 bp, synthetic construct
  misc_feature 1..2007: note = Description of Artificial Sequence: Synthetic coding sequence
  source 1..2007: mol_type = other DNA
atgaccgtgacctacagcagcaaggtggccaacgccaccttcttcggcttccacagactgctgctgaagtggagaggcagcatctacaagctgctgtacagagagttcatcgtgttcgccgtgctgtacaccgccatcagcctggtgtacagactgctgctgaccggcgtgcagaagagatacttcgagaagctgagcatctactgcgacagatacgccgagcagatccccgtgaccttcgtgctgggcttctacgtgaccctggtggtgaacagatggtggaaccagttcgtgaacctgccctggcccgacagactgatgttcctgatcagcagcagcgtgcacggcagcgacgagcacggcagactgctgagaagaaccctgatgagatacgtgaacctgaccagcctgctgatcttcagaagcgtgagcaccgccgtgtacaagagattccccaccatggaccacgtggtggaggccggcttcatgaccaccgacgagagaaagctgttcaaccacctgaagagcccccacctgaagtactgggtgcccttcatctggttcggcaacctggccaccaaggccagaaacgagggcagaatcagagacagcgtggacctgcagagcctgatgaccgagatgaacagatacagaagctggtgcagcctgctgttcggctacgactgggtgggcatccccctggtgtacacccaggtggtgaccctggccgtgtacaccttcttcttcgcctgcctgatcggcagacagttcctggaccccaccaagggctacgccggccacgacctggacctgtacatccccatcttcaccctgctgcagttcttcttctacgccggctggctgaaggtggccgagcagctgatcaaccccttcggcgaggacgacgacgacttcgagaccaactggtgcatcgacagaaacctgcaggtgagcctgctggccgtggacgagatgcacatgagcctgcccaagatgaagaaggacatctactgggacgacagcgccgccagacccccctacaccctggccgccgccgactactgcatccccagcttcctgggcagcaccgtgcagatgggcctgagcggcagcgacttccccgacgaggagtggctgtgggactacgagaagcacggccacagacacagcatgatcagaagagtgaagagattcctgagcgcccacgagcaccccagcagccccagaagaagaagctacagaagacagaccagcgacagcagcatgttcctgcccagagacgacctgagccccgccagagacctgctggacgtgcccagcagaaacccccccagagccagccccacctggaagaagagctgcttccccgagggcagccccaccctgcacttcagcatgggcgagctgagcaccatcagagagaccagccagaccagcaccctgcagagcctgaccccccagagcagcgtgagaaccagccccatcaagatgcccctggtgcccgaggtgctgatcaccgccgccgaggcccccgtgcccaccagcggcggctaccaccacgacagcgccaccagcatcctgagcagcgagttcaccggcgtgcagcccagcaagaccgagcagcagcagggccccatgggcagcatcctgagccccagcgagaaggagaccccccccggcggccccagcccccagaccgtgagcgccagcgccgaggagaacatcttcaactgcgaggaggaccccggcgacaccttcctgaagagatggagcctgcccggcttcctgggcagcagccacaccagcctgggcaacctgagccccgaccccatgagcagccagcccgccctgctgatcgacaccgagaccagcagcgagatcagcggcatcaacatcgtggccggcagcagagtgagcagcgacatgctgtacctgatggagaacctggacaccaaggagaccgacatcatcgagctgaacaaggagaccgaggagagccccaagtag

SEQ ID NO: 74345 - DNA, 1197 bp, synthetic construct
  misc_feature 1..1197: note = Description of Artificial Sequence: Synthetic coding sequence
  source 1..1197: mol_type = other DNA
atgaccgtgacctacagcagcaaggtggccaacgccaccttcttcggcttccacagactgctgctgaagtggagaggcagcatctacaagctgctgtacagagagttcatcgtgttcgccgtgctgtacaccgccatcagcctggtgtacagactgctgctgaccggcgtgcagaagagatacttcgagaagctgagcatctactgcgacagatacgccgagcagatccccgtgaccttcgtgctgggcttctacgtgaccctggtggtgaacagatggtggaaccagttcgtgaacctgccctggcccgacagactgatgttcctgatcagcagcagcgtgcacggcagcgacgagcacggcagactgctgagaagaaccctgatgagatacgtgaacctgaccagcctgctgatcttcagaagcgtgagcaccgccgtgtacaagagattccccaccatggaccacgtggtggaggccggcttcatgaccaccgacgagagaaagctgttcaaccacctgaagagcccccacctgaagtactgggtgcccttcatctggttcggcaacctggccaccaaggccagaaacgagggcagaatcagagacagcgtggacctgcagagcctgatgaccgagatgaacagatacagaagctggtgcagcctgctgttcggctacgactgggtgggcatccccctggtgtacacccaggtggtgaccctggccgtgtacaccttcttcttcgcctgcctgatcggcagacagttcctggaccccaccaagggctacgccggccacgacctggacctgtacatccccatcttcaccctgctgcagttcttcttctacgccggctggctgaaggtggccgagcagctgatcaaccccttcggcgaggacgacgacgacttcgagaccaactggtgcatcgacagaaacctgcaggtgagcctgctggccgtggacgagatgcacatgagcctgcccaagatgaagaaggacatctactgggacgacagcgccgccagacccccctacaccctggccgccgccgactactgcatccccagcttcctgggcagcaccgtgcagatgggcaagcagatgcccaagaacgagtggaagatggaggacatcaagatccccctgccccagccccagttccagtgcgccaagagcgaccccggcggctag

SEQ ID NO: 74346 - DNA, 219 bp, synthetic construct; identical to SEQ ID NO: 74343
  misc_feature 1..219: note = Description of Artificial Sequence: Synthetic coding sequence
  source 1..219: mol_type = other DNA

SEQ ID NO: 74347 - DNA, 1368 bp, synthetic construct
  misc_feature 1..1368: note = Description of Artificial Sequence: Synthetic coding sequence
  source 1..1368: mol_type = other DNA
atgaccaccgacgagagaaagctgttcaaccacctgaagagcccccacctgaagtactgggtgcccttcatctggttcggcaacctggccaccaaggccagaaacgagggcagaatcagagacagcgtggacctgcagagcctgatgaccgagatgaacagatacagaagctggtgcagcctgctgttcggctacgactgggtgggcatccccctggtgtacacccaggtggccgagcagctgatcaaccccttcggcgaggacgacgacgacttcgagaccaactggtgcatcgacagaaacctgcaggtgagcctgctggccgtggacgagatgcacatgagcctgcccaagatgaagaaggacatctactgggacgacagcgccgccagacccccctacaccctggccgccgccgactactgcatccccagcttcctgggcagcaccgtgcagatgggcctgagcggcagcgacttccccgacgaggagtggctgtgggactacgagaagcacggccacagacacagcatgatcagaagagtgaagagattcctgagcgcccacgagcaccccagcagccccagaagaagaagctacagaagacagaccagcgacagcagcatgttcctgcccagagacgacctgagccccgccagagacctgctggacgtgcccagcagaaacccccccagagccagccccacctggaagaagagctgcttccccgagggcagccccaccctgcacttcagcatgggcgagctgagcaccatcagagagaccagccagaccagcaccctgcagagcctgaccccccagagcagcgtgagaaccagccccatcaagatgcccctggtgcccgaggtgctgatcaccgccgccgaggcccccgtgcccaccagcggcggctaccaccacgacagcgccaccagcatcctgagcagcgagttcaccggcgtgcagcccagcaagaccgagcagcagcagggccccatgggcagcatcctgagccccagcgagaaggagaccccccccggcggccccagcccccagaccgtgagcgccagcgccgaggagaacatcttcaactgcgaggaggaccccggcgacaccttcctgaagagatggagcctgcccggcttcctgggcagcagccacaccagcctgggcaacctgagccccgaccccatgagcagccagcccgccctgctgatcgacaccgagaccagcagcgagatcagcggcatcaacatcgtggccggcagcagagtgagcagcgacatgctgtacctgatggagaacctggacaccaaggagaccgacatcatcgagctgaacaaggagaccgaggagagccccaagtag

SEQ ID NO: 74348 - DNA, 219 bp, synthetic construct; identical to SEQ ID NO: 74343
  misc_feature 1..219: note = Description of Artificial Sequence: Synthetic coding sequence
  source 1..219: mol_type = other DNA

SEQ ID NO: 74349 - DNA, 1422 bp, synthetic construct
  misc_feature 1..1422: note = Description of Artificial Sequence: Synthetic coding sequence
  source 1..1422: mol_type = other DNA
atgaccgtgagctacaccctgaaggtggccgaggccagattcggcggcttcagcggcctgctgctgagatggagaggcagcatctacaagctgctgtacaaggagttcctgctgttcggcgccctgtacgccgtgctgagcatcacctacagactgctgctgacccaggagcagagatacgtgtacgcccaggtggccagatactgcaacagaagcgccgacctgatccccctgagcttcgtgctgggcttctacgtgaccctggtggtgaacagatggtggagccagtacaccagcatccccctgcccgaccagctgatgtgcgtgatcagcgccagcgtgcacggcgtggaccagagaggcagactgctgagaagaaccctgatcagatacgccaacctggccagcgtgctggtgctgagaagcgtgagcaccagagtgctgaagagattccccaccatggagcacgtggtggacgccggcttcatgagccaggaggagagaaagaagttcgagagcctgaagagcgacttcaacaagtactgggtgccctgcgtgtggttcaccaacctggccgcccaggccagaagagacggcagaatcagagacgacatcgccctgtgcctgctgctggaggagctgaacaagtacagagccaagtgcagcatgctgttccactacgactggatcagcatccccctggtgtacacccaggtggtgaccatcgccgtgtacagcttcttcgccctgagcctggtgggcagacagttcgtggagcccgaggccggcgccgccaagccccagaagctgctgaagcccggccaggagcccgcccccgccctgggcgaccccgacatgtacgtgcccctgaccaccctgctgcagttcttcttctacgccggctggctgaaggtggccgagcagatcatcaaccccttcggcgaggacgacgacgacttcgagaccaaccagctgatcgacagaaacctgcaggtgagcctgctgagcgtggacgagatgtaccagaacctgccccccgccgagaaggaccagtactgggacgaggaccagccccagcccccctacaccgtggccaccgccgccgagagcctgagacccagcttcctgggcagcaccttcaacctgagaatgagcgacgaccccgagcagagcctgcaggtggaggccagccccggcagcggcagacccgcccccgccgcccagacccccctgctgggcagattcctgggcgtgggcgcccccagccccgccatcagcctgagaaacttcggcagagtgagaggcacccccagacccccccacctgctgagattcagagccgaggagggcggcgaccccgaggccgccgccagaatcgaggaggagagcgccgagagcggcgacgaggccctggagccctag

SEQ ID NO: 74350 - DNA, 294 bp, synthetic construct
  misc_feature 1..294: note = Description of Artificial Sequence: Synthetic coding sequence
  source 1..294: mol_type = other DNA
atgtacctgggcatcacccccagcgtgacctgcaacaacagcagcaagaacgagttcagcctgatcctggagaagaaccccctggtggagttcgtggaggagctgcccgccggcagaagcagcctgtgctactgcaacctgctgtgcggcatcatcagaggcgccctggagatggtgcacctggccgccgacgtgaccttcctgcaggacagactgaagggcgacagcgtgaccgagatcggcatcaccttcctgaagaagagagacgagaagaagtacagaggcaagaagtag

SEQ ID NO: 74351 - DNA, 546 bp, synthetic construct
  misc_feature 1..546: note = Description of Artificial Sequence: Synthetic coding sequence
  source 1..546: mol_type = other DNA
atgagcagacccgcccacagaagacccgagtaccacaagatcaacaaggacctgttcgtgctgacctacggcgccctggtggcccagctgtgcaaggactacgagaaggacgaggacgtgaaccagtacctggacaagatgggctacggcatcggcaccagactggtggaggacttcctggccagaagctgcgtgggcagatgccacagctacagcgagatcatcgacatcatcgcccaggtggccttcaagatgtacctgggcatcacccccagcgtgacctgcaacaacagcagcaagaacgagttcagcctgatcctggagaagaaccccctggtggagttcgtggaggagctgcccgccggcagaagcagcctgtgctactgcaacctgctgtgcggcatcatcagaggcgccctggagatggtgcacctggccgccgacgtgaccttcctgcaggacagactgaagggcgacagcgtgaccgagatcggcatcaccttcctgaagaagagagacgagaagaagtacagaggcaagaagtag

SEQ ID NO: 74352 - DNA, 504 bp, synthetic construct
  misc_feature 1..504: note = Description of Artificial Sequence: Synthetic coding sequence
  source 1..504: mol_type = other DNA
aacaaggacctgttcgtgctgacctacggcgccctggtggcccagctgtgcaaggactacgagaaggacgaggacgtgaaccagtacctggacaagatgggctacggcatcggcaccagactggtggaggacttcctggccagaagctgcgtgggcagatgccacagctacagcgagatcatcgacatcatcgcccaggtggccttcaagatgtacctgggcatcacccccagcgtgacctgcaacaacagcagcaagaacgagttcagcctgatcctggagaagaaccccctggtggagttcgtggaggagctgcccgccggcagaagcagcctgtgctactgcaacctgctgtgcggcatcatcagaggcgccctggagatggtgcacctggccgccgacgtgaccttcctgcaggacagactgaagggcgacagcgtgaccgagatcggcatcaccttcctgaagaagagagacgagaagaagtacagaggcaagaagtag

SEQ ID NO: 74353 - DNA, 1497 bp, synthetic construct
  misc_feature 1..1497: note = Description of Artificial Sequence: Synthetic coding sequence
  source 1..1497: mol_type = other DNA
atgagaccccccgcctgctggtggctgctggccccccccgccctgctggccctgctgacctgcagcctggccttcggcctggccagcgaggacaccaagaaggaggtgaagcagagccaggacctggagaagagcggcatcagcagaaagaacgacatcgacctgaagggcatcgtgttcgtgatccagagccagagcaacagcttccacgccaagagagccgagcagctgaagaagagcatcctgaagcaggccgccgacctgacccaggagctgcccagcgtgctgctgctgcaccagctggccaagcaggagggcgcctggaccatcctgcccctgctgccccacttcagcgtgacctacagcagaaacagcagctggatcttcttctgcgaggaggagaccagaatccagatccccaagctgctggagaccctgagaagatacgaccccagcaaggagtggttcctgggcaaggccctgcacgacgaggaggccaccatcatccaccactacgccttcagcgagaaccccaccgtgttcaagtaccccgacttcgccgccggctgggccctgagcatccccctggtgaacaagctgaccaagagactgaagagcgagagcctgaagagcgacttcaccatcgacctgaagcacgagatcgccctgtacatctgggacaagggcggcggcccccccctgacccccgtgcccgagttctgcaccaacgacgtggacttctactgcgccaccaccttccacagcttcctgcccctgtgcagaaagcccgtgaagaagaaggacatcttcgtggccgtgaagacctgcaagaagttccacggcgacagaatccccatcgtgaagcagacctgggagagccaggccagcctgatcgagtactacagcgactacaccgagaacagcatccccaccgtggacctgggcatccccaacaccgacagaggccactgcggcaagaccttcgccatcctggagagattcctgaacagaagccaggacaagaccgcctggctggtgatcgtggacgacgacaccctgatcagcatcagcagactgcagcacctgctgagctgctacgacagcggcgagcccgtgttcctgggcgagagatacggctacggcctgggcaccggcggctacagctacatcaccggcggcggcggcatggtgttcagcagagaggccgtgagaagactgctggccagcaagtgcagatgctacagcaacgacgcccccgacgacatggtgctgggcatgtgcttcagcggcctgggcatccccgtgacccacagccccctgttccaccaggccagacccgtggactaccccaaggactacctgagccaccaggtgcccatcagcttccacaagcactggaacatcgaccccgtgaaggtgtacttcacctggctggcccccagcgacgaggacaaggccagacaggagacccagaagggcttcagagaggagctgtag

SEQ ID NO: 74354 - DNA, 1005 bp, synthetic construct
  misc_feature 1..1005: note = Description of Artificial Sequence: Synthetic coding sequence
  source 1..1005: mol_type = other DNA
atgcccaagagaagagacatcctggccatcgtgctgatcgtgctgccctggaccctgctgatcaccgtgtggcaccagagcaccctggcccccctgctggccgtgcacaaggacgagggcagcgaccccagaagagagaccccccccggcgccgaccccagagagtactgcaccagcgacagagacatcgtggaggtggtgagaaccgagtacgtgtacaccagaccccccccctggagcgacaccctgcccaccatccacgtggtgacccccacctacagcagacccgtgcagaaggccgagctgaccagaatggccaacaccctgctgcacgtgcccaacctgcactggctggtggtggaggacgcccccagaagaacccccctgaccgccagactgctgagagacaccggcctgaactacacccacctgcacgtggagacccccagaaactacaagctgagaggcgacgccagagaccccagaatccccagaggcaccatgcagagaaacctggccctgagatggctgagagagaccttccccagaaacagcagccagcccggcgtggtgtacttcgccgacgacgacaacacctacagcctggagctgttcgaggagatgagaagcaccagaagagtgagcgtgtggcccgtggccttcgtgggcggcctgagatacgaggcccccagagtgaacggcgccggcaaggtggtgggctggaagaccgtgttcgacccccacagacccttcgccatcgacatggccggcttcgccgtgaacctgagactgatcctgcagagaagccaggcctacttcaagctgagaggcgtgaagggcggctaccaggagagcagcctgctgagagagctggtgaccctgaacgacctggagcccaaggccgccaactgcaccaagatcctggtgtggcacaccagaaccgagaagcccgtgctggtgaacgagggcaagaagggcttcaccgaccccagcgtggagatctag

SEQ ID NO: 74355 - DNA, 1005 bp, synthetic construct; identical to SEQ ID NO: 74354
  misc_feature 1..1005: note = Description of Artificial Sequence: Synthetic coding sequence
  source 1..1005: mol_type = other DNA

SEQ ID NO: 74356 - DNA, 1005 bp, synthetic construct; identical to SEQ ID NO: 74354
  misc_feature 1..1005: note = Description of Artificial Sequence: Synthetic coding sequence
  source 1..1005: mol_type = other DNA

SEQ ID NO: 74357 - DNA, 1044 bp, synthetic construct
  misc_feature 1..1044: note = Description of Artificial Sequence: Synthetic coding sequence
  source 1..1044: mol_type = other DNA
atgggcaacgaggagccctgggtgcagcccgccctggagatgcccaagagaagagacatcctggccatcgtgctgatcgtgctgccctggaccctgctgatcaccgtgtggcaccagagcaccctggcccccctgctggccgtgcacaaggacgagggcagcgaccccagaagagagaccccccccggcgccgaccccagagagtactgcaccagcgacagagacatcgtggaggtggtgagaaccgagtacgtgtacaccagaccccccccctggagcgacaccctgcccaccatccacgtggtgacccccacctacagcagacccgtgcagaaggccgagctgaccagaatggccaacaccctgctgcacgtgcccaacctgcactggctggtggtggaggacgcccccagaagaacccccctgaccgccagactgctgagagacaccggcctgaactacacccacctgcacgtggagacccccagaaactacaagctgagaggcgacgccagagaccccagaatccccagaggcaccatgcagagaaacctggccctgagatggctgagagagaccttccccagaaacagcagccagcccggcgtggtgtacttcgccgacgacgacaacacctacagcctggagctgttcgaggagatgagaagcaccagaagagtgagcgtgtggcccgtggccttcgtgggcggcctgagatacgaggcccccagagtgaacggcgccggcaaggtggtgggctggaagaccgtgttcgacccccacagacccttcgccatcgacatggccggcttcgccgtgaacctgagactgatcctgcagagaagccaggcctacttcaagctgagaggcgtgaagggcggctaccaggagagcagcctgctgagagagctggtgaccctgaacgacctggagcccaaggccgccaactgcaccaagatcctggtgtggcacaccagaaccgagaagcccgtgctggtgaacgagggcaagaagggcttcaccgaccccagcgtggagatctag

SEQ ID NO: 74358 - DNA, 1008 bp, synthetic construct
  misc_feature 1..1008: note = Description of Artificial Sequence: Synthetic coding sequence
  source 1..1008: mol_type = other DNA
atgaagctgaagctgaagaacgtgttcctggcctacttcctggtgagcatcgccggcctgctgtacgccctggtgcagctgggccagccctgcgactgcctgccccccctgagagccgccgccgagcagctgagacagaaggacctgagaatcagccagctgcaggccgagctgagaagacccccccccgcccccgcccagccccccgagcccgaggccctgcccaccatctacgtggtgacccccacctacgccagactggtgcagaaggccgagctggtgagactgagccagaccctgagcctggtgcccagactgcactggctgctggtggaggacgccgagggccccacccccctggtgagcggcctgctggccgccagcggcctgctgttcacccacctggtggtgctgacccccaaggcccagagactgagagagggcgagcccggctgggtgcaccccagaggcgtggagcagagaaacaaggccctggactggctgagaggcagaggcggcgccgtgggcggcgagaaggacccccccccccccggcacccagggcgtggtgtacttcgccgacgacgacaacacctacagcagagagctgttcgaggagatgagatggaccagaggcgtgagcgtgtggcccgtgggcctggtgggcggcctgagattcgagggcccccaggtgcaggacggcagagtggtgggcttccacaccgcctgggagcccagcagacccttccccgtggacatggccggcttcgccgtggccctgcccctgctgctggacaagcccaacgcccagttcgacagcaccgcccccagaggccacctggagagcagcctgctgagccacctggtggaccccaaggacctggagcccagagccgccaactgcaccagagtgctggtgtggcacaccagaaccgagaagcccaagatgaagcaggaggagcagctgcagagacagggcagaggcagcgaccccgccatcgaggtgtag

SEQ ID NO: 74359 - DNA, 948 bp, synthetic construct
  misc_feature 1..948: note = Description of Artificial Sequence: Synthetic coding sequence
  source 1..948: mol_type = other DNA
atgaagctgaagctgaagaacgtgttcctggcctacttcctggtgagcatcgccggcctgctgtacgccctggtgcagctgggccagccctgcgactgcctgccccccctgagagccgccgccgagcagctgagacagaaggacctgagaatcagccagctgcaggccgagctgagaagacccccccccgcccccgcccagccccccgagcccgaggccctgcccaccatctacgtggtgacccccacctacgccagactggtgcagaaggccgagctggtgagactgagccagaccctgagcctggtgcccagactgcactggctgctggtggaggacgccgagggccccacccccctggtgagcggcctgctggccgccagcggcctgctgttcacccacctggtggtgctgacccccaaggcccagagactgagagagggcgagcccggctgggtgcaccccagaggcgtggagcagagaaacaaggccctggactggctgagaggcagaggcggcgccgtgggcggcgagaaggacccccccccccccggcacccagggcgtggtgtacttcgccgacgacgacaacacctacagcagagagctgttcgaggagatgagatggaccagaggcgtgagcgtgtggcccgtgggcctggtgggcggcctgagattcgagggcccccaggtgcaggacggcagagtggtgggcttccacaccgcctgggagcccagcagacccttccccgtggacatggccggcttcgccgtggccctgcccctgctgctggacaagcccaacgcccagttcgacagcaccgcccccagaggccacctggagagcagcctgctgagccacctggtggaccccaaggacctggagcccagagccgccaactgcaccagaaccgagagcagatgcgtgacccaggccggcgtgcagtag

SEQ ID NO: 74360 - DNA, 2997 bp, synthetic construct
  misc_feature 1..2997: note = Description of Artificial Sequence: Synthetic coding sequence
  source 1..2997: mol_type = other DNA
atgggcagccccagagccgccagaccccccctgctgctgagacccgtgaagctgctgagaagaagattcagactgctgctggccctggccgtggtgagcgtgggcctgtggaccctgtacctggagctggtggccagcgcccaggtgggcggcaaccccctgaacagaagatacggcagctggagagagctggccaaggccctggccagcagaaacatccccgccgtggacccccacctgcagttctaccacccccagagactgagcctggaggaccacgacatcgaccagggcgtgagcagcaacagcagctacctgaagtggaacaagcccgtgccctggctgagcgagttcagaggcagagccaacctgcacgtgttcgaggactggtgcggcagcagcatccagcagctgagaagaaacctgcacttccccctgtacccccacatcagaaccaccctgagaaagctggccgtgagccccaagtggaccaactacggcctgagaatcttcggctacctgcaccccttcaccgacggcaagatccagttcgccatcgccgccgacgacaacgccgagttctggctgagcctggacgaccaggtgagcggcctgcagctgctggccagcgtgggcaagaccggcaaggagtggaccgcccccggcgagttcggcaagttcagaagccagatcagcaagcccgtgagcctgagcgccagccacagatactacttcgaggtgctgcacaagcagaacgaggagggcaccgaccacgtggaggtggcctggagaagaaacgaccccggcgccaagttcaccatcatcgacagcctgagcctgagcctgttcaccaacgagaccttcctgcagatggacgaggtgggccacatcccccagaccgccgccagccacgtggacagcagcaacgccctgcccagagacgagcagccccccgccgacatgctgagacccgaccccagagacaccctgtacagagtgcccctgatccccaagagccacctgagacacgtgctgcccgactgcccctacaagcccagctacctggtggacggcctgcccctgcagagataccagggcctgagattcgtgcacctgagcttcgtgtaccccaacgactacaccagactgagccacatggagacccacaacaagtgcttctaccaggagaacgcctactaccaggacagattcagcttccaggagtacatcaagatcgaccagcccgagaagcagggcctggagcagcccggcttcgaggagaacctgctggaggagagccagtacggcgaggtggccgaggagacccccgccagcaacaaccagaacgccagaatgctggagggcagacagacccccgccagcaccctggagcaggacgccaccgactacagactgagaagcctgagaaagctgctggcccagcccagagagggcctgctggcccccttcagcaagagaaacagcaccgccagcttccccggcagaaccagccacatccccgtgcagcagcccgagaagagaaagcagaagcccagccccgagcccagccaggacagcccccacagcgacaagtggccccccggccaccccgtgaagaacctgccccagatgagaggccccagacccagacccgccggcgacagccccagaaagacccagtggctgaaccaggtggagagctacatcgccgagcagagaagaggcgacagaatgagaccccaggcccccggcagaggctggcacggcgaggaggaggtggtggccgccgccggccaggagggccaggtggagggcgaggaggagggcgaggaggaggaggaggaggaggacatgagcgaggtgttcgagtacgtgcccgtgttcgaccccgtggtgaactgggaccagaccttcagcgccagaaacctggacttccaggccctgagaaccgactggatcgacctgagctgcaacaccagcggcaacctgctgctgcccgagcaggaggccctggaggtgaccagagtgttcctgaagaagctgaaccagagaagcagaggcagataccagctgcagagaatcgtgaacgtggagaagagacaggaccagctgagaggcggcagatacctgctggagctggagctgctggagcagggccagagagtggtgagactgagcgagtacgtgagcgccagaggctggcagggcatcgaccccgccggcggcgaggaggtggaggccagaaacctgcagggcctggtgtgggacccccacaacagaagaagacaggtgctgaacaccagagcccaggagcccaagctgtgctggccccagggcttcagctggagccacagagccgtggtgcacttcgtggtgcccgtgaagaaccaggccagatgggtgcagcagttcatcaaggacatggagaacctgttccaggtgaccggcgacccccacttcaacatcgtgatcaccgactacagcagcgaggacatggacgtggagatggccctgaagagaagcaagctgagaagctaccagtacgtgaagctgagcggcaacttcgagagaagcgccggcctgcaggccggcatcgacctggtgaaggacccccacagcatcatcttcctgtgcgacctgcacatccacttccccgccggcgtgatcgacgccatcagaaagcactgcgtggagggcaagatggccttcgcccccatggtgatgagactgcactgcggcgccaccccccagtggcccgagggctactgggaggtgaacggcttcggcctgctgggcatctacaagagcgacctggacagaatcggcggcatgaacaccaaggagttcagagacagatggggcggcgaggactgggagctgctggacagaatcctgcaggccggcctggacgtggagagactgagcctgagaaacttcttccaccacttccacagcaagagaggcatgtggagcagaagacagatgaagaccctgtag

SEQ ID NO: 74361 - DNA, 306 bp, synthetic construct
  misc_feature 1..306: note = Description of Artificial Sequence: Synthetic coding sequence
  source 1..306: mol_type = other DNA
atgagcagaagcgtggccctggccgtgctggccctgctgagcctgagcggcctggaggccatccagagaacccccaagatccaggtgtacagcagacaccccgccgagaacggcaagagcaacttcctgaactgctacgtgagcggcttccaccccagcgacatcgaggtggacctgctgaagaacggcgagagaatcgagaaggtggagcacagcgacctgagcttcagcaaggactggagcttctacctgctgtactacaccgagttcacccccaccgagaagatgagcatgcccgccgtgtag

SEQ ID NO: 74362 - DNA, 369 bp, synthetic construct
  misc_feature 1..369: note = Description of Artificial Sequence: Synthetic coding sequence
  source 1..369: mol_type = other DNA
atgagcagaagcgtggccctggccgtgctggccctgctgagcctgagcggcctggaggccatccagagaacccccaagatccaggtgtacagcagacaccccgccgagaacggcaagagcaacttcctgaactgctacgtgagcggcttccaccccagcgacatcgaggtggacctgctgaagaacggcgagagaatcgagaaggtggagcacagcgacctgagcttcagcaaggactggagcttctacctgctgtactacaccgagttcacccccaccgagaaggacgagtacgcctgcagagtgaaccacgtgaccctgagccagcccaagatcgtgaagtggggcaagagctacatcctgctgtag

SEQ ID NO: 74363 - DNA, 360 bp, synthetic construct
  misc_feature 1..360: note = Description of Artificial Sequence: Synthetic coding sequence
  source 1..360: mol_type = other DNA
atgagcagaagcgtggccctggccgtgctggccctgctgagcctgagcggcctggaggccatccagagaacccccaagatccaggtgtacagcagacaccccgccgagaacggcaagagcaacttcctgaactgctacgtgagcggcttccaccccagcgacatcgaggtggacctgctgaagaacggcgagagaatcgagaaggtggagcacagcgacctgagcttcagcaaggactggagcttctacctgctgtactacaccgagttcacccccaccgagaaggacgagtacgcctgcagagtgaaccacgtgaccctgagccagcccaagatcgtgaagtgggacagagacatgtag

SEQ ID NO: 74364 - DNA, 369 bp, synthetic construct; identical to SEQ ID NO: 74362
  misc_feature 1..369: note = Description of Artificial Sequence: Synthetic coding sequence
  source 1..369: mol_type = other DNA

SEQ ID NO: 74365 - DNA, 360 bp, synthetic construct; identical to SEQ ID NO: 74363
  misc_feature 1..360: note = Description of Artificial Sequence: Synthetic coding sequence
  source 1..360: mol_type = other DNA

SEQ ID NO: 74366 - DNA, 360 bp, synthetic construct; identical to SEQ ID NO: 74363
  misc_feature 1..360: note = Description of Artificial Sequence: Synthetic coding sequence
  source 1..360: mol_type = other DNA

SEQ ID NO: 74367 - DNA, 1644 bp, synthetic construct
  misc_feature 1..1644: note = Description of Artificial Sequence: Synthetic coding sequence
  source 1..1644: mol_type = other DNA
atggacatcatcttcggcagaaacagaaaggagcagctggagcccgtgagagccaaggtgaccggcaagatccccgcctggctgcagggcaccctgctgagaaacggccccggcatgcacaccgtgggcgagagcagatacaaccactggttcgacggcctggccctgctgcacagcttcaccatcagagacggcgaggtgtactacagaagcaagtacctgagaagcgacacctacaacaccaacatcgaggccaacagaatcgtggtgagcgagttcggcaccatggcctaccccgacccctgcaagaacatcttcagcaaggccttcagctacctgagccacaccatccccgacttcaccgacaactgcctgatcaacatcatgaagtgcggcgaggacttctacgccaccagcgagaccaactacatcagaaagatcaacccccagaccctggagaccctggagaaggtggactacagaaagtacgtggccgtgaacctggccaccagccacccccactacgacgaggccggcaacgtgctgaacatgggcaccagcatcgtggagaagggcaagaccaagtacgtgatcttcaagatccccgccaccgtgcccgagggcaagaagcagggcaagagcccctggaagcacaccgaggtgttctgcagcatccccagcagaagcctgctgagccccagctactaccacagcttcggcgtgaccgagaactacgtgatcttcctggagcagcccttcagactggacatcctgaagatggccaccgcctacatcagaagaatgagctgggccagctgcctggccttccacagagaggagaagacctacatccacatcatcgaccagagaaccagacagcccgtgcagaccaagttctacaccgacgccatggtggtgttccaccacgtgaacgcctacgaggaggacggctgcatcgtgttcgacgtgatcgcctacgaggacaacagcctgtaccagctgttctacctggccaacctgaaccaggacttcaaggagaacagcagactgaccagcgtgcccaccctgagaagattcgccgtgcccctgcacgtggacaagaacgccgaggtgggcaccaacctgatcaaggtggccagcaccaccgccaccgccctgaaggaggaggacggccaggtgtactgccagcccgagttcctgtacgagggcctggagctgcccagagtgaactacgcccacaacggcaagcagtacagatacgtgttcgccaccggcgtgcagtggagccccatccccaccaagatcatcaagtacgacatcctgaccaagagcagcctgaagtggagagaggacgactgctggcccgccgagcccctgttcgtgcccgcccccggcgccaaggacgaggacgacggcgtgatcctgagcgccatcgtgagcaccgacccccagaagctgcccttcctgctgatcctggacgccaagagcttcaccgagctggccagagccagcgtggacgtggacatgcacatggacctgcacggcctgttcatcaccgacatggactgggacaccaagaagcaggccgccagcgaggagcagagagacagagccagcgactgccacggcgcccccctgacctag

SEQ ID NO: 74368 - DNA, 1437 bp, synthetic construct
  misc_feature 1..1437: note = Description of Artificial Sequence: Synthetic coding sequence
  source 1..1437: mol_type = other DNA
atggccgccggcaaccccgccccccagtgggcctgggacgcccacagctggggcgtgcagatccagcccctggtgagaagaccctgccccgccccccagctgcaccaccagagaagagccttcagctacctgagccacaccatccccgacttcaccgacaactgcctgatcaacatcatgaagtgcggcgaggacttctacgccaccagcgagaccaactacatcagaaagatcaacccccagaccctggagaccctggagaaggtggactacagaaagtacgtggccgtgaacctggccaccagccacccccactacgacgaggccggcaacgtgctgaacatgggcaccagcatcgtggagaagggcaagaccaagtacgtgatcttcaagatccccgccaccgtgcccgagggcaagaagcagggcaagagcccctggaagcacaccgaggtgttctgcagcatccccagcagaagcctgctgagccccagctactaccacagcttcggcgtgaccgagaactacgtgatcttcctggagcagcccttcagactggacatcctgaagatggccaccgcctacatcagaagaatgagctgggccagctgcctggccttccacagagaggagaagacctacatccacatcatcgaccagagaaccagacagcccgtgcagaccaagttctacaccgacgccatggtggtgttccaccacgtgaacgcctacgaggaggacggctgcatcgtgttcgacgtgatcgcctacgaggacaacagcctgtaccagctgttctacctggccaacctgaaccaggacttcaaggagaacagcagactgaccagcgtgcccaccctgagaagattcgccgtgcccctgcacgtggacaagaacgccgaggtgggcaccaacctgatcaaggtggccagcaccaccgccaccgccctgaaggaggaggacggccaggtgtactgccagcccgagttcctgtacgagggcctggagctgcccagagtgaactacgcccacaacggcaagcagtacagatacgtgttcgccaccggcgtgcagtggagccccatccccaccaagatcatcaagtacgacatcctgaccaagagcagcctgaagtggagagaggacgactgctggcccgccgagcccctgttcgtgcccgcccccggcgccaaggacgaggacgacggcgtgatcctgagcgccatcgtgagcaccgacccccagaagctgcccttcctgctgatcctggacgccaagagcttcaccgagctggccagagccagcgtggacgtggacatgcacatggacctgcacggcctgttcatcaccgacatggactgggacaccaagaagcaggccgccagcgaggagcagagagacagagccagcgactgccacggcgcccccctgacctag

SEQ ID NO: 74369 - DNA, 1740 bp, synthetic construct
  misc_feature 1..1740: note = Description of Artificial Sequence: Synthetic coding sequence
  source 1..1740: mol_type = other DNA
atgttcttcagagtgttcctgcacttcatcagaagccacagcgccaccgccgtggacttcctgcccgtgatggtgcacagactgcccgtgttcaagagatacatgggcaacaccccccagaagaaggccgtgttcggccagtgcagaggcctgccctgcgtggcccccctgctgaccaccgtggaggaggcccccagaggcatcagcgccagagtgtggggccacttccccaagtggctgaacggcagcctgctgagaatcggccccggcaagttcgagttcggcaaggacaagtacaaccactggttcgacggcatggccctgctgcaccagttcagaatggccaagggcaccgtgacctacagaagcaagttcctgcagagcgacacctacaaggccaacagcgccaagaacagaatcgtgatcagcgagttcggcaccctggccctgcccgacccctgcaagaacgtgttcgagagattcatgagcagattcgagctgcccggcaaggccgccgccatgaccgacaacaccaacgtgaactacgtgagatacaagggcgactactacctgtgcaccgagaccaacttcatgaacaaggtggacatcgagaccctggagaagaccgagaaggtggactggagcaagttcatcgccgtgaacggcgccaccgcccacccccactacgacctggacggcaccgcctacaacatgggcaacagcttcggcccctacggcttcagctacaaggtgatcagagtgccccccgagaaggtggacctgggcgagaccatccacggcgtgcaggtgatctgcagcatcgccagcaccgagaagggcaagcccagctactaccacagcttcggcatgaccagaaactacatcatcttcatcgagcagcccctgaagatgaacctgtggaagatcgccaccagcaagatcagaggcaaggccttcagcgacggcatcagctgggagccccagtgcaacaccagattccacgtggtggagaagagaaccggccagctgctgcccggcagatactacagcaagcccttcgtgaccttccaccagatcaacgccttcgaggaccagggctgcgtgatcatcgacctgtgctgccaggacaacggcagaaccctggaggtgtaccagctgcagaacctgagaaaggccggcgagggcctggaccaggtgcacaacagcgccgccaagagcttccccagaagattcgtgctgcccctgaacgtgagcctgaacgcccccgagggcgacaacctgagccccctgagctacaccagcgccagcgccgtgaagcaggccgacggcaccatctggtgcagccacgagaacctgcaccaggaggacctggagaaggagggcggcatcgagttcccccagatctactacgacagattcagcggcaagaagtaccacttcttctacggctgcggcttcagacacctggtgggcgacagcctgatcaaggtggacgtggtgaacaagaccctgaaggtgtggagagaggacggcttctaccccagcgagcccgtgttcgtgcccgcccccggcaccaacgaggaggacggcggcgtgatcctgagcgtggtgatcacccccaaccagaacgagagcaacttcatcctggtgctggacgccaagaacttcgaggagctgggcagagccgaggtgcccgtgcagatgccctacggcttccacggcaccttcatccccatctag

SEQ ID NO: 74370 - DNA, 1638 bp, synthetic construct
  misc_feature 1..1638: note = Description of Artificial Sequence: Synthetic coding sequence
  source 1..1638: mol_type = other DNA
atgggcaacaccccccagaagaaggccgtgttcggccagtgcagaggcctgccctgcgtggcccccctgctgaccaccgtggaggaggcccccagaggcatcagcgccagagtgtggggccacttccccaagtggctgaacggcagcctgctgagaatcggccccggcaagttcgagttcggcaaggacaagtacaaccactggttcgacggcatggccctgctgcaccagttcagaatggccaagggcaccgtgacctacagaagcaagttcctgcagagcgacacctacaaggccaacagcgccaagaacagaatcgtgatcagcgagttcggcaccctggccctgcccgacccctgcaagaacgtgttcgagagattcatgagcagattcgagctgcccggcaaggccgccgccatgaccgacaacaccaacgtgaactacgtgagatacaagggcgactactacctgtgcaccgagaccaacttcatgaacaaggtggacatcgagaccctggagaagaccgagaaggtggactggagcaagttcatcgccgtgaacggcgccaccgcccacccccactacgacctggacggcaccgcctacaacatgggcaacagcttcggcccctacggcttcagctacaaggtgatcagagtgccccccgagaaggtggacctgggcgagaccatccacggcgtgcaggtgatctgcagcatcgccagcaccgagaagggcaagcccagctactaccacagcttcggcatgaccagaaactacatcatcttcatcgagcagcccctgaagatgaacctgtggaagatcgccaccagcaagatcagaggcaaggccttcagcgacggcatcagctgggagccccagtgcaacaccagattccacgtggtggagaagagaaccggccagctgctgcccggcagatactacagcaagcccttcgtgaccttccaccagatcaacgccttcgaggaccagggctgcgtgatcatcgacctgtgctgccaggacaacggcagaaccctggaggtgtaccagctgcagaacctgagaaaggccggcgagggcctggaccaggtgcacaacagcgccgccaagagcttccccagaagattcgtgctgcccctgaacgtgagcctgaacgcccccgagggcgacaacctgagccccctgagctacaccagcgccagcgccgtgaagcaggccgacggcaccatctggtgcagccacgagaacctgcaccaggaggacctggagaaggagggcggcatcgagttcccccagatctactacgacagattcagcggcaagaagtaccacttcttctacggctgcggcttcagacacctggtgggcgacagcctgatcaaggtggacgtggtgaacaagaccctgaaggtgtggagagaggacggcttctaccccagcgagcccgtgttcgtgcccgcccccggcaccaacgaggaggacggcggcgtgatcctgagcgtggtgatcacccccaaccagaacgagagcaacttcatcctggtgctggacgccaagaacttcgaggagctgggcagagccgaggtgcccgtgcagatgccctacggcttccacggcaccttcatccccatctag

SEQ ID NO: 74371 - DNA, 1638 bp, synthetic construct; identical to SEQ ID NO: 74370
  misc_feature 1..1638: note = Description of Artificial Sequence: Synthetic coding sequence
  source 1..1638: mol_type = other DNA

SEQ ID NO: 74372 - DNA, 1620 bp, synthetic construct
  misc_feature 1..1620: note = Description of Artificial Sequence: Synthetic coding sequence
  source 1..1620: mol_type = other DNA
atgggcaacaccccccagaagaaggccgtgttcggccagtgcagaggcctgccctgcgtggcccccctgctgaccaccgtggaggaggcccccagaggcatcagcgccagagtgtggggccacttccccaagtggctgaacggcagcctgctgagaatcggccccggcaagttcgagttcggcaaggacaagtacaaccactggttcgacggcatggccctgctgcaccagttcagaatggccaagggcaccgtgacctacagaagcaagttcctgcagagcgacacctacaaggccaacagcgccaagaacagaatcgtgatcagcgagttcggcaccctggccctgcccgacccctgcaagaacgtgttcgagagattcatgagcagattcgagctgcccggcaaggccgccgccatgaccgacaacaccaacgtgaactacgtgagatacaagggcgactactacctgtgcaccgagaccaacttcatgaacaaggtggacatcgagaccctggagaagaccgagaaggtggactggagcaagttcatcgccgtgaacggcgccaccgcccacccccactacgacctggacggcaccgcctacaacatgggcaacagcttcggcccctacggcttcagctacaaggtgatcagagtgccccccgagaaggtggacctgggcgagaccatccacggcgtgcaggtgatctgcagcatcgccagcaccgagaagggcaagcccagctactaccacagcttcggcatgaccagaaactacatcatcttcatcgagcagcccctgaagatgaacctgtggaagatcgccaccagcaagatcagaggcaaggccttcagcgacggcatcagctgggagccccagtgcaacaccagattccacgtggtggagaagagaaccggccagctgctgcccggcagatactacagcaagcccttcgtgaccttccaccagatcaacgccttcgaggaccagggctgcgtgatcatcgacctgtgctgccaggacaacggcagaaccctggaggtgtaccagctgcagaacctgagaaaggccggcgagggcctggaccaggtgcacaacagcgccgccaagagcttccccagaagattcgtgctgcccctgaacgtgagcctgaacgcccccgagggcgacaacctgagccccctgagctacaccagcgccagcgccgtgaagcaggccgacggcaccatctggtgcagccacgagaacctgcaccaggaggacctggagaaggagggcggcatcgagttcccccagatctactacgacagattcagcggcaagaagtaccacttcttctacggctgcggcttcagacacctggtgggcgacagcctgatcaaggtggacgtggtgtggagagaggacggcttctaccccagcgagcccgtgttcgtgcccgcccccggcaccaacgaggaggacggcggcgtgatcctgagcgtggtgatcacccccaaccagaacgagagcaacttcatcctggtgctggacgccaagaacttcgaggagctgggcagagccgaggtgcccgtgcagatgccctacggcttccacggcaccttcatccccatctag

SEQ ID NO: 74373 - DNA, 1638 bp, synthetic construct; identical to SEQ ID NO: 74370
  misc_feature 1..1638: note = Description of Artificial Sequence: Synthetic coding sequence
  source 1..1638: mol_type = other DNA

SEQ ID NO: 74374 - DNA, 1221 bp, synthetic construct
  misc_feature 1..1221: note = Description of Artificial Sequence: Synthetic coding sequence
  source 1..1221: mol_type = other DNA
atgccccccgtgggcggcaagaaggccaagaagggcatcctggagagactgaacgccggcgagatcgtgatcggcgacggcggcttcgtgttcgccctggagaagagaggctacgtgaaggccggcccctggacccccgaggccgccgtggagcaccccgaggccgtgagacagctgcacagagagttcctgagagccggcagcaacgtgatgcagaccttcaccttctacgccagcgaggacaagctggagaacagaggcaactacgtgctggagaagatcagcggccaggaggtgaacgaggccgcctgcgacatcgccagacaggtggccgacgagggcgacgccctggtggccggcggcgtgagccagacccccagctacctgagctgcaagagcgagaccgaggtgaagaaggtgttcctgcagcagctggaggtgttcatgaagaagaacgtggacttcctgatcgccgagtacttcgagcacgtggaggaggccgtgtgggccgtggagaccctgatcgccagcggcaagcccgtggccgccaccatgtgcatcggccccgagggcgacctgcacggcgtgccccccggcgagtgcgccgtgagactggtgaaggccggcgccagcatcatcggcgtgaactgccacttcgaccccaccatcagcctgaagaccgtgaagctgatgaaggagggcctggaggccgccagactgaaggcccacctgatgagccagcccctggcctaccacacccccgactgcaacaagcagggcttcatcgacctgcccgagttccccttcggcctggagcccagagtggccaccagatgggacatccagaagtacgccagagaggcctacaacctgggcgtgagatacatcggcggctgctgcggcttcgagccctaccacatcagagccatcgccgaggagctggcccccgagagaggcttcctgccccccgccagcgagaagcacggcagctggggcagcggcctggacatgcacaccaagccctgggtgagagccagagccagaaaggagtactgggagaacctgagaatcgccagcggcagaccctacaaccccagcatgagcaagcccgacggctggggcgtgaccaagggcaccgccgagctgatgcagcagaaggaggccaccaccgagcagcagctgaaggagctgttcgagaagcagaagttcaagagccagtag

SEQ ID NO: 74375 - DNA, 612 bp, synthetic construct
  misc_feature 1..612: note = Description of Artificial Sequence: Synthetic coding sequence
  source 1..612: mol_type = other DNA
atgccccccgtgggcggcaagaaggccaagaagggcatcctggagagactgaacgccggcgagatcgtgatcggcgacggcggcttcgtgttcgccctggagaagagaggctacgtgaaggccggcccctggacccccgaggccgccgtggagcaccccgaggccggcgccagcatcatcggcgtgaactgccacttcgaccccaccatcagcctgaagaccgtgaagctgatgaaggagggcctggaggccgccagactgaaggcccacctgatgagccagcccctggcctaccacacccccgactgcaacaagcagggcttcatcgacctgcccgagttccccttcggcctggagcccgagctgccccccgacggcatcttcaagaacacccccgagagacccaccacctggggcagcggcaccctggccggcgccgtggacctgagccccaccaccagcggccagctgcagagaagctggccccagaagggcgccttctgccaccagctgcagaagaacatggccgccggcgaggtggtgtggacctgcacccccaaccccggcctggagcagggccccggcagaaacaccggcagaatcttcggctag

SEQ ID NO: 74376 - DNA, 1092 bp, synthetic construct
  misc_feature 1..1092: note = Description of Artificial Sequence: Synthetic coding sequence
  source 1..1092: mol_type = other DNA
atggcccccgccggcagacccggcgccaagaagggcatcctggagagactggagagcggcgaggtggtgatcggcgacggcagcttcctgatcaccctggagaagagaggctacgtgaaggccggcctgtggacccccgaggccgtgatcgagcaccccgacgccgtgagacagctgcacatggagttcctgagagccggcagcaacgtgatgcagaccttcaccttcagcgccagcgaggacaacatggagagcaagtgggaggacgtgaacgccgccgcctgcgacctggccagagaggtggccggcaagggcgacgccctggtggccggcggcatctgccagaccagcatctacaagtaccagaaggacgaggccagaatcaagaagctgttcagacagcagctggaggtgttcgcctggaagaacgtggacttcctgatcgccgagtacttcgagcacgtggaggaggccgtgtgggccgtggaggtgctgaaggagagcgacagacccgtggccgtgaccatgtgcatcggccccgagggcgacatgcacgacatcacccccggcgagtgcgccgtgagactggtgaaggccggcgccagcatcgtgggcgtgaactgcagattcggccccgacaccagcctgaagaccatggagctgatgaaggagggcctggagtgggccggcctgaaggcccacctgatggtgcagcccctgggcttccacgcccccgactgcggcaaggagggcttcgtggacctgcccgagtaccccttcggcctggagagcagagtggccaccagatgggacatccagaagtacgccagagaggcctacaacctgggcgtgagatacatcggcggctgctgcggcttcgagccctaccacatcagagccatcgccgaggagctggcccccgagagaggcttcctgccccccgccagcgagaagcacggcagctggggcagcggcctggacatgcacaccaagccctggatcagagccagagccagaagagagtactgggagaacctgctgcccgccagcggcagacccttctgccccagcctgagcaagcccgacttctag

SEQ ID NO: 74377 - DNA, 900 bp, synthetic construct
  misc_feature 1..900: note = Description of Artificial Sequence: Synthetic coding sequence
  source 1..900: mol_type = other DNA
atggcccccgccggcagacccggcgccaagaagggcatcctggagagactggagagcggcgaggtggtgatcggcgacggcagcttcctgatcaccctggagaagagaggctacgtgaaggccggcctgtggacccccgaggccgtgatcgagcaccccgacgccgtgagacagctgcacatggagttcctgagagccggcagcaacgtgatgcagaccttcaccttcagcgccagcgaggacaacatggagagcaagtacttcgagcacgtggaggaggccgtgtgggccgtggaggtgctgaaggagagcgacagacccgtggccgtgaccatgtgcatcggccccgagggcgacatgcacgacatcacccccggcgagtgcgccgtgagactggtgaaggccggcgccagcatcgtgggcgtgaactgcagattcggccccgacaccagcctgaagaccatggagctgatgaaggagggcctggagtgggccggcctgaaggcccacctgatggtgcagcccctgggcttccacgcccccgactgcggcaaggagggcttcgtggacctgcccgagtaccccttcggcctggagagcagagtggccaccagatgggacatccagaagtacgccagagaggcctacaacctgggcgtgagatacatcggcggctgctgcggcttcgagccctaccacatcagagccatcgccgaggagctggcccccgagagaggcttcctgccccccgccagcgagaagcacggcagctggggcagcggcctggacatgcacaccaagccctggatcagagccagagccagaagagagtactgggagaacctgctgcccgccagcggcagacccttctgccccagcctgagcaagcccgacttctag

SEQ ID NO: 74378 - DNA, 639 bp, synthetic construct
  misc_feature 1..639: note = Description of Artificial Sequence: Synthetic coding sequence
  source 1..639: mol_type = other DNA
atgatcatcggcggcatcgaccacagcctgtacaccggcagcctgtggtacacccccatcagaagagagtggtactacgaggtgatcatcgtgagagtggagatcaacggccaggacctgaagatggactgcaaggagtacaactacgacaagagcatcgtggacagcggcaccaccaacctgagactgcccaagaaggtgttcgaggccgccgtgaagagcatcaaggccgccagcagcaccgagaagttccccgacggcttctggctgggcgagcagctggtgtgctggcaggccggcaccaccccctggaacatcttccccgtgatcagcctgtacctgatgggcgaggtgaccaaccagagcttcagaatcaccatcctgccccagcagtacctgagatggaagatgtggcccagacccaagaccaccgtgacctgccacctgaccgtgatccacggccactgctacggcagctgctaccacggcggcctgctgctgagcctgatcggccccgagaacgagctggccctgctgagcgccctggccatgtgcaccatgagcagcggcagacagagatggaaggcctgccacctgggccacggcagactgtggctgcagcacagcaccgacagatag

SEQ ID NO: 74379 - DNA, 1506 bp, synthetic construct
  misc_feature 1..1506: note = Description of Artificial Sequence: Synthetic coding sequence
  source 1..1506: mol_type = other DNA
atggcccaggccctgccctggctgctgctgtggatgggcgccggcgtgctgcccgcccacggcacccagcacggcatcagactgcccctgagaagcggcctgggcggcgcccccctgggcctgagactgcccagagagaccgacgaggagcccgaggagcccggcagaagaggcagcttcgtggagatggtggacaacctgagaggcaagagcggccagggctactacgtggagatgaccgtgggcagccccccccagaccctgaacatcctggtggacaccggcagcagcaacttcgccgtgggcgccgccccccaccccttcctgcacagatactaccagagacagctgagcagcacctacagagacctgagaaagggcgtgtacgtgccctacacccagggcaagtgggagggcgagctgggcaccgacctggtgagcatcccccacggccccaacgtgaccgtgagagccaacatcgccgccatcaccgagagcgacaagttcttcatcaacggcagcaactgggagggcatcctgggcctggcctacgccgagatcgccagacccgacgacagcctggagcccttcttcgacagcctggtgaagcagacccacgtgcccaacctgttcagcctgcagctgtgcggcgccggcttccccctgaaccagagcgaggtgctggccagcgtgggcggcagcatgatcatcggcggcatcgaccacagcctgtacaccggcagcctgtggtacacccccatcagaagagagtggtactacgaggtgatcatcgtgagagtggagatcaacggccaggacctgaagatggactgcaaggagtacaactacgacaagagcatcgtggacagcggcaccaccaacctgagactgcccaagaaggtgttcgaggccgccgtgaagagcatcaaggccgccagcagcaccgagaagttccccgacggcttctggctgggcgagcagctggtgtgctggcaggccggcaccaccccctggaacatcttccccgtgatcagcctgtacctgatgggcgaggtgaccaaccagagcttcagaatcaccatcctgccccagcagtacctgagacccgtggaggacgtggccaccagccaggacgactgctacaagttcgccatcagccagagcagcaccggcaccgtgatgggcgccgtgatcatggagggcttctacgtggtgttcgacagagccagaaagagaatcggcttcgccgtgagcgcctgccacgtgcacgacgagttcagaaccgccgccgtggagggccccttcgtgaccctggacatggaggactgcggctacaacatcccccagaccgacgagagcaccctgatgaccatcgcctacgtgatggccgccatctgcgccctgttcatgctgcccctgtgcctgatggtgtgccagtggtgctgcctgagatgcctgagacagcagcacgacgacttcgccgacgacatcagcctgctgaagtag

SEQ ID NO: 74380 - DNA, 1299 bp, synthetic construct
  misc_feature 1..1299: note = Description of Artificial Sequence: Synthetic coding sequence
  source 1..1299: mol_type = other DNA
atggcccaggccctgccctggctgctgctgtggatgggcgccggcgtgctgcccgcccacggcacccagcacggcatcagactgcccctgagaagcggcctgggcggcgcccccctgggcctgagactgcccagagagaccgacgaggagcccgaggagcccggcagaagaggcagcttcgtggagatggtggacaacctgagaggcaagagcggccagggctactacgtggagatgaccgtgggcagccccccccagaccctgaacatcctggtggacaccggcagcagcaacttcgccgtgggcgccgccccccaccccttcctgcacagatactaccagagacagctgagcagcacctacagagacctgagaaagggcgtgtacgtgccctacacccagggcaagtgggagggcgagctgggcaccgacctgctgtgcggcgccggcttccccctgaaccagagcgaggtgctggccagcgtgggcggcagcatgatcatcggcggcatcgaccacagcctgtacaccggcagcctgtggtacacccccatcagaagagagtggtactacgaggtgatcatcgtgagagtggagatcaacggccaggacctgaagatggactgcaaggagtacaactacgacaagagcatcgtggacagcggcaccaccaacctgagactgcccaagaaggtgttcgaggccgccgtgaagagcatcaaggccgccagcagcaccgagaagttccccgacggcttctggctgggcgagcagctggtgtgctggcaggccggcaccaccccctggaacatcttccccgtgatcagcctgtacctgatgggcgaggtgaccaaccagagcttcagaatcaccatcctgccccagcagtacctgagacccgtggaggacgtggccaccagccaggacgactgctacaagttcgccatcagccagagcagcaccggcaccgtgatgggcgccgtgatcatggagggcttctacgtggtgttcgacagagccagaaagagaatcggcttcgccgtgagcgcctgccacgtgcacgacgagttcagaaccgccgccgtggagggccccttcgtgaccctggacatggaggactgcggctacaacatcccccagaccgacgagagcaccctgatgaccatcgcctacgtgatggccgccatctgcgccctgttcatgctgcccctgtgcctgatggtgtgccagtggtgctgcctgagatgcctgagacagcagcacgacgacttcgccgacgacatcagcctgctgaagtag

SEQ ID NO: 74381 - DNA, 1374 bp, synthetic construct
  misc_feature 1..1374: note = Description of Artificial Sequence: Synthetic coding sequence
  source 1..1374: mol_type = other DNA
atggcccaggccctgccctggctgctgctgtggatgggcgccggcgtgctgcccgcccacggcacccagcacggcatcagactgcccctgagaagcggcctgggcggcgcccccctgggcctgagactgcccagagagaccgacgaggagcccgaggagcccggcagaagaggcagcttcgtggagatggtggacaacctgagaggcaagagcggccagggctactacgtggagatgaccgtgggcagccccccccagaccctgaacatcctggtggacaccggcagcagcaacttcgccgtgggcgccgccccccaccccttcctgcacagatactaccagagacagctgagcagcacctacagagacctgagaaagggcgtgtacgtgccctacacccagggcaagtgggagggcgagctgggcaccgacctgcccgacgacagcctggagcccttcttcgacagcctggtgaagcagacccacgtgcccaacctgttcagcctgcagctgtgcggcgccggcttccccctgaaccagagcgaggtgctggccagcgtgggcggcagcatgatcatcggcggcatcgaccacagcctgtacaccggcagcctgtggtacacccccatcagaagagagtggtactacgaggtgatcatcgtgagagtggagatcaacggccaggacctgaagatggactgcaaggagtacaactacgacaagagcatcgtggacagcggcaccaccaacctgagactgcccaagaaggtgttcgaggccgccgtgaagagcatcaaggccgccagcagcaccgagaagttccccgacggcttctggctgggcgagcagctggtgtgctggcaggccggcaccaccccctggaacatcttccccgtgatcagcctgtacctgatgggcgaggtgaccaaccagagcttcagaatcaccatcctgccccagcagtacctgagacccgtggaggacgtggccaccagccaggacgactgctacaagttcgccatcagccagagcagcaccggcaccgtgatgggcgccgtgatcatggagggcttctacgtggtgttcgacagagccagaaagagaatcggcttcgccgtgagcgcctgccacgtgcacgacgagttcagaaccgccgccgtggagggccccttcgtgaccctggacatggaggactgcggctacaacatcccccagaccgacgagagcaccctgatgaccatcgcctacgtgatggccgccatctgcgccctgttcatgctgcccctgtgcctgatggtgtgccagtggtgctgcctgagatgcctgagacagcagcacgacgacttcgccgacgacatcagcctgctgaagtag

SEQ ID NO: 74382 - DNA, 1431 bp, synthetic construct
  misc_feature 1..1431: note = Description of Artificial Sequence: Synthetic coding sequence
  source 1..1431: mol_type = other DNA
atggcccaggccctgccctggctgctgctgtggatgggcgccggcgtgctgcccgcccacggcacccagcacggcatcagactgcccctgagaagcggcctgggcggcgcccccctgggcctgagactgcccagagagaccgacgaggagcccgaggagcccggcagaagaggcagcttcgtggagatggtggacaacctgagaggcaagagcggccagggctactacgtggagatgaccgtgggcagccccccccagaccctgaacatcctggtggacaccggcagcagcaacttcgccgtgggcgccgccccccaccccttcctgcacagatactaccagagacagctgagcagcacctacagagacctgagaaagggcgtgtacgtgccctacacccagggcaagtgggagggcgagctgggcaccgacctggtgagcatcccccacggccccaacgtgaccgtgagagccaacatcgccgccatcaccgagagcgacaagttcttcatcaacggcagcaactgggagggcatcctgggcctggcctacgccgagatcgccagactgtgcggcgccggcttccccctgaaccagagcgaggtgctggccagcgtgggcggcagcatgatcatcggcggcatcgaccacagcctgtacaccggcagcctgtggtacacccccatcagaagagagtggtactacgaggtgatcatcgtgagagtggagatcaacggccaggacctgaagatggactgcaaggagtacaactacgacaagagcatcgtggacagcggcaccaccaacctgagactgcccaagaaggtgttcgaggccgccgtgaagagcatcaaggccgccagcagcaccgagaagttccccgacggcttctggctgggcgagcagctggtgtgctggcaggccggcaccaccccctggaacatcttccccgtgatcagcctgtacctgatgggcgaggtgaccaaccagagcttcagaatcaccatcctgccccagcagtacctgagacccgtggaggacgtggccaccagccaggacgactgctacaagttcgccatcagccagagcagcaccggcaccgtgatgggcgccgtgatcatggagggcttctacgtggtgttcgacagagccagaaagagaatcggcttcgccgtgagcgcctgccacgtgcacgacgagttcagaaccgccgccgtggagggccccttcgtgaccctggacatggaggactgcggctacaacatcccccagaccgacgagagcaccctgatgaccatcgcctacgtgatggccgccatctgcgccctgttcatgctgcccctgtgcctgatggtgtgccagtggtgctgcctgagatgcctgagacagcagcacgacgacttcgccgacgacatcagcctgctgaagtag

SEQ ID NO: 74383 - DNA, 1131 bp, synthetic construct
  misc_feature 1..1131: note = Description of Artificial Sequence: Synthetic coding sequence
  source 1..1131: mol_type = other DNA
atggtgcccttcatctacctgcaggcccacttcaccctgtgcagcggctggagcagcacctacagagacctgagaaagggcgtgtacgtgccctacacccagggcaagtgggagggcgagctgggcaccgacctggtgagcatcccccacggccccaacgtgaccgtgagagccaacatcgccgccatcaccgagagcgacaagttcttcatcaacggcagcaactgggagggcatcctgggcctggcctacgccgagatcgccagactgtgcggcgccggcttccccctgaaccagagcgaggtgctggccagcgtgggcggcagcatgatcatcggcggcatcgaccacagcctgtacaccggcagcctgtggtacacccccatcagaagagagtggtactacgaggtgatcatcgtgagagtggagatcaacggccaggacctgaagatggactgcaaggagtacaactacgacaagagcatcgtggacagcggcaccaccaacctgagactgcccaagaaggtgttcgaggccgccgtgaagagcatcaaggccgccagcagcaccgagaagttccccgacggcttctggctgggcgagcagctggtgtgctggcaggccggcaccaccccctggaacatcttccccgtgatcagcctgtacctgatgggcgaggtgaccaaccagagcttcagaatcaccatcctgccccagcagtacctgagacccgtggaggacgtggccaccagccaggacgactgctacaagttcgccatcagccagagcagcaccggcaccgtgatgggcgccgtgatcatggagggcttctacgtggtgttcgacagagccagaaagagaatcggcttcgccgtgagcgcctgccacgtgcacgacgagttcagaaccgccgccgtggagggccccttcgtgaccctggacatggaggactgcggctacaacatcccccagaccgacgagagcaccctgatgaccatcgcctacgtgatggccgccatctgcgccctgttcatgctgcccctgtgcctgatggtgtgccagtggtgctgcctgagatgcctgagacagcagcacgacgacttcgccgacgacatcagcctgctgaagtag

SEQ ID NO: 74384 - DNA, 1191 bp, synthetic construct
  misc_feature 1..1191: note = Description of Artificial Sequence: Synthetic coding sequence
  source 1..1191: mol_type = other DNA
atgggcgccctggccagagccctgctgctgcccctgctggcccagtggctgctgagagccgcccccgagctggcccccgcccccttcaccctgcccctgagagtggccgccgccaccaacagagtggtggcccccacccccggccccggcacccccgccgagagacacgccgacggcctggccctggccctggagcccgccctggccagccccgccggcgccgccaacttcctggccatggtggacaacctgcagggcgacagcggcagaggctactacctggagatgctgatcggcacccccccccagaagctgcagatcctggtggacaccggcagcagcaacttcgccgtggccggcaccccccacagctacatcgacacctacttcgacaccgagagaagcagcacctacagaagcaagggcttcgacgtgaccgtgaagtacacccagggcagctggaccggcttcgtgggcgaggacctggtgaccatccccaagggcttcaacaccagcttcctggtgaacatcgccaccatcttcgagagcgagaacttcttcctgcccggcatcaagtggaacggcatcctgggcctggcctacgccaccctggccaagcccagcagcagcctggagaccttcttcgacagcctggtgacccaggccaacatccccaacgtgttcagcatgcagatgtgcggcgccggcctgcccgtggccggcagcggcaccaacggcggcagcctggtgctgggcggcatcgagcccagcctgtacaagggcgacatctggtacacccccatcaaggaggagtggtactaccagatcgagatcctgaagctggagatcggcggccagagcctgaacctggactgcagagagtacaacgccgacaaggccatcgtggacagcggcaccaccctgctgagactgccccagaaggtgttcgacgccgtggtggaggccgtggccagagccagcctgatccccgagttcagcgacggcttctggaccggcagccagctggcctgctggaccaacagcgagaccccctggagctacttccccaagatcagcatctacctgagagacgagaacagcagcagaagcttcagaatcaccatcctgccccagaagctgcaggtgctgcagtgcctgaagttccccggcctgagccagcagagaatgtag

SEQ ID NO: 74385 - DNA, 1557 bp, synthetic construct
  misc_feature 1..1557: note = Description of Artificial Sequence: Synthetic coding sequence
  source 1..1557: mol_type = other DNA
atgggcgccctggccagagccctgctgctgcccctgctggcccagtggctgctgagagccgcccccgagctggcccccgcccccttcaccctgcccctgagagtggccgccgccaccaacagagtggtggcccccacccccggccccggcacccccgccgagagacacgccgacggcctggccctggccctggagcccgccctggccagccccgccggcgccgccaacttcctggccatggtggacaacctgcagggcgacagcggcagaggctactacctggagatgctgatcggcacccccccccagaagctgcagatcctggtggacaccggcagcagcaacttcgccgtggccggcaccccccacagctacatcgacacctacttcgacaccgagagaagcagcacctacagaagcaagggcttcgacgtgaccgtgaagtacacccagggcagctggaccggcttcgtgggcgaggacctggtgaccatccccaagggcttcaacaccagcttcctggtgaacatcgccaccatcttcgagagcgagaacttcttcctgcccggcatcaagtggaacggcatcctgggcctggcctacgccaccctggccaagcccagcagcagcctggagaccttcttcgacagcctggtgacccaggccaacatccccaacgtgttcagcatgcagatgtgcggcgccggcctgcccgtggccggcagcggcaccaacggcggcagcctggtgctgggcggcatcgagcccagcctgtacaagggcgacatctggtacacccccatcaaggaggagtggtactaccagatcgagatcctgaagctggagatcggcggccagagcctgaacctggactgcagagagtacaacgccgacaaggccatcgtggacagcggcaccaccctgctgagactgccccagaaggtgttcgacgccgtggtggaggccgtggccagagccagcctgatccccgagttcagcgacggcttctggaccggcagccagctggcctgctggaccaacagcgagaccccctggagctacttccccaagatcagcatctacctgagagacgagaacagcagcagaagcttcagaatcaccatcctgccccagctgtacatccagcccatgatgggcgccggcctgaactacgagtgctacagattcggcatcagccccagcaccaacgccctggtgatcggcgccaccgtgatggagggcttctacgtgatcttcgacagagcccagaagagagtgggcttcgccgccagcccctgcgccgagatcgccggcgccgccgtgagcgagatcagcggccccttcagcaccgaggacgtggccagcaactgcgtgcccgcccagagcctgagcgagcccatcctgtggatcgtgagctacgccctgatgagcgtgtgcggcgccatcctgctggtgctgatcgtgctgctgctgctgcccttcagatgccagagaagacccagagaccccgaggtggtgaacgacgagagcagcctggtgagacacagatggaagtag

SEQ ID NO: 74386 - DNA, 1407 bp, synthetic construct
  misc_feature 1..1407: note = Description of Artificial Sequence: Synthetic coding sequence
  source 1..1407: mol_type = other DNA
atgggcgccctggccagagccctgctgctgcccctgctggcccagtggctgctgagagccgcccccgagctggcccccgcccccttcaccctgcccctgagagtggccgccgccaccaacagagtggtggcccccacccccggccccggcacccccgccgagagacacgccgacggcctggccctggccctggagcccgccctggccagccccgccggcgccgccaacttcctggccatggtggacaacctgcagggcgacagcggcagaggctactacctggagatgctgatcggcacccccccccagaagctgcagatcctggtggacaccggcagcagcaacttcgccgtggccggcaccccccacagctacatcgacacctacttcgacaccgagagaagcagcacctacagaagcaagggcttcgacgtgaccgtgaagtacacccagggcagctggaccggcttcgtgggcgaggacctggtgaccatccccaagggcttcaacaccagcttcctggtgaacatcgccaccatcttcgagagcgagaacttcttcctgcccggcatcaagtggaacggcatcctgggcctggcctacgccaccctggccaagcccagcagcagcctggagaccttcttcgacagcctggtgacccaggccaacatccccaacgtgttcagcatgcagatgtgcggcgccggcctgcccgtggccggcagcggcaccaacggcggcagcctggtgctgggcggcatcgagcccagcctgtacaagggcgacatctggtacacccccatcaaggaggagtggtactaccagatcgagatcctgaagctggagatcggcggccagagcctgaacctggactgcagagagtacaacgccgacaaggccatcgtggacagcggcaccaccctgctgagactgccccagaaggtgttcgacgccgtggtggaggccgtggccagagccagcctgctgtacatccagcccatgatgggcgccggcctgaactacgagtgctacagattcggcatcagccccagcaccaacgccctggtgatcggcgccaccgtgatggagggcttctacgtgatcttcgacagagcccagaagagagtgggcttcgccgccagcccctgcgccgagatcgccggcgccgccgtgagcgagatcagcggccccttcagcaccgaggacgtggccagcaactgcgtgcccgcccagagcctgagcgagcccatcctgtggatcgtgagctacgccctgatgagcgtgtgcggcgccatcctgctggtgctgatcgtgctgctgctgctgcccttcagatgccagagaagacccagagaccccgaggtggtgaacgacgagagcagcctggtgagacacagatggaagtag

SEQ ID NO: 74387 - DNA, 1272 bp, synthetic construct
  misc_feature 1..1272: note = Description of Artificial Sequence: Synthetic coding sequence
  source 1..1272: mol_type = other DNA
atgctgatcggcacccccccccagaagctgcagatcctggtggacaccggcagcagcaacttcgccgtggccggcaccccccacagctacatcgacacctacttcgacaccgagagaagcagcacctacagaagcaagggcttcgacgtgaccgtgaagtacacccagggcagctggaccggcttcgtgggcgaggacctggtgaccatccccaagggcttcaacaccagcttcctggtgaacatcgccaccatcttcgagagcgagaacttcttcctgcccggcatcaagtggaacggcatcctgggcctggcctacgccaccctggccaagcccagcagcagcctggagaccttcttcgacagcctggtgacccaggccaacatccccaacgtgttcagcatgcagatgtgcggcgccggcctgcccgtggccggcagcggcaccaacggcggcagcctggtgctgggcggcatcgagcccagcctgtacaagggcgacatctggtacacccccatcaaggaggagtggtactaccagatcgagatcctgaagctggagatcggcggccagagcctgaacctggactgcagagagtacaacgccgacaaggccatcgtggacagcggcaccaccctgctgagactgccccagaaggtgttcgacgccgtggtggaggccgtggccagagccagcctgatccccgagttcagcgacggcttctggaccggcagccagctggcctgctggaccaacagcgagaccccctggagctacttccccaagatcagcatctacctgagagacgagaacagcagcagaagcttcagaatcaccatcctgccccagctgtacatccagcccatgatgggcgccggcctgaactacgagtgctacagattcggcatcagccccagcaccaacgccctggtgatcggcgccaccgtgatggagggcttctacgtgatcttcgacagagcccagaagagagtgggcttcgccgccagcccctgcgccgagatcgccggcgccgccgtgagcgagatcagcggccccttcagcaccgaggacgtggccagcaactgcgtgcccgcccagagcctgagcgagcccatcctgtggatcgtgagctacgccctgatgagcgtgtgcggcgccatcctgctggtgctgatcgtgctgctgctgctgcccttcagatgccagagaagacccagagaccccgaggtggtgaacgacgagagcagcctggtgagacacagatggaagtag

SEQ ID NO: 74388 - DNA, 576 bp, synthetic construct
  misc_feature 1..576: note = Description of Artificial Sequence: Synthetic coding sequence
  source 1..576: mol_type = other DNA
atgcccagaagcctgtggctgggctgcagcagcctggccgacagcatgcccagcctgagatgcctgtacaaccccggcaccggcgccctgaccgccttccagaacagcagcgagagagaggactgcaacaacggcgagccccccagaaagatcatccccgagaagaacagcctgagacagacctacaacagctgcgccagactgtgcctgaaccaggagaccgtgtgcctggccagcaccgccatgaagaccgagaactgcgtggccaagaccaagctggccaacggcaccagcagcatgatcgtgcccaagcagagaaagctgagcgccagctacgagaaggagaaggagctgtgcgtgaagtacttcgagcagtggagcgagagcgaccaggtggagttcgtggagcacctgatcagccagatgtgccactaccagcacggccacatcaacagctacctgaagcccatgctgcagagagacttcatcaccgccctgcccgccagaggcctggaccacatcgccgagaacatcctgagctacctggacgccaagagcctgtgcgccgccgagtag

SEQ ID NO: 74389 - DNA, 1818 bp, synthetic construct
  misc_feature 1..1818: note = Description of Artificial Sequence: Synthetic coding sequence
  source 1..1818: mol_type = other DNA
atggaccccgccgaggccgtgctgcaggagaaggccctgaagttcatgtgcagcatgcccagaagcctgtggctgggctgcagcagcctggccgacagcatgcccagcctgagatgcctgtacaaccccggcaccggcgccctgaccgccttccagaacagcagcgagagagaggactgcaacaacggcgagccccccagaaagatcatccccgagaagaacagcctgagacagacctacaacagctgcgccagactgtgcctgaaccaggagaccgtgtgcctggccagcaccgccatgaagaccgagaactgcgtggccaagaccaagctggccaacggcaccagcagcatgatcgtgcccaagcagagaaagctgagcgccagctacgagaaggagaaggagctgtgcgtgaagtacttcgagcagtggagcgagagcgaccaggtggagttcgtggagcacctgatcagccagatgtgccactaccagcacggccacatcaacagctacctgaagcccatgctgcagagagacttcatcaccgccctgcccgccagaggcctggaccacatcgccgagaacatcctgagctacctggacgccaagagcctgtgcgccgccgagctggtgtgcaaggagtggtacagagtgaccagcgacggcatgctgtggaagaagctgatcgagagaatggtgagaaccgacagcctgtggagaggcctggccgagagaagaggctggggccagtacctgttcaagaacaagccccccgacggcaacgccccccccaacagcttctacagagccctgtaccccaagatcatccaggacatcgagaccatcgagagcaactggagatgcggcagacacagcctgcagagaatccactgcagaagcgagaccagcaagggcgtgtactgcctgcagtacgacgaccagaagatcgtgagcggcctgagagacaacaccatcaagatctgggacaagaacaccctggagtgcaagagaatcctgaccggccacaccggcagcgtgctgtgcctgcagtacgacgagagagtgatcatcaccggcagcagcgacagcaccgtgagagtgtgggacgtgaacaccggcgagatgctgaacaccctgatccaccactgcgaggccgtgctgcacctgagattcaacaacggcatgatggtgacctgcagcaaggacagaagcatcgccgtgtgggacatggccagccccaccgacatcaccctgagaagagtgctggtgggccacagagccgccgtgaacgtggtggacttcgacgacaagtacatcgtgagcgccagcggcgacagaaccatcaaggtgtggaacaccagcacctgcgagttcgtgagaaccctgaacggccacaagagaggcatcgcctgcctgcagtacagagacagactggtggtgagcggcagcagcgacaacaccatcagactgtgggacatcgagtgcggcgcctgcctgagagtgctggagggccacgaggagctggtgagatgcatcagattcgacaacaagagaatcgtgagcggcgcctacgacggcaagatcaaggtgtgggacctggtggccgccctggaccccagagcccccgccggcaccctgtgcctgagaaccctggtggagcacagcggcagagtgttcagactgcagttcgacgagttccagatcgtgagcagcagccacgacgacaccatcctgatctgggacttcctgaacgaccccgccgcccaggccgagccccccagaagccccagcagaacctacacctacatcagcagatag

SEQ ID NO: 74390 - DNA, 1695 bp, synthetic construct
  misc_feature 1..1695: note = Description of Artificial Sequence: Synthetic coding sequence
  source 1..1695: mol_type = other DNA
atgtgcagcatgcccagaagcctgtggctgggctgcagcagcctggccgacagcatgcccagcctgagatgcctgtacaaccccggcaccggcgccctgaccgccttccagacctacaacagctgcgccagactgtgcctgaaccaggagaccgtgtgcctggccagcaccgccatgaagaccgagaactgcgtggccaagaccaagctggccaacggcaccagcagcatgatcgtgcccaagcagagaaagctgagcgccagctacgagaaggagaaggagctgtgcgtgaagtacttcgagcagtggagcgagagcgaccaggtggagttcgtggagcacctgatcagccagatgtgccactaccagcacggccacatcaacagctacctgaagcccatgctgcagagagacttcatcaccgccctgcccgccagaggcctggaccacatcgccgagaacatcctgagctacctggacgccaagagcctgtgcgccgccgagctggtgtgcaaggagtggtacagagtgaccagcgacggcatgctgtggaagaagctgatcgagagaatggtgagaaccgacagcctgtggagaggcctggccgagagaagaggctggggccagtacctgttcaagaacaagccccccgacggcaacgccccccccaacagcttctacagagccctgtaccccaagatcatccaggacatcgagaccatcgagagcaactggagatgcggcagacacagcctgcagagaatccactgcagaagcgagaccagcaagggcgtgtactgcctgcagtacgacgaccagaagatcgtgagcggcctgagagacaacaccatcaagatctgggacaagaacaccctggagtgcaagagaatcctgaccggccacaccggcagcgtgctgtgcctgcagtacgacgagagagtgatcatcaccggcagcagcgacagcaccgtgagagtgtgggacgtgaacaccggcgagatgctgaacaccctgatccaccactgcgaggccgtgctgcacctgagattcaacaacggcatgatggtgacctgcagcaaggacagaagcatcgccgtgtgggacatggccagccccaccgacatcaccctgagaagagtgctggtgggccacagagccgccgtgaacgtggtggacttcgacgacaagtacatcgtgagcgccagcggcgacagaaccatcaaggtgtggaacaccagcacctgcgagttcgtgagaaccctgaacggccacaagagaggcatcgcctgcctgcagtacagagacagactggtggtgagcggcagcagcgacaacaccatcagactgtgggacatcgagtgcggcgcctgcctgagagtgctggagggccacgaggagctggtgagatgcatcagattcgacaacaagagaatcgtgagcggcgcctacgacggcaagatcaaggtgtgggacctggtggccgccctggaccccagagcccccgccggcaccctgtgcctgagaaccctggtggagcacagcggcagagtgttcagactgcagttcgacgagttccagatcgtgagcagcagccacgacgacaccatcctgatctgggacttcctgaacgaccccgccgcccaggccgagccccccagaagccccagcagaacctacacctacatcagcagatag

SEQ ID NO: 74391 - DNA, 1710 bp, synthetic construct
  misc_feature 1..1710: note = Description of Artificial Sequence: Synthetic coding sequence
  source 1..1710: mol_type = other DNA
atggaccccgccgaggccgtgctgcaggagaaggccctgaagttcatgaacagcagcgagagagaggactgcaacaacggcgagccccccagaaagatcatccccgagaagaacagcctgagacagacctacaacagctgcgccagactgtgcctgaaccaggagaccgtgtgcctggccagcaccgccatgaagaccgagaactgcgtggccaagaccaagctggccaacggcaccagcagcatgatcgtgcccaagcagagaaagctgagcgccagctacgagaaggagaaggagctgtgcgtgaagtacttcgagcagtggagcgagagcgaccaggtggagttcgtggagcacctgatcagccagatgtgccactaccagcacggccacatcaacagctacctgaagcccatgctgcagagagacttcatcaccgccctgcccgccagaggcctggaccacatcgccgagaacatcctgagctacctggacgccaagagcctgtgcgccgccgagctggtgtgcaaggagtggtacagagtgaccagcgacggcatgctgtggaagaagctgatcgagagaatggtgagaaccgacagcctgtggagaggcctggccgagagaagaggctggggccagtacctgttcaagaacaagccccccgacggcaacgccccccccaacagcttctacagagccctgtaccccaagatcatccaggacatcgagaccatcgagagcaactggagatgcggcagacacagcctgcagagaatccactgcagaagcgagaccagcaagggcgtgtactgcctgcagtacgacgaccagaagatcgtgagcggcctgagagacaacaccatcaagatctgggacaagaacaccctggagtgcaagagaatcctgaccggccacaccggcagcgtgctgtgcctgcagtacgacgagagagtgatcatcaccggcagcagcgacagcaccgtgagagtgtgggacgtgaacaccggcgagatgctgaacaccctgatccaccactgcgaggccgtgctgcacctgagattcaacaacggcatgatggtgacctgcagcaaggacagaagcatcgccgtgtgggacatggccagccccaccgacatcaccctgagaagagtgctggtgggccacagagccgccgtgaacgtggtggacttcgacgacaagtacatcgtgagcgccagcggcgacagaaccatcaaggtgtggaacaccagcacctgcgagttcgtgagaaccctgaacggccacaagagaggcatcgcctgcctgcagtacagagacagactggtggtgagcggcagcagcgacaacaccatcagactgtgggacatcgagtgcggcgcctgcctgagagtgctggagggccacgaggagctggtgagatgcatcagattcgacaacaagagaatcgtgagcggcgcctacgacggcaagatcaaggtgtgggacctggtggccgccctggaccccagagcccccgccggcaccctgtgcctgagaaccctggtggagcacagcggcagagtgttcagactgcagttcgacgagttccagatcgtgagcagcagccacgacgacaccatcctgatctgggacttcctgaacgaccccgccgcccaggccgagccccccagaagccccagcagaacctacacctacatcagcagatag

SEQ ID NO: 74392 - DNA, 126 bp, synthetic construct
  misc_feature 1..126: note = Description of Artificial Sequence: Synthetic coding sequence
  source 1..126: mol_type = other DNA
atggaccccgccgaggccgtgctgcaggagaaggccctgaagttcatgacctacaacagctgcgccagactgtgcctgaaccaggagaccgtgtgcctggccagcaccgccatgaagaccgagtag

SEQ ID NO: 74393 - DNA, 327 bp, synthetic construct
  misc_feature 1..327: note = Description of Artificial Sequence: Synthetic coding sequence
  source 1..327: mol_type = other DNA
atggtgaccctgctgcccatcgagggccaggagatccacttcttcgagatcctggagagcgagtgcgtgctgtacaccggctggatcgagagagccagcggcagcagcatctaccccgaggccaaggccagactgcccctggaggccctgctgggcagcaacaaggagcccatgctgcccaaggagaccgtgctgagcctgaagagatacaacctgggcagcagcgccatgaagagaaacgtgcccggccacgtgctgcagagacccagctacctgaccagaatccaggtgaccctgctgtgcaacagcagcgccgaggccctgtag

SEQ ID NO: 74394 - DNA, 1521 bp, synthetic construct
  misc_feature 1..1521: note = Description of Artificial Sequence: Synthetic coding sequence
  source 1..1521: mol_type = other DNA
atggagcagctggacgtgttcatcagcatcaagcccaagcccaagcagcccagcaagagcgtgatcgtgaagagcgtggagagaaacgccctgaacatgtacgaggccagaaagtgcctgctgggcctggagagcagcggcgtgaccatcgccaccagccccagccccgccagctgccccgccggcctggcctgccccagcctggacatcctggccagcgccggcctgggcctgaccggcctgggcctgctgggccccaccaccctgagcctgaacaccagcaccacccccaacagcctgctgaacgccctgaacagcagcgtgagccccctgcagagccccagcagcggcacccccagccccaccctgtgggccccccccctggccaacaccagcagcgccaccggcttcagcgccatcccccacctgatgatccccagcaccgcccaggccaccctgaccaacatcctgctgagcggcgtgcccacctacggccacaccgcccccagccccccccccggcctgacccccgtggacgtgcacatcaacagcatgcagaccgagggcaagaagatcagcgccgccctgaacggccacgcccagagccccgacatcaagtacggcgccatcagcaccagcagcctgggcgagaaggtgctgagcgccaaccacggcgaccccagcatccagaccagcggcagcgagcagaccagccccaagagcagccccaccgagggctgcaacgacgccttcgtggaggtgggcatgcccagaagccccagccacagcggcaacgccggcgacctgaagcagatgatgtgccccagcaaggtgagctgcgccaagagacagaccgtggagctgctgcagggcaccaagaacagccacctgcacagcaccgacagactgctgagcgaccccgagctgagcgccaccgagagccccctggccgacaagaaggcccccggcagcgagagagccgccgagagagccgccgccgcccagcagaacagcgagagagcccacctggcccccagaagcagctacgtgaacatgcaggccttcgactacgagcagaagaagctgctggccaccaaggccatgctgaagaagcccgtggtgaccgaggtgagaacccccaccaacacctggagcggcctgggcttcagcaagagcatgcccgccgagaccatcaaggagctgagaagagccaaccacgtgagctacaagcccaccatgaccaccacctacgagggcagcagcatgagcctgagcagaagcaacagcagagagcacctgggcggcggcagcgagagcgacaactggagagacagaaacggcatcggccccggcagccacagcgagttcgccgccagcatcggcagccccaagagaaagcagaacaagagcagcgagagatgcgtgctgtgcaccctgctgggcatccccagactggagtgcgtgtacctgggctggagcatcaccgactgcggcctgagcgacttcaagtgcctggtgtag

SEQ ID NO: 74395 - DNA, 2925 bp, synthetic construct
  misc_feature 1..2925: note = Description of Artificial Sequence: Synthetic coding sequence
  source 1..2925: mol_type = other DNA
atggccgcccagggcgagcccggctacctggccgcccagagcgaccccggcagcaacagcgagagaagcaccgacagccccgtgcccggcagcgaggacgacctggtggccggcgccaccctgcacagccccgagtggagcgaggagagattcagagtggacagaaagaagctggaggccatgctgcaggccgccgccgagggcaagggcagaagcggcgaggacttcttccagaagatcatggaggagaccaacacccagatcgcctggcccagcaagctgaagatcggcgccaagagcaagaaggacccccacatcaaggtgagcggcaagaaggaggacgtgaaggaggccaaggagatgatcatgagcgtgctggacaccaagagcaacagagtgaccctgaagatggacgtgagccacaccgagcacagccacgtgatcggcaagggcggcaacaacatcaagaaggtgatggaggagaccggctgccacatccacttccccgacagcaacagaaacaaccaggccgagaagagcaaccaggtgagcatcgccggccagcccgccggcgtggagagcgccagagtgagaatcagagagctgctgcccctggtgctgatgttcgagctgcccatcgccggcatcctgcagcccgtgcccgaccccaacagccccagcatccagcacatcagccagacctacaacatcagcgtgagcttcaagcagagaagcagaatgtacggcgccaccgtgatcgtgagaggcagccagaacaacaccagcgccgtgaaggagggcaccgccatgctgctggagcacctggccggcagcctggccagcgccatccccgtgagcacccagctggacatcgccgcccagcaccacctgttcatgatgggcagaaacggcagcaacatcaagcacatcatgcagagaaccggcgcccagatccacttccccgaccccagcaacccccagaagaagagcaccgtgtacctgcagggcaccatcgagagcgtgtgcctggccagacagtacctgatgggctgcctgcccctggtgctgatgttcgacatgaaggaggagatcgaggtggacccccagttcatcgcccagctgatggagcagctggacgtgttcatcagcatcaagcccaagcccaagcagcccagcaagagcgtgatcgtgaagagcgtggagagaaacgccctgaacatgtacgaggccagaaagtgcctgctgggcctggagagcagcggcgtgaccatcgccaccagccccagccccgccagctgccccgccggcctggcctgccccagcctggacatcctggccagcgccggcctgggcctgaccggcctgggcctgctgggccccaccaccctgagcctgaacaccagcaccacccccaacagcctgctgaacgccctgaacagcagcgtgagccccctgcagagccccagcagcggcacccccagccccaccctgtgggccccccccctggccaacaccagcagcgccaccggcttcagcgccatcccccacctgatgatccccagcaccgcccaggccaccctgaccaacatcctgctgagcggcgtgcccacctacggccacaccgcccccagccccccccccggcctgacccccgtggacgtgcacatcaacagcatgcagaccgagggcaagaagatcagcgccgccctgaacggccacgcccagagccccgacatcaagtacggcgccatcagcaccagcagcctgggcgagaaggtgctgagcgccaaccacggcgaccccagcatccagaccagcggcagcgagcagaccagccccaagagcagccccaccgagggctgcaacgacgccttcgtggaggtgggcatgcccagaagccccagccacagcggcaacgccggcgacctgaagcagatgatgtgccccagcaaggtgagctgcgccaagagacagaccgtggagctgctgcagggcaccaagaacagccacctgcacagcaccgacagactgctgagcgaccccgagctgagcgccaccgagagccccctggccgacaagaaggcccccggcagcgagagagccgccgagagagccgccgccgcccagcagaacagcgagagagcccacctggcccccagaagcagctacgtgaacatgcaggccttcgactacgagcagaagaagctgctggccaccaaggccatgctgaagaagcccgtggtgaccgaggtgagaacccccaccaacacctggagcggcctgggcttcagcaagagcatgcccgccgagaccatcaaggagctgagaagagccaaccacgtgagctacaagcccaccatgaccaccacctacgagggcagcagcatgagcctgagcagaagcaacagcagagagcacctgggcggcggcagcgagagcgacaactggagagacagaaacggcatcggccccggcagccacagcgagttcgccgccagcatcggcagccccaagagaaagcagaacaagagcaccgagcactacctgagcagcagcaactacatggactgcatcagcagcctgaccggcagcaacggctgcaacctgaacagcagcttcaagggcagcgacctgcccgagctgttcagcaagctgggcctgggcaagtacaccgacgtgttccagcagcaggagatcgacctgcagaccttcctgaccctgaccgaccaggacctgaaggagctgggcatcaccaccttcggcgccagaagaaagatgctgctggccatcagcgagctgaacaagaacagaagaaagctgttcgagagccccaacgccagaaccagcttcctggagggcggcgccagcggcagactgcccagacagtaccacagcgacatcgccagcgtgagcggcagatggtag

SEQ ID NO: 74396 - DNA, 2928 bp, synthetic construct
  misc_feature 1..2928: note = Description of Artificial Sequence: Synthetic coding sequence
  source 1..2928: mol_type = other DNA
atggccgccgaggaggtgctgcagaccgtggaccactacaagaccgagatcgagagactgaccaaggagctgaccgagaccacccacgagaagatccaggccgccgagtacggcctggtggtgctggaggagaagctgaccctgaagcagcagtacgacgagctggaggccgagtacgacagcctgaagcaggagctggagcagctgaaggaggccttcggccagagcttcagcatccacagaaaggtggccgaggacggcgagaccagagaggagaccctgctgcaggagagcgccagcaaggaggcctactacctgggcaagatcctggagatgcagaacgagctgaagcagagcagagccgtggtgaccaacgtgcaggccgagaacgagagactgaccgccgtggtgcaggacctgaaggagaacaacgagatggtggagctgcagagaatcagaatgaaggacgagatcagagagtacaagttcagagaggccagactgctgcaggactacaccgagctggaggaggagaacatcaccctgcagaagctggtgagcaccctgaagcagaaccaggtggagtacgagggcctgaagcacgagatcaagagattcgaggaggagaccgtgctgctgaacagccagctggaggacgccatcagactgaaggagatcgccgagcaccagctggaggaggccctggagaccctgaagaacgagagagagcagaagaacaacctgagaaaggagctgagccagtacatcagcctgaacgacaaccacatcagcatcagcgtggacggcctgaagttcgccgaggacggcagcgagcccaacaacgacgacaagatgaacggccacatccacggccccctggtgaagctgaacggcgactacagaacccccaccctgagaaagggcgagagcctgaaccccgtgagcgacctgttcagcgagctgaacatcagcgagatccagaagctgaagcagcagctgatgcaggtggagagagagaaggccatcctgctggccaacctgcaggagagccagacccagctggagcacaccaagggcgccctgaccgagcagcacgagagagtgcacagactgaccgagcacgtgaacgccatgagaggcctgcagagcagcaaggagctgaaggccgagctggacggcgagaagggcagagacagcggcgaggaggcccacgactacgaggtggacatcaacggcctggagatcctggagtgcaagtacagagtggccgtgaccgaggtgatcgacctgaaggccgagatcaaggccctgaaggagaagtacaacaagagcgtggagaactacaccgacgagaaggccaagtacgagagcaagatccagatgtacgacgagcaggtgaccagcctggagaagaccaccaaggagagcggcgagaagatggcccacatggagaaggagctgcagaagatgaccagcatcgccaacgagaaccacagcaccctgaacaccgcccaggacgagctggtgaccttcagcgaggagctggcccagctgtaccaccacgtgtgcctgtgcaacaacgagacccccaacagagtgatgctggactactacagacagagcagagtgaccagaagcggcagcctgaagggccccgacgaccccagaggcctgctgagccccagactggccagaagaggcgtgagcagccccgtggagaccagaaccagcagcgagcccgtggccaaggagagcaccgaggccagcaaggagcccagccccaccaagacccccaccatcagccccgtgatcaccgccccccccagcagccccgtgctggacaccagcgacatcagaaaggagcccatgaacatctacaacctgaacgccatcatcagagaccagatcaagcacctgcagaaggccgtggacagaagcctgcagctgagcagacagagagccgccgccagagagctggcccccatgatcgacaaggacaaggaggccctgatggaggagatcctgaagctgaagagcctgctgagcaccaagagagagcagatcgccaccctgagagccgtgctgaaggccaacaagcagaccgccgaggtggccctggccaacctgaagaacaagtacgagaacgagaaggccatggtgaccgagaccatgaccaagctgagaaacgagctgaaggccctgaaggaggacgccgccaccttcagcagcctgagagccatgttcgccaccagatgcgacgagtacgtgacccagctggacgagatgcagagacagctggccgccgccgaggacgagaagaagaccctgaacaccctgctgagaatggccatccagcagaagctggccctgacccagagactggaggacctggagttcgaccacgagcagagcagaagaagcaagggcaagctgggcaagagcaagatcggcagccccaaggtgagcggcgaggccagcgtgaccgtgcccaccatcgacacctacctgctgcacagccagggcccccagacccccaacatcagagtgagcagcggcacccagagaaagagacagttcagccccagcctgtgcgaccagagcagacccagaaccagcggcgccagctacctgcagaacctgctgagagtgccccccgaccccaccagcaccgagagcttcctgctgaagggcccccccagcatgagcgagttcatccagggccacagactgagcaaggagaagagactgaccgtggccccccccgactgccagcagcccgccgccagcgtgcccccccagtgcagccagctggccggcagacaggactgccccaccgtgagccccgacaccgccctgcccgaggagcagccccacagcagcagccagtgcgcccccctgcactgcctgagcaagcccccccacccctag

SEQ ID NO: 74397 - DNA, 2484 bp, synthetic construct
  misc_feature 1..2484: note = Description of Artificial Sequence: Synthetic coding sequence
  source 1..2484: mol_type = other DNA
atggccgccgaggaggtgctgcagaccgtggaccactacaagaccgagatcgagagactgaccaaggagctgaccgagaccacccacgagaagatccaggccgccgagtacggcctggtggtgctggaggagaagctgaccctgaagcagcagtacgacgagctggaggccgagtacgacagcctgaagcaggagctggagcagctgaaggaggccttcggccagagcttcagcatccacagaaaggtggccgaggacggcgagaccagagaggagaccctgctgcaggagagcgccagcaaggaggcctactacctgggcaagatcctggagatgcagaacgagctgaagcagagcagagccgtggtgaccaacgtgcaggccgagaacgagagactgaccgccgtggtgcaggacctgaaggagaacaacgagatggtggagctgcagagaatcagaatgaaggacgagatcagagagtacaagttcagagaggccagactgctgcaggactacaccgagctggaggaggagaacatcaccctgcagaagctggtgagcaccctgaagcagaaccaggtggagtacgagggcctgaagcacgagatcaagagattcgaggaggagaccgtgctgctgaacagccagctggaggacgccatcagactgaaggagatcgccgagcaccagctggaggaggccctggagaccctgaagaacgagagagagcagaagaacaacctgagaaaggagctgagccagtacatcagcctgaacgacaaccacatcagcatcagcgtggacggcctgaagttcgccgaggacggcagcgagcccaacaacgacgacaagatgaacggccacatccacggccccctggtgaagctgaacggcgactacagaacccccaccctgagaaagggcgagagcctgaaccccgtgagcgacctgttcagcgagctgaacatcagcgagatccagaagctgaagcagcagctgatgcaggtggagagagagaaggccatcctgctggccaacctgcaggagagccagacccagctggagcacaccaagggcgccctgaccgagcagcacgagagagtgcacagactgaccgagcacgtgaacgccatgagaggcctgcagagcagcaaggagctgaaggccgagctggacggcgagaagggcagagacagcggcgaggaggcccacgactacgaggtggacatcaacggcctggagatcctggagtgcaagtacagagtggccgtgaccgaggtgatcgacctgaaggccgagatcaaggccctgaaggagaagtacaacaagagcgtggagaactacaccgacgagaaggccaagtacgagagcaagatccagatgtacgacgagcaggtgaccagcctggagaagaccaccaaggagagcggcgagaagatggcccacatggagaaggagctgcagaagatgaccagcatcgccaacgagaaccacagcaccctgaacaccgcccaggacgagctggtgaccttcagcgaggagctggcccagctgtaccaccacgtgtgcctgtgcaacaacgagacccccaacagagtgatgctggactactacagacagagcagagtgaccagaagcggcagcctgaagggccccgacgaccccagaggcctgctgagccccagactggccagaagaggcgtgagcagccccgtggagaccagaaccagcagcgagcccgtggccaaggagagcaccgaggccagcaaggagcccagccccaccaagacccccaccatcagccccgtgatcaccgccccccccagcagccccgtgctggacaccagcgacatcagaaaggagcccatgaacatctacaacctgaacgccatcatcagagaccagatcaagcacctgcagaaggccgtggacagaagcctgcagctgagcagacagagagccgccgccagagagctggcccccatgatcgacaaggacaaggaggccctgatggaggagatcctgaagctgaagagcctgctgagcaccaagagagagcagatcgccaccctgagagccgtgctgaaggccaacaagcagaccgccgaggtggccctggccaacctgaagaacaagtacgagaacgagaaggccatggtgaccgagaccatgaccaagctgagaaacgagctgaaggccctgaaggaggacgccgccaccttcagcagcctgagagccatgttcgccaccagatgcgacgagtacgtgacccagctggacgagatgcagagacagctggccgccgccgaggacgagaagaagaccctgaacaccctgctgagaatggccatccagcagaagctggccctgacccagagactggaggacctggagttcgaccacgagcagagcagaagaagcaagggcaagctgggcaagagcaagatcggcagccccaagaccatcttcaccttccccctgtag

SEQ ID NO: 74398 - DNA, 2508 bp, synthetic construct
  misc_feature 1..2508: note = Description of Artificial Sequence: Synthetic coding sequence
  source 1..2508: mol_type = other DNA
atggccgccgaggaggtgctgcagaccgtggaccactacaagaccgagatcgagagactgaccaaggagctgaccgagaccacccacgagaagatccaggccgccgagtacggcctggtggtgctggaggagaagctgaccctgaagcagcagtacgacgagctggaggccgagtacgacagcctgaagcaggagctggagcagctgaaggaggccttcggccagagcttcagcatccacagaaaggtggccgaggacggcgagaccagagaggagaccctgctgcaggagagcgccagcaaggaggcctactacctgggcaagatcctggagatgcagaacgagctgaagcagagcagagccgtggtgaccaacgtgcaggccgagaacgagagactgaccgccgtggtgcaggacctgaaggagaacaacgagatggtggagctgcagagaatcagaatgaaggacgagatcagagagtacaagttcagagaggccagactgctgcaggactacaccgagctggaggaggagaacatcaccctgcagaagctggtgagcaccctgaagcagaaccaggtggagtacgagggcctgaagcacgagatcaagagattcgaggaggagaccgtgctgctgaacagccagctggaggacgccatcagactgaaggagatcgccgagcaccagctggaggaggccctggagaccctgaagaacgagagagagcagaagaacaacctgagaaaggagctgagccagtacatcagcctgaacgacaaccacatcagcatcagcgtggacggcctgaagttcgccgaggacggcagcgagcccaacaacgacgacaagatgaacggccacatccacggccccctggtgaagctgaacggcgactacagaacccccaccctgagaaagggcgagagcctgaaccccgtgagcgacctgttcagcgagctgaacatcagcgagatccagaagctgaagcagcagctgatgcaggtggagagagagaaggccatcctgctggccaacctgcaggagagccagacccagctggagcacaccaagggcgccctgaccgagcagcacgagagagtgcacagactgaccgagcacgtgaacgccatgagaggcctgcagagcagcaaggagctgaaggccgagctggacggcgagaagggcagagacagcggcgaggaggcccacgactacgaggtggacatcaacggcctggagatcctggagtgcaagtacagagtggccgtgaccgaggtgatcgacctgaaggccgagatcaaggccctgaaggagaagtacaacaagagcgtggagaactacaccgacgagaaggccaagtacgagagcaagatccagatgtacgacgagcaggtgaccagcctggagaagaccaccaaggagagcggcgagaagatggcccacatggagaaggagctgcagaagatgaccagcatcgccaacgagaaccacagcaccctgaacaccgcccaggacgagctggtgaccttcagcgaggagctggcccagctgtaccaccacgtgtgcctgtgcaacaacgagacccccaacagagtgatgctggactactacagacagagcagagtgaccagaagcggcagcctgaagggccccgacgaccccagaggcctgctgagccccagactggccagaagaggcgtgagcagccccgtggagaccagaaccagcagcgagcccgtggccaaggagagcaccgaggccagcaaggagcccagccccaccaagacccccaccatcagccccgtgatcaccgccccccccagcagccccgtgctggacaccagcgacatcagaaaggagcccatgaacatctacaacctgaacgccatcatcagagaccagatcaagcacctgcagaaggccgtggacagaagcctgcagctgagcagacagagagccgccgccagagagctggcccccatgatcgacaaggacaaggaggccctgatggaggagatcctgaagctgaagagcctgctgagcaccaagagagagcagatcgccaccctgagagccgtgctgaaggccaacaagcagaccgccgaggtggccctggccaacctgaagaacaagtacgagaacgagaaggccatggtgaccgagaccatgaccaagctgagaaacgagctgaaggccctgaaggaggacgccgccaccttcagcagcctgagagccatgttcgccaccagatgcgacgagtacgtgacccagctggacgagatgcagagacagctggccgccgccgaggacgagaagaagaccctgaacaccctgctgagaatggccatccagcagaagctggccctgacccagagactggaggacctggagttcgaccacgagcagagcagaagaagcaagggcaagctgggcaagagcaagatcggcagccccaagatcgtgagcagcctgctgcccccctacagacacagcgcccacaactag

SEQ ID NO: 74399 - DNA, 2568 bp, synthetic construct
  misc_feature 1..2568: note = Description of Artificial Sequence: Synthetic coding sequence
  source 1..2568: mol_type = other DNA
atgagcgcccccagcgaggaggaggagtacgccagactggtgatggaggcccagcccgagtggctgagagccgaggtgaagagactgagccacgagctggccgagaccaccagagagaagatccaggccgccgagtacggcctggccgtgctggaggagaagcaccagctgaagctgcagttcgaggagctggaggtggactacgaggccatcagaagcgagatggagcagctgaaggaggccttcggccaggcccacaccaaccacaagaaggtggccgccgacggcgagagcagagaggagagcctgatccaggagagcgccagcaaggagcagtactacgtgagaaaggtgctggagctgcagaccgagctgaagcagctgagaaacgtgctgaccaacacccagagcgagaacgagagactggccagcgtggcccaggagctgaaggagatcaaccagaacgtggagatccagagaggcagactgagagacgacatcaaggagtacaagttcagagaggccagactgctgcaggactacagcgagctggaggaggagaacatcagcctgcagaagcaggtgagcgtgctgagacagaaccaggtggagttcgagggcctgaagcacgagatcaagagactggaggaggagaccgagtacctgaacagccagctggaggacgccatcagactgaaggagatcagcgagagacagctggaggaggccctggagaccctgaagaccgagagagagcagaagaacagcctgagaaaggagctgagccactacatgagcatcaacgacagcttctacaccagccacctgcacgtgagcctggacggcctgaagttcagcgacgacgccgccgagcccaacaacgacgccgaggccctggtgaacggcttcgagcacggcggcctggccaagctgcccctggacaacaagaccagcacccccaagaaggagggcctggccccccccagccccagcctggtgagcgacctgctgagcgagctgaacatcagcgagatccagaagctgaagcagcagctgatgcagatggagagagagaaggccggcctgctggccaccctgcaggacacccagaagcagctggagcacaccagaggcagcctgagcgagcagcaggagaaggtgaccagactgaccgagaacctgagcgccctgagaagactgcaggccagcaaggagagacagaccgccctggacaacgagaaggacagagacagccacgaggacggcgactactacgaggtggacatcaacggccccgagatcctggcctgcaagtaccacgtggccgtggccgaggccggcgagctgagagagcagctgaaggccctgagaagcacccacgaggccagagaggcccagcacgccgaggagaagggcagatacgaggccgagggccaggccctgaccgagaaggtgagcctgctggagaaggccagcagacaggacagagagctgctggccagactggagaaggagctgaagaaggtgagcgacgtggccggcgagacccagggcagcctgagcgtggcccaggacgagctggtgaccttcagcgaggagctggccaacctgtaccaccacgtgtgcatgtgcaacaacgagacccccaacagagtgatgctggactactacagagagggccagggcggcgccggcagaaccagccccggcggcagaaccagccccgaggccagaggcagaagaagccccatcctgctgcccaagggcctgctggcccccgaggccggcagagccgacggcggcaccggcgacagcagccccagccccggcagcagcctgcccagccccctgagcgaccccagaagagagcccatgaacatctacaacctgatcgccatcatcagagaccagatcaagcacctgcaggccgccgtggacagaaccaccgagctgagcagacagagaatcgccagccaggagctgggccccgccgtggacaaggacaaggaggccctgatggaggagatcctgaagctgaagagcctgctgagcaccaagagagagcagatcaccaccctgagaaccgtgctgaaggccaacaagcagaccgccgaggtggccctggccaacctgaagagcaagtacgagaacgagaaggccatggtgaccgagaccatgatgaagctgagaaacgagctgaaggccctgaaggaggacgccgccaccttcagcagcctgagagccatgttcgccaccagatgcgacgagtacatcacccagctggacgagatgcagagacagctggccgccgccgaggacgagaagaagaccctgaacagcctgctgagaatggccatccagcagaagctggccctgacccagagactggagctgctggagctggaccacgagcagaccagaagaggcagagccaaggccgcccccaagaccaagcccgccacccccagcgtgagccacacctgcgcctgcgccagcgacagagccgagggcaccggcctggccaaccaggtgttctgcagcgagaagcacagcatctactgcgactag

SEQ ID NO: 74400 - DNA, 2475 bp, synthetic construct
  misc_feature 1..2475: note = Description of Artificial Sequence: Synthetic coding sequence
  source 1..2475: mol_type = other DNA
atgagcgcccccagcgaggaggaggagtacgccagactggtgatggaggcccagcccgagtggctgagagccgaggtgaagagactgagccacgagctggccgagaccaccagagagaagatccaggccgccgagtacggcctggccgtgctggaggagaagcaccagctgaagctgcagttcgaggagctggaggtggactacgaggccatcagaagcgagatggagcagctgaaggaggccttcggccaggcccacaccaaccacaagaaggtggccgccgacggcgagagcagagaggagagcctgatccaggagagcgccagcaaggagcagtactacgtgagaaaggtgctggagctgcagaccgagctgaagcagctgagaaacgtgctgaccaacacccagagcgagaacgagagactggccagcgtggcccaggagctgaaggagatcaaccagaacgtggagatccagagaggcagactgagagacgacatcaaggagtacaagttcagagaggccagactgctgcaggactacagcgagctggaggaggagaacatcagcctgcagaagcaggtgagcgtgctgagacagaaccaggtggagttcgagggcctgaagcacgagatcaagagactggaggaggagaccgagtacctgaacagccagctggaggacgccatcagactgaaggagatcagcgagagacagctggaggaggccctggagaccctgaagaccgagagagagcagaagaacagcctgagaaaggagctgagccactacatgagcatcaacgacagcttctacaccagccacctgcacgtgagcctggacggcctgaagttcagcgacgacgccgccgagcccaacaacgacgccgaggccctggtgaacggcttcgagcacggcggcctggccaagctgcccctggacaacaagaccagcacccccaagaaggagggcctggccccccccagccccagcctggtgagcgacctgctgagcgagctgaacatcagcgagatccagaagctgaagcagcagctgatgcagatggagagagagaaggccggcctgctggccaccctgcaggacacccagaagcagctggagcacaccagaggcagcctgagcgagcagcaggagaaggtgaccagactgaccgagaacctgagcgccctgagaagactgcaggccagcaaggagagacagaccgccctggacaacgagaaggacagagacagccacgaggacggcgactactacgaggtggacatcaacggccccgagatcctggcctgcaagtaccacgtggccgtggccgaggccggcgagctgagagagcagctgaaggccctgagaagcacccacgaggccagagaggcccagcacgccgaggagaagggcagatacgaggccgagggccaggccctgaccgagaaggtgagcctgctggagaaggccagcagacaggacagagagctgctggccagactggagaaggagctgaagaaggtgagcgacgtggccggcgagacccagggcagcctgagcgtggcccaggacgagctggtgaccttcagcgaggagctggccaacctgtaccaccacgtgtgcatgtgcaacaacgagacccccaacagagtgatgctggactactacagagagggccagggcggcgccggcagaaccagccccggcggcagaaccagccccgaggccagaggcagaagaagccccatcctgctgcccaagggcctgctggcccccgaggccggcagagccgacggcggcaccggcgacagcagccccagccccggcagcagcctgcccagccccctgagcgaccccagaagagagcccatgaacatctacaacctgatcgccatcatcagagaccagatcaagcacctgcaggccgccgtggacagaaccaccgagctgagcagacagagaatcgccagccaggagctgggccccgccgtggacaaggacaaggaggccctgatggaggagatcctgaagctgaagagcctgctgagcaccaagagagagcagatcaccaccctgagaaccgtgctgaaggccaacaagcagaccgccgaggtggccctggccaacctgaagagcaagtacgagaacgagaaggccatggtgaccgagaccatgatgaagctgagaaacgagctgaaggccctgaaggaggacgccgccaccttcagcagcctgagagccatgttcgccaccagatgcgacgagtacatcacccagctggacgagatgcagagacagctggccgccgccgaggacgagaagaagaccctgaacagcctgctgagaatggccatccagcagaagctggccctgacccagagactggagctgctggagctggaccacgagcagaccagaagaggcagagccaaggccgcccccaagaccaagcccgccacccccagcctgtag

SEQ ID NO: 74401 - DNA, 1107 bp, synthetic construct
  misc_feature 1..1107: note = Description of Artificial Sequence: Synthetic coding sequence
  source 1..1107: mol_type = other DNA
atgtggcccctgtggagactggtgagcctgctggccctgagccaggccctgcccttcgagcagagaggcttctgggacttcaccctggacgacggccccttcatgatgaacgacgaggaggccagcggcgccgacaccagcggcgtgctggaccccgacagcgtgacccccacctacagcgccatgtgccccttcggctgccactgccacctgagagtggtgcagtgcagcgacctgggcctgaagagcgtgcccaaggagatcagccccgacaccaccctgctggacctgcagaacaacgacatcagcgagctgagaaaggacgacttcaagggcctgcagcacctgtacgccctggtgctggtgaacaacaagatcagcaagatccacgagaaggccttcagccccctgagaaagctgcagaagctgtacatcagcaagaaccacctggtggagatcccccccaacctgcccagcagcctggtggagctgagaatccacgacaacagaatcagaaaggtgcccaagggcgtgttcagcggcctgagaaacatgaactgcatcgagatgggcggcaaccccctggagaacagcggcttcgagcccggcgccttcgacggcctgaagctgaactacctgagaatcagcgaggccaagctgaccggcatccccaaggacctgcccgagaccctgaacgagctgcacctggaccacaacaagatccaggccatcgagctggaggacctgctgagatacagcaagctgtacagactgggcctgggccacaaccagatcagaatgatcgagaacggcagcctgagcttcctgcccaccctgagagagctgcacctggacaacaacaagctggccagagtgcccagcggcctgcccgacctgaagctgctgcaggtggtgtacctgcacagcaacaacatcaccaaggtgggcgtgaacgacttctgccccatgggcttcggcgtgaagagagcctactacaacggcatcagcctgttcaacaaccccgtgccctactgggaggtgcagcccgccaccttcagatgcgtgaccgacagactggccatccagttcggcaactacaagaagtag

SEQ ID NO: 74402 - DNA, 924 bp, synthetic construct
  misc_feature 1..924: note = Description of Artificial Sequence: Synthetic coding sequence
  source 1..924: mol_type = other DNA
atgtgccccttcggctgccactgccacctgagagtggtgcagtgcagcgacctgggcctgaagagcgtgcccaaggagatcagccccgacaccaccctgctggacctgcagaacaacgacatcagcgagctgagaaaggacgacttcaagggcctgcagcacctgtacgccctggtgctggtgaacaacaagatcagcaagatccacgagaaggccttcagccccctgagaaagctgcagaagctgtacatcagcaagaaccacctggtggagatcccccccaacctgcccagcagcctggtggagctgagaatccacgacaacagaatcagaaaggtgcccaagggcgtgttcagcggcctgagaaacatgaactgcatcgagatgggcggcaaccccctggagaacagcggcttcgagcccggcgccttcgacggcctgaagctgaactacctgagaatcagcgaggccaagctgaccggcatccccaaggacctgcccgagaccctgaacgagctgcacctggaccacaacaagatccaggccatcgagctggaggacctgctgagatacagcaagctgtacagactgggcctgggccacaaccagatcagaatgatcgagaacggcagcctgagcttcctgcccaccctgagagagctgcacctggacaacaacaagctggccagagtgcccagcggcctgcccgacctgaagctgctgcaggtggtgtacctgcacagcaacaacatcaccaaggtgggcgtgaacgacttctgccccatgggcttcggcgtgaagagagcctactacaacggcatcagcctgttcaacaaccccgtgccctactgggaggtgcagcccgccaccttcagatgcgtgaccgacagactggccatccagttcggcaactacaagaagtag

SEQ ID NO: 74403 - DNA, 924 bp, synthetic construct; identical to SEQ ID NO: 74402
  misc_feature 1..924: note = Description of Artificial Sequence: Synthetic coding sequence
  source 1..924: mol_type = other DNA

SEQ ID NO: 74404 - DNA, 717 bp, synthetic construct
  misc_feature 1..717: note = Description of Artificial Sequence: Synthetic coding sequence
  source 1..717: mol_type = other DNA
atgtggcccctgtggagactggtgagcctgctggccctgagccaggccctgcccttcgagcagagaggcttctgggacttcaccctggacgacggccccttcatgatgaacgacgaggaggccagcggcgccgacaccagcggcgtgctggaccccgacagcgtgacccccacctacagcgccatgtgccccttcggctgccactgccacctgagagtggtgcagtgcagcgacctgggcctgaagagcgtgcccaaggagatcagccccgacaccaccctgctggacctgcagaacaacgacatcagcgagctgagaaaggacgacttcaagggcctgcagcacctgtacgtgagaagctgggaggagcccgccggcctgcagcagagagccggcgtgagagccctggtgctggtgaacaacaagatcagcaagatccacgagaaggccttcagccccctgagaaagctgcagaagctgtacatcagcaagaaccacctggtggagatcccccccaacctgcccagcagcctggtggagctgagaatccacgacaacagaatcagaaaggtgcccaagggcgtgttcagcggcctgagaaacatgaactgcatcgagatgggcggcaaccccctggagaacagcggcttcgagcccggcgccttcgacggcctgaagctgaactacctgagaatcagcgaggccaagctgacctag

SEQ ID NO: 74405 - DNA, 1257 bp, synthetic construct
  misc_feature 1..1257: note = Description of Artificial Sequence: Synthetic coding sequence
  source 1..1257: mol_type = other DNA
atgatccagctgaccgccacccccgtgagcgccctggtggacgagcccgtgcacatcagagccaccggcctgatccccttccagatggtgagcttccaggccagcctggaggacgagaacggcgacatgttctacagccaggcccactacagagccaacgagttcggcgaggtggacctgaaccacgccagcagcctgggcggcgactacatgggcgtgcaccccatgggcctgttctggagcctgaagcccgagaagctgctgaccagactgctgaagagagacgtgatgaacagacccttccaggtgcaggtgaagctgtacgacctggagctgatcgtgaacaacaaggtggccagcgcccccaaggccagcctgaccctggagagatggtacgtggcccccggcgtgaccagaatcaaggtgagagagggcagactgagaggcgccctgttcctgccccccggcgagggcctgttccccggcgtgatcgacctgttcggcggcctgggcggcctgctggagttcagagccagcctgctggccagcagaggcttcgccagcctggccctggcctaccacaactacgaggacctgcccagaaagcccgaggtgaccgacctggagtacttcgaggaggccgccaacttcctgctgagacaccccaaggtgttcggcagcggcgtgggcgtggtgagcgtgtgccagggcgtgcagatcggcctgagcatggccatctacctgaagcaggtgaccgccaccgtgctgatcaacggcaccaacttccccttcggcatcccccaggtgtaccacggccagatccaccagcccctgccccacagcgcccagctgatcagcaccaacgccctgggcctgctggagctgtacagaaccttcgagaccacccaggtgggcgccagccagtacctgttccccatcgaggaggcccagggccagttcctgttcatcgtgggcgagggcgacaagaccatcaacagcaaggcccacgccgagcaggccatcggccagctgaagagacacggcaagaacaactggaccctgctgagctaccccggcgccggccacctgatcgagcccccctacagccccctgtgctgcgccagcaccacccacgacctgagactgcactggggcggcgaggtgatcccccacgccgccgcccaggagcacgcctggaaggagatccagagattcctgagaaagcacctgatccccgacgtgaccagccagctgtag

SEQ ID NO: 74406 - DNA, 1257 bp, synthetic construct; identical to SEQ ID NO: 74405
  misc_feature 1..1257: note = Description of Artificial Sequence: Synthetic coding sequence
  source 1..1257: mol_type = other DNA

SEQ ID NO: 74407 - DNA, 891 bp, synthetic construct
  misc_feature 1..891: note = Description of Artificial Sequence: Synthetic coding sequence
  source 1..891: mol_type = other DNA
atgaacgccgagcccgagagaaagttcggcgtggtggtggtgggcgtgggcagagccggcagcgtgagaatgagagacctgagaaacccccaccccagcagcgccttcctgaacctgatcggcttcgtgagcagaagagagctgggcagcatcgacggcgtgcagcagatcagcctggaggacgccctgagcagccaggaggtggaggtggcctacatctgcagcgagagcagcagccacgaggactacatcagacagttcctgaacgccggcaagcacgtgctggtggagtaccccatgaccctgagcctggccgccgcccaggagctgtgggagctggccgagcagaagggcaaggtgctgcacgaggagcacgtggagctgctgatggaggagttcgccttcctgaagaaggaggtggtgggcaaggacctgctgaagggcagcctgctgttcaccgccggccccctggaggaggagagattcggcttccccgccttcagcggcatcagcagactgacctggctggtgagcctgttcggcgagctgagcctggtgagcgccaccctggaggagagaaaggaggaccagtacatgaagatgaccgtgtgcctggagaccgagaagaagagccccctgagctggatcgaggagaagggccccggcctgaagagaaacagatacctgagcttccacttcaagagcggcagcctggagaacgtgcccaacgtgggcgtgaacaagaacatcttcctgaaggaccagaacatcttcgtgcagaagctgctgggccagttcagcgagaaggagctggccgccgagaagaagagaatcctgcactgcctgggcctggccgaggagatccagaagtactgctgcagcagaaagtag

SEQ ID NO: 74408 - DNA, 891 bp, synthetic construct; identical to SEQ ID NO: 74407
  misc_feature 1..891: note = Description of Artificial Sequence: Synthetic coding sequence
  source 1..891: mol_type = other DNA

SEQ ID NO: 74409 - DNA, 309 bp, synthetic construct
  misc_feature 1..309: note = Description of Artificial Sequence: Synthetic coding sequence
  source 1..309: mol_type = other DNA
atgaacgccgagcccgagagaaagttcggcgtggtggtggtgggcgtgggcagagccggcagcgtgagaatgagagacctgagaaacccccaccccagcagcgccttcctgaacctgatcggcttcgtgagcagaagagagctgggcagcatcgacggcgtgcagcagatcagcctggaggacgccctgagcagccaggaggtggaggtggcctacatctgcagcgagagcagcagccacgaggactacatcagacagttcctgaacgccggcaagcacgtgctggtggagtaccccatgaccctgtag

SEQ ID NO: 74410 - DNA, 621 bp, synthetic construct
  misc_feature 1..621: note = Description of Artificial Sequence: Synthetic coding sequence
  source 1..621: mol_type = other DNA
atggccgtgaagaagatcgccatcttcggcgccaccggccagaccggcctgaccaccctggcccaggccgtgcaggccggctacgaggtgaccgtgctggtgagagacagcagcagactgcccagcgagggccccagacccgcccacgtggtggtgggcgacgtgctgcaggccgccgacgtggacaagaccgtggccggccaggacgccgtgatcgtgctgctgggcaccagaaacgacctgagccccaccaccgtgatgagcgagggcgccagaaacatcgtggccgccatgaaggcccacggcgtggacaaggtggtggcctgcaccagcgccttcctgctgtgggaccccaccaaggtgccccccagactgcaggccgtgaccgacgaccacatcagaatgcacaaggtgctgagagagagcggcctgaagtacgtggccgtgatgcccccccacatcggcgaccagcccctgaccggcgcctacaccgtgaccctggacggcagaggccccagcagagtgatcagcaagcacgacctgggccacttcatgctgagatgcctgaccaccgacgagtacgacggccacagcacctaccccagccaccagtaccagtag

SEQ ID NO: 74411 - DNA, 399 bp, synthetic construct
  misc_feature 1..399: note = Description of Artificial Sequence: Synthetic coding sequence
  source 1..399: mol_type = other DNA
atgggcagcctgatgctgctgttcgtggagaccaccagaaacagcagcgcctgcatcttccccgtgatcctgaacgagctgagcagcaccgtggagaccatcacccacttccccgaggtgaccgacggcgagtgcgtgttccccttccactacaagaacggcacctactacgactgcatcaagagcaaggccagacacaagtggtgcagcctgaacaagacctacgagggctactggaagttctgcagcgccgaggacttcgccaactgcgtgttccccttctggtacagaagactgatctactgggagtgcaccgacgacggcgaggccttcggcaagaagtggtgcagcctgaccaagaacttcaacaaggacagaatctggaagtactgcgagtag

SEQ ID NO: 74412 - DNA, 429 bp, synthetic construct
  misc_feature 1..429: note = Description of Artificial Sequence: Synthetic coding sequence
  source 1..429: mol_type = other DNA
atggccgccgccgccgagggcgtgctggccaccagaagcgacgagcccgccagagacgacgccgccgtggagaccgccgaggaggccaaggagcccgccgaggccgacatcaccgagctgtgcagagacatgttcagcaagatggccacctacctgaccggcgagctgaccgccaccagcgaggactacaagctgctggagaacatgaacaagctgaccagcctgaagtacctggagatgaaggacatcgccatcaacatcagcagaaacctgaaggacctgaaccagaagtacgccggcctgcagccctacctggaccagatcaacgtgatcgaggagcaggtggccgccctggagcaggccgcctacaagctggacgcctacagcaagaagctggaggccaagtacaagaagctggagaagagatag

SEQ ID NO: 74413 - DNA, 225 bp, synthetic construct
  misc_feature 1..225: note = Description of Artificial Sequence: Synthetic coding sequence
  source 1..225: mol_type = other DNA
atgaacaagctgaccagcctgaagtacctggagatgaaggacatcgccatcaacatcagcagaaacctgaaggacctgaaccagaagtacgccggcctgcagccctacctggaccagatcaacgtgatcgaggagcaggtggccgccctggagcaggccgcctacaagctggacgcctacagcaagaagctggaggccaagtacaagaagctggagaagagatag

SEQ ID NO: 74414 - DNA, 225 bp, synthetic construct; identical to SEQ ID NO: 74413
  misc_feature 1..225: note = Description of Artificial Sequence: Synthetic coding sequence
  source 1..225: mol_type = other DNA

SEQ ID NO: 74415 - DNA, 300 bp, synthetic construct
  misc_feature 1..300: note = Description of Artificial Sequence: Synthetic coding sequence
  source 1..300: mol_type = other DNA
atgttcagcaagatggccacctacctgaccggcgagctgaccgccaccagcgaggactacaagctgctggagaacatgaacaagctgaccagcctgaagtacctggagatgaaggacatcgccatcaacatcagcagaaacctgaaggacctgaaccagaagtacgccggcctgcagccctacctggaccagatcaacgtgatcgaggagcaggtggccgccctggagcaggccgcctacaagctggacgcctacagcaagaagctggaggccaagtacaagaagctggagaagagatag

SEQ ID NO: 74416 - DNA, 609 bp, synthetic construct
  misc_feature 1..609: note = Description of Artificial Sequence: Synthetic coding sequence
  source 1..609: mol_type = other DNA
atggccagccagggcagaagaagaagacccctgagaagacccgagaccgtggtgcccggcgaggccaccgagaccgacagcgagagaagcgccagcagcagcgaggaggaggagctgtacctgggccccagcggccccaccagaggcagacccaccggcctgagagtggccggcgaggccgccgagaccgacagcgagcccgagcccgagcccgagcccaccgccgcccccagagacctgccccccctggtggtgcagagagagagcgccgaggaggcctggggcaccgaggaggcccccgcccccgcccccgccagaagcctgctgcagctgagactggccgagagccaggccagactggaccacgacgtggccgccgccgtgagcggcgtgtacagaagagccggcagagacgtggccgccctggccagcagactggccgccgcccaggccgccggcctggccgccgcccacagcgtgagactggccagaggcgacctgtgcgccctggccgagagactggacatcgtggccggctgcagactgctgcccgacatcagaggcgtgcccggcaccgagcccgagaaggaccccggccccagagcctag

SEQ ID NO: 74417 - DNA, 1632 bp, synthetic construct
  misc_feature 1..1632: note = Description of Artificial Sequence: Synthetic coding sequence
  source 1..1632: mol_type = other DNA
atggcccacgcccacatccagggcggcagaagagccaagagcagattcgtggtgtgcatcatgagcggcgccagaagcaagctggccctgttcctgtgcggctgctacgtggtggccctgggcgcccacaccggcgaggagagcgtggccgaccaccacgaggccgagtactacgtggccgccgtgtacgagcaccccagcatcctgagcctgaaccccctggccctgatcagcagacaggaggccctggagctgatgaaccagaacctggacatctacgagcagcaggtgatgaccgccgcccagaaggacgtgcagatcatcgtgttccccgaggacggcatccacggcttcaacttcaccagaaccagcatctaccccttcctggacttcatgcccagcccccaggtggtgagatggaacccctgcctggagccccacagattcaacgacaccgaggtgctgcagagactgagctgcatggccatcagaggcgacatgttcctggtggccaacctgggcaccaaggagccctgccacagcagcgaccccagatgccccaaggacggcagataccagttcaacaccaacgtggtgttcagcaacaacggcaccctggtggacagatacagaaagcacaacctgtacttcgaggccgccttcgacgtgcccctgaaggtggacctgatcaccttcgacacccccttcgccggcagattcggcatcttcacctgcttcgacatcctgttcttcgaccccgccatcagagtgctgagagactacaaggtgaagcacgtggtgtaccccaccgcctggatgaaccagctgcccctgctggccgccatcgagatccagaaggccttcgccgtggccttcggcatcaacgtgctggccgccaacgtgcaccaccccgtgctgggcatgaccggcagcggcatccacacccccctggagagcttctggtaccacgacatggagaaccccaagagccacctgatcatcgcccaggtggccaagaaccccgtgggcctgatcggcgccgagaacgccaccggcgagaccgaccccagccacagcaagttcctgaagatcctgagcggcgacccctactgcgagaaggacgcccaggaggtgcactgcgacgaggccaccaagtggaacgtgaacgccccccccaccttccacagcgagatgatgtacgacaacttcaccctggtgcccgtgtggggcaaggagggctacctgcacgtgtgcagcaacggcctgtgctgctacctgctgtacgagagacccaccctgagcaaggagctgtacgccctgggcgtgttcgacggcctgcacaccgtgcacggcacctactacatccaggtgtgcgccctggtgagatgcggcggcctgggcttcgacacctgcggccaggagatcaccgaggccaccggcatcttcgagttccacctgtggggcaacttcagcaccagctacatcttccccctgttcctgaccagcggcatgaccctggaggtgcccgaccagctgggctgggagaacgaccactacttcctgagaaagagcagactgagcagcggcctggtgaccgccgccctgtacggcagactgtacgagagagactag

SEQ ID NO: 74418 - DNA, 1572 bp, synthetic construct
  misc_feature 1..1572: note = Description of Artificial Sequence: Synthetic coding sequence
  source 1..1572: mol_type = other DNA
atgagcggcgccagaagcaagctggccctgttcctgtgcggctgctacgtggtggccctgggcgcccacaccggcgaggagagcgtggccgaccaccacgaggccgagtactacgtggccgccgtgtacgagcaccccagcatcctgagcctgaaccccctggccctgatcagcagacaggaggccctggagctgatgaaccagaacctggacatctacgagcagcaggtgatgaccgccgcccagaaggacgtgcagatcatcgtgttccccgaggacggcatccacggcttcaacttcaccagaaccagcatctaccccttcctggacttcatgcccagcccccaggtggtgagatggaacccctgcctggagccccacagattcaacgacaccgaggtgctgcagagactgagctgcatggccatcagaggcgacatgttcctggtggccaacctgggcaccaaggagccctgccacagcagcgaccccagatgccccaaggacggcagataccagttcaacaccaacgtggtgttcagcaacaacggcaccctggtggacagatacagaaagcacaacctgtacttcgaggccgccttcgacgtgcccctgaaggtggacctgatcaccttcgacacccccttcgccggcagattcggcatcttcacctgcttcgacatcctgttcttcgaccccgccatcagagtgctgagagactacaaggtgaagcacgtggtgtaccccaccgcctggatgaaccagctgcccctgctggccgccatcgagatccagaaggccttcgccgtggccttcggcatcaacgtgctggccgccaacgtgcaccaccccgtgctgggcatgaccggcagcggcatccacacccccctggagagcttctggtaccacgacatggagaaccccaagagccacctgatcatcgcccaggtggccaagaaccccgtgggcctgatcggcgccgagaacgccaccggcgagaccgaccccagccacagcaagttcctgaagatcctgagcggcgacccctactgcgagaaggacgcccaggaggtgcactgcgacgaggccaccaagtggaacgtgaacgccccccccaccttccacagcgagatgatgtacgacaacttcaccctggtgcccgtgtggggcaaggagggctacctgcacgtgtgcagcaacggcctgtgctgctacctgctgtacgagagacccaccctgagcaaggagctgtacgccctgggcgtgttcgacggcctgcacaccgtgcacggcacctactacatccaggtgtgcgccctggtgagatgcggcggcctgggcttcgacacctgcggccaggagatcaccgaggccaccggcatcttcgagttccacctgtggggcaacttcagcaccagctacatcttccccctgttcctgaccagcggcatgaccctggaggtgcccgaccagctgggctgggagaacgaccactacttcctgagaaagagcagactgagcagcggcctggtgaccgccgccctgtacggcagactgtacgagagagactag

SEQ ID NO: 74419 - DNA, 1638 bp, synthetic construct
  misc_feature 1..1638: note = Description of Artificial Sequence: Synthetic coding sequence
  source 1..1638: mol_type = other DNA
atggccagaaaggagacccagctgatcatcaagatgaaccacctggccagattcgtggtgtgcatcatgagcggcgccagaagcaagctggccctgttcctgtgcggctgctacgtggtggccctgggcgcccacaccggcgaggagagcgtggccgaccaccacgaggccgagtactacgtggccgccgtgtacgagcaccccagcatcctgagcctgaaccccctggccctgatcagcagacaggaggccctggagctgatgaaccagaacctggacatctacgagcagcaggtgatgaccgccgcccagaaggacgtgcagatcatcgtgttccccgaggacggcatccacggcttcaacttcaccagaaccagcatctaccccttcctggacttcatgcccagcccccaggtggtgagatggaacccctgcctggagccccacagattcaacgacaccgaggtgctgcagagactgagctgcatggccatcagaggcgacatgttcctggtggccaacctgggcaccaaggagccctgccacagcagcgaccccagatgccccaaggacggcagataccagttcaacaccaacgtggtgttcagcaacaacggcaccctggtggacagatacagaaagcacaacctgtacttcgaggccgccttcgacgtgcccctgaaggtggacctgatcaccttcgacacccccttcgccggcagattcggcatcttcacctgcttcgacatcctgttcttcgaccccgccatcagagtgctgagagactacaaggtgaagcacgtggtgtaccccaccgcctggatgaaccagctgcccctgctggccgccatcgagatccagaaggccttcgccgtggccttcggcatcaacgtgctggccgccaacgtgcaccaccccgtgctgggcatgaccggcagcggcatccacacccccctggagagcttctggtaccacgacatggagaaccccaagagccacctgatcatcgcccaggtggccaagaaccccgtgggcctgatcggcgccgagaacgccaccggcgagaccgaccccagccacagcaagttcctgaagatcctgagcggcgacccctactgcgagaaggacgcccaggaggtgcactgcgacgaggccaccaagtggaacgtgaacgccccccccaccttccacagcgagatgatgtacgacaacttcaccctggtgcccgtgtggggcaaggagggctacctgcacgtgtgcagcaacggcctgtgctgctacctgctgtacgagagacccaccctgagcaaggagctgtacgccctgggcgtgttcgacggcctgcacaccgtgcacggcacctactacatccaggtgtgcgccctggtgagatgcggcggcctgggcttcgacacctgcggccaggagatcaccgaggccaccggcatcttcgagttccacctgtggggcaacttcagcaccagctacatcttccccctgttcctgaccagcggcatgaccctggaggtgcccgaccagctgggctgggagaacgaccactacttcctgagaaagagcagactgagcagcggcctggtgaccgccgccctgtacggcagactgtacgagagagactag

SEQ ID NO: 74420 - DNA, 1638 bp, synthetic construct
  misc_feature 1..1638: note = Description of Artificial Sequence: Synthetic coding sequence
  source 1..1638: mol_type = other DNA
atgcccgagggcggcggcaccagcagaagactgctgcccatgcagagcagattcgtggtgtgcatcatgagcggcgccagaagcaagctggccctgttcctgtgcggctgctacgtggtggccctgggcgcccacaccggcgaggagagcgtggccgaccaccacgaggccgagtactacgtggccgccgtgtacgagcaccccagcatcctgagcctgaaccccctggccctgatcagcagacaggaggccctggagctgatgaaccagaacctggacatctacgagcagcaggtgatgaccgccgcccagaaggacgtgcagatcatcgtgttccccgaggacggcatccacggcttcaacttcaccagaaccagcatctaccccttcctggacttcatgcccagcccccaggtggtgagatggaacccctgcctggagccccacagattcaacgacaccgaggtgctgcagagactgagctgcatggccatcagaggcgacatgttcctggtggccaacctgggcaccaaggagccctgccacagcagcgaccccagatgccccaaggacggcagataccagttcaacaccaacgtggtgttcagcaacaacggcaccctggtggacagatacagaaagcacaacctgtacttcgaggccgccttcgacgtgcccctgaaggtggacctgatcaccttcgacacccccttcgccggcagattcggcatcttcacctgcttcgacatcctgttcttcgaccccgccatcagagtgctgagagactacaaggtgaagcacgtggtgtaccccaccgcctggatgaaccagctgcccctgctggccgccatcgagatccagaaggccttcgccgtggccttcggcatcaacgtgctggccgccaacgtgcaccaccccgtgctgggcatgaccggcagcggcatccacacccccctggagagcttctggtaccacgacatggagaaccccaagagccacctgatcatcgcccaggtggccaagaaccccgtgggcctgatcggcgccgagaacgccaccggcgagaccgaccccagccacagcaagttcctgaagatcctgagcggcgacccctactgcgagaaggacgcccaggaggtgcactgcgacgaggccaccaagtggaacgtgaacgccccccccaccttccacagcgagatgatgtacgacaacttcaccctggtgcccgtgtggggcaaggagggctacctgcacgtgtgcagcaacggcctgtgctgctacctgctgtacgagagacccaccctgagcaaggagctgtacgccctgggcgtgttcgacggcctgcacaccgtgcacggcacctactacatccaggtgtgcgccctggtgagatgcggcggcctgggcttcgacacctgcggccaggagatcaccgaggccaccggcatcttcgagttccacctgtggggcaacttcagcaccagctacatcttccccctgttcctgaccagcggcatgaccctggaggtgcccgaccagctgggctgggagaacgaccactacttcctgagaaagagcagactgagcagcggcctggtgaccgccgccctgtacggcagactgtacgagagagactag

SEQ ID NO: 74421 - DNA, 585 bp, synthetic construct
  misc_feature 1..585: note = Description of Artificial Sequence: Synthetic coding sequence
  source 1..585: mol_type = other DNA
atgcccagaaacctgctgtacagcctgctgagcagccacctgagcccccacttcagcaccagcgtgaccagcgccaaggtggccgtgaacggcgtgcagctgcactaccagcagaccggcgagggcgaccacgccgtgctgctgctgcccggcatgctgggcagcggcgagaccgacttcggcccccagctgaagaacctgaacaagaagctgttcaccgtggtggcctgggaccccagaggctacggccacagcagaccccccgacagagacttccccgccgacttcttcgagagagacgccaaggacgccgtggacctgatgaaggccctgaagttcaagaaggtgagcctgctgggctggagcgacggcggcatcaccgccctgatcgccgccgccaagtaccccagctacatccacaagatggtgatctggggcgccaacgcctacgtgaccgacgaggacagcatgatctacgagggcatcagagacgtgagcaagtggagcgagagaaccagaaagcccctggaggccctgtacggctggagcctgaccctgagccccggctggaacgccatggcctag

SEQ ID NO: 74422 - DNA, 825 bp, synthetic construct
  misc_feature 1..825: note = Description of Artificial Sequence: Synthetic coding sequence
  source 1..825: mol_type = other DNA
atgcccagaaacctgctgtacagcctgctgagcagccacctgagcccccacttcagcaccagcgtgaccagcgccaaggtggccgtgaacggcgtgcagctgcactaccagcagaccggcgagggcgaccacgccgtgctgctgctgcccggcatgctgggcagcggcgagaccgacttcggcccccagctgaagaacctgaacaagaagctgttcaccgtggtggcctgggaccccagaggctacggccacagcagaccccccgacagagacttccccgccgacttcttcgagagagacgccaaggacgccgtggacctgatgaaggccctgaagttcaagaaggtgagcctgctgggctggagcgacggcggcatcaccgccctgatcgccgccgccaagtaccccagctacatccacaagatggtgatctggggcgccaacgcctacgtgaccgacgaggacagcatgatctacgagggcatcagagacgtgagcaagtggagcgagagaaccagaaagcccctggaggccctgtacggctacgactacttcgccagaacctgcgagaagtgggtggacggcatcagacagttcaagcacctgcccgacggcaacatctgcagacacctgctgcccagagtgcagtgccccgccctgatcgtgcacggcgagaaggaccccctggtgcccagattccacgccgacttcatccacaagcacgtgaagggcagcagactgcacctgatgcccgagggcaagcacaacctgcacctgagattcgccgacgagttcaacaagctggccgaggacttcctgcagtag

SEQ ID NO: 74423 - DNA, 876 bp, synthetic construct
  misc_feature 1..876: note = Description of Artificial Sequence: Synthetic coding sequence
  source 1..876: mol_type = other DNA
atggtggccgtgctgggcggcagaggcgtgctgagactgagactgctgctgagcgccctgaagcccggcatccacgtgcccagagccggccccgccgccgccttcggcaccagcgtgaccagcgccaaggtggccgtgaacggcgtgcagctgcactaccagcagaccggcgagggcgaccacgccgtgctgctgctgcccggcatgctgggcagcggcgagaccgacttcggcccccagctgaagaacctgaacaagaagctgttcaccgtggtggcctgggaccccagaggctacggccacagcagaccccccgacagagacttccccgccgacttcttcgagagagacgccaaggacgccgtggacctgatgaaggccctgaagttcaagaaggtgagcctgctgggctggagcgacggcggcatcaccgccctgatcgccgccgccaagtaccccagctacatccacaagatggtgatctggggcgccaacgcctacgtgaccgacgaggacagcatgatctacgagggcatcagagacgtgagcaagtggagcgagagaaccagaaagcccctggaggccctgtacggctacgactacttcgccagaacctgcgagaagtgggtggacggcatcagacagttcaagcacctgcccgacggcaacatctgcagacacctgctgcccagagtgcagtgccccgccctgatcgtgcacggcgagaaggaccccctggtgcccagattccacgccgacttcatccacaagcacgtgaagggcagcagactgcacctgatgcccgagggcaagcacaacctgcacctgagattcgccgacgagttcaacaagctggccgaggacttcctgcagtag

SEQ ID NO: 74424 - DNA, 264 bp, synthetic construct
  misc_feature 1..264: note = Description of Artificial Sequence: Synthetic coding sequence
  source 1..264: mol_type = other DNA
atgtactgcctgcagtggctgctgcccgtgctgctgatccccaagcccctgaaccccgccctgtggttcagccacagcatgttcatgggcttctacctgctgagcttcctgctggagagaaagccctgcaccatctgcgccctggtgttcctggccgccctgttcctgatctgctacagctgctggggcaactgcttcctgtaccactgcagcgacagccccctgcccgagagcgcccacgaccccggcgtggtgggcacctag

SEQ ID NO: 74425 - DNA, 264 bp, synthetic construct; identical to SEQ ID NO: 74424
  misc_feature 1..264: note = Description of Artificial Sequence: Synthetic coding sequence
  source 1..264: mol_type = other DNA

SEQ ID NO: 74426 - DNA, 264 bp, synthetic construct; identical to SEQ ID NO: 74424
  misc_feature 1..264: note = Description of Artificial Sequence: Synthetic coding sequence
  source 1..264: mol_type = other DNA

SEQ ID NO: 74427 - DNA, 264 bp, synthetic construct; identical to SEQ ID NO: 74424
  misc_feature 1..264: note = Description of Artificial Sequence: Synthetic coding sequence
  source 1..264: mol_type = other DNA

SEQ ID NO: 74428 - DNA, 264 bp, synthetic construct; identical to SEQ ID NO: 74424
  misc_feature 1..264: note = Description of Artificial Sequence: Synthetic coding sequence
  source 1..264: mol_type = other DNA

SEQ ID NO: 74429 - DNA, 189 bp, synthetic construct
  misc_feature 1..189: note = Description of Artificial Sequence: Synthetic coding sequence
  source 1..189: mol_type = other DNA
atgtactgcctgcagtggctgctgcccgtgctgctgatccccaagcccctgaaccccgccctgtggttcagccacagcatgttcatgggcttctacctgctgagcttcctgctggagagaaagccctgcaccatctgcgccctggtgttcctggccgccctgttcctgatctgctacagctgctggtag

SEQ ID NO: 74430 - DNA, 264 bp, synthetic construct; identical to SEQ ID NO: 74424
  misc_feature 1..264: note = Description of Artificial Sequence: Synthetic coding sequence
  source 1..264: mol_type = other DNA

SEQ ID NO: 74431 - DNA, 264 bp, synthetic construct; identical to SEQ ID NO: 74424
  misc_feature 1..264: note = Description of Artificial Sequence: Synthetic coding sequence
  source 1..264: mol_type = other DNA

SEQ ID NO: 74432 - DNA, 237 bp, synthetic construct
  misc_feature 1..237: note = Description of Artificial Sequence: Synthetic coding sequence
  source 1..237: mol_type = other DNA
atgtactgcctgcagtggctgctgcccgtgctgctgatccccaagcccctgaaccccgccctgtggttcagccacagcatgttcatgggcttctacctgctgagcttcctgctggagagaaagccctgcaccatctgcgccctggtgttcctggccgccctgttcctgatctgctacagctgctggggcaactgcttcctgtaccactgcagcgacagccccctgcccgagagctag

SEQ ID NO: 74433 - DNA, 24 bp, synthetic construct
  misc_feature 1..24: note = Description of Artificial Sequence: Synthetic coding sequence
  source 1..24: mol_type = other DNA
atgtactgcctgcagtggctgtag

SEQ ID NO: 74434 - DNA, 1368 bp, synthetic construct
  misc_feature 1..1368: note = Description of Artificial Sequence: Synthetic coding sequence
  source 1..1368: mol_type = other DNA
atgagcagcagcggcctgaacagcgagaaggtggccgccctgatccagaagctgaacagcgacccccagttcgtgctggcccagaacgtgggcaccacccacgacctgctggacatctgcctgaagagagccaccgtgcagagagcccagcacgtgttccagcacgccgtgccccaggagggcaagcccatcaccaaccagaagagcagcggcagatgctggatcttcagctgcctgaacgtgatgagactgcccttcatgaagaagctgaacatcgaggagttcgagttcagccagagctacctgttcttctgggacaaggtggagagatgctacttcttcctgagcgccttcgtggacaccgcccagagaaaggagcccgaggacggcagactggtgcagttcctgctgatgaaccccgccaacgacggcggccagtgggacatgctggtgaacatcgtggagaagtacggcgtgatccccaagaagtgcttccccgagagctacaccaccgaggccaccagaagaatgaacgacatcctgaaccacaagatgagagagttctgcatcagactgagaaacctggtgcacagcggcgccaccaagggcgagatcagcgccacccaggacgtgatgatggaggagatcttcagagtggtgtgcatctgcctgggcaacccccccgagaccttcacctgggagtacagagacaaggacaagaactaccagaagatcggccccatcacccccctggagttctacagagagcacgtgaagcccctgttcaacatggaggacaagatctgcctggtgaacgaccccagaccccagcacaagtacaacaagctgtacaccgtggagtacctgagcaacatggtgggcggcagaaagaccctgtacaacaaccagcccatcgacttcctgaagaagatggtggccgccagcatcaaggacggcgaggccgtgtggttcggctgcgacgtgggcaagcacttcaacagcaagctgggcctgagcgacatgaacctgtacgaccacgagctggtgttcggcgtgagcctgaagaacatgaacaaggccgagagactgaccttcggcgagagcctgatgacccacgccatgaccttcaccgccgtgagcgagaaggacgaccaggacggcgccttcaccaagtggagagtggagaacagctggggcgaggaccacggccacaagggctacctgtgcatgaccgacgagtggttcagcgagtacgtgtacgaggtggtggtggacagaaagcacgtgcccgaggaggtgctggccgtgctggagcaggagcccatcatcctgcccgcctgggaccccatgggcgccctggccgagtag

SEQ ID NO: 74435 - DNA, 1107 bp, synthetic construct
  misc_feature 1..1107: note = Description of Artificial Sequence: Synthetic coding sequence
  source 1..1107: mol_type = other DNA
atgtgcagcagcaccccctgccccagaagagccagccagagccccaccagaagagcccaggtggagagatgctacttcttcctgagcgccttcgtggacaccgcccagagaaaggagcccgaggacggcagactggtgcagttcctgctgatgaaccccgccaacgacggcggccagtgggacatgctggtgaacatcgtggagaagtacggcgtgatccccaagaagtgcttccccgagagctacaccaccgaggccaccagaagaatgaacgacatcctgaaccacaagatgagagagttctgcatcagactgagaaacctggtgcacagcggcgccaccaagggcgagatcagcgccacccaggacgtgatgatggaggagatcttcagagtggtgtgcatctgcctgggcaacccccccgagaccttcacctgggagtacagagacaaggacaagaactaccagaagatcggccccatcacccccctggagttctacagagagcacgtgaagcccctgttcaacatggaggacaagatctgcctggtgaacgaccccagaccccagcacaagtacaacaagctgtacaccgtggagtacctgagcaacatggtgggcggcagaaagaccctgtacaacaaccagcccatcgacttcctgaagaagatggtggccgccagcatcaaggacggcgaggccgtgtggttcggctgcgacgtgggcaagcacttcaacagcaagctgggcctgagcgacatgaacctgtacgaccacgagctggtgttcggcgtgagcctgaagaacatgaacaaggccgagagactgaccttcggcgagagcctgatgacccacgccatgaccttcaccgccgtgagcgagaaggacgaccaggacggcgccttcaccaagtggagagtggagaacagctggggcgaggaccacggccacaagggctacctgtgcatgaccgacgagtggttcagcgagtacgtgtacgaggtggtggtggacagaaagcacgtgcccgaggaggtgctggccgtgctggagcaggagcccatcatcctgcccgcctgggaccccatgggcgccctggccgagtag

SEQ ID NO: 74436 - DNA, 2241 bp, synthetic construct
  misc_feature 1..2241: note = Description of Artificial Sequence: Synthetic coding sequence
  source 1..2241: mol_type = other DNA
atggccggcagcagaggcgccggcagaaccgccgcccccagcgtgagacccgagaagagaagaagcgagcccgagctggagcccgagcccgagcccgagccccccctgctgtgcaccagccccctgagccacagcaccggcagcgacagcggcgtgagcgacagcgaggagagcgtgttcagcggcctggaggacagcggcagcgacagcagcgaggacgacgacgagggcgacgaggagggcgaggacggcgccctggacgacgagggccacagcggcatcaagaagaccaccgaggagcaggtgcaggccagcaccccctgccccagaaccgagatggccagcgccagaatcggcgacgagtacgccgaggacagcagcgacgaggaggacatcagaaacaccgtgggcaacgtgcccctggagtggtacgacgacttcccccacgtgggctacgacctggacggcagaagaatctacaagcccctgagaaccagagacgagctggaccagttcctggacaagatggacgaccccgactactggagaaccgtgcaggaccccatgaccggcagagacctgagactgaccgacgagcaggtggccctggtgagaagactgcagagcggccagttcggcgacgtgggcttcaacccctacgagcccgccgtggacttcttcagcggcgacgtgatgatccaccccgtgaccaacagacccgccgacaagagaagcttcatccccagcctggtggagaaggagaaggtgagcagaatggtgcacgccatcaagatgggctggatccagcccagaagacccagagaccccacccccagcttctacgacctgtgggcccaggaggaccccaacgccgtgctgggcagacacaagatgcacgtgcccgcccccaagctggccctgcccggccacgccgagagctacaaccccccccccgagtacctgctgagcgaggaggagagactggcctgggagcagcaggagcccggcgagagaaagctgagcttcctgcccagaaagttccccagcctgagagccgtgcccgcctacggcagattcatccaggagagattcgagagatgcctggacctgtacctgtgccccagacagagaaagatgagagtgaacgtggaccccgaggacctgatccccaagctgcccagacccagagacctgcagcccttccccacctgccaggccctggtgtacagaggccacagcgacctggtgagatgcctgagcgtgagccccggcggccagtggctggtgagcggcagcgacgacggcagcctgagactgtgggaggtggccaccgccagatgcgtgagaaccgtgcccgtgggcggcgtggtgaagagcgtggcctggaaccccagccccgccgtgtgcctggtggccgccgccgtggaggacagcgtgctgctgctgaaccccgccctgggcgacagactggtggccggcagcaccgaccagctgctgagcgccttcgtgccccccgaggagccccccctgcagcccgccagatggctggaggccagcgaggaggagagacaggtgggcctgagactgagaatctgccacggcaagcccgtgacccaggtgacctggcacggcagaggcgactacctggccgtggtgctggccacccagggccacacccaggtgctgatccaccagctgagcagaagaagaagccagagccccttcagaagaagccacggccaggtgcagagagtggccttccaccccgccagacccttcctgctggtggccagccagagaagcgtgagactgtaccacctgctgagacaggagctgaccaagaagctgatgcccaactgcaagtgggtgagcagcctggccgtgcaccccgccggcgacaacgtgatctgcggcagctacgacagcaagctggtgtggttcgacctggacctgagcaccaagccctacagaatgctgagacaccacaagaaggccctgagagccgtggccttccaccccagataccccctgttcgccagcggcagcgacgacggcagcgtgatcgtgtgccacggcatggtgtacaacgacctgctgcagaaccccctgctggtgcccgtgaaggtgctgaagggccacgtgctgaccagagacctgggcgtgctggacgtgatcttccaccccacccagccctgggtgttcagcagcggcgccgacggcaccgtgagactgttcacctag

SEQ ID NO: 74437 - DNA, 1083 bp, synthetic construct
  misc_feature 1..1083: note = Description of Artificial Sequence: Synthetic coding sequence
  source 1..1083: mol_type = other DNA
atgaactacaccgagagcagccccctgagagagagcaccgccatcggcttcacccccgagctggagagcatcatccccgtgcccagcaacaagaccacctgcgagaactggagagagatccaccacctggtgttccacgtggccaacatctgcttcgccgtgggcctggtgatccccaccaccctgcacctgcacatgatcttcctgagaggcatgctgaccctgggctgcaccctgtacatcgtgtgggccaccctgtacagatgcgccctggacatcatgatctggaacagcgtgttcctgggcgtgaacatcctgcacctgagctacctgctgtacaagaagagacccgtgaagatcgagaaggagctgagcggcatgtacagaagactgttcgagcccctgagagtgccccccgacctgttcagaagactgaccggccagttctgcatgatccagaccctgaagaagggccagacctacgccgccgaggacaagaccagcgtggacgacagactgagcatcctgctgaagggcaagatgaaggtgagctacagaggccacttcctgcacaacatctacccctgcgccttcatcgacagccccgagttcagaagcacccagatgcacaagggcgagaagttccaggtgaccatcatcgccgacgacaactgcagattcctgtgctggagcagagagagactgacctacttcctggagagcgagcccttcctgtacgagatcttcagatacctgatcggcaaggacatcaccaacaagctgtacagcctgaacgaccccaccctgaacgacaagaaggccaagaagctggagcaccagctgagcctgtgcacccagatcagcatgctggagatgagaaacagcatcgccagcagcagcgacagcgacgacggcctgcaccagttcctgagaggcaccagcagcatgagcagcctgcacgtgagcagcccccaccagagagccagcgccaagatgaagcccatcgaggagggcgccgaggacgacgacgacgtgttcgagcccgccagccccaacaccctgaaggtgcaccagctgccctag

SEQ ID NO: 74438 - DNA, 1083 bp, synthetic construct; identical to SEQ ID NO: 74437
  misc_feature 1..1083: note = Description of Artificial Sequence: Synthetic coding sequence
  source 1..1083: mol_type = other DNA

SEQ ID NO: 74439 - DNA, 1083 bp, synthetic construct; identical to SEQ ID NO: 74437
  misc_feature 1..1083: note = Description of Artificial Sequence: Synthetic coding sequence
  source 1..1083: mol_type = other DNA

SEQ ID NO: 74440 - DNA, 783 bp, synthetic construct
  misc_feature 1..783: note = Description of Artificial Sequence: Synthetic coding sequence
  source 1..783: mol_type = other DNA
atggacagacacagcagctacatcttcatctggctgcagctggagctgtgcgccatggccgtgctgctgaccaagggcgagatcagatgctactgcgacgccgcccactgcgtggccaccggctacatgtgcaagagcgagctgagcgcctgcttcagcagactgctggacccccagaacagcaacagccccctgacccacggctgcctggacagcctggccagcaccaccgacatctgccaggccaagcaggccagaaaccacagcggcaccaccatccccaccctggagtgctgccacgaggacatgtgcaactacagaggcctgcacgacgtgctgagcccccccagaggcgaggccagcggccagggcaacagataccagcacgacggcagcagaaacctgatcaccaaggtgcaggagctgaccagcagcaaggagctgtggttcagagccgccgtgatcgccgtgcccatcgccggcggcctgatcctggtgctgctgatcatgctggccctgagaatgctgagaagcgagaacaagagactgcaggaccagagacagcagatgctgagcagactgcactacagcttccacggccaccacagcaagaagggccaggtggccaagctggacctggagtgcatggtgcccgtgagcggccacgagaactgctgcctgacctgcgacaagatgagacaggccgacctgagcaacgacaagatcctgagcctggtgcactggggcatgtacagcggccacggcaagctggagttcgtgtag

SEQ ID NO: 74441 - DNA, 744 bp, synthetic construct
  misc_feature 1..744: note = Description of Artificial Sequence: Synthetic coding sequence
  source 1..744: mol_type = other DNA
atggacagacacagcagctacatcttcatctggctgcagctggagctgtgcgccatggccgtgctgctgaccaagggcgagatcagatgctactgcgacgccgcccactgcgtggccaccggctacatgtgcaagagcgagctgagcgcctgcttcagcagactgctggacccccagaacagcaacagcccccacatctgccaggccaagcaggccagaaaccacagcggcaccaccatccccaccctggagtgctgccacgaggacatgtgcaactacagaggcctgcacgacgtgctgagcccccccagaggcgaggccagcggccagggcaacagataccagcacgacggcagcagaaacctgatcaccaaggtgcaggagctgaccagcagcaaggagctgtggttcagagccgccgtgatcgccgtgcccatcgccggcggcctgatcctggtgctgctgatcatgctggccctgagaatgctgagaagcgagaacaagagactgcaggaccagagacagcagatgctgagcagactgcactacagcttccacggccaccacagcaagaagggccaggtggccaagctggacctggagtgcatggtgcccgtgagcggccacgagaactgctgcctgacctgcgacaagatgagacaggccgacctgagcaacgacaagatcctgagcctggtgcactggggcatgtacagcggccacggcaagctggagttcgtgtag

SEQ ID NO: 74442 - DNA, 2058 bp, synthetic construct
  misc_feature 1..2058: note = Description of Artificial Sequence: Synthetic coding sequence
  source 1..2058: mol_type = other DNA
atgctgtggttcagcggcgtgggcgccctggccgagagatactgcagaagaagccccggcatcacctgctgcgtgctgctgctgctgaactgcagcggcgtgcccatgagcctggccagcagcttcctgaccggcagcgtggccaagtgcgagaacgagggcgaggtgctgcagatccccttcatcaccgacaacccctgcatcatgtgcgtgtgcctgaacaaggaggtgacctgcaagagagagaagtgccccgtgctgagcagagactgcgccctggccatcaagcagagaggcgcctgctgcgagcagtgcaagggctgcacctacgagggcaacacctacaacagcagcttcaagtggcagagccccgccgagccctgcgtgctgagacagtgccaggagggcgtggtgaccgagagcggcgtgagatgcgtggtgcactgcaagaaccccctggagcacctgggcatgtgctgccccacctgccccggctgcgtgttcgagggcgtgcagtaccaggagggcgaggagttccagcccgagggcagcaagtgcaccaagtgcagctgcaccggcggcagaacccagtgcgtgagagaggtgtgccccatcctgagctgcccccagcacctgagccacatcccccccggccagtgctgccccaagtgcctgggccagagaaaggtgttcgacctgcccttcggcagctgcctgttcagaagcgacgtgtacgacaacggcagcagcttcctgtacgacaactgcaccgcctgcacctgcagagacagcaccgtggtgtgcaagagaaagtgcagccaccccggcggctgcgaccagggccaggagggctgctgcgaggagtgcctgctgagagtgccccccgaggacatcaaggtgtgcaagttcggcaacaagatcttccaggacggcgagatgtggagcagcatcaactgcaccatctgcgcctgcgtgaagggcagaaccgagtgcagaaacaagcagtgcatccccatcagcagctgcccccagggcaagatcctgaacagaaagggctgctgccccatctgcaccgagaagcccggcgtgtgcaccgtgttcggcgacccccactacaacaccttcgacggcagaaccttcaacttccagggcacctgccagtacgtgctgaccaaggactgcagcagccccgccagccccttccaggtgctggtgaagaacgacgccagaagaaccagaagcttcagctggaccaagagcgtggagctggtgctgggcgagagcagagtgagcctgcagcagcacctgaccgtgagatggaacggcagcagaatcgccctgccctgcagagccccccacttccacatcgacctggacggctacctgctgaaggtgaccaccaaggccggcctggagatcagctgggacggcgacagcttcgtggaggtgatggccgccccccacctgaagggcaagctgtgcggcctgtgcggcaactacaacggccacaagagagacgacctgatcggcggcgacggcaacttcaagttcgacgtggacgacttcgccgagagctggagagtggagagcaacgagttctgcaacagaccccagagaaagcccgtgcccgagctgtgccagggcaccgtgaaggtgaagctgagagcccacagagagtgccagaagctgaagagctgggagttccagacctgccacagcaccgtggactacgccaccttctacagaagctgcgtgaccgacatgtgcgagtgccccgtgcacaagaactgctactgcgagagcttcctggcctacaccagagcctgccagagagagggcatcaaggtgcactgggagccccagcagaactgcgccgccacccagtgcaagcacggcgccgtgtacgacacctgcggccccggctgcatcaagacctgcgacaactggaacgagatcggcccctgcaacaagccctgcgtggccggctgccactgccccgccaacctggtgctgcacaagggcagatgcatcaagcccgtgctgtgcccccagagatag

SEQ ID NO: 74443 - DNA, 2058 bp, synthetic construct; identical to SEQ ID NO: 74442
  misc_feature 1..2058: note = Description of Artificial Sequence: Synthetic coding sequence
  source 1..2058: mol_type = other DNA

SEQ ID NO: 74444 - DNA, 2028 bp, synthetic construct
  misc_feature 1..2028: note = Description of Artificial Sequence: Synthetic coding sequence
  source 1..2028: mol_type = other DNA
atggacaccaagagcatcctggaggagctgctgctgaagagaagccagcagaagaagaagatgagccccaacaactacaaggagagactgttcgtgctgaccaagaccaacctgagctactacgagtacgacaagatgaagagaggcagcagaaagggcagcatcgagatcaagaagatcagatgcgtggagaaggtgaacctggaggagcagacccccgtggagagacagtaccccttccagatcgtgtacaaggacggcctgctgtacgtgtacgccagcaacgaggagagcagaagccagtggctgaaggccctgcagaaggagatcagaggcaacccccacctgctggtgaagtaccacagcggcttcttcgtggacggcaagttcctgtgctgccagcagagctgcaaggccgcccccggctgcaccctgtgggaggcctacgccaacctgcacaccgccgtgaacgaggagaagcacagagtgcccaccttccccgacagagtgctgaagatccccagagccgtgcccgtgctgaagatggacgcccccagcagcagcaccaccctggcccagtacgacaacgagagcaagaagaactacggcagccagccccccagcagcagcaccagcctggcccagtacgacagcaacagcaagaagatctacggcagccagcccaacttcaacatgcagtacatccccagagaggacttccccgactggtggcaggtgagaaagctgaagagcagcagcagcagcgaggacgtggccagcagcaaccagaaggagagaaacgtgaaccacaccaccagcaagatcagctgggagttccccgagagcagcagcagcgaggaggaggagaacctggacgactacgactggttcgccggcaacatcagcagaagccagagcgagcagctgctgagacagaagggcaaggagggcgccttcatggtgagaaacagcagccaggtgggcatgtacaccgtgagcctgttcagcaaggccgtgaacgacaagaagggcaccgtgaagcactaccacgtgcacaccaacgccgagaacaagctgtacctggccgagaactactgcttcgacagcatccccaagctgatccactaccaccagcacaacagcgccggcatgatcaccagactgagacaccccgtgagcaccaaggccaacaaggtgcccgacagcgtgagcctgggcaacggcatctgggagctgaagagagaggagatcaccctgctgaaggagctgggcagcggccagttcggcgtggtgcagctgggcaagtggaagggccagtacgacgtggccgtgaagatgatcaaggagggcagcatgagcgaggacgagttcttccaggaggcccagaccatgatgaagctgagccaccccaagctggtgaagttctacggcgtgtgcagcaaggagtaccccatctacatcgtgaccgagtacatcagcaacggctgcctgctgaactacctgagaagccacggcaagggcctggagcccagccagctgctggagatgtgctacgacgtgtgcgagggcatggccttcctggagagccaccagttcatccacagagacctggccgccagaaactgcctggtggacagagacctgtgcgtgaaggtgagcgacttcggcatgaccagatacgtgctggacgaccagtacgtgagcagcgtgggcaccaagttccccgtgaagtggagcgcccccgaggtgttccactacttcaagtacagcagcaagagcgacgtgtgggccttcggcatcctgatgtgggaggtgttcagcctgggcaagcagccctacgacctgtacgacaacagccaggtggtgctgaaggtgagccagggccacagactgtacagaccccacctggccagcgacaccatctaccagatcatgtacagctgctggcacgagctgcccgagaagagacccaccttccagcagctgctgagcagcatcgagcccctgagagagaaggacaagcactag

SEQ ID NO: 74445 - DNA, 2028 bp, synthetic construct; identical to SEQ ID NO: 74444
  misc_feature 1..2028: note = Description of Artificial Sequence: Synthetic coding sequence
  source 1..2028: mol_type = other DNA

SEQ ID NO: 74446 - DNA, 2028 bp, synthetic construct; identical to SEQ ID NO: 74444
  misc_feature 1..2028: note = Description of Artificial Sequence: Synthetic coding sequence
  source 1..2028: mol_type = other DNA

SEQ ID NO: 74447 - DNA, 525 bp, synthetic construct
  misc_feature 1..525: note = Description of Artificial Sequence: Synthetic coding sequence
  source 1..525: mol_type = other DNA
atgaccgagctggagtaccccaagggcagcagcatcatgcccgccgccggcaccatgtacctgaccaccagcaccggctacccctacacctaccacaacggcgtggcctacttccacacccccgaggtgaccagcgtgccccccccctggcccagcagaagcgtgtgcagcagccccgtgatggtggcccagcccatctaccagcagcccgcctaccactaccaggccaccacccagtacctgcccggccagtggcagtggagcgtgccccagcccagcgccagcagcgcccccttcctgtacctgcagcccagcgaggtgatctaccagcccgtggagatcgcccaggacggcggctgcgtgcccccccccctgagcctgatggagaccagcgtgcccgagccctacagcgaccacggcgtgcaggccacctaccaccaggtgtacgcccccagcgccatcaccatgcccgcccccgtgatgcagcccgagcccatcaagaccgtgtggagcatccactactag

SEQ ID NO: 74448 - DNA, 888 bp, synthetic construct
  misc_feature 1..888: note = Description of Artificial Sequence: Synthetic coding sequence
  source 1..888: mol_type = other DNA
atggagaccgagagcggcccccagaccagcaaccagatgcagaccgacagcctgagccccagccccaaccccgtgagccccgtgcccctgaacaaccccaccagcgcccccagatacggcaccgtgatccccaacagaatcttcgtgggcggcatcgacttcaagaccaacgagagcgacctgagaaagttcttcagccagtacggcagcgtgaaggaggtgaagatcgtgaacgacagagccggcgtgagcaagggctacggcttcgtgaccttcgagacccaggaggacgcccagaagatcctgcaggaggccgagaagctgaactacaaggacaagaagctgaacatcggccccgccatcagaaagcagcaggtgggcatccccagaagcagcatcatgcccgccgccggcaccatgtacctgaccaccagcaccggctacccctacacctaccacaacggcgtggcctacttccacacccccgaggtgaccagcgtgccccccccctggcccagcagaagcgtgtgcagcagccccgtgatggtggcccagcccatctaccagcagcccgcctaccactaccaggccaccacccagtacctgcccggccagtggcagtggagcgtgccccagcccagcgccagcagcgcccccttcctgtacctgcagcccagcgaggtgatctaccagcccgtggagatcgcccaggacggcggctgcgtgcccccccccctgagcctgatggagaccagcgtgcccgagccctacagcgaccacggcgtgcaggccacctaccaccaggtgtacgcccccagcgccatcaccatgcccgcccccgtgatgcagcccgagcccatcaagaccgtgtggagcatccactactag

SEQ ID NO: 74449 - DNA, 852 bp, synthetic construct
  misc_feature 1..852: note = Description of Artificial Sequence: Synthetic coding sequence
  source 1..852: mol_type = other DNA
atgcagaccgacagcctgagccccagccccaaccccgtgagccccgtgcccctgaacaaccccaccagcgcccccagatacggcaccgtgatccccaacagaatcttcgtgggcggcatcgacttcaagaccaacgagagcgacctgagaaagttcttcagccagtacggcagcgtgaaggaggtgaagatcgtgaacgacagagccggcgtgagcaagggctacggcttcgtgaccttcgagacccaggaggacgcccagaagatcctgcaggaggccgagaagctgaactacaaggacaagaagctgaacatcggccccgccatcagaaagcagcaggtgggcatccccagaagcagcatcatgcccgccgccggcaccatgtacctgaccaccagcaccggctacccctacacctaccacaacggcgtggcctacttccacacccccgaggtgaccagcgtgccccccccctggcccagcagaagcgtgtgcagcagccccgtgatggtggcccagcccatctaccagcagcccgcctaccactaccaggccaccacccagtacctgcccggccagtggcagtggagcgtgccccagcccagcgccagcagcgcccccttcctgtacctgcagcccagcgaggtgatctaccagcccgtggagatcgcccaggacggcggctgcgtgcccccccccctgagcctgatggagaccagcgtgcccgagccctacagcgaccacggcgtgcaggccacctaccaccaggtgtacgcccccagcgccatcaccatgcccgcccccgtgatgcagcccgagcccatcaagaccgtgtggagcatccactactag

SEQ ID NO: 74450 - DNA, 852 bp, synthetic construct; identical to SEQ ID NO: 74449
  misc_feature 1..852: note = Description of Artificial Sequence: Synthetic coding sequence
  source 1..852: mol_type = other DNA

SEQ ID NO: 74451 - DNA, 414 bp, synthetic construct
  misc_feature 1..414: note = Description of Artificial Sequence: Synthetic coding sequence
  source 1..414: mol_type = other DNA
atgctgagcggcagactggtgctgggcctggtgagcatggccggcagagtgtgcctgtgccagggcagcgccggcagcggcgccatcggccccgtggaggccgccatcagaaccaagctggaggaggccctgagccccgaggtgctggagctgagaaacgagagcggcggccacgccgtgccccccggcagcgagacccacttcagagtggccgtggtgagcagcagattcgagggcctgagccccctgcagagacacagactggtgcacgccgccctggccgaggagctgggcggccccgtgcacgccctggccatccaggccagaacccccgcccagtggagagagaacagccagctggacaccagccccccctgcctgggcggcaacaagaagaccctgggcaccccctag

SEQ ID NO: 74452 - DNA, 414 bp, synthetic construct; identical to SEQ ID NO: 74451
  misc_feature 1..414: note = Description of Artificial Sequence: Synthetic coding sequence
  source 1..414: mol_type = other DNA

SEQ ID NO: 74453 - DNA, 414 bp, synthetic construct; identical to SEQ ID NO: 74451
  misc_feature 1..414: note = Description of Artificial Sequence: Synthetic coding sequence
  source 1..414: mol_type = other DNA

SEQ ID NO: 74454 - DNA, 459 bp, synthetic construct
  misc_feature 1..459: note = Description of Artificial Sequence: Synthetic coding sequence
  source 1..459: mol_type = other DNA
atggccagcgccaagagcctggacagatggaaggccagactgctggagggcggcagcaccgccctgacctacgccctggtgagagccgaggtgagcttccccgccgaggtggcccccgtgagacagcagggcagcgtggccggcgccagagccggcgtggtgagcctgctgggctgcagaagcagctggaccgccgccatggagctgagcgccgagtacctgagagagaagctgcagagagacctggaggccgagcacgtggaggtggaggacaccaccctgaacagatgcagctgcagcttcagagtgctggtggtgagcgccaagttcgagggcaagcccctgctgcagagacacagactggtgaacgcctgcctggccgaggagctgccccacatccacgccttcgagcagaagaccctgacccccgaccagtgggccagagagagacagaagtag

SEQ ID NO: 74455 - DNA, 306 bp, synthetic construct
  misc_feature 1..306: note = Description of Artificial Sequence: Synthetic coding sequence
  source 1..306: mol_type = other DNA
atggccgcctggagccccgccgccgccgcccccctgctgagaggcatcagaggcctgcccctgcaccacagaatgttcgccacccagaccgagggcgagctgagagtgacccagatcctgaaggagaagttccccagagccaccgccatcaaggtgaccgacatcagcggcaccaagagaagaaaccagagagacgcctggatcgccgacatctacctgtgcccccagaccctgaccaccccctggctgcacagatgctgctgcctgagaccctggatgaacttcaccgacatcatcctgccctag

SEQ ID NO: 74456 - DNA, 324 bp, synthetic construct
  misc_feature 1..324: note = Description of Artificial Sequence: Synthetic coding sequence
  source 1..324: mol_type = other DNA
atggccgcctggagccccgccgccgccgcccccctgctgagaggcatcagaggcctgcccctgcaccacagaatgttcgccacccagaccgagggcgagctgagagtgacccagatcctgaaggagaagttccccagagccaccgccatcaaggtgaccgacatcagcggcggctgcggcgccatgtacgagatcaagatcgagagcgaggagttcaaggagaagagaaccgtgcagcagcaccagatggtgaaccaggccctgaaggaggagatcaaggagatgcacggcctgagaatcttcaccagcgtgcccaagagatag

SEQ ID NO: 74457 - DNA, 1200 bp, synthetic construct
  misc_feature 1..1200: note = Description of Artificial Sequence: Synthetic coding sequence
  source 1..1200: mol_type = other DNA
atggcccagagacagccccacagccccaaccagaccctgatcagcatcaccaacgacaccgagagcagcagcagcgtggtgagcaacgacaacaccaacaagggctggagcggcgacaacagccccggcatcgaggccctgtgcgccatctacatcacctacgccgtgatcatcagcgtgggcatcctgggcaacgccatcctgatcaaggtgttcttcaagaccaagagcatgcagaccgtgcccaacatcttcatcaccagcctggccttcggcgacctgctgctgctgctgacctgcgtgcccgtggacgccacccactacctggccgagggctggctgttcggcagaatcggctgcaaggtgctgagcttcatcagactgaccagcgtgggcgtgagcgtgttcaccctgaccatcctgagcgccgacagatacaaggccgtggtgaagcccctggagagacagcccagcaacgccatcctgaagacctgcgtgaaggccggctgcgtgtggatcgtgagcatgatcttcgccctgcccgaggccatcttcagcaacgtgtacaccttcagagaccccaacaagaacatgaccttcgagagctgcaccagctaccccgtgagcaagaagctgctgcaggagatccacagcctgctgtgcttcctggtgttctacatcatccccctgagcatcatcagcgtgtactacagcctgatcgccagaaccctgtacaagagcaccctgaacatccccaccgaggagcagagccacgccagaaagcagatcgagagcagaaagagaatcgccagaaccgtgctggtgctggtggccctgttcgccctgtgctggctgcccaaccacctgctgtacctgtaccacagcttcaccagccagacctacgtggaccccagcgccatgcacttcatcttcaccatcttcagcagagtgctggccttcagcaacagctgcgtgaaccccttcgccctgtactggctgagcaagagcttccagaagcacttcaaggcccagctgttctgctgcaaggccgagagacccgagccccccgtggccgacaccagcctgaccaccctggccgtgatgggcaccgtgcccggcaccggcagcatccagatgagcgagatcagcgtgaccagcttcaccggctgcagcgtgaagcaggccgaggacagattctag

SEQ ID NO: 74458 - DNA, 303 bp, synthetic construct
  misc_feature 1..303: note = Description of Artificial Sequence: Synthetic coding sequence
  source 1..303: mol_type = other DNA
atgagagccctgaccctgctggccctgctggccctggccgccctgtgcatcgccggccaggccggcgccaagcccagcggcgccgagagcagcaagggcgccgccttcgtgagcaagcaggagggcagcgaggtggtgaagagacccagaagatacctgtaccagtggctgggcgcccccgtgccctaccccgaccccctggagcccagaagagaggtgtgcgagctgaaccccgactgcgacgagctggccgaccacatcggcttccaggaggcctacagaagattctacggccccgtgtag

SEQ ID NO: 74459 - DNA, 957 bp, synthetic construct
  misc_feature 1..957: note = Description of Artificial Sequence: Synthetic coding sequence
  source 1..957: mol_type = other DNA
atggccgcccagggctgcgccgccagcagactgctgcagctgctgctgcagctgctgctgctgctgctgctgctggccgccggcggcgccagagccagatggagaggcgagggcaccagcgcccacctgagagacatcttcctgggcagatgcgccgagtacagagccctgctgagccccgagcagagaaacaagaactgcaccgccatctgggaggccttcaaggtggccctggacaaggacccctgcagcgtgctgcccagcgactacgacctgttcatcaacctgagcagacacagcatccccagagacaagagcctgttctgggagaacagccacctgctggtgaacagcttcgccgacaacaccagaagattcatgcccctgagcgacgtgctgtacggcagagtggccgacttcctgagctggtgcagacagaagaacgacagcggcctggactaccagagctgccccaccagcgaggactgcgagaacaaccccgtggacagcttctggaagagagccagcatccagtacagcaaggacagcagcggcgtgatccacgtgatgctgaacggcagcgagcccaccggcgcctaccccatcaagggcttcttcgccgactacgagatccccaacctgcagaaggagaagatcaccagaatcgagatctgggtgatgcacgagatcggcggccccaacgtggagagctgcggcgagggcagcatgaaggtgctggagaagagactgaaggacatgggcttccagtacagctgcatcaacgactacagacccgtgaagctgctgcagtgcgtggaccacagcacccaccccgactgcgccctgaagagcgccgccgccgccacccagagaaaggcccccagcctgtacaccgagcagagagccggcctgatcatccccctgttcctggtgctggccagcagaacccagctgtag

SEQ ID NO: 74460 - DNA, 543 bp, synthetic construct
  misc_feature 1..543: note = Description of Artificial Sequence: Synthetic coding sequence
  source 1..543: mol_type = other DNA
atggccagcaccagctacgactactgcagagtgcccatggaggacggcgacaagagatgcaagctgctgctgggcatcggcatcctggtgctgctgatcatcgtgatcctgggcgtgcccctgatcatcttcaccatcaaggccaacagcgaggcctgcagagacggcctgagagccgtgatggagtgcagaaacgtgacccacctgctgcagcaggagctgaccgaggcccagaagggcttccaggacgtggaggcccaggccgccacctgcaaccacaccgtgatggccctgatggccagcctggacgccgagaaggcccagggccagaagaaggtggaggagctggagggcgagatcaccaccctgaaccacaagctgcaggacgccagcgccgaggtggagagactgagaagagagaaccaggtgctgagcgtgagaatcgccgacaagaagtactaccccagcagccaggacagcagcagcgccgccgccccccagctgctgatcgtgctgctgggcctgagcgccctgctgcagtag

SEQ ID NO: 74461 - DNA, 651 bp, synthetic construct
  misc_feature 1..651: note = Description of Artificial Sequence: Synthetic coding sequence
  source 1..651: mol_type = other DNA
atggccagcaccagctacgactactgcagagtgcccatggaggacggcgacaagagatgcaagctgctgctgggcatcggcatcctggtgctgctgatcatcgtgatcctgggcgtgcccctgatcatcttcaccatcaaggccaacagcgaggcctgcagagacggcctgagagccgtgatggagtgcagaaacgtgacccacctgctgcagcaggagctgaccgaggcccagaagggcttccaggacgtggaggcccaggccgccacctgcaaccacaccgtgatggccctgatggccagcctggacgccgagaaggcccagggccagaagaaggtggaggagctggagggcgagatcaccaccctgaaccacaagctgcaggacgccagcgccgaggtggagagactgagaagagagaaccaggtgctgagcgtgagaatcgccgacaagaagtactaccccagcagccacttccccagcaccccccagagcagactgcagacccagctgaccaccctgaagatcgagatggacgaggccaaggcccagggcacccagatgggcgccgagaacggcgccctgaccggcgccctgggctgcaagggcgtgggcagagacagaagcggcagaagcctgggcgagagctag

SEQ ID NO: 74462 - DNA, 1179 bp, synthetic construct
  misc_feature 1..1179: note = Description of Artificial Sequence: Synthetic coding sequence
  source 1..1179: mol_type = other DNA
atggtgctgctgagcatcctgagaatcctgttcctgtgcgagctggtgctgttcatggagcacagagcccagatggccgagggcggccagagcagcatcgccctgctggccgaggcccccaccctgcccctgatcgaggagctgctggaggagagccccggcgagcagcccagaaagcccagactgctgggccacagcctgagatacatgctggagctgtacagaagaagcgccgacagccacggccaccccagagagaacagaaccatcggcgccaccatggtgagactggtgaagcccctgaccaacgtggccagaccccacagaggcacctggcacatccagatcctgggcttccccctgagacccaacagaggcctgtaccagctggtgagagccaccgtggtgtacagacaccacctgcagctgaccagattcaacctgagctgccacgtggagccctgggtgcagaagaaccccaccaaccacttccccagcagcgagggcgacagcagcaagcccagcctgatgagcaacgcctggaaggagatggacatcacccagctggtgcagcagagattctggaacaacaagggccacagaatcctgagactgagattcatgtgccagcagcagaaggacagcggcggcctggagctgtggcacggcaccagcagcctggacatcgccttcctgctgctgtacttcaacgacacccacaagagcatcagaaaggccaagttcctgcccagaggcatggaggagttcatggagagagagagcctgctgagaagaaccagacaggccgacggcatcagcgccgaggtgaccgccagcagcagcaagcacagcggccccgagaacaaccagtgcagcctgcaccccttccagatcagcttcagacagctgggctgggaccactggatcatcgccccccccttctacacccccaactactgcaagggcacctgcctgagagtgctgagagacggcctgaacagccccaaccacgccatcatccagaacctgatcaaccagctggtggaccagagcgtgcccagacccagctgcgtgccctacaagtacgtgcccatcagcgtgctgatgatcgaggccaacggcagcatcctgtacaaggagtacgagggcatgatcgccgagagctgcacctgcagatag

SEQ ID NO: 74463 - DNA, 1419 bp, synthetic construct
  misc_feature 1..1419: note = Description of Artificial Sequence: Synthetic coding sequence
  source 1..1419: mol_type = other DNA
atggccggcgccagcagactgctgttcctgtggctgggctgcttctgcgtgagcctggcccagggcgagagacccaagccccccttccccgagctgagaaaggccgtgcccggcgacagaaccgccggcggcggccccgacagcgagctgcagccccaggacaaggtgagcgagcacatgctgagactgtacgacagatacagcaccgtgcaggccgccagaacccccggcagcctggagggcggcagccagccctggagacccagactgctgagagagggcaacaccgtgagaagcttcagagccgccgccgccgagaccctggagagaaagggcctgtacatcttcaacctgaccagcctgaccaagagcgagaacatcctgagcgccaccctgtacttctgcatcggcgagctgggcaacatcagcctgagctgccccgtgagcggcggctgcagccaccacgcccagagaaagcacatccagatcgacctgagcgcctggaccctgaagttcagcagaaaccagagccagctgctgggccacctgagcgtggacatggccaagagccacagagacatcatgagctggctgagcaaggacatcacccagctgctgagaaaggccaaggagaacgaggagttcctgatcggcttcaacatcaccagcaagggcagacagctgcccaagagaagactgcccttccccgagccctacatcctggtgtacgccaacgacgccgccatcagcgagcccgagagcgtggtgagcagcctgcagggccacagaaacttccccaccggcaccgtgcccaagtgggacagccacatcagagccgccctgagcatcgagagaagaaagaagagaagcaccggcgtgctgctgcccctgcagaacaacgagctgcccggcgccgagtaccagtacaagaaggacgaggtgtgggaggagagaaagccctacaagaccctgcaggcccaggcccccgagaagagcaagaacaagaagaagcagagaaagggcccccacagaaagagccagaccctgcagttcgacgagcagaccctgaagaaggccagaagaaagcagtggatcgagcccagaaactgcgccagaagatacctgaaggtggacttcgccgacatcggctggagcgagtggatcatcagccccaagagcttcgacgcctactactgcagcggcgcctgccagttccccatgcccaagagcctgaagcccagcaaccacgccaccatccagagcatcgtgagagccgtgggcgtggtgcccggcatccccgagccctgctgcgtgcccgagaagatgagcagcctgagcatcctgttcttcgacgagaacaagaacgtggtgctgaaggtgtaccccaacatgaccgtggagagctgcgcctgcagatag

SEQ ID NO: 74464 - DNA, 213 bp, synthetic construct
  misc_feature 1..213: note = Description of Artificial Sequence: Synthetic coding sequence
  source 1..213: mol_type = other DNA
tgcttcttctactacctgaagagcctgaagcccagcaaccacgccaccatccagagcatcgtgagagccgtgggcgtggtgcccggcatccccgagccctgctgcgtgcccgagaagatgagcagcctgagcatcctgttcttcgacgagaacaagaacgtggtgctgaaggtgtaccccaacatgaccgtggagagctgcgcctgcagatag

SEQ ID NO: 74465 - DNA, 1227 bp, synthetic construct
  misc_feature 1..1227: note = Description of Artificial Sequence: Synthetic coding sequence
  source 1..1227: mol_type = other DNA
atgatccccggcaacagaatgctgatggtggtgctgctgtgccaggtgctgctgggcggcgccagccacgccagcctgatccccgagaccggcaagaagaaggtggccgagatccagggccacgccggcggcagaagaagcggccagagccacgagctgctgagagacttcgaggccaccctgctgcagatgttcggcctgagaagaagaccccagcccagcaagagcgccgtgatccccgactacatgagagacctgtacagactgcagagcggcgaggaggaggaggagcagatccacagcaccggcctggagtaccccgagagacccgccagcagagccaacaccgtgagaagcttccaccacgaggagcacctggagaacatccccggcaccagcgagaacagcgccttcagattcctgttcaacctgagcagcatccccgagaacgaggtgatcagcagcgccgagctgagactgttcagagagcaggtggaccagggccccgactgggagagaggcttccacagaatcaacatctacgaggtgatgaagccccccgccgaggtggtgcccggccacctgatcaccagactgctggacaccagactggtgcaccacaacgtgaccagatgggagaccttcgacgtgagccccgccgtgctgagatggaccagagagaagcagcccaactacggcctggccatcgaggtgacccacctgcaccagaccagaacccaccagggccagcacgtgagaatcagcagaagcctgccccagggcagcggcaactgggcccagctgagacccctgctggtgaccttcggccacgacggcagaggccacgccctgaccagaagaagaagagccaagagaagccccaagcaccacagccagagagccagaaagaagaacaagaactgcagaagacacagcctgtacgtggacttcagcgacgtgggctggaacgactggatcgtggccccccccggctaccaggccttctactgccacggcgactgccccttccccctggccgaccacctgaacagcaccaaccacgccatcgtgcagaccctggtgaacagcgtgaacagcagcatccccaaggcctgctgcgtgcccaccgagctgagcgccatcagcatgctgtacctggacgagtacgacaaggtggtgctgaagaactaccaggagatggtggtggagggctgcggctgcagatag

SEQ ID NO: 74466 - DNA, 1227 bp, synthetic construct; identical to SEQ ID NO: 74465
  misc_feature 1..1227: note = Description of Artificial Sequence: Synthetic coding sequence
  source 1..1227: mol_type = other DNA

SEQ ID NO: 74467 - DNA, 1227 bp, synthetic construct; identical to SEQ ID NO: 74465
  misc_feature 1..1227: note = Description of Artificial Sequence: Synthetic coding sequence
  source 1..1227: mol_type = other DNA

SEQ ID NO: 74468 - DNA, 1227 bp, synthetic construct; identical to SEQ ID NO: 74465
  misc_feature 1..1227: note = Description of Artificial Sequence: Synthetic coding sequence
  source 1..1227: mol_type = other DNA

SEQ ID NO: 74469 - DNA, 333 bp, synthetic construct
  misc_feature 1..333: note = Description of Artificial Sequence: Synthetic coding sequence
  source 1..333: mol_type = other DNA
atgatccccggcaacagaatgctgatggtggtgctgctgtgccaggtgctgctgggcggcgccagccacgccagcctgatccccgagaccggcaagaagaaggtggccgagatccagggccacgccggcggcagaagaagcggccagagccacgagctgctgagagacttcgaggccaccctgctgcagatgttcggcctgagaagaagaccccagcccagcaagagcgccgtgatccccgactacatgagagacctgtacagactgcagagcggcgaggaggaggaggagcagatccacagcaccggcctggagtaccccgagagaccctag

SEQ ID NO: 74470 - DNA, 1365 bp, synthetic construct
  misc_feature 1..1365: note = Description of Artificial Sequence: Synthetic coding sequence
  source 1..1365: mol_type = other DNA
atgcacctgaccgtgttcctgctgaagggcatcgtgggcttcctgtggagctgctgggtgctggtgggctacgccaagggcggcctgggcgacaaccacgtgcacagcagcttcatctacagaagactgagaaaccacgagagaagagagatccagagagagatcctgagcatcctgggcctgccccacagacccagacccttcagccccggcaagcaggccagcagcgcccccctgttcatgctggacctgtacaacgccatgaccaacgaggagaaccccgaggagagcgagtacagcgtgagagccagcctggccgaggagaccagaggcgccagaaagggctaccccgccagccccaacggctaccccagaagaatccagctgagcagaaccacccccctgaccacccagagcccccccctggccagcctgcacgacaccaacttcctgaacgacgccgacatggtgatgagcttcgtgaacctggtggagagagacaaggacttcagccaccagagaagacactacaaggagttcagattcgacctgacccagatcccccacggcgaggccgtgaccgccgccgagttcagaatctacaaggacagaagcaacaacagattcgagaacgagaccatcaagatcagcatctaccagatcatcaaggagtacaccaacagagacgccgacctgttcctgctggacaccagaaaggcccaggccctggacgtgggctggctggtgttcgacatcaccgtgaccagcaaccactgggtgatcaacccccagaacaacctgggcctgcagctgtgcgccgagaccggcgacggcagaagcatcaacgtgaagagcgccggcctggtgggcagacagggcccccagagcaagcagcccttcatggtggccttcttcaaggccagcgaggtgctgctgagaagcgtgagagccgccaacaagagaaagaaccagaacagaaacaagagcagcagccaccaggacagcagcagaatgagcagcgtgggcgactacaacaccagcgagcagaagcaggcctgcaagaagcacgagctgtacgtgagcttcagagacctgggctggcaggactggatcatcgcccccgagggctacgccgccttctactgcgacggcgagtgcagcttccccctgaacgcccacatgaacgccaccaaccacgccatcgtgcagaccctggtgcacctgatgttccccgaccacgtgcccaagccctgctgcgcccccaccaagctgaacgccatcagcgtgctgtacttcgacgacagcagcaacgtgatcctgaagaagtacagaaacatggtggtgagaagctgcggctgccactag

SEQ ID NO: 74471 - DNA, 1254 bp, synthetic construct
  misc_feature 1..1254: note = Description of Artificial Sequence: Synthetic coding sequence
  source 1..1254: mol_type = other DNA
atgcacctgaccgtgttcctgctgaagggcatcgtgggcttcctgtggagctgctgggtgctggtgggctacgccaagggcggcctgggcgacaaccacgtgcacagcagcttcatctacagaagactgagaaaccacgagagaagagagatccagagagagatcctgagcatcctgggcctgccccacagacccagacccttcagccccggcaagcaggccagcagcgcccccctgttcatgctggacctgtacaacgccatgaccaacgaggagaaccccgaggagagcgagtacagcgtgagagccagcctggccgaggagaccagaggcgccagaaagggctaccccgccagccccaacggctaccccagaagaatccagctgagcagaaccacccccctgaccacccagagcccccccctggccagcctgcacgacaccaacttcctgaacgacgccgacatggtgatgagcttcgtgaacctggtggagagagacaaggacttcagccaccagagaagacactacaaggagttcagattcgacctgacccagatcccccacggcgaggccgtgaccgccgccgagttcagaatctacaaggacagaagcaacaacagattcgagaacgagaccatcaagatcagcatctaccagatcatcaaggagtacaccaacagagacgccgacctgttcctgctggacaccagaaaggcccaggccctggacgtgggctggctggtgttcgacatcaccgtgaccagcaaccactgggtgatcaacccccagaacaacctgggcctgcagctgtgcgccgagaccggcgacggcagaagcatcaacgtgaagagcgccggcctggtgggcagacagggcccccagagcaagcagcccttcatggtggccttcttcaaggccagcgaggtgctgctgagaagcgtgagagccgccaacaagagaaagaaccagaacagaaacaagagcagcagccaccaggacagcagcagaatgagcagcgtgggcgactacaacaccagcgagcagaagcaggcctgcaagaagcacgagctgtacgtgagcttcagagacctgggctggcaggtgcacctgatgttccccgaccacgtgcccaagccctgctgcgcccccaccaagctgaacgccatcagcgtgctgtacttcgacgacagcagcaacgtgatcctgaagaagtacagaaacatggtggtgagaagctgcggctgccactag

SEQ ID NO: 74472 - DNA, 1542 bp, synthetic construct
  misc_feature 1..1542: note = Description of Artificial Sequence: Synthetic coding sequence
  source 1..1542: mol_type = other DNA
atgcccggcctgggcagaagagcccagtggctgtgctggtggtggggcctgctgtgcagctgctgcggccccccccccctgagaccccccctgcccgccgccgccgccgccgccgccggcggccagctgctgggcgacggcggcagccccggcagaaccgagcagcccccccccagcccccagagcagcagcggcttcctgtacagaagactgaagacccaggagaagagagagatgcagaaggagatcctgagcgtgctgggcctgccccacagacccagacccctgcacggcctgcagcagccccagccccccgccctgagacagcaggaggagcagcagcagcagcagcagctgcccagaggcgagcccccccccggcagactgaagagcgcccccctgttcatgctggacctgtacaacgccctgagcgccgacaacgacgaggacggcgccagcgagggcgagagacagcagagctggccccacgaggccgccagcagcagccagagaagacagcccccccccggcgccgcccaccccctgaacagaaagagcctgctggcccccggcagcggcagcggcggcgccagccccctgaccagcgcccaggacagcgccttcctgaacgacgccgacatggtgatgagcttcgtgaacctggtggagtacgacaaggagttcagccccagacagagacaccacaaggagttcaagttcaacctgagccagatccccgagggcgaggtggtgaccgccgccgagttcagaatctacaaggactgcgtgatgggcagcttcaagaaccagaccttcctgatcagcatctaccaggtgctgcaggagcaccagcacagagacagcgacctgttcctgctggacaccagagtggtgtgggccagcgaggagggctggctggagttcgacatcaccgccaccagcaacctgtgggtggtgaccccccagcacaacatgggcctgcagctgagcgtggtgaccagagacggcgtgcacgtgcaccccagagccgccggcctggtgggcagagacggcccctacgacaagcagcccttcatggtggccttcttcaaggtgagcgaggtgcacgtgagaaccaccagaagcgccagcagcagaagaagacagcagagcagaaacagaagcacccagagccaggacgtggccagagtgagcagcgccagcgactacaacagcagcgagctgaagaccgcctgcagaaagcacgagctgtacgtgagcttccaggacctgggctggcaggactggatcatcgcccccaagggctacgccgccaactactgcgacggcgagtgcagcttccccctgaacgcccacatgaacgccaccaaccacgccatcgtgcagaccctggtgcacctgatgaaccccgagtacgtgcccaagccctgctgcgcccccaccaagctgaacgccatcagcgtgctgtacttcgacgacaacagcaacgtgatcctgaagaagtacagaaacatggtggtgagagcctgcggctgccactag

SEQ ID NO: 74473 - DNA, 1308 bp, synthetic construct
  misc_feature 1..1308: note = Description of Artificial Sequence: Synthetic coding sequence
  source 1..1308: mol_type = other DNA
atgcagaaggagatcctgagcgtgctgggcctgccccacagacccagacccctgcacggcctgcagcagccccagccccccgccctgagacagcaggaggagcagcagcagcagcagcagctgcccagaggcgagcccccccccggcagactgaagagcgcccccctgttcatgctggacctgtacaacgccctgagcgccgacaacgacgaggacggcgccagcgagggcgagagacagcagagctggccccacgaggccgccagcagcagccagagaagacagcccccccccggcgccgcccaccccctgaacagaaagagcctgctggcccccggcagcggcagcggcggcgccagccccctgaccagcgcccaggacagcgccttcctgaacgacgccgacatggtgatgagcttcgtgaacctggtggagtacgacaaggagttcagccccagacagagacaccacaaggagttcaagttcaacctgagccagatccccgagggcgaggtggtgaccgccgccgagttcagaatctacaaggactgcgtgatgggcagcttcaagaaccagaccttcctgatcagcatctaccaggtgctgcaggagcaccagcacagagacagcgacctgttcctgctggacaccagagtggtgtgggccagcgaggagggctggctggagttcgacatcaccgccaccagcaacctgtgggtggtgaccccccagcacaacatgggcctgcagctgagcgtggtgaccagagacggcgtgcacgtgcaccccagagccgccggcctggtgggcagagacggcccctacgacaagcagcccttcatggtggccttcttcaaggtgagcgaggtgcacgtgagaaccaccagaagcgccagcagcagaagaagacagcagagcagaaacagaagcacccagagccaggacgtggccagagtgagcagcgccagcgactacaacagcagcgagctgaagaccgcctgcagaaagcacgagctgtacgtgagcttccaggacctgggctggcaggactggatcatcgcccccaagggctacgccgccaactactgcgacggcgagtgcagcttccccctgaacgcccacatgaacgccaccaaccacgccatcgtgcagaccctggtgcacctgatgaaccccgagtacgtgcccaagccctgctgcgcccccaccaagctgaacgccatcagcgtgctgtacttcgacgacaacagcaacgtgatcctgaagaagtacagaaacatggtggtgagagcctgcggctgccactag

SEQ ID NO: 74474 - DNA, 1431 bp, synthetic construct
  misc_feature 1..1431: note = Description of Artificial Sequence: Synthetic coding sequence
  source 1..1431: mol_type = other DNA
gccgccggcggccagctgctgggcgacggcggcagccccggcagaaccgagcagcccccccccagcccccagagcagcagcggcttcctgtacagaagactgaagacccaggagaagagagagatgcagaaggagatcctgagcgtgctgggcctgccccacagacccagacccctgcacggcctgcagcagccccagccccccgccctgagacagcaggaggagcagcagcagcagcagcagctgcccagaggcgagcccccccccggcagactgaagagcgcccccctgttcatgctggacctgtacaacgccctgagcgccgacaacgacgaggacggcgccagcgagggcgagagacagcagagctggccccacgaggccgccagcagcagccagagaagacagcccccccccggcgccgcccaccccctgaacagaaagagcctgctggcccccggcagcggcagcggcggcgccagccccctgaccagcgcccaggacagcgccttcctgaacgacgccgacatggtgatgagcttcgtgaacctggtggagtacgacaaggagttcagccccagacagagacaccacaaggagttcaagttcaacctgagccagatccccgagggcgaggtggtgaccgccgccgagttcagaatctacaaggactgcgtgatgggcagcttcaagaaccagaccttcctgatcagcatctaccaggtgctgcaggagcaccagcacagagacagcgacctgttcctgctggacaccagagtggtgtgggccagcgaggagggctggctggagttcgacatcaccgccaccagcaacctgtgggtggtgaccccccagcacaacatgggcctgcagctgagcgtggtgaccagagacggcgtgcacgtgcaccccagagccgccggcctggtgggcagagacggcccctacgacaagcagcccttcatggtggccttcttcaaggtgagcgaggtgcacgtgagaaccaccagaagcgccagcagcagaagaagacagcagagcagaaacagaagcacccagagccaggacgtggccagagtgagcagcgccagcgactacaacagcagcgagctgaagaccgcctgcagaaagcacgagctgtacgtgagcttccaggacctgggctggcaggactggatcatcgcccccaagggctacgccgccaactactgcgacggcgagtgcagcttccccctgaacgcccacatgaacgccaccaaccacgccatcgtgcagaccctggtgcacctgatgaaccccgagtacgtgcccaagccctgctgcgcccccaccaagctgaacgccatcagcgtgctgtacttcgacgacaacagcaacgtgatcctgaagaagtacagaaacatggtggtgagagcctgcggctgccactag

SEQ ID NO: 74475 - DNA, 2505 bp, synthetic construct
  misc_feature 1..2505: note = Description of Artificial Sequence: Synthetic coding sequence
  source 1..2505: mol_type = other DNA
atggaggagaagacccagatcaagaccttcctgggcagcaagctgcccaagtacggcaccaagagcgtgagaagcaccctgcagcccatgcccaacggcacccccgtgaacctgctgggcaccagcaagaacagcaacgtgaagagctacatcaagaacaacggcagcgactgccccagcagccacagcttcaactggagaaaggccaacaagtaccagctgtgcgcccagggcgtggaggagcccaacaacacccagaacagccacgacaagatcatcgaccccgagaagagagtgcccacccagggcatgttcgacaagaacggcatcaagggcggcctgaagagcgtgagcctgttcaccagcaagctggccaagcccagcaccatgttcgtgagcagcaccgaggagctgaaccagaagagcttcagcggccccagcaacctgggcaagttcaccaagggcaccctgctgggcagaaccagctacagcagcatcaacacccccaagagccagctgaacggcttctacggcaacagaagcgccggcagcatgcagagacccagagccaacagctgcgccaccagaagcagcagcggcgagagcctggcccagagccccgacagcagcaagagcatcaactgcgagaagatggtgagaagccagagcttcagccacagcatccagaacagcttcctgccccccagcagcatcaccagaagccacagcttcaacagagccgtggacctgaccaagccctaccagaaccagcagctgagcatcagagtgcccctgagaagcagcatgctgaccagaaacagcagacagcccgaggtgctgaacggcaacgagcacctgggctacggcttcaacagaccctacgccgccggcggcaagaagctggccctgcccaacggccccggcgtgaccagcaccctgggctacagaatggtgcaccccagcctgctgaagagcagcagaagccccttcagcggcaccatgaccgtggacggcaacaagaacagccccgccgacacctgcgtggaggaggacgccaccgtgctggccaaggacagagccgccaacaaggaccaggagctgatcgagaacgagagctacagaaccaagaacaaccagaccatgaagcacgacgccaagatgagatacctgagcgacgacgtggacgacatcagcctgagcagcctgagcagcagcgacaagaacgacctgagcgaggacttcagcgacgacttcatcgacatcgaggacagcaacagaaccagaatcacccccgaggagatgagcctgaaggaggagaagcacgagaacggccccccccaggacatgttcgacagccccaaggagaacgagaaggccttcagcaagaccgacgagtggatcgacatcagcgtgagcgacagaagcgagtgcaccaagcacaccagcggcaacaacctggtgagccccgacaccgactacagagccggcagcagcttcgagctgagccccagcgacagcagcgacggcacctacatgtgggacgaggagggcctggagcccatcggcaacgtgcaccccgtgggcagctacgagagcagcgagatgaacagcatcgacatcctgaacaacctggagagctgcgacctggaggacgacgacctgatgctggacgtggacctgcccgaggacgcccccctggagaacgtggagtgcgacaacatgaacagattcgacagacccgacagaaacgtgagacagccccaggagggcttctggaagagacccccccagagatggagcggccaggagcactaccacctgagccaccccgaccactaccaccaccacggcaagagcgacctgagcagaggcagcccctacagagagagccccctgggccacttcgagagctacggcggcatgcccttcttccaggcccagaagatgttcgtggacgtgcccgagaacaccgtgatcctggacgagatgaccctgagacacatggtgcaggactgcaccgccgtgaagacccagctgctgaagctgaagagactgctgcaccagcacgacggcagcggcagcctgcacgacatccagctgagcctgcccagcagccccgagcccgaggacggcgacaaggtgtacaagaacgaggacctgctgaacgagatcaagcagctgaaggacgagatcaagaagaaggacgagaagatccagctgctggagctgcagctggccacccagcacatctgccaccagaagtgcaaggaggagaagtgcacctacgccgacaagtacacccagaccccctggagaagaatccccggcggctacagcgcccccagcttcagcccctggcagggcagcttccagggcatccccagaaccgtgcccccccacagaagacagaccagcagcaccaccgccttccagcagcccagccagacccacagaagccaccccggcaagaccaacaaggccaccacctacagaggcccccagtag

SEQ ID NO: 74476 - DNA, 1599 bp, synthetic construct
  misc_feature 1..1599: note = Description of Artificial Sequence: Synthetic coding sequence
  source 1..1599: mol_type = other DNA
atgccccagctgtacatctacatcagactgctgggcgcctacctgttcatcatcagcagagtgcagggccagaacctggacagcatgctgcacggcaccggcatgaagagcgacagcgaccagaagaagagcgagaacggcgtgaccctggcccccgaggacaccctgcccttcctgaagtgctactgcagcggccactgccccgacgacgccatcaacaacacctgcatcaccaacggccactgcttcgccatcatcgaggaggacgaccagggcgagaccaccctggccagcggctgcatgaagtacgagggcagcgacttccagtgcaaggacagccccaaggcccagctgagaagaaccatcgagtgctgcagaaccaacctgtgcaaccagtacctgcagcccaccctgccccccgtggtgatcggccccttcttcgacggcagcatcagatggctggtgctgctgatcagcatggccgtgtgcatcatcgccatgatcatcttcagcagctgcttctgctacaagcactactgcaagagcatcagcagcagaagaagatacaacagagacctggagcaggacgaggccttcatccccgtgggcgagagcctgaaggacctgatcgaccagagccagagcagcggcagcggcagcggcctgcccctgctggtgcagagaaccatcgccaagcagatccagatggtgagacaggtgggcaagggcagatacggcgaggtgtggatgggcaagtggagaggcgagaaggtggccgtgaaggtgttcttcaccaccgaggaggccagctggttcagagagaccgagatctaccagaccgtgctgatgagacacgagaacatcctgggcttcatcgccgccgacatcaagggcaccggcagctggacccagctgtacctgatcaccgactaccacgagaacggcagcctgtacgacttcctgaagtgcgccaccctggacaccagagccctgctgaagctggcctacagcgccgcctgcggcctgtgccacctgcacaccgagatctacggcacccagggcaagcccgccatcgcccacagagacctgaagagcaagaacatcctgatcaagaagaacggcagctgctgcatcgccgacctgggcctggccgtgaagttcaacagcgacaccaacgaggtggacgtgcccctgaacaccagagtgggcaccaagagatacatggcccccgaggtgctggacgagagcctgaacaagaaccacttccagccctacatcatggccgacatctacagcttcggcctgatcatctgggagatggccagaagatgcatcaccggcggcatcgtggaggagtaccagctgccctactacaacatggtgcccagcgaccccagctacgaggacatgagagaggtggtgtgcgtgaagagactgagacccatcgtgagcaacagatggaacagcgacgagtgcctgagagccgtgctgaagctgatgagcgagtgctgggcccacaaccccgccagcagactgaccgccctgagaatcaagaagaccctggccaagatggtggagagccaggacgtgaagatctag

SEQ ID NO: 74477 - DNA, 3117 bp, synthetic construct
  misc_feature 1..3117: note = Description of Artificial Sequence: Synthetic coding sequence
  source 1..3117: mol_type = other DNA
atgaccagcagcctgcagagaccctggagagtgccctggctgccctggaccatcctgctggtgagcaccgccgccgccagccagaaccaggagagactgtgcgccttcaaggacccctaccagcaggacctgggcatcggcgagagcagaatcagccacgagaacggcaccatcctgtgcagcaagggcagcacctgctacggcctgtgggagaagagcaagggcgacatcaacctggtgaagcagggctgctggagccacatcggcgacccccaggagtgccactacgaggagtgcgtggtgaccaccaccccccccagcatccagaacggcacctacagattctgctgctgcagcaccgacctgtgcaacgtgaacttcaccgagaacttccccccccccgacaccacccccctgagccccccccacagcttcaacagagacgagaccatcatcatcgccctggccagcgtgagcgtgctggccgtgctgatcgtggccctgtgcttcggctacagaatgctgaccggcgacagaaagcagggcctgcacagcatgaacatgatggaggccgccgccagcgagcccagcctggacctggacaacctgaagctgctggagctgatcggcagaggcagatacggcgccgtgtacaagggcagcctggacgagagacccgtggccgtgaaggtgttcagcttcgccaacagacagaacttcatcaacgagaagaacatctacagagtgcccctgatggagcacgacaacatcgccagattcatcgtgggcgacgagagagtgaccgccgacggcagaatggagtacctgctggtgatggagtactaccccaacggcagcctgtgcaagtacctgagcctgcacaccagcgactgggtgagcagctgcagactggcccacagcgtgaccagaggcctggcctacctgcacaccgagctgcccagaggcgaccactacaagcccgccatcagccacagagacctgaacagcagaaacgtgctggtgaagaacgacggcacctgcgtgatcagcgacttcggcctgagcatgagactgaccggcaacagactggtgagacccggcgaggaggacaacgccgccatcagcgaggtgggcaccatcagatacatggcccccgaggtgctggagggcgccgtgaacctgagagactgcgagagcgccctgaagcaggtggacatgtacgccctgggcctgatctactgggagatcttcatgagatgcaccgacctgttccccggcgagagcgtgcccgagtaccagatggccttccagaccgaggtgggcaaccaccccaccttcgaggacatgcaggtgctggtgagcagagagaagcagagacccaagttccccgaggcctggaaggagaacagcctggccgtgagaagcctgaaggagaccatcgaggactgctgggaccaggacgccgaggccagactgaccgcccagtgcgccgaggagagaatggccgagctgatgatgatctgggagagaaacaagagcgtgagccccaccgtgaaccccatgagcaccgccatgcagaacgagagaaacctgagccacaacagaagagtgcccaagatcggcccctaccccgactacagcagcagcagctacatcgaggacagcatccaccacaccgacagcatcgtgaagaacatcagcagcgagcacagcatgagcagcacccccctgaccatcggcgagaagaacagaaacagcatcaactacgagagacagcaggcccaggccagaatccccagccccgagaccagcgtgaccagcctgagcaccaacaccaccaccaccaacaccaccggcctgacccccagcaccggcatgaccaccatcagcgagatgccctaccccgacgagaccaacctgcacaccaccaacgtggcccagagcatcggccccacccccgtgtgcctgcagctgaccgaggaggacctggagaccaacaagctggaccccaaggaggtggacaagaacctgaaggagagcagcgacgagaacctgatggagcacagcctgaagcagttcagcggccccgaccccctgagcagcaccagcagcagcctgctgtaccccctgatcaagctggccgtggaggccaccggccagcaggacttcacccagaccgccaacggccaggcctgcctgatccccgacgtgctgcccacccagatctaccccctgcccaagcagcagaacctgcccaagagacccaccagcctgcccctgaacaccaagaacagcaccaaggagcccagactgaagttcggcagcaagcacaagagcaacctgaagcaggtggagaccggcgtggccaagatgaacaccatcaacgccgccgagccccacgtggtgaccgtgaccatgaacggcgtggccggcagaaaccacagcgtgaacagccacgccgccaccacccagtacgccaacggcaccgtgctgagcggccagaccaccaacatcgtgacccacagagcccaggagatgctgcagaaccagttcatcggcgaggacaccagactgaacatcaacagcagccccgacgagcacgagcccctgctgagaagagagcagcaggccggccacgacgagggcgtgctggacagactggtggacagaagagagagacccctggagggcggcagaaccaacagcaacaacaacaacagcaacccctgcagcgagcaggacgtgctggcccagggcgtgcccagcaccgccgccgaccccggccccagcaagcccagaagagcccagagacccaacagcctggacctgagcgccaccaacgtgctggacggcagcagcatccagatcggcgagagcacccaggacggcaagagcggcagcggcgagaagatcaagaagagagtgaagaccccctacagcctgaagagatggagacccagcacctgggtgatcagcaccgagagcctggactgcgaggtgaacaacaacggcagcaacagagccgtgcacagcaagagcagcaccgccgtgtacctggccgagggcggcaccgccaccaccatggtgagcaaggacatcggcatgaactgcctgtag

SEQ ID NO: 74478 - DNA, 2337 bp, synthetic construct
  misc_feature 1..2337: note = Description of Artificial Sequence: Synthetic coding sequence
  source 1..2337: mol_type = other DNA
atgagcagcggcgccaaggagggcggcggcggcagccccgcctaccacctgccccacccccacccccaccccccccagcacgcccagtacgtgggcccctacagactggagaagaccctgggcaagggccagaccggcctggtgaagctgggcgtgcactgcatcaccggccagaaggtggccatcaagatcgtgaacagagagaagctgagcgagagcgtgctgatgaaggtggagagagagatcgccatcctgaagctgatcgagcacccccacgtgctgaagctgcacgacgtgtacgagaacaagaagtacctgtacctggtgctggagcacgtgagcggcggcgagctgttcgactacctggtgaagaagggcagactgacccccaaggaggccagaaagttcttcagacagatcgtgagcgccctggacttctgccacagctacagcatctgccacagagacctgaagcccgagaacctgctgctggacgagaagaacaacatcagaatcgccgacttcggcatggccagcctgcaggtgggcgacagcctgctggagaccagctgcggcagcccccactacgcctgccccgaggtgatcaagggcgagaagtacgacggcagaagagccgacatgtggagctgcggcgtgatcctgttcgccctgctggtgggcgccctgcccttcgacgacgacaacctgagacagctgctggagaaggtgaagagaggcgtgttccacatgccccacttcatcccccccgactgccagagcctgctgagaggcatgatcgaggtggagcccgagaagagactgagcctggagcagatccagaagcacccctggtacctgggcggcaagcacgagcccgacccctgcctggagcccgcccccggcagaagagtggccatgagaagcctgcccagcaacggcgagctggaccccgacgtgctggagagcatggccagcctgggctgcttcagagacagagagagactgcacagagagctgagaagcgaggaggagaaccaggagaagatgatctactacctgctgctggacagaaaggagagataccccagctgcgaggaccaggacctgccccccagaaacgacgtggacccccccagaaagagagtggacagccccatgctgagcagacacggcaagagaagacccgagagaaagagcatggaggtgctgagcatcaccgacgccggcggcggcggcagccccgtgcccaccagaagagccctggagatggcccagcacagccagagaagcagaagcgtgagcggcgccagcaccggcctgagcagcagccccctgagcagccccagaagccccgtgttcagcttcagccccgagcccggcgccggcgacgaggccagaggcggcggcagccccaccagcaagacccagaccctgcccagcagaggccccagaggcggcggcgccggcgagcagccccccccccccagcgccagaagcacccccctgcccggcccccccggcagccccagaagcagcggcggcacccccctgcacagccccctgcacacccccagagccagccccaccggcacccccggcaccacccccccccccagccccggcggcggcgtgggcggcgccgcctggagaagcagactgaacagcatcagaaacagcttcctgggcagccccagattccacagaagaaagatgcaggtgcccaccgccgaggagatgagcagcctgacccccgagagcagccccgagctggccaagagaagctggttcggcaacttcatcagcctggacaaggaggagcagatcttcctggtgctgaaggacaagcccctgagcagcatcaaggccgacatcgtgcacgccttcctgagcatccccagcctgagccacagcgtgctgagccagaccagcttcagagccgagtacaaggccagcggcggccccagcgtgttccagaagcccgtgagattccaggtggacatcagcagcagcgagggccccgagcccagccccagaagagacggcagcggcggcggcggcatctacagcgtgaccttcaccctgatcagcggccccagcagaagattcaagagagtggtggagaccatccaggcccagctgctgagcacccacgaccagcccagcgtgcaggccctggccgacgagaagaacggcgcccagaccagacccgccggcgccccccccagaagcctgcagcccccccccggcagacccgaccccgagctgagcagcagccccagaagaggcccccccaaggacaagaagctgctggccaccaacggcacccccctgccctag

SEQ ID NO: 74479 - DNA, 1422 bp, synthetic construct
  misc_feature 1..1422: note = Description of Artificial Sequence: Synthetic coding sequence
  source 1..1422: mol_type = other DNA
atgagaagcctgcccagcaacggcgagctggaccccgacgtgctggagagcatggccagcctgggctgcttcagagacagagagagactgcacagagagctgagaagcgaggaggagaaccaggagaagatgatctactacctgctgctggacagaaaggagagataccccagctgcgaggaccaggacctgccccccagaaacgacgtggacccccccagaaagagagtggacagccccatgctgagcagacacggcaagagaagacccgagagaaagagcatggaggtgctgagcatcaccgacgccggcggcggcggcagccccgtgcccaccagaagagccctggagatggcccagcacagccagagaagcagaagcgtgagcggcgccagcaccggcctgagcagcagccccctgagcagccccagaagccccgtgttcagcttcagccccgagcccggcgccggcgacgaggccagaggcggcggcagccccaccagcaagacccagaccctgcccagcagaggccccagaggcggcggcgccggcgagcagccccccccccccagcgccagaagcacccccctgcccggcccccccggcagccccagaagcagcggcggcacccccctgcacagccccctgcacacccccagagccagccccaccggcacccccggcaccacccccccccccagccccggcggcggcgtgggcggcgccgcctggagaagcagactgaacagcatcagaaacagcttcctgggcagccccagattccacagaagaaagatgcaggtgcccaccgccgaggagatgagcagcctgacccccgagagcagccccgagctggccaagagaagctggttcggcaacttcatcagcctggacaaggaggagcagatcttcctggtgctgaaggacaagcccctgagcagcatcaaggccgacatcgtgcacgccttcctgagcatccccagcctgagccacagcgtgctgagccagaccagcttcagagccgagtacaaggccagcggcggccccagcgtgttccagaagcccgtgagattccaggtggacatcagcagcagcgagggccccgagcccagccccagaagagacggcagcggcggcggcggcatctacagcgtgaccttcaccctgatcagcggccccagcagaagattcaagagagtggtggagaccatccaggcccagctgctgagcacccacgaccagcccagcgtgcaggccctggccgacgagaagaacggcgcccagaccagacccgccggcgccccccccagaagcctgcagcccccccccggcagacccgaccccgagctgagcagcagccccagaagaggcccccccaaggacaagaagctgctggccaccaacggcacccccctgccctag

SEQ ID NO: 74480 - DNA, 1422 bp, synthetic construct; identical to SEQ ID NO: 74479
  misc_feature 1..1422: note = Description of Artificial Sequence: Synthetic coding sequence
  source 1..1422: mol_type = other DNA

SEQ ID NO: 74481 - DNA, 2976 bp, synthetic construct
  misc_feature 1..2976: note = Description of Artificial Sequence: Synthetic coding sequence
  source 1..2976: mol_type = other DNA
atgagacacagagtgtgcagaggcagaagcggccagggcagaagaagaagcagcgtgatcccctggcccgtgcccaagcacgtgggctgggtggtgctgctgggctgcggcggcagcggcaccagcatcctggtggtgagcatcgtgggcagcggcctgatcaaggccatggcccccgccgagatcctgaacggcaaggagatcagcgcccagatcagagccagactgaagaaccaggtgacccagctgaaggagcaggtgcccggcttcacccccagactggccatcctgcaggtgggcaacagagacgacagcaacctgtacatcaacgtgaagctgaaggccgccgaggagatcggcatcaaggccacccacatcaagctgcccagaaccaccaccgagagcgaggtgatgaagtacatcaccagcctgaacgaggacagcaccgtgcacggcttcctggtgcagctgcccctggacagcgagaacagcatcaacaccgaggaggtgatcaacgccatcgcccccgagaaggacgtggacggcctgaccagcatcaacgccggcaagctggccagaggcgacctgaacgactgcttcatcccctgcacccccaagggctgcctggagctgatcaaggagaccggcgtgcccatcgccggcagacacgccgtggtggtgggcagaagcaagatcgtgggcgcccccatgcacgacctgctgctgtggaacaacgccaccgtgaccacctgccacagcaagaccgcccacctggacgaggaggtgaacaagggcgacatcctggtggtggccaccggccagcccgagatggtgaagggcgagtggatcaagcccggcgccatcgtgatcgactgcggcatcaactacgtgcccgacgacaagaagcccaacggcagaaaggtggtgggcgacgtggcctacgacgaggccaaggagagagccagcttcatcacccccgtgcccggcggcgtgggccccatgaccgtggccatgctgatgcagagcaccgtggagagcgccaagagattcctggagaagttcaagcccggcaagtggatgatccagtacaacaacctgaacctgaagacccccgtgcccagcgacatcgacatcagcagaagctgcaagcccaagcccatcggcaagctggccagagagatcggcctgctgagcgaggaggtggagctgtacggcgagaccaaggccaaggtgctgctgagcgccctggagagactgaagcacagacccgacggcaagtacgtggtggtgaccggcatcacccccacccccctgggcgagggcaagagcaccaccaccatcggcctggtgcaggccctgggcgcccacctgtaccagaacgtgttcgcctgcgtgagacagcccagccagggccccaccttcggcatcaagggcggcgccgccggcggcggctacagccaggtgatccccatggaggagttcaacctgcacctgaccggcgacatccacgccatcaccgccgccaacaacctggtggccgccgccatcgacgccagaatcttccacgagctgacccagaccgacaaggccctgttcaacagactggtgcccagcgtgaacggcgtgagaagattcagcgacatccagatcagaagactgaagagactgggcatcgagaagaccgaccccaccaccctgaccgacgaggagatcaacagattcgccagactggacatcgaccccgagaccatcacctggcagagagtgctggacaccaacgacagattcctgagaaagatcaccatcggccaggcccccaccgagaagggccacaccagaaccgcccagttcgacatcagcgtggccagcgagatcatggccgtgctggccctgaccaccagcctggaggacatgagagagagactgggcaagatggtggtggccagcagcaagaagggcgagcccgtgagcgccgaggacctgggcgtgagcggcgccctgaccgtgctgatgaaggacgccatcaagcccaacctgatgcagaccctggagggcacccccgtgttcgtgcacgccggccccttcgccaacatcgcccacggcaacagcagcatcatcgccgacagaatcgccctgaagctggtgggccccgagggcttcgtggtgaccgaggccggcttcggcgccgacatcggcatggagaagttcttcaacatcaagtgcagatacagcggcctgtgcccccacgtggtggtgctggtggccaccgtgagagccctgaagatgcacggcggcggccccaccgtgaccgccggcctgcccctgcccaaggcctacatccaggagaacctggagctggtggagaagggcttcagcaacctgaagaagcagatcgagaacgccagaatgttcggcatccccgtggtggtggccgtgaacgccttcaagaccgacaccgagagcgagctggacctgatcagcagactgagcagagagcacggcgccttcgacgccgtgaagtgcacccactgggccgagggcggcaagggcgccctggccctggcccaggccgtgcagagagccgcccaggcccccagcagcttccagctgctgtacgacctgaagctgcccgtggaggacaagatcagaatcatcgcccagaagatctacggcgccgacgacatcgagctgctgcccgaggcccagcacaaggccgaggtgtacaccaagcagggcttcggcaacctgcccatctgcatggccaagacccacctgagcctgagccacaaccccgagcagaagggcgtgcccaccggcttcatcctgcccatcagagacatcagagccagcgtgggcgccggcttcctgtaccccctggtgggcaccatgagcaccatgcccggcctgcccaccagaccctgcttctacgacatcgacctggaccccgagaccgagcaggtgaacggcctgttctag

SEQ ID NO: 74482 - DNA, 1176 bp, synthetic construct
  misc_feature 1..1176: note = Description of Artificial Sequence: Synthetic coding sequence
  source 1..1176: mol_type = other DNA
atgttcagcccctggaagatcagcatgttcctgagcgtgagagaggacagcgtgcccaccaccgccagcttcagcgccgacatgctgaacgtgaccctgcagggccccaccctgaacggcaccttcgcccagagcaagtgcccccaggtggagtggctgggctggctgaacaccatccagccccccttcctgtgggtgctgttcgtgctggccaccctggagaacatcttcgtgctgagcgtgttctgcctgcacaagagcagctgcaccgtggccgagatctacctgggcaacctggccgccgccgacctgatcctggcctgcggcctgcccttctgggccatcaccatcagcaacaacttcgactggctgttcggcgagaccctgtgcagagtggtgaacgccatcatcagcatgaacctgtacagcagcatctgcttcctgatgctggtgagcatcgacagatacctggccctggtgaagaccatgagcatgggcagaatgagaggcgtgagatgggccaagctgtacagcctggtgatctggggctgcaccctgctgctgagcagccccatgctggtgttcagaaccatgaaggagtacagcgacgagggccacaacgtgaccgcctgcgtgatcagctaccccagcctgatctgggaggtgttcaccaacatgctgctgaacgtggtgggcttcctgctgcccctgagcgtgatcaccttctgcaccatgcagatcatgcaggtgctgagaaacaacgagatgcagaagttcaaggagatccagaccgagagaagagccaccgtgctggtgctggtggtgctgctgctgttcatcatctgctggctgcccttccagatcagcaccttcctggacaccctgcacagactgggcatcctgagcagctgccaggacgagagaatcatcgacgtgatcacccagatcgccagcttcatggcctacagcaacagctgcctgaaccccctggtgtacgtgatcgtgggcaagagattcagaaagaagagctgggaggtgtaccagggcgtgtgccagaagggcggctgcagaagcgagcccatccagatggagaacagcatgggcaccctgagaaccagcatcagcgtggagagacagatccacaagctgcaggactgggccggcagcagacagtag

SEQ ID NO: 74483 - DNA, 1095 bp, synthetic construct
  misc_feature 1..1095: note = Description of Artificial Sequence: Synthetic coding sequence
  source 1..1095: mol_type = other DNA
atgctgaacgtgaccctgcagggccccaccctgaacggcaccttcgcccagagcaagtgcccccaggtggagtggctgggctggctgaacaccatccagccccccttcctgtgggtgctgttcgtgctggccaccctggagaacatcttcgtgctgagcgtgttctgcctgcacaagagcagctgcaccgtggccgagatctacctgggcaacctggccgccgccgacctgatcctggcctgcggcctgcccttctgggccatcaccatcagcaacaacttcgactggctgttcggcgagaccctgtgcagagtggtgaacgccatcatcagcatgaacctgtacagcagcatctgcttcctgatgctggtgagcatcgacagatacctggccctggtgaagaccatgagcatgggcagaatgagaggcgtgagatgggccaagctgtacagcctggtgatctggggctgcaccctgctgctgagcagccccatgctggtgttcagaaccatgaaggagtacagcgacgagggccacaacgtgaccgcctgcgtgatcagctaccccagcctgatctgggaggtgttcaccaacatgctgctgaacgtggtgggcttcctgctgcccctgagcgtgatcaccttctgcaccatgcagatcatgcaggtgctgagaaacaacgagatgcagaagttcaaggagatccagaccgagagaagagccaccgtgctggtgctggtggtgctgctgctgttcatcatctgctggctgcccttccagatcagcaccttcctggacaccctgcacagactgggcatcctgagcagctgccaggacgagagaatcatcgacgtgatcacccagatcgccagcttcatggcctacagcaacagctgcctgaaccccctggtgtacgtgatcgtgggcaagagattcagaaagaagagctgggaggtgtaccagggcgtgtgccagaagggcggctgcagaagcgagcccatccagatggagaacagcatgggcaccctgagaaccagcatcagcgtggagagacagatccacaagctgcaggactgggccggcagcagacagtag

SEQ ID NO: 74484 - DNA, 1095 bp, synthetic construct; identical to SEQ ID NO: 74483
  misc_feature 1..1095: note = Description of Artificial Sequence: Synthetic coding sequence
  source 1..1095: mol_type = other DNA

SEQ ID NO: 74485 - DNA, 1176 bp, synthetic construct; identical to SEQ ID NO: 74482
  misc_feature 1..1176: note = Description of Artificial Sequence: Synthetic coding sequence
  source 1..1176: mol_type = other DNA

SEQ ID NO: 74486 - DNA, 684 bp, synthetic construct
  misc_feature 1..684: note = Description of Artificial Sequence: Synthetic coding sequence
  source 1..684: mol_type = other DNA
atgggcggcaagctgagcaagaagaagaagggctacaacgtgaacgacgagaaggccaaggagaaggacaagaaggccgagggcgccgccaccgaggaggagggcacccccaaggagagcgagccccaggccgccgccgagcccgccgaggccaaggagggcaaggagaagcccgaccaggacgccgagggcaaggccgaggagaaggagggcgagaaggacgccgccgccgccaaggaggaggcccccaaggccgagcccgagaagaccgagggcgccgccgaggccaaggccgagccccccaaggcccccgagcaggagcaggccgcccccggccccgccgccggcggcgaggcccccaaggccgccgaggccgccgccgcccccgccgagagcgccgcccccgccgccggcgaggagcccagcaaggaggagggcgagcccaagaagaccgaggcccccgccgcccccgccgcccaggagaccaagagcgacggcgcccccgccagcgacagcaagcccggcagcagcgaggccgcccccagcagcaaggagacccccgccgccaccgaggcccccagcagcacccccaaggcccagggccccgccgccagcgccgaggagcccaagcccgtggaggcccccgccgccaacagcgaccagaccgtgaccgtgaaggagtag

SEQ ID NO: 74487 - DNA, 522 bp, synthetic construct
  misc_feature 1..522: note = Description of Artificial Sequence: Synthetic coding sequence
  source 1..522: mol_type = other DNA
atgggcggcaagctgagcaagaagaagaagggctacaacgtgaacgacgagaaggccaaggagaaggacaagaaggccgagggcgccgccaccgaggaggagggcacccccaaggagagcgagccccaggccgccgccgagcccgccgaggccaaggagggcaaggagaagcccgaccaggacgccgagggcaaggccgaggagaaggagggcgagaaggacgccgccgccgccaaggaggaggcccccaaggccgagcccgacaaggaggagggcgagcccaagaagaccgaggcccccgccgcccccgccgcccaggagaccaagagcgacggcgcccccgccagcgacagcaagcccggcagcagcgaggccgcccccagcagcaaggagacccccgccgccaccgaggcccccagcagcacccccaaggcccagggccccgccgccagcgccgaggagcccaagcccgtggaggcccccgccgccaacagcgaccagaccgtgaccgtgaaggagtag

SEQ ID NO: 74488 - DNA, 543 bp, synthetic construct
  misc_feature 1..543: note = Description of Artificial Sequence: Synthetic coding sequence
  source 1..543: mol_type = other DNA
atgggctgcggcggcagcagagccgacgccatcgagcccagatactacgagagctggaccagagagaccgagagcacctggctgacctacaccgacagcgacgccccccccagcgccgccgcccccgacagcggccccgaggccggcggcctgcacagcgtgctggaggccgagaagagcaagatcaaggcccccaccgacagcgtgagcgacgagggcctgttcagcgccagcaagatggcccccctggccgtgttcagccacggcatgctggaggacggcctgcccagcaacggcgtgcccagaagcaccgcccccggcggcatccccaaccccgagaagaagaccaactgcgagacccagtgccccaacccccagagcctgagcagcggccccctgacccagaagcagaacggcctgcagaccaccgaggccaagagagacgccaagagaatgcccgccaaggaggtgaccatcaacgtgaccgacagcatccagcagatggacagaagcagaagaatcaccaagaactgcgtgaactag

SEQ ID NO: 74489 - DNA, 438 bp, synthetic construct
  misc_feature 1..438: note = Description of Artificial Sequence: Synthetic coding sequence
  source 1..438: mol_type = other DNA
atgggctgcggcggcagcagagccgacgccatcgagcccagatactacgagagctggaccagagagaccgagagcacctggctgacctacaccgacagcgacgccccccccagcgccgccgcccccgacagcggccccgaggccggcggcctgcacagcggcatgctggaggacggcctgcccagcaacggcgtgcccagaagcaccgcccccggcggcatccccaaccccgagaagaagaccaactgcgagacccagtgccccaacccccagagcctgagcagcggccccctgacccagaagcagaacggcctgcagaccaccgaggccaagagagacgccaagagaatgcccgccaaggaggtgaccatcaacgtgaccgacagcatccagcagatggacagaagcagaagaatcaccaagaactgcgtgaactag

SEQ ID NO: 74490 - DNA, 165 bp, synthetic construct
  misc_feature 1..165: note = Description of Artificial Sequence: Synthetic coding sequence
  source 1..165: mol_type = other DNA
atgggctgcggcggcagcagagccgacgccatcgagcccagatactacgagagctggaccagagagaccgagagcacctggctgacctacaccgacagcgacgccccccccagcgccgccgcccccgacagcggccccgaggccggcggcctgcacagcggctag

SEQ ID NO: 74491 - DNA, 387 bp, synthetic construct
  misc_feature 1..387: note = Description of Artificial Sequence: Synthetic coding sequence
  source 1..387: mol_type = other DNA
atggagagcaaggaggagagagccctgaacaacctgatcgtggagaacgtgaaccaggagaacgacgagaaggacgagaaggagcaggtggccaacaagggcgagcccctggccctgcccctgaacgtgagcgagtactgcgtgcccagaggcaacagaagaagattcagagtgagacagcccatcctgcagtacagatgggacatcatgcacagactgggcgagccccaggccagaatgagagaggagaacatggagagaatcggcgaggaggtgagacagctgatggagaagctgagagagaagcagctgagccacagcctgagagccgtgagcaccgaccccccccaccacgaccaccacgacgagttctgcctgatgccctag

SEQ ID NO: 74492 - DNA, 387 bp, synthetic construct; identical to SEQ ID NO: 74491
  misc_feature 1..387: note = Description of Artificial Sequence: Synthetic coding sequence
  source 1..387: mol_type = other DNA

SEQ ID NO: 74493 - DNA, 306 bp, synthetic construct
  misc_feature 1..306: note = Description of Artificial Sequence: Synthetic coding sequence
  source 1..306: mol_type = other DNA
atggagagcaaggaggagagagccctgaacaacctgatcgtggagaacgtgaaccaggagaacgacgagaaggacgagaaggagcaggtggccaacaagggcgagcccctggccctgcccctgaacgtgagcgagtactgcgtgcccagaggcaacagaagaagattcagagtgagacagcccatcctgcagtacagatgggacatcatgcacagactgggcgagccccaggccagaatgagagaggagaacatggagagaatcggcgaggaggtgagacagctgatggagaagctgagagagtag

SEQ ID NO: 74494 - DNA, 483 bp, synthetic construct
  misc_feature 1..483: note = Description of Artificial Sequence: Synthetic coding sequence
  source 1..483: mol_type = other DNA
atgcagaagatggtggtgtgcggcgccaagtgctgcggcgacgccccccacgtggagaacagagaggaggagaccgccagaatcggccccggcgtgatggagagcaaggaggagagagccctgaacaacctgatcgtggagaacgtgaaccaggagaacgacgagaaggacgagaaggagcaggtggccaacaagggcgagcccctggccctgcccctgaacgtgagcgagtactgcgtgcccagaggcaacagaagaagattcagagtgagacagcccatcctgcagtacagatgggacatcatgcacagactgggcgagccccaggccagaatgagagaggagaacatggagagaatcggcgaggaggtgagacagctgatggagaagctgagagagaagcagctgagccacagcctgagagccgtgagcaccgaccccccccaccacgaccaccacgacgagttctgcctgatgccctag

SEQ ID NO: 74495 - DNA, 378 bp, synthetic construct
  misc_feature 1..378: note = Description of Artificial Sequence: Synthetic coding sequence
  source 1..378: mol_type = other DNA
atggagagcaaggagaagagagccgtgaacagcctgagcatggagaacgccaaccaggagaacgaggagaaggagcaggtggccaacaagggcgagcccctggccctgcccctggacgccggcgagtactgcgtgcccagaggcaacagaagaagattcagagtgagacagcccatcctgcagtacagatgggacatgatgcacagactgggcgagccccaggccagaatgagagaggagaacatggagagaatcggcgaggaggtgagacagctgatggagaagctgagagagaagcagctgagccacagcctgagagccgtgagcaccgaccccccccaccacgaccaccacgacgagttctgcctgatgccctag

SEQ ID NO: 74496 - DNA, 363 bp, synthetic construct
  misc_feature 1..363: note = Description of Artificial Sequence: Synthetic coding sequence
  source 1..363: mol_type = other DNA
atggagagcaaggaggagctggccgccaacaacctgaacggcgagaacgcccagcaggagaacgagggcggcgagcaggcccccacccagaacgaggaggagagcagacacctgggcggcggcgagggccagaagcccggcggcaacatcagaagaggcagagtgagaagactggtgcccaacttcagatgggccatccccaacagacacatcgagcacaacgaggccagagacgacgtggagagattcgtgggccagatgatggagatcaagagaaagaccagagagcagcagatgagacactacatgagattccagacccccgagcccgacaaccactacgacttctgcctgatcccctag

SEQ ID NO: 74497 - DNA, 363 bp, synthetic construct; identical to SEQ ID NO: 74496
  misc_feature 1..363: note = Description of Artificial Sequence: Synthetic coding sequence
  source 1..363: mol_type = other DNA

SEQ ID NO: 74498 - DNA, 336 bp, synthetic construct
  misc_feature 1..336: note = Description of Artificial Sequence: Synthetic coding sequence
  source 1..336: mol_type = other DNA
atggagaacgtgcccaaggagaacaaggtggtggagaaggcccccgtgcagaacgaggcccccgccctgggcggcggcgagtaccaggagcccggcggcaacgtgaagggcgtgtgggccccccccgcccccggcttcggcgaggacgtgcccaacagactggtggacaacatcgacatgatcgacggcgacggcgacgacatggagagattcatggaggagatgagagagctgagaagaaagatcagagagctgcagctgagatacagcctgagaatcctgatcggcgaccccccccaccacgaccaccacgacgagttctgcctgatgccctag

SEQ ID NO: 74499 - DNA, 336 bp, synthetic construct; identical to SEQ ID NO: 74498
  misc_feature 1..336: note = Description of Artificial Sequence: Synthetic coding sequence
  source 1..336: mol_type = other DNA

SEQ ID NO: 74500 - DNA, 378 bp, synthetic construct
  misc_feature 1..378: note = Description of Artificial Sequence: Synthetic coding sequence
  source 1..378: mol_type = other DNA
atggaccacaagcccctgctgcaggagagaccccccgcctacaacctggaggccggccagggcgactacgcctgcggcccccacggctacggcgccatccccgccgccccccccccccccccctacccctacctggtgaccggcatccccacccaccaccccagagtgtacaacatccacagcagaaccgtgaccagataccccgccaacagcatcgtggtggtgggcggctgccccgtgtgcagagtgggcgtgctggaggactgcttcaccttcctgggcatcttcctggccatcatcctgttccccttcggcttcatctgctgcttcgccctgagaaagagaagatgccccaactgcggcgccaccttcgcctag

SEQ ID NO: 74501 - DNA, 297 bp, synthetic construct
  misc_feature 1..297: note = Description of Artificial Sequence: Synthetic coding sequence
  source 1..297: mol_type = other DNA
atggaccacaagcccctgctgcaggagagaccccccgcctacaacctggaggccggccagggcgactacgcctgcggcccccacggctacggcgccatccccgccgccccccccccccccccctacccctacctggtgaccggcatccccacccaccaccccagagtgtacaacatccacagcagaaccgtgaccagataccccgccaacagcatcgtggtggtgggcggctgccccgtgtgcagacaccagagaagcagctggctgtacacctaccccctgagagtgtgcacctag

SEQ ID NO: 74502 - DNA, 1536 bp, synthetic construct
  misc_feature 1..1536: note = Description of Artificial Sequence: Synthetic coding sequence
  source 1..1536: mol_type = other DNA
atgagcagaggccccgaggaggtgaacagactgaccgagagcacctacagaaacgtgatggagcagttcaaccccggcctgagaaacctgatcaacctgggcaagaactacgagaaggccgtgaacgccatgatcctggccggcaaggcctactacgacggcgtggccaagatcggcgagatcgccaccggcagccccgtgagcaccgagctgggccacgtgctgatcgagatcagcagcacccacaagaagctgaacgagagcctggacgagaacttcaagaagttccacaaggagatcatccacgagctggagaagaagatcgagctggacgtgaagtacatgaacgccaccctgaagagataccagaccgagcacaagaacaagctggagagcctggagaagagccaggccgagctgaagaagatcagaagaaagagccagggcagcagaaacgccctgaagtacgagcacaaggagatcgagtacgtggagaccgtgaccagcagacagagcgagatccagaagttcatcgccgacggctgcaaggaggccctgctggaggagaagagaagattctgcttcctggtggacaagcactgcggcttcgccaaccacatccactactaccacctgcagagcgccgagctgctgaacagcaagctgcccagatggcaggagacctgcgtggacgccatcaaggtgcccgagaagatcatgaacatgatcgaggagatcaagacccccgccagcacccccgtgagcggcaccccccaggccagccccatgatcgagagaagcaacgtggtgagaaaggactacgacaccctgagcaagtgcagccccaagatgccccccgcccccagcggcagagcctacaccagccccctgatcgacatgttcaacaaccccgccaccgccgcccccaacagccagagagtgaacaacagcaccggcaccagcgaggaccccagcctgcagagaagcgtgagcgtggccaccggcctgaacatgatgaagaagcagaaggtgaagaccatcttcccccacaccgccggcagcaacaagaccctgctgagcttcgcccagggcgacgtgatcaccctgctgatccccgaggagaaggacggctggctgtacggcgagcacgacgtgagcaaggccagaggctggttccccagcagctacaccaagctgctggaggagaacgagaccgaggccgtgaccgtgcccacccccagccccacccccgtgagaagcatcagcaccgtgaacctgagcgagaacagcagcgtggtgatccccccccccgactacctggagtgcctgagcatgggcgccgccgccgacagaagagccgacagcgccagaaccaccagcaccttcaaggcccccgccagcaagcccgagaccgccgcccccaacgacgccaacggcaccgccaagccccccttcctgagcggcgagaaccccttcgccaccgtgaagctgagacccaccgtgaccaacgacagaagcgcccccatcatcagatag

SEQ ID NO: 74503 - DNA, 4656 bp, synthetic construct
  misc_feature 1..4656: note = Description of Artificial Sequence: Synthetic coding sequence
  source 1..4656: mol_type = other DNA
atggagaacaccggctggatgggcaagggccacagaatgacccccgcctgccccctgctgctgagcgtgatcctgagcctgagactggccaccgccttcgaccccgcccccagcgcctgcagcgccctggccagcggcgtgctgtacggcgccttcagcctgcaggacctgttccccaccatcgccagcggctgcagctggaccctggagaaccccgaccccaccaagtacagcctgtacctgagattcaacagacaggagcaggtgtgcgcccacttcgcccccagactgctgcccctggaccactacctggtgaacttcacctgcctgagacccagccccgaggaggccgtggcccaggccgagagcgaggtgggcagacccgaggaggaggaggccgaggccgccgccggcctggagctgtgcagcggcagcggccccttcaccttcctgcacttcgacaagaacttcgtgcagctgtgcctgagcgccgagcccagcgaggcccccagactgctggcccccgccgccctggccttcagattcgtggaggtgctgctgatcaacaacaacaacagcagccagttcacctgcggcgtgctgtgcagatggagcgaggagtgcggcagagccgccggcagagcctgcggcttcgcccagcccggctgcagctgccccggcgaggccggcgccggcagcaccaccaccaccagccccggcccccccgccgcccacaccctgagcaacgccctggtgcccggcggccccgccccccccgccgaggccgacctgcacagcggcagcagcaacgacctgttcaccaccgagatgagatacggcgaggagcccgaggaggagcccaaggtgaagacccagtggcccagaagcgccgacgagcccggcctgtacatggcccagaccggcgaccccgccgccgaggagtggagcccctggagcgtgtgcagcctgacctgcggccagggcctgcaggtgagaaccagaagctgcgtgagcagcccctacggcaccctgtgcagcggccccctgagagagaccagaccctgcaacaacagcgccacctgccccgtgcacggcgtgtgggaggagtggggcagctggagcctgtgcagcagaagctgcggcagaggcagcagaagcagaatgagaacctgcgtgcccccccagcacggcggcaaggcctgcgagggccccgagctgcagaccaagctgtgcagcatggccgcctgccccgtggagggccagtggctggagtggggcccctggggcccctgcagcaccagctgcgccaacggcacccagcagagaagcagaaagtgcagcgtggccggccccgcctgggccacctgcaccggcgccctgaccgacaccagagagtgcagcaacctggagtgccccgccaccgacagcaagtggggcccctggaacgcctggagcctgtgcagcaagacctgcgacaccggctggcagagaagattcagaatgtgccaggccaccggcacccagggctacccctgcgagggcaccggcgaggaggtgaagccctgcagcgagaagagatgccccgccttccacgagatgtgcagagacgagtacgtgatgctgatgacctggaagaaggccgccgccggcgagatcatctacaacaagtgcccccccaacgccagcggcagcgccagcagaagatgcctgctgagcgcccagggcgtggcctactggggcctgcccagcttcgccagatgcatcagccacgagtacagatacctgtacctgagcctgagagagcacctggccaagggccagagaatgctggccggcgagggcatgagccaggtggtgagaagcctgcaggagctgctggccagaagaacctactacagcggcgacctgctgttcagcgtggacatcctgagaaacgtgaccgacaccttcaagagagccacctacgtgcccagcgccgacgacgtgcagagattcttccaggtggtgagcttcatggtggacgccgagaacaaggagaagtgggacgacgcccagcaggtgagccccggcagcgtgcacctgctgagagtggtggaggacttcatccacctggtgggcgacgccctgaaggccttccagagcagcctgatcgtgaccgacaacctggtgatcagcatccagagagagcccgtgagcgccgtgagcagcgacatcaccttccccatgagaggcagaagaggcatgaaggactgggtgagacacagcgaggacagactgttcctgcccaaggaggtgctgagcctgagcagccccggcaagcccgccaccagcggcgccgccggcagccccggcagaggcagaggccccggcaccgtgccccccggccccggccacagccaccagagactgctgcccgccgaccccgacgagagcagctacttcgtgatcggcgccgtgctgtacagaaccctgggcctgatcctgcccccccccagaccccccctggccgtgaccagcagagtgatgaccgtgaccgtgagaccccccacccagccccccgccgagcccctgatcaccgtggagctgagctacatcatcaacggcaccaccgacccccactgcgccagctgggactacagcagagccgacgccagcagcggcgactgggacaccgagaactgccagaccctggagacccaggccgcccacaccagatgccagtgccagcacctgagcaccttcgccgtgctggcccagccccccaaggacctgaccctggagctggccggcagccccagcgtgcccctggtgatcggctgcgccgtgagctgcatggccctgctgaccctgctggccatctacgccgccttctggagattcatcaagagcgagagaagcatcatcctgctgaacttctgcctgagcatcctggccagcaacatcctgatcctggtgggccagagcagagtgctgagcaagggcgtgtgcaccatgaccgccgccttcctgcacttcttcttcctgagcagcttctgctgggtgctgaccgaggcctggcagagctacctggccgtgatcggcagaatgagaaccagactggtgagaaagagattcctgtgcctgggctggggcctgcccgccctggtggtggccgtgagcgtgggcttcaccagaaccaagggctacggcaccagcagctactgctggctgagcctggagggcggcctgctgtacgccttcgtgggccccgccgccgtgatcgtgctggtgaacatgctgatcggcatcatcgtgttcaacaagctgatggccagagacggcatcagcgacaagagcaagaagcagagagccggcgccagcctgtggagcagctgcgtggtgctgcccctgctggccctgacctggatgagcgccgtgctggccatgaccgacagaagaagcgtgctgttccaggccctgttcgccgtgttcaacagcgcccagggcttcgtgatcaccgccgtgcactgcttcctgagaagagaggtgcaggacgtggtgaagtgccagatgggcgtgtgcagagccgacgagagcgaggacagccccgacagctgcaagaacggccagctgcagatcctgagcgacttcgagaaggacgtggacctggcctgccagaccgtgctgttcaaggaggtgaacacctgcaaccccagcaccatcaccggcaccctgagcagactgagcctggacgaggacgaggagcccaagagctgcctggtgggccccgagggcagcctgagcttcagccccctgcccggcaacatcctggtgcccatggccgccagccccggcctgggcgagcccccccccccccaggaggccaaccccgtgtacatgtgcggcgagggcggcctgagacagctggacctgacctggctgagacccaccgagcccggcagcgagggcgactacatggtgctgcccagaagaaccctgagcctgcagcccggcggcggcggcggcggcggcgaggacgcccccagagccagacccgagggcacccccagaagagccgccaagaccgtggcccacaccgagggctaccccagcttcctgagcgtggaccacagcggcctgggcctgggccccgcctacggcagcctgcagaacccctacggcatgaccttccagccccccccccccacccccagcgccagacaggtgcccgagcccggcgagagaagcagaaccatgcccagaaccgtgcccggcagcaccatgaagatgggcagcctggagagaaagaagctgagatacagcgacctggacttcgaggtgatgcacaccagaaagagacacagcgagctgtaccacgagctgaaccagaagttccacaccttcgacagatacagaagccagagcaccgccaagagagagaagagatggagcgtgagcagcggcggcgccgccgagagaagcgtgtgcaccgacaagcccagccccggcgagagacccagcctgagccagcacagaagacaccagagctggagcaccttcaagagcatgaccctgggcagcctgccccccaagcccagagagagactgaccctgcacagagccgccgcctgggagcccaccgagccccccgacggcgacttccagaccgaggtgtag

SEQ ID NO: 74504 - DNA, 4755 bp, synthetic construct
  misc_feature 1..4755: note = Description of Artificial Sequence: Synthetic coding sequence
  source 1..4755: mol_type = other DNA
atggagaacaccggctggatgggcaagggccacagaatgacccccgcctgccccctgctgctgagcgtgatcctgagcctgagactggccaccgccttcgaccccgcccccagcgcctgcagcgccctggccagcggcgtgctgtacggcgccttcagcctgcaggacctgttccccaccatcgccagcggctgcagctggaccctggagaaccccgaccccaccaagtacagcctgtacctgagattcaacagacaggagcaggtgtgcgcccacttcgcccccagactgctgcccctggaccactacctggtgaacttcacctgcctgagacccagccccgaggaggccgtggcccaggccgagagcgaggtgggcagacccgaggaggaggaggccgaggccgccgccggcctggagctgtgcagcggcagcggccccttcaccttcctgcacttcgacaagaacttcgtgcagctgtgcctgagcgccgagcccagcgaggcccccagactgctggcccccgccgccctggccttcagattcgtggaggtgctgctgatcaacaacaacaacagcagccagttcacctgcggcgtgctgtgcagatggagcgaggagtgcggcagagccgccggcagagcctgcggcttcgcccagcccggctgcagctgccccggcgaggccggcgccggcagcaccaccaccaccagccccggcccccccgccgcccacaccctgagcaacgccctggtgcccggcggccccgccccccccgccgaggccgacctgcacagcggcagcagcaacgacctgttcaccaccgagatgagatacggcgaggagcccgaggaggagcccaaggtgaagacccagtggcccagaagcgccgacgagcccggcctgtacatggcccagaccggcgaccccgccgccgaggagtggagcccctggagcgtgtgcagcctgacctgcggccagggcctgcaggtgagaaccagaagctgcgtgagcagcccctacggcaccctgtgcagcggccccctgagagagaccagaccctgcaacaacagcgccacctgccccgtgcacggcgtgtgggaggagtggggcagctggagcctgtgcagcagaagctgcggcagaggcagcagaagcagaatgagaacctgcgtgcccccccagcacggcggcaaggcctgcgagggccccgagctgcagaccaagctgtgcagcatggccgcctgccccgtggagggccagtggctggagtggggcccctggggcccctgcagcaccagctgcgccaacggcacccagcagagaagcagaaagtgcagcgtggccggccccgcctgggccacctgcaccggcgccctgaccgacaccagagagtgcagcaacctggagtgccccgccaccgacagcaagtggggcccctggaacgcctggagcctgtgcagcaagacctgcgacaccggctggcagagaagattcagaatgtgccaggccaccggcacccagggctacccctgcgagggcaccggcgaggaggtgaagccctgcagcgagaagagatgccccgccttccacgagatgtgcagagacgagtacgtgatgctgatgacctggaagaaggccgccgccggcgagatcatctacaacaagtgcccccccaacgccagcggcagcgccagcagaagatgcctgctgagcgcccagggcgtggcctactggggcctgcccagcttcgccagatgcatcagccacgagtacagatacctgtacctgagcctgagagagcacctggccaagggccagagaatgctggccggcgagggcatgagccaggtggtgagaagcctgcaggagctgctggccagaagaacctactacagcggcgacctgctgttcagcgtggacatcctgagaaacgtgaccgacaccttcaagagagccacctacgtgcccagcgccgacgacgtgcagagattcttccaggtggtgagcttcatggtggacgccgagaacaaggagaagtgggacgacgcccagcaggtgagccccggcagcgtgcacctgctgagagtggtggaggacttcatccacctggtgggcgacgccctgaaggccttccagagcagcctgatcgtgaccgacaacctggtgatcagcatccagagagagcccgtgagcgccgtgagcagcgacatcaccttccccatgagaggcagaagaggcatgaaggactgggtgagacacagcgaggacagactgttcctgcccaaggaggtgctgagcctgagcagccccggcaagcccgccaccagcggcgccgccggcagccccggcagaggcagaggccccggcaccgtgccccccggccccggccacagccaccagagactgctgcccgccgaccccgacgagagcagctacttcgtgatcggcgccgtgctgtacagaaccctgggcctgatcctgcccccccccagaccccccctggccgtgaccagcagagtgatgaccgtgaccgtgagaccccccacccagccccccgccgagcccctgatcaccgtggagctgagctacatcatcaacggcaccaccgacccccactgcgccagctgggactacagcagagccgacgccagcagcggcgactgggacaccgagaactgccagaccctggagacccaggccgcccacaccagatgccagtgccagcacctgagcaccttcgccgtgctggcccagccccccaaggacctgaccctggagctggccggcagccccagcgtgcccctggtgatcggctgcgccgtgagctgcatggccctgctgaccctgctggccatctacgccgccttctggagattcatcaagagcgagagaagcatcatcctgctgaacttctgcctgagcatcctggccagcaacatcctgatcctggtgggccagagcagagtgctgagcaagggcgtgtgcaccatgaccgccgccttcctgcacttcttcttcctgagcagcttctgctgggtgctgaccgaggcctggcagagctacctggccgtgatcggcagaatgagaaccagactggtgagaaagagattcctgtgcctgggctggggcctgcccgccctggtggtggccgtgagcgtgggcttcaccagaaccaagggctacggcaccagcagctactgctggctgagcctggagggcggcctgctgtacgccttcgtgggccccgccgccgtgatcgtgctggtgaacatgctgatcggcatcatcgtgttcaacaagctgatggccagagacggcatcagcgacaagagcaagaagcagagagccggcagcgagagatgcccctgggccagcctgctgctgccctgcagcgcctgcggcgccgtgcccagccccctgctgagcagcgccagcgccagaaacgccatggccagcctgtggagcagctgcgtggtgctgcccctgctggccctgacctggatgagcgccgtgctggccatgaccgacagaagaagcgtgctgttccaggccctgttcgccgtgttcaacagcgcccagggcttcgtgatcaccgccgtgcactgcttcctgagaagagaggtgcaggacgtggtgaagtgccagatgggcgtgtgcagagccgacgagagcgaggacagccccgacagctgcaagaacggccagctgcagatcctgagcgacttcgagaaggacgtggacctggcctgccagaccgtgctgttcaaggaggtgaacacctgcaaccccagcaccatcaccggcaccctgagcagactgagcctggacgaggacgaggagcccaagagctgcctggtgggccccgagggcagcctgagcttcagccccctgcccggcaacatcctggtgcccatggccgccagccccggcctgggcgagcccccccccccccaggaggccaaccccgtgtacatgtgcggcgagggcggcctgagacagctggacctgacctggctgagacccaccgagcccggcagcgagggcgactacatggtgctgcccagaagaaccctgagcctgcagcccggcggcggcggcggcggcggcgaggacgcccccagagccagacccgagggcacccccagaagagccgccaagaccgtggcccacaccgagggctaccccagcttcctgagcgtggaccacagcggcctgggcctgggccccgcctacggcagcctgcagaacccctacggcatgaccttccagccccccccccccacccccagcgccagacaggtgcccgagcccggcgagagaagcagaaccatgcccagaaccgtgcccggcagcaccatgaagatgggcagcctggagagaaagaagctgagatacagcgacctggacttcgaggtgatgcacaccagaaagagacacagcgagctgtaccacgagctgaaccagaagttccacaccttcgacagatacagaagccagagcaccgccaagagagagaagagatggagcgtgagcagcggcggcgccgccgagagaagcgtgtgcaccgacaagcccagccccggcgagagacccagcctgagccagcacagaagacaccagagctggagcaccttcaagagcatgaccctgggcagcctgccccccaagcccagagagagactgaccctgcacagagccgccgcctgggagcccaccgagccccccgacggcgacttccagaccgaggtgtag

SEQ ID NO: 74505 - DNA, 4758 bp, synthetic construct
  misc_feature 1..4758: note = Description of Artificial Sequence: Synthetic coding sequence
  source 1..4758: mol_type = other DNA
atggagaacaccggctggatgggcaagggccacagaatgacccccgcctgccccctgctgctgagcgtgatcctgagcctgagactggccaccgccttcgaccccgcccccagcgcctgcagcgccctggccagcggcgtgctgtacggcgccttcagcctgcaggacctgttccccaccatcgccagcggctgcagctggaccctggagaaccccgaccccaccaagtacagcctgtacctgagattcaacagacaggagcaggtgtgcgcccacttcgcccccagactgctgcccctggaccactacctggtgaacttcacctgcctgagacccagccccgaggaggccgtggcccaggccgagagcgaggtgggcagacccgaggaggaggaggccgaggccgccgccggcctggagctgtgcagcggcagcggccccttcaccttcctgcacttcgacaagaacttcgtgcagctgtgcctgagcgccgagcccagcgaggcccccagactgctggcccccgccgccctggccttcagattcgtggaggtgctgctgatcaacaacaacaacagcagccagttcacctgcggcgtgctgtgcagatggagcgaggagtgcggcagagccgccggcagagcctgcggcttcgcccagcccggctgcagctgccccggcgaggccggcgccggcagcaccaccaccaccagccccggcccccccgccgcccacaccctgagcaacgccctggtgcccggcggccccgccccccccgccgaggccgacctgcacagcggcagcagcaacgacctgttcaccaccgagatgagatacggcgaggagcccgaggaggagcccaaggtgaagacccagtggcccagaagcgccgacgagcccggcctgtacatggcccagaccggcgaccccgccgccgaggagtggagcccctggagcgtgtgcagcctgacctgcggccagggcctgcaggtgagaaccagaagctgcgtgagcagcccctacggcaccctgtgcagcggccccctgagagagaccagaccctgcaacaacagcgccacctgccccgtgcacggcgtgtgggaggagtggggcagctggagcctgtgcagcagaagctgcggcagaggcagcagaagcagaatgagaacctgcgtgcccccccagcacggcggcaaggcctgcgagggccccgagctgcagaccaagctgtgcagcatggccgcctgccccgtggagggccagtggctggagtggggcccctggggcccctgcagcaccagctgcgccaacggcacccagcagagaagcagaaagtgcagcgtggccggccccgcctgggccacctgcaccggcgccctgaccgacaccagagagtgcagcaacctggagtgccccgccaccgacagcaagtggggcccctggaacgcctggagcctgtgcagcaagacctgcgacaccggctggcagagaagattcagaatgtgccaggccaccggcacccagggctacccctgcgagggcaccggcgaggaggtgaagccctgcagcgagaagagatgccccgccttccacgagatgtgcagagacgagtacgtgatgctgatgacctggaagaaggccgccgccggcgagatcatctacaacaagtgcccccccaacgccagcggcagcgccagcagaagatgcctgctgagcgcccagggcgtggcctactggggcctgcccagcttcgccagatgcatcagccacgagtacagatacctgtacctgagcctgagagagcacctggccaagggccagagaatgctggccggcgagggcatgagccaggtggtgagaagcctgcaggagctgctggccagaagaacctactacagcggcgacctgctgttcagcgtggacatcctgagaaacgtgaccgacaccttcaagagagccacctacgtgcccagcgccgacgacgtgcagagattcttccaggtggtgagcttcatggtggacgccgagaacaaggagaagtgggacgacgcccagcaggtgagccccggcagcgtgcacctgctgagagtggtggaggacttcatccacctggtgggcgacgccctgaaggccttccagagcagcctgatcgtgaccgacaacctggtgatcagcatccagagagagcccgtgagcgccgtgagcagcgacatcaccttccccatgagaggcagaagaggcatgaaggactgggtgagacacagcgaggacagactgttcctgcccaaggaggtgctgagcctgagcagccccggcaagcccgccaccagcggcgccgccggcagccccggcagaggcagaggccccggcaccgtgccccccggccccggccacagccaccagagactgctgcccgccgaccccgacgagagcagctacttcgtgatcggcgccgtgctgtacagaaccctgggcctgatcctgcccccccccagaccccccctggccgtgaccagcagagtgatgaccgtgaccgtgagaccccccacccagccccccgccgagcccctgatcaccgtggagctgagctacatcatcaacggcaccaccgacccccactgcgccagctgggactacagcagagccgacgccagcagcggcgactgggacaccgagaactgccagaccctggagacccaggccgcccacaccagatgccagtgccagcacctgagcaccttcgccgtgctggcccagccccccaaggacctgaccctggagctggccggcagccccagcgtgcccctggtgatcggctgcgccgtgagctgcatggccctgctgaccctgctggccatctacgccgccttctggagattcatcaagagcgagagaagcatcatcctgctgaacttctgcctgagcatcctggccagcaacatcctgatcctggtgggccagagcagagtgctgagcaagggcgtgtgcaccatgaccgccgccttcctgcacttcttcttcctgagcagcttctgctgggtgctgaccgaggcctggcagagctacctggccgtgatcggcagaatgagaaccagactggtgagaaagagattcctgtgcctgggctggggcctgcccgccctggtggtggccgtgagcgtgggcttcaccagaaccaagggctacggcaccagcagctactgctggctgagcctggagggcggcctgctgtacgccttcgtgggccccgccgccgtgatcgtgctggtgaacatgctgatcggcatcatcgtgttcaacaagctgatggccagagacggcatcagcgacaagagcaagaagcagagagccggcagcgagagatgcccctgggccagcctgctgctgccctgcagcgcctgcggcgccgtgcccagccccctgctgagcagcgccagcgccagaaacgccatggccagcctgtggagcagctgcgtggtgctgcccctgctggccctgacctggatgagcgccgtgctggccatgaccgacagaagaagcgtgctgttccaggccctgttcgccgtgttcaacagcgcccagggcttcgtgatcaccgccgtgcactgcttcctgagaagagaggtgcaggacgtggtgaagtgccagatgggcgtgtgcagagccgacgagagcgaggacagccccgacagctgcaagaacggccagctgcagatcctgagcgacttcgagaaggacgtggacctggcctgccagaccgtgctgttcaaggaggtgaacacctgcaaccccagcaccatcaccggcaccctgagcagactgagcctggacgaggacgaggagcccaagagctgcctggtgggccccgagggcagcctgagcttcagccccctgcccggcaacatcctggtgcccatggccgccagccccggcctgggcgagcccccccccccccaggaggccaaccccgtgtacatgtgcggcgagggcggcctgagacagctggacctgacctggctgagacccaccgagcccggcagcgagggcgactacatggtgctgcccagaagaaccctgagcctgcagcccggcggcggcggcggcggcggcgaggacgcccccagagccagacccgagggcacccccagaagagccgccaagaccgtggcccacaccgagggctaccccagcttcctgagcgtggaccacagcggcctgggcctgggccccgcctacggcagcctgcagaacccctacggcatgaccttccagccccccccccccacccccagcgccagacaggtgcccgagcccggcgagagaagcagaaccatgcccagaaccgtgcccggcagcaccatgaagatgggcagcctggagagaaagaagctgagatacagcgacctggacttcgagaaggtgatgcacaccagaaagagacacagcgagctgtaccacgagctgaaccagaagttccacaccttcgacagatacagaagccagagcaccgccaagagagagaagagatggagcgtgagcagcggcggcgccgccgagagaagcgtgtgcaccgacaagcccagccccggcgagagacccagcctgagccagcacagaagacaccagagctggagcaccttcaagagcatgaccctgggcagcctgccccccaagcccagagagagactgaccctgcacagagccgccgcctgggagcccaccgagccccccgacggcgacttccagaccgaggtgtag

SEQ ID NO: 74506 - DNA, 4665 bp, synthetic construct
  misc_feature 1..4665: note = Description of Artificial Sequence: Synthetic coding sequence
  source 1..4665: mol_type = other DNA
atgacccccgcctgccccctgctgctgagcgtgatcctgagcctgagactggccaccgccttcgaccccgcccccagcgcctgcagcgccctggccagcggcgtgctgtacggcgccttcagcctgcaggacctgttccccaccatcgccagcggctgcagctggaccctggagaaccccgaccccaccaagtacagcctgtacctgagattcaacagacaggagcaggtgtgcgcccacttcgcccccagactgctgcccctggaccactacctggtgaacttcacctgcctgagacccagccccgaggaggccgtggcccaggccgagagcgaggtgggcagacccgaggaggaggaggccgaggccgccgccggcctggagctgtgcagcggcagcggccccttcaccttcctgcacttcgacaagaacttcgtgcagctgtgcctgagcgccgagcccagcgaggcccccagactgctggcccccgccgccctggccttcagattcgtggaggtgctgctgatcaacaacaacaacagcagccagttcacctgcggcgtgctgtgcagatggagcgaggagtgcggcagagccgccggcagagcctgcggcttcgcccagcccggctgcagctgccccggcgaggccggcgccggcagcaccaccaccaccagccccggcccccccgccgcccacaccctgagcaacgccctggtgcccggcggccccgccccccccgccgaggccgacctgcacagcggcagcagcaacgacctgttcaccaccgagatgagatacggcgaggagcccgaggaggagcccaaggtgaagacccagtggcccagaagcgccgacgagcccggcctgtacatggcccagaccggcgaccccgccgccgaggagtggagcccctggagcgtgtgcagcctgacctgcggccagggcctgcaggtgagaaccagaagctgcgtgagcagcccctacggcaccctgtgcagcggccccctgagagagaccagaccctgcaacaacagcgccacctgccccgtgcacggcgtgtgggaggagtggggcagctggagcctgtgcagcagaagctgcggcagaggcagcagaagcagaatgagaacctgcgtgcccccccagcacggcggcaaggcctgcgagggccccgagctgcagaccaagctgtgcagcatggccgcctgccccgtggagggccagtggctggagtggggcccctggggcccctgcagcaccagctgcgccaacggcacccagcagagaagcagaaagtgcagcgtggccggccccgcctgggccacctgcaccggcgccctgaccgacaccagagagtgcagcaacctggagtgccccgccaccgacagcaagtggggcccctggaacgcctggagcctgtgcagcaagacctgcgacaccggctggcagagaagattcagaatgtgccaggccaccggcacccagggctacccctgcgagggcaccggcgaggaggtgaagccctgcagcgagaagagatgccccgccttccacgagatgtgcagagacgagtacgtgatgctgatgacctggaagaaggccgccgccggcgagatcatctacaacaagtgcccccccaacgccagcggcagcgccagcagaagatgcctgctgagcgcccagggcgtggcctactggggcctgcccagcttcgccagatgcatcagccacgagtacagatacctgtacctgagcctgagagagcacctggccaagggccagagaatgctggccggcgagggcatgagccaggtggtgagaagcctgcaggagctgctggccagaagaacctactacagcggcgacctgctgttcagcgtggacatcctgagaaacgtgaccgacaccttcaagagagccacctacgtgcccagcgccgacgacgtgcagagattcttccaggtggtgagcttcatggtggacgccgagaacaaggagaagtgggacgacgcccagcaggtgagccccggcagcgtgcacctgctgagagtggtggaggacttcatccacctggtgggcgacgccctgaaggccttccagagcagcctgatcgtgaccgacaacctggtgatcagcatccagagagagcccgtgagcgccgtgagcagcgacatcaccttccccatgagaggcagaagaggcatgaaggactgggtgagacacagcgaggacagactgttcctgcccaaggaggtgctgagcctgagcagccccggcaagcccgccaccagcggcgccgccggcagccccggcagaggcagaggccccggcaccgtgccccccggccccggccacagccaccagagactgctgcccgccgaccccgacgagagcagctacttcgtgatcggcgccgtgctgtacagaaccctgggcctgatcctgcccccccccagaccccccctggccgtgaccagcagagtgatgaccgtgaccgtgagaccccccacccagccccccgccgagcccctgatcaccgtggagctgagctacatcatcaacggcaccaccgacccccactgcgccagctgggactacagcagagccgacgccagcagcggcgactgggacaccgagaactgccagaccctggagacccaggccgcccacaccagatgccagtgccagcacctgagcaccttcgccgtgctggcccagccccccaaggacctgaccctggagctggccggcagccccagcgtgcccctggtgatcggctgcgccgtgagctgcatggccctgctgaccctgctggccatctacgccgccttctggagattcatcaagagcgagagaagcatcatcctgctgaacttctgcctgagcatcctggccagcaacatcctgatcctggtgggccagagcagagtgctgagcaagggcgtgtgcaccatgaccgccgccttcctgcacttcttcttcctgagcagcttctgctgggtgctgaccgaggcctggcagagctacctggccgtgatcggcagaatgagaaccagactggtgagaaagagattcctgtgcctgggctggggcctgcccgccctggtggtggccgtgagcgtgggcttcaccagaaccaagggctacggcaccagcagctactgctggctgagcctggagggcggcctgctgtacgccttcgtgggccccgccgccgtgatcgtgctggtgaacatgctgatcggcatcatcgtgttcaacaagctgatggccagagacggcatcagcgacaagagcaagaagcagagagccggcagcgagagatgcccctgggccagcctgctgctgccctgcagcgcctgcggcgccgtgcccagccccctgctgagcagcgccagcgccagaaacgccatggccagcctgtggagcagctgcgtggtgctgcccctgctggccctgacctggatgagcgccgtgctggccatgaccgacagaagaagcgtgctgttccaggccctgttcgccgtgttcaacagcgcccagggcttcgtgatcaccgccgtgcactgcttcctgagaagagaggtgcaggacgtggtgaagtgccagatgggcgtgtgcagagccgacgagagcgaggacagccccgacagctgcaagaacggccagctgcagatcctgagcgacttcgagaaggacgtggacctggcctgccagaccgtgctgttcaaggaggtgaacacctgcaaccccagcaccatcaccggcaccctgagcagactgagcctggacgaggacgaggagcccaagagctgcctggtgggccccgagggcagcctgagcttcagccccctgcccggcaacatcctggtgcccatggccgccagccccggcctgggcgagcccccccccccccaggaggccaaccccgtgtacatgtgcggcgagggcggcctgagacagctggacctgacctggctgagacccaccgagcccggcagcgagggcgactacatggtgctgcccagaagaaccctgagcctgcagcccggcggcggcggcggcggcggcgaggacgcccccagagccagacccgagggcacccccagaagagccgccaagaccgtggcccacaccgagggctaccccagcttcctgagcgtggaccacagcggcctgggcctgggccccgcctacggcagcctgcagaacccctacggcatgaccttccagccccccccccccacccccagcgccagacaggtgcccgagcccggcgagagaagcagaaccatgcccagaaccgtgcccggcagcaccatgaagatgggcagcctggagagaaagaagctgagatacagcgacctggacttcgagaaggtgatgcacaccagaaagagacacagcgagctgtaccacgagctgaaccagaagttccacaccttcgacagatacagaagccagagcaccgccaaggacaagcccagccccggcgagagacccagcctgagccagcacagaagacaccagagctggagcaccttcaagagcatgaccctgggcagcctgccccccaagcccagagagagactgaccctgcacagagccgccgcctgggagcccaccgagccccccgacggcgacttccagaccgaggtgtag

SEQ ID NO: 74507 - DNA, 4401 bp, synthetic construct
  misc_feature 1..4401: note = Description of Artificial Sequence: Synthetic coding sequence
  source 1..4401: mol_type = other DNA
atgacccccgcctgccccctgctgctgagcgtgatcctgagcctgagactggccaccgccttcgaccccgcccccagcgcctgcagcgccctggccagcggcgtgctgtacggcgccttcagcctgcaggacctgttccccaccatcgccagcggctgcagctggaccctggagaaccccgaccccaccaagtacagcctgtacctgagattcaacagacaggagcaggtgtgcgcccacttcgcccccagactgctgcccctggaccactacctggtgaacttcacctgcctgagacccagccccgaggaggccgtggcccaggccgagagcgaggtgggcagacccgaggaggaggaggccgaggccgccgccggcctggagctgtgcagcggcagcggccccttcaccttcctgcacttcgacaagaacttcgtgcagctgtgcctgagcgccgagcccagcgaggcccccagactgctggcccccgccgccctggccttcagattcgtggaggtgctgctgatcaacaacaacaacagcagccagttcacctgcggcgtgctgtgcagatggagcgaggagtgcggcagagccgccggcagagcctgcggcttcgcccagcccggctgcagctgccccggcgaggccggcgccggcagcaccaccaccaccagccccggcccccccgccgcccacaccctgagcaacgccctggtgcccggcggccccgccccccccgccgaggccgacctgcacagcggcagcagcaacgacctgttcaccaccgagatgagatacggcgaggagcccgaggaggagcccaaggtgaagacccagtggcccagaagcgccgacgagcccggcctgtacatggcccagaccggcgaccccgccgccgaggagtggagcccctggagcgtgtgcagcctgacctgcggccagggcctgcaggtgagaaccagaagctgcgtgagcagcccctacggcaccctgtgcagcggccccctgagagagaccagaccctgcaacaacagcgccacctgccccgtggagggccagtggctggagtggggcccctggggcccctgcagcaccagctgcgccaacggcacccagcagagaagcagaaagtgcagcgtggccggccccgcctgggccacctgcaccggcgccctgaccgacaccagagagtgcagcaacctggagtgccccgccaccgacagcaagtggggcccctggaacgcctggagcctgtgcagcaagacctgcgacaccggctggcagagaagattcagaatgtgccaggccaccggcacccagggctacccctgcgagggcaccggcgaggaggtgaagccctgcagcgagaagagatgccccgccttccacgagatgtgcagagacgagtacgtgatgctgatgacctggaagaaggccgccgccggcgagatcatctacaacaagtgcccccccaacgccagcggcagcgccagcagaagatgcctgctgagcgcccagggcgtggcctactggggcctgcccagcttcgccagatgcatcagccacgagtacagatacctgtacctgagcctgagagagcacctggccaagggccagagaatgctggccggcgagggcatgagccaggtggtgagaagcctgcaggagctgctggccagaagaacctactacagcggcgacctgctgttcagcgtggacatcctgagaaacgtgaccgacaccttcaagagagccacctacgtgcccagcgccgacgacgtgcagagattcttccaggtggtgagcttcatggtggacgccgagaacaaggagaagtgggacgacgcccagcaggtgagccccggcagcgtgcacctgctgagagtggtggaggacttcatccacctggtgggcgacgccctgaaggccttccagagcagcctgatcgtgaccgacaacctggtgatcagcatccagagagagcccgtgagcgccgtgagcagcgacatcaccttccccatgagaggcagaagaggcatgaaggactgggtgagacacagcgaggacagactgttcctgcccaaggaggtgctgagcctgagcagccccggcaagcccgccaccagcggcgccgccggcagccccggcagaggcagaggccccggcaccgtgccccccggccccggccacagccaccagagactgctgcccgccgaccccgacgagagcagctacttcgtgatcggcgccgtgctgtacagaaccctgggcctgatcctgcccccccccagaccccccctggccgtgaccagcagagtgatgaccgtgaccgtgagaccccccacccagccccccgccgagcccctgatcaccgtggagctgagctacatcatcaacggcaccaccgacccccactgcgccagctgggactacagcagagccgacgccagcagcggcgactgggacaccgagaactgccagaccctggagacccaggccgcccacaccagatgccagtgccagcacctgagcaccttcgccgtgctggcccagccccccaaggacctgaccctggagctggccggcagccccagcgtgcccctggtgatcggctgcgccgtgagctgcatggccctgctgaccctgctggccatctacgccgccttctggagattcatcaagagcgagagaagcatcatcctgctgaacttctgcctgagcatcctggccagcaacatcctgatcctggtgggccagagcagagtgctgagcaagggcgtgtgcaccatgaccgccgccttcctgcacttcttcttcctgagcagcttctgctgggtgctgaccgaggcctggcagagctacctggccgtgatcggcagaatgagaaccagactggtgagaaagagattcctgtgcctgggctggggcctgcccgccctggtggtggccgtgagcgtgggcttcaccagaaccaagggctacggcaccagcagctactgctggctgagcctggagggcggcctgctgtacgccttcgtgggccccgccgccgtgatcgtgctggtgaacatgctgatcggcatcatcgtgttcaacaagctgatggccagagacggcatcagcgacaagagcaagaagcagagagccggcgccagcctgtggagcagctgcgtggtgctgcccctgctggccctgacctggatgagcgccgtgctggccatgaccgacagaagaagcgtgctgttccaggccctgttcgccgtgttcaacagcgcccagggcttcgtgatcaccgccgtgcactgcttcctgagaagagaggtgcaggacgtggtgaagtgccagatgggcgtgtgcagagccgacgagagcgaggacagccccgacagctgcaagaacggccagctgcagatcctgagcgacttcgagaaggacgtggacctggcctgccagaccgtgctgttcaaggaggtgaacacctgcaaccccagcaccatcaccggcaccctgagcagactgagcctggacgaggacgaggagcccaagagctgcctggtgggccccgagggcagcctgagcttcagccccctgcccggcaacatcctggtgcccatggccgccagccccggcctgggcgagcccccccccccccaggaggccaaccccgtgtacatgtgcggcgagggcggcctgagacagctggacctgacctggctgagacccaccgagcccggcagcgagggcgactacatggtgctgcccagaagaaccctgagcctgcagcccggcggcggcggcggcggcggcgaggacgcccccagagccagacccgagggcacccccagaagagccgccaagaccgtggcccacaccgagggctaccccagcttcctgagcgtggaccacagcggcctgggcctgggccccgcctacggcagcctgcagaacccctacggcatgaccttccagccccccccccccacccccagcgccagacaggtgcccgagcccggcgagagaagcagaaccatgcccagaaccgtgcccggcagcaccatgaagatgggcagcctggagagaaagaagctgagatacagcgacctggacttcgagaaggtgatgcacaccagaaagagacacagcgagctgtaccacgagctgaaccagaagttccacaccttcgacagatacagaagccagagcaccgccaaggacaagcccagccccggcgagagacccagcctgagccagcacagaagacaccagagctggagcaccttcaagagcatgaccctgggcagcctgccccccaagcccagagagagactgaccctgcacagagccgccgcctgggagcccaccgagccccccgacggcgacttccagaccgaggtgtag

SEQ ID NO: 74508 - DNA, 4500 bp, synthetic construct
  misc_feature 1..4500: note = Description of Artificial Sequence: Synthetic coding sequence
  source 1..4500: mol_type = other DNA
atgacccccgcctgccccctgctgctgagcgtgatcctgagcctgagactggccaccgccttcgaccccgcccccagcgcctgcagcgccctggccagcggcgtgctgtacggcgccttcagcctgcaggacctgttccccaccatcgccagcggctgcagctggaccctggagaaccccgaccccaccaagtacagcctgtacctgagattcaacagacaggagcaggtgtgcgcccacttcgcccccagactgctgcccctggaccactacctggtgaacttcacctgcctgagacccagccccgaggaggccgtggcccaggccgagagcgaggtgggcagacccgaggaggaggaggccgaggccgccgccggcctggagctgtgcagcggcagcggccccttcaccttcctgcacttcgacaagaacttcgtgcagctgtgcctgagcgccgagcccagcgaggcccccagactgctggcccccgccgccctggccttcagattcgtggaggtgctgctgatcaacaacaacaacagcagccagttcacctgcggcgtgctgtgcagatggagcgaggagtgcggcagagccgccggcagagcctgcggcttcgcccagcccggctgcagctgccccggcgaggccggcgccggcagcaccaccaccaccagccccggcccccccgccgcccacaccctgagcaacgccctggtgcccggcggccccgccccccccgccgaggccgacctgcacagcggcagcagcaacgacctgttcaccaccgagatgagatacggcgaggagcccgaggaggagcccaaggtgaagacccagtggcccagaagcgccgacgagcccggcctgtacatggcccagaccgtgcacggcgtgtgggaggagtggggcagctggagcctgtgcagcagaagctgcggcagaggcagcagaagcagaatgagaacctgcgtgcccccccagcacggcggcaaggcctgcgagggccccgagctgcagaccaagctgtgcagcatggccgcctgccccgtggagggccagtggctggagtggggcccctggggcccctgcagcaccagctgcgccaacggcacccagcagagaagcagaaagtgcagcgtggccggccccgcctgggccacctgcaccggcgccctgaccgacaccagagagtgcagcaacctggagtgccccgccaccgacagcaagtggggcccctggaacgcctggagcctgtgcagcaagacctgcgacaccggctggcagagaagattcagaatgtgccaggccaccggcacccagggctacccctgcgagggcaccggcgaggaggtgaagccctgcagcgagaagagatgccccgccttccacgagatgtgcagagacgagtacgtgatgctgatgacctggaagaaggccgccgccggcgagatcatctacaacaagtgcccccccaacgccagcggcagcgccagcagaagatgcctgctgagcgcccagggcgtggcctactggggcctgcccagcttcgccagatgcatcagccacgagtacagatacctgtacctgagcctgagagagcacctggccaagggccagagaatgctggccggcgagggcatgagccaggtggtgagaagcctgcaggagctgctggccagaagaacctactacagcggcgacctgctgttcagcgtggacatcctgagaaacgtgaccgacaccttcaagagagccacctacgtgcccagcgccgacgacgtgcagagattcttccaggtggtgagcttcatggtggacgccgagaacaaggagaagtgggacgacgcccagcaggtgagccccggcagcgtgcacctgctgagagtggtggaggacttcatccacctggtgggcgacgccctgaaggccttccagagcagcctgatcgtgaccgacaacctggtgatcagcatccagagagagcccgtgagcgccgtgagcagcgacatcaccttccccatgagaggcagaagaggcatgaaggactgggtgagacacagcgaggacagactgttcctgcccaaggaggtgctgagcctgagcagccccggcaagcccgccaccagcggcgccgccggcagccccggcagaggcagaggccccggcaccgtgccccccggccccggccacagccaccagagactgctgcccgccgaccccgacgagagcagctacttcgtgatcggcgccgtgctgtacagaaccctgggcctgatcctgcccccccccagaccccccctggccgtgaccagcagagtgatgaccgtgaccgtgagaccccccacccagccccccgccgagcccctgatcaccgtggagctgagctacatcatcaacggcaccaccgacccccactgcgccagctgggactacagcagagccgacgccagcagcggcgactgggacaccgagaactgccagaccctggagacccaggccgcccacaccagatgccagtgccagcacctgagcaccttcgccgtgctggcccagccccccaaggacctgaccctggagctggccggcagccccagcgtgcccctggtgatcggctgcgccgtgagctgcatggccctgctgaccctgctggccatctacgccgccttctggagattcatcaagagcgagagaagcatcatcctgctgaacttctgcctgagcatcctggccagcaacatcctgatcctggtgggccagagcagagtgctgagcaagggcgtgtgcaccatgaccgccgccttcctgcacttcttcttcctgagcagcttctgctgggtgctgaccgaggcctggcagagctacctggccgtgatcggcagaatgagaaccagactggtgagaaagagattcctgtgcctgggctggggcctgcccgccctggtggtggccgtgagcgtgggcttcaccagaaccaagggctacggcaccagcagctactgctggctgagcctggagggcggcctgctgtacgccttcgtgggccccgccgccgtgatcgtgctggtgaacatgctgatcggcatcatcgtgttcaacaagctgatggccagagacggcatcagcgacaagagcaagaagcagagagccggcagcgagagatgcccctgggccagcctgctgctgccctgcagcgcctgcggcgccgtgcccagccccctgctgagcagcgccagcgccagaaacgccatggccagcctgtggagcagctgcgtggtgctgcccctgctggccctgacctggatgagcgccgtgctggccatgaccgacagaagaagcgtgctgttccaggccctgttcgccgtgttcaacagcgcccagggcttcgtgatcaccgccgtgcactgcttcctgagaagagaggtgcaggacgtggtgaagtgccagatgggcgtgtgcagagccgacgagagcgaggacagccccgacagctgcaagaacggccagctgcagatcctgagcgacttcgagaaggacgtggacctggcctgccagaccgtgctgttcaaggaggtgaacacctgcaaccccagcaccatcaccggcaccctgagcagactgagcctggacgaggacgaggagcccaagagctgcctggtgggccccgagggcagcctgagcttcagccccctgcccggcaacatcctggtgcccatggccgccagccccggcctgggcgagcccccccccccccaggaggccaaccccgtgtacatgtgcggcgagggcggcctgagacagctggacctgacctggctgagacccaccgagcccggcagcgagggcgactacatggtgctgcccagaagaaccctgagcctgcagcccggcggcggcggcggcggcggcgaggacgcccccagagccagacccgagggcacccccagaagagccgccaagaccgtggcccacaccgagggctaccccagcttcctgagcgtggaccacagcggcctgggcctgggccccgcctacggcagcctgcagaacccctacggcatgaccttccagccccccccccccacccccagcgccagacaggtgcccgagcccggcgagagaagcagaaccatgcccagaaccgtgcccggcagcaccatgaagatgggcagcctggagagaaagaagctgagatacagcgacctggacttcgagaaggtgatgcacaccagaaagagacacagcgagctgtaccacgagctgaaccagaagttccacaccttcgacagatacagaagccagagcaccgccaaggacaagcccagccccggcgagagacccagcctgagccagcacagaagacaccagagctggagcaccttcaagagcatgaccctgggcagcctgccccccaagcccagagagagactgaccctgcacagagccgccgcctgggagcccaccgagccccccgacggcgacttccagaccgaggtgtag

SEQ ID NO: 74509 - DNA, 4503 bp, synthetic construct
  misc_feature 1..4503: note = Description of Artificial Sequence: Synthetic coding sequence
  source 1..4503: mol_type = other DNA
atgctgagcctgagaggccccgacacccacggcaagggccacagaatgacccccgcctgccccctgctgctgagcgtgatcctgagcctgagactggccaccgccttcgaccccgcccccagcgcctgcagcgccctggccagcggcgtgctgtacggcgccttcagcctgcaggacctgttccccaccatcgccagcggctgcagctggaccctggagaaccccgaccccaccaagtacagcctgtacctgagattcaacagacaggagcaggtgtgcgcccacttcgcccccagactgctgcccctggaccactacctggtgaacttcacctgcctgagacccagccccgaggaggccgtggcccaggccgagagcgaggtgggcagacccgaggaggaggaggccgaggccgccgccggcctggagctgtgcagcggcagcggccccttcaccttcctgcacttcgacaagaacttcgtgcagctgtgcctgagcgccgagcccagcgaggcccccagactgctggcccccgccgccctggccttcagattcgtggaggtgctgctgatcaacaacaacaacagcagccagttcacctgcggcgtgctgtgcagatggagcgaggagtgcggcagagccgccggcagagcctgcggcttcgcccagcccggctgcagctgccccggcgaggccggcgccggcagcaccaccaccaccagccccggcccccccgccgcccacaccctgagcaacgccctggtgcccggcggccccgccccccccgccgaggccgacctgcacagcggcagcagcaacgacctgttcaccaccgagatgagatacggcgaggagcccgaggaggagcccaaggtgaagacccagtggcccagaagcgccgacgagcccggcctgtacatggcccagaccgtgcacggcgtgtgggaggagtggggcagctggagcctgtgcagcagaagctgcggcagaggcagcagaagcagaatgagaacctgcgtgcccccccagcacggcggcaaggcctgcgagggccccgagctgcagaccaagctgtgcagcatggccgcctgccccgtggagggccagtggctggagtggggcccctggggcccctgcagcaccagctgcgccaacggcacccagcagagaagcagaaagtgcagcgtggccggccccgcctgggccacctgcaccggcgccctgaccgacaccagagagtgcagcaacctggagtgccccgccaccgacagcaagtggggcccctggaacgcctggagcctgtgcagcaagacctgcgacaccggctggcagagaagattcagaatgtgccaggccaccggcacccagggctacccctgcgagggcaccggcgaggaggtgaagccctgcagcgagaagagatgccccgccttccacgagatgtgcagagacgagtacgtgatgctgatgacctggaagaaggccgccgccggcgagatcatctacaacaagtgcccccccaacgccagcggcagcgccagcagaagatgcctgctgagcgcccagggcgtggcctactggggcctgcccagcttcgccagatgcatcagccacgagtacagatacctgtacctgagcctgagagagcacctggccaagggccagagaatgctggccggcgagggcatgagccaggtggtgagaagcctgcaggagctgctggccagaagaacctactacagcggcgacctgctgttcagcgtggacatcctgagaaacgtgaccgacaccttcaagagagccacctacgtgcccagcgccgacgacgtgcagagattcttccaggtggtgagcttcatggtggacgccgagaacaaggagaagtgggacgacgcccagcaggtgagccccggcagcgtgcacctgctgagagtggtggaggacttcatccacctggtgggcgacgccctgaaggccttccagagcagcctgatcgtgaccgacaacctggtgatcagcatccagagagagcccgtgagcgccgtgagcagcgacatcaccttccccatgagaggcagaagaggcatgaaggactgggtgagacacagcgaggacagactgttcctgcccaaggaggtgctgagcctgagcagccccggcaagcccgccaccagcggcgccgccggcagccccggcagaggcagaggccccggcaccgtgccccccggccccggccacagccaccagagactgctgcccgccgaccccgacgagagcagctacttcgtgatcggcgccgtgctgtacagaaccctgggcctgatcctgcccccccccagaccccccctggccgtgaccagcagagtgatgaccgtgaccgtgagaccccccacccagccccccgccgagcccctgatcaccgtggagctgagctacatcatcaacggcaccaccgacccccactgcgccagctgggactacagcagagccgacgccagcagcggcgactgggacaccgagaactgccagaccctggagacccaggccgcccacaccagatgccagtgccagcacctgagcaccttcgccgtgctggcccagccccccaaggacctgaccctggagctggccggcagccccagcgtgcccctggtgatcggctgcgccgtgagctgcatggccctgctgaccctgctggccatctacgccgccttctggagattcatcaagagcgagagaagcatcatcctgctgaacttctgcctgagcatcctggccagcaacatcctgatcctggtgggccagagcagagtgctgagcaagggcgtgtgcaccatgaccgccgccttcctgcacttcttcttcctgagcagcttctgctgggtgctgaccgaggcctggcagagctacctggccgtgatcggcagaatgagaaccagactggtgagaaagagattcctgtgcctgggctggggcctgcccgccctggtggtggccgtgagcgtgggcttcaccagaaccaagggctacggcaccagcagctactgctggctgagcctggagggcggcctgctgtacgccttcgtgggccccgccgccgtgatcgtgctggtgaacatgctgatcggcatcatcgtgttcaacaagctgatggccagagacggcatcagcgacaagagcaagaagcagagagccggcgccagcctgtggagcagctgcgtggtgctgcccctgctggccctgacctggatgagcgccgtgctggccatgaccgacagaagaagcgtgctgttccaggccctgttcgccgtgttcaacagcgcccagggcttcgtgatcaccgccgtgcactgcttcctgagaagagaggtgcaggacgtggtgaagtgccagatgggcgtgtgcagagccgacgagagcgaggacagccccgacagctgcaagaacggccagctgcagatcctgagcgacttcgagaaggacgtggacctggcctgccagaccgtgctgttcaaggaggtgaacacctgcaaccccagcaccatcaccggcaccctgagcagactgagcctggacgaggacgaggagcccaagagctgcctggtgggccccgagggcagcctgagcttcagccccctgcccggcaacatcctggtgcccatggccgccagccccggcctgggcgagcccccccccccccaggaggccaaccccgtgtacatgtgcggcgagggcggcctgagacagctggacctgacctggctgagacccaccgagcccggcagcgagggcgactacatggtgctgcccagaagaaccctgagcctgcagcccggcggcggcggcggcggcggcgaggacgcccccagagccagacccgagggcacccccagaagagccgccaagaccgtggcccacaccgagggctaccccagcttcctgagcgtggaccacagcggcctgggcctgggccccgcctacggcagcctgcagaacccctacggcatgaccttccagccccccccccccacccccagcgccagacaggtgcccgagcccggcgagagaagcagaaccatgcccagaaccgtgcccggcagcaccatgaagatgggcagcctggagagaaagaagctgagatacagcgacctggacttcgagaaggtgatgcacaccagaaagagacacagcgagctgtaccacgagctgaaccagaagttccacaccttcgacagatacagaagccagagcaccgccaagagagagaagagatggagcgtgagcagcggcggcgccgccgagagaagcgtgtgcaccgacaagcccagccccggcgagagacccagcctgagccagcacagaagacaccagagctggagcaccttcaagagcatgaccctgggcagcctgccccccaagcccagagagagactgaccctgcacagagccgccgcctgggagcccaccgagccccccgacggcgacttccagaccgaggtgtag

SEQ ID NO: 74510 - DNA, 2544 bp, synthetic construct
  misc_feature 1..2544: note = Description of Artificial Sequence: Synthetic coding sequence
  source 1..2544: mol_type = other DNA
ggcaagggccacagaatgacccccgcctgccccctgctgctgagcgtgatcctgagcctgagactggccaccgccttcgaccccgcccccagcgcctgcagcgccctggccagcggcgtgctgtacggcgccttcagcctgcaggacctgttccccaccatcgccagcggctgcagctggaccctggagaaccccgaccccaccaagtacagcctgtacctgagattcaacagacaggagcaggtgtgcgcccacttcgcccccagactgctgcccctggaccactacctggtgaacttcacctgcctgagacccagccccgaggaggccgtggcccaggccgagagcgaggtgggcagacccgaggaggaggaggccgaggccgccgccggcctggagctgtgcagcggcagcggccccttcaccttcctgcacttcgacaagaacttcgtgcagctgtgcctgagcgccgagcccagcgaggcccccagactgctggcccccgccgccctggccttcagattcgtggaggtgctgctgatcaacaacaacaacagcagccagttcacctgcggcgtgctgtgcagatggagcgaggagtgcggcagagccgccggcagagcctgcggcttcgcccagcccggctgcagctgccccggcgaggccggcgccggcagcaccaccaccaccagccccggcccccccgccgcccacaccctgagcaacgccctggtgcccggcggccccgccccccccgccgaggccgacctgcacagcggcagcagcaacgacctgttcaccaccgagatgagatacggcgaggagcccgaggaggagcccaaggtgaagacccagtggcccagaagcgccgacgagcccggcctgtacatggcccagaccggcgaccccgccgccgaggagtggagcccctggagcgtgtgcagcctgacctgcggccagggcctgcaggtgagaaccagaagctgcgtgagcagcccctacggcaccctgtgcagcggccccctgagagagaccagaccctgcaacaacagcgccacctgccccgtggagggccagtggctggagtggggcccctggggcccctgcagcaccagctgcgccaacggcacccagcagagaagcagaaagtgcagcgtggccggccccgcctgggccacctgcaccggcgccctgaccgacaccagagagtgcagcaacctggagtgccccgccaccgacagcaagtggggcccctggaacgcctggagcctgtgcagcaagacctgcgacaccggctggcagagaagattcagaatgtgccaggccaccggcacccagggctacccctgcgagggcaccggcgaggaggtgaagccctgcagcgagaagagatgccccgccttccacgagatgtgcagagacgagtacgtgatgctgatgacctggaagaaggccgccgccggcgagatcatctacaacaagtgcccccccaacgccagcggcagcgccagcagaagatgcctgctgagcgcccagggcgtggcctactggggcctgcccagcttcgccagatgcatcagccacgagtacagatacctgtacctgagcctgagagagcacctggccaagggccagagaatgctggccggcgagggcatgagccaggtggtgagaagcctgcaggagctgctggccagaagaacctactacagcggcgacctgctgttcagcgtggacatcctgagaaacgtgaccgacaccttcaagagagccacctacgtgcccagcgccgacgacgtgcagagattcttccaggtggtgagcttcatggtggacgccgagaacaaggagaagtgggacgacgcccagcaggtgagccccggcagcgtgcacctgctgagagtggtggaggacttcatccacctggtgggcgacgccctgaaggccttccagagcagcctgatcgtgaccgacaacctggtgatcagcatccagagagagcccgtgagcgccgtgagcagcgacatcaccttccccatgagaggcagaagaggcatgaaggactgggtgagacacagcgaggacagactgttcctgcccaaggaggtgctgagcctgagcagccccggcaagcccgccaccagcggcgccgccggcagccccggcagaggcagaggccccggcaccgtgccccccggccccggccacagccaccagagactgctgcccgccgaccccgacgagagcagctacttcgtgatcggcgccgtgctgtacagaaccctgggcctgatcctgcccccccccagaccccccctggccgtgaccagcagagtgatgaccgtgaccgtgagaccccccacccagccccccgccgagcccctgatcaccgtggagctgagctacatcatcaacggcaccaccgacccccactgcgccagctgggactacagcagagccgacgccagcagcggcgactgggacaccgagaactgccagaccctggagacccaggccgcccacaccagatgccagtgccagtag

SEQ ID NO: 74511 - skipped

SEQ ID NO: 74512 - DNA, 3528 bp, synthetic construct
  misc_feature 1..3528: note = Description of Artificial Sequence: Synthetic coding sequence
  source 1..3528: mol_type = other DNA
atggcccagaccgtgcacggcgtgtgggaggagtggggcagctggagcctgtgcagcagaagctgcggcagaggcagcagaagcagaatgagaacctgcgtgcccccccagcacggcggcaaggcctgcgagggccccgagctgcagaccaagctgtgcagcatggccgcctgccccgtggagggccagtggctggagtggggcccctggggcccctgcagcaccagctgcgccaacggcacccagcagagaagcagaaagtgcagcgtggccggccccgcctgggccacctgcaccggcgccctgaccgacaccagagagtgcagcaacctggagtgccccgccaccgacagcaagtggggcccctggaacgcctggagcctgtgcagcaagacctgcgacaccggctggcagagaagattcagaatgtgccaggccaccggcacccagggctacccctgcgagggcaccggcgaggaggtgaagccctgcagcgagaagagatgccccgccttccacgagatgtgcagagacgagtacgtgatgctgatgacctggaagaaggccgccgccggcgagatcatctacaacaagtgcccccccaacgccagcggcagcgccagcagaagatgcctgctgagcgcccagggcgtggcctactggggcctgcccagcttcgccagatgcatcagccacgagtacagatacctgtacctgagcctgagagagcacctggccaagggccagagaatgctggccggcgagggcatgagccaggtggtgagaagcctgcaggagctgctggccagaagaacctactacagcggcgacctgctgttcagcgtggacatcctgagaaacgtgaccgacaccttcaagagagccacctacgtgcccagcgccgacgacgtgcagagattcttccaggtggtgagcttcatggtggacgccgagaacaaggagaagtgggacgacgcccagcaggtgagccccggcagcgtgcacctgctgagagtggtggaggacttcatccacctggtgggcgacgccctgaaggccttccagagcagcctgatcgtgaccgacaacctggtgatcagcatccagagagagcccgtgagcgccgtgagcagcgacatcaccttccccatgagaggcagaagaggcatgaaggactgggtgagacacagcgaggacagactgttcctgcccaaggaggtgctgagcctgagcagccccggcaagcccgccaccagcggcgccgccggcagccccggcagaggcagaggccccggcaccgtgccccccggccccggccacagccaccagagactgctgcccgccgaccccgacgagagcagctacttcgtgatcggcgccgtgctgtacagaaccctgggcctgatcctgcccccccccagaccccccctggccgtgaccagcagagtgatgaccgtgaccgtgagaccccccacccagccccccgccgagcccctgatcaccgtggagctgagctacatcatcaacggcaccaccgacccccactgcgccagctgggactacagcagagccgacgccagcagcggcgactgggacaccgagaactgccagaccctggagacccaggccgcccacaccagatgccagtgccagcacctgagcaccttcgccgtgctggcccagccccccaaggacctgaccctggagctggccggcagccccagcgtgcccctggtgatcggctgcgccgtgagctgcatggccctgctgaccctgctggccatctacgccgccttctggagattcatcaagagcgagagaagcatcatcctgctgaacttctgcctgagcatcctggccagcaacatcctgatcctggtgggccagagcagagtgctgagcaagggcgtgtgcaccatgaccgccgccttcctgcacttcttcttcctgagcagcttctgctgggtgctgaccgaggcctggcagagctacctggccgtgatcggcagaatgagaaccagactggtgagaaagagattcctgtgcctgggctggggcctgcccgccctggtggtggccgtgagcgtgggcttcaccagaaccaagggctacggcaccagcagctactgctggctgagcctggagggcggcctgctgtacgccttcgtgggccccgccgccgtgatcgtgctggtgaacatgctgatcggcatcatcgtgttcaacaagctgatggccagagacggcatcagcgacaagagcaagaagcagagagccggcgccagcctgtggagcagctgcgtggtgctgcccctgctggccctgacctggatgagcgccgtgctggccatgaccgacagaagaagcgtgctgttccaggccctgttcgccgtgttcaacagcgcccagggcttcgtgatcaccgccgtgcactgcttcctgagaagagaggtgcaggacgtggtgaagtgccagatgggcgtgtgcagagccgacgagagcgaggacagccccgacagctgcaagaacggccagctgcagatcctgagcgacttcgagaaggacgtggacctggcctgccagaccgtgctgttcaaggaggtgaacacctgcaaccccagcaccatcaccggcaccctgagcagactgagcctggacgaggacgaggagcccaagagctgcctggtgggccccgagggcagcctgagcttcagccccctgcccggcaacatcctggtgcccatggccgccagccccggcctgggcgagcccccccccccccaggaggccaaccccgtgtacatgtgcggcgagggcggcctgagacagctggacctgacctggctgagacccaccgagcccggcagcgagggcgactacatggtgctgcccagaagaaccctgagcctgcagcccggcggcggcggcggcggcggcgaggacgcccccagagccagacccgagggcacccccagaagagccgccaagaccgtggcccacaccgagggctaccccagcttcctgagcgtggaccacagcggcctgggcctgggccccgcctacggcagcctgcagaacccctacggcatgaccttccagccccccccccccacccccagcgccagacaggtgcccgagcccggcgagagaagcagaaccatgcccagaaccgtgcccggcagcaccatgaagatgggcagcctggagagaaagaagctgagatacagcgacctggacttcgagaaggtgatgcacaccagaaagagacacagcgagctgtaccacgagctgaaccagaagttccacaccttcgacagatacagaagccagagcaccgccaaggacaagcccagccccggcgagagacccagcctgagccagcacagaagacaccagagctggagcaccttcaagagcatgaccctgggcagcctgccccccaagcccagagagagactgaccctgcacagagccgccgcctgggagcccaccgagccccccgacggcgacttccagaccgaggtgtag

SEQ ID NO: 74513 - DNA, 4656 bp, synthetic construct; identical to SEQ ID NO: 74503
  misc_feature 1..4656: note = Description of Artificial Sequence: Synthetic coding sequence
  source 1..4656: mol_type = other DNA

SEQ ID NO: 74514 - DNA, 2187 bp, synthetic construct
  misc_feature 1..2187: note = Description of Artificial Sequence: Synthetic coding sequence
  source 1..2187: mol_type = other DNA
atgctgctgccccagggcaaggaggccgtggagggcaagaagtgccagggcagacagagaagagccggcctgagcgaggtgtggagcagaaagctgagaaacgagagcctgggcacctggagcacccagggctgcaagaccgtgctgaccgacgccagccacaccaagtgcctgtgcgacagactgagcaccttcgccatcctggcccagcagcccagagagatcatcatggagagcagcggcacccccagcgtgaccctgatcgtgggcagcggcctgagctgcctggccctgatcaccctggccgtggtgtacgccgccctgtggagatacatcagaagcgagagaagcatcatcctgatcaacttctgcctgagcatcatcagcagcaacatcctgatcctggtgggccagacccagacccacaacaagagcatctgcaccaccaccaccgccttcctgcacttcttcttcctggccagcttctgctgggtgctgaccgaggcctggcagagctacatggccgtgaccggcaagatcagaaccagactgatcagaaagagattcctgtgcctgggctggggcctgcccgccctggtggtggccaccagcgtgggcttcaccagaaccaagggctacggcaccgaccactactgctggctgagcctggagggcggcctgctgtacgccttcgtgggccccgccgccgccgtggtgctggtgaacatggtgatcggcatcctggtgttcaacaagctggtgagcagagacggcatcctggacaagaagctgaagcacagagccggccagatgagcgagccccacagcggcctgaccctgaagtgcgccaagtgcggcgtggtgagcaccaccgccctgagcgccaccaccgccagcaacgccatggccagcctgtggagcagctgcgtggtgctgcccctgctggccctgacctggatgagcgccgtgctggccatgaccgacaagagaagcatcctgttccagatcctgttcgccgtgttcgacagcctgcagggcttcgtgatcgtgatggtgcactgcatcctgagaagagaggtgcaggacgccttcagatgcagactgagaaactgccaggaccccatcaacgccgacagcagcagcagcttccccaacggccacgcccagatcatgaccgacttcgagaaggacgtggacatcgcctgcagaagcgtgctgcacaaggacatcggcccctgcagagccgccaccatcaccggcaccctgagcagaatcagcctgaacgacgacgaggaggagaagggcaccaaccccgagggcctgagctacagcaccctgcccggcaacgtgatcagcaaggtgatcatccagcagcccaccggcctgcacatgcccatgagcatgaacgagctgagcaacccctgcctgaagaaggagaacagcgagctgagaagaaccgtgtacctgtgcaccgacgacaacctgagaggcgccgacatggacatcgtgcacccccaggagagaatgatggagagcgactacatcgtgatgcccagaagcagcgtgaacaaccagcccagcatgaaggaggagagcaagatgaacatcggcatggagaccctgccccacgagagactgctgcactacaaggtgaaccccgagttcaacatgaacccccccgtgatggaccagttcaacatgaacctggagcagcacctggccccccaggagcacatgcagaacctgcccttcgagcccagaaccgccgtgaagaacttcatggccagcgagctggacgacaacgccggcctgagcagaagcgagaccggcagcaccatcagcatgagcagcctggagagaagaaagagcagatacagcgacctggacttcgagaaggtgatgcacaccagaaagagacacatggagctgttccaggagctgaaccagaagttccagaccctggacagattcagagacatccccaacaccagcagcatggagaaccccgcccccaacaagaacccctgggacaccttcaagaaccccagcgagtacccccactacaccaccatcaacgtgctggacaccgaggccaaggacgccctggagctgagacccgccgagtgggagaagtgcctgaacctgcccctggacgtgcaggagggcgacttccagaccgaggtgtag

SEQ ID NO: 74515 - DNA, 4569 bp, synthetic construct
  misc_feature 1..4569: note = Description of Artificial Sequence: Synthetic coding sequence
  source 1..4569: mol_type = other DNA
atgaaggccgtgagaaacctgctgatctacatcttcagcacctacctgctggtgatgttcggcttcaacgccgcccaggacttctggtgcagcaccctggtgaagggcgtgatctacggcagctacagcgtgagcgagatgttccccaagaacttcaccaactgcacctggaccctggagaaccccgaccccaccaagtacagcatctacctgaagttcagcaagaaggacctgagctgcagcaacttcagcctgctggcctaccagttcgaccacttcagccacgagaagatcaaggacctgctgagaaagaaccacagcatcatgcagctgtgcaacagcaagaacgccttcgtgttcctgcagtacgacaagaacttcatccagatcagaagagtgttccccaccaacttccccggcctgcagaagaagggcgaggaggaccagaagagcttcttcgagttcctggtgctgaacaaggtgagccccagccagttcggctgccacgtgctgtgcacctggctggagagctgcctgaagagcgagaacggcagaaccgagagctgcggcatcatgtacaccaagtgcacctgcccccagcacctgggcgagtggggcatcgacgaccagagcctgatcctgctgaacaacgtggtgctgcccctgaacgagcagaccgagggctgcctgacccaggagctgcagaccacccaggtgtgcaacctgaccagagaggccaagagaccccccaaggaggagttcggcatgatgggcgaccacaccatcaagagccagagacccagaagcgtgcacgagaagagagtgccccaggagcaggccgacgccgccaagttcatggcccagaccggcgagagcggcgtggaggagtggagccagtggagcacctgcagcgtgacctgcggccagggcagccaggtgagaaccagaacctgcgtgagcccctacggcacccactgcagcggccccctgagagagagcagagtgtgcaacaacaccgccctgtgccccgtgcacggcgtgtgggaggagtggagcccctggagcctgtgcagcttcacctgcggcagaggccagagaaccagaaccagaagctgcacccccccccagtacggcggcagaccctgcgagggccccgagacccaccacaagccctgcaacatcgccctgtgccccgtggacggccagtggcaggagtggagcagctggagccagtgcagcgtgacctgcagcaacggcacccagcagagaagcagacagtgcaccgccgccgcccacggcggcagcgagtgcagaggcccctgggccgagagcagagagtgctacaaccccgagtgcaccgccaacggccagtggaaccagtggggccactggagcggctgcagcaagagctgcgacggcggctgggagagaagaatcagaacctgccagggcgccgtgatcaccggccagcagtgcgagggcaccggcgaggaggtgagaagatgcaacgagcagagatgccccgccccctacgagatctgccccgaggactacctgatgagcatggtgtggaagagaacccccgccggcgacctggccttcaaccagtgccccctgaacgccaccggcaccaccagcagaagatgcagcctgagcctgcacggcgtggccttctgggagcagcccagcttcgccagatgcatcagcaacgagtacagacacctgcagcacagcatcaaggagcacctggccaagggccagagaatgctggccggcgacggcatgagccaggtgaccaagaccctgctggacctgacccagagaaagaacttctacgccggcgacctgctgatgagcgtggagatcctgagaaacgtgaccgacaccttcaagagagccagctacatccccgccagcgacggcgtgcagaacttcttccagatcgtgagcaacctgctggacgaggagaacaaggagaagtgggaggacgcccagcagatctaccccggcagcatcgagctgatgcaggtgatcgaggacttcatccacatcgtgggcatgggcatgatggacttccagaacagctacctgatgaccggcaacgtggtggccagcatccagaagctgcccgccgccagcgtgctgaccgacatcaacttccccatgaagggcagaaagggcatggtggactgggccagaaacagcgaggacagagtggtgatccccaagagcatcttcacccccgtgagcagcaaggagctggacgagagcagcgtgttcgtgctgggcgccgtgctgtacaagaacctggacctgatcctgcccaccctgagaaactacaccgtgatcaacagcaagatcatcgtggtgaccatcagacccgagcccaagaccaccgacagcttcctggagatcgagctggcccacctggccaacggcaccctgaacccctactgcgtgctgtgggacgacagcaagaccaacgagagcctgggcacctggagcacccagggctgcaagaccgtgctgaccgacgccagccacaccaagtgcctgtgcgacagactgagcaccttcgccatcctggcccagcagcccagagagatcatcatggagagcagcggcacccccagcgtgaccctgatcgtgggcagcggcctgagctgcctggccctgatcaccctggccgtggtgtacgccgccctgtggagatacatcagaagcgagagaagcatcatcctgatcaacttctgcctgagcatcatcagcagcaacatcctgatcctggtgggccagacccagacccacaacaagagcatctgcaccaccaccaccgccttcctgcacttcttcttcctggccagcttctgctgggtgctgaccgaggcctggcagagctacatggccgtgaccggcaagatcagaaccagactgatcagaaagagattcctgtgcctgggctggggcctgcccgccctggtggtggccaccagcgtgggcttcaccagaaccaagggctacggcaccgaccactactgctggctgagcctggagggcggcctgctgtacgccttcgtgggccccgccgccgccgtggtgctggtgaacatggtgatcggcatcctggtgttcaacaagctggtgagcagagacggcatcctggacaagaagctgaagcacagagccggccagatgagcgagccccacagcggcctgaccctgaagtgcgccaagtgcggcgtggtgagcaccaccgccctgagcgccaccaccgccagcaacgccatggccagcctgtggagcagctgcgtggtgctgcccctgctggccctgacctggatgagcgccgtgctggccatgaccgacaagagaagcatcctgttccagatcctgttcgccgtgttcgacagcctgcagggcttcgtgatcgtgatggtgcactgcatcctgagaagagaggtgcaggacgccttcagatgcagactgagaaactgccaggaccccatcaacgccgacagcagcagcagcttccccaacggccacgcccagatcatgaccgacttcgagaaggacgtggacatcgcctgcagaagcgtgctgcacaaggacatcggcccctgcagagccgccaccatcaccggcaccctgagcagaatcagcctgaacgacgacgaggaggagaagggcaccaaccccgagggcctgagctacagcaccctgcccggcaacgtgatcagcaaggtgatcatccagcagcccaccggcctgcacatgcccatgagcatgaacgagctgagcaacccctgcctgaagaaggagaacagcgagctgagaagaaccgtgtacctgtgcaccgacgacaacctgagaggcgccgacatggacatcgtgcacccccaggagagaatgatggagagcgactacatcgtgatgcccagaagcagcgtgaacaaccagcccagcatgaaggaggagagcaagatgaacatcggcatggagaccctgccccacgagagactgctgcactacaaggtgaaccccgagttcaacatgaacccccccgtgatggaccagttcaacatgaacctggagcagcacctggccccccaggagcacatgcagaacctgcccttcgagcccagaaccgccgtgaagaacttcatggccagcgagctggacgacaacgccggcctgagcagaagcgagaccggcagcaccatcagcatgagcagcctggagagaagaaagagcagatacagcgacctggacttcgagaaggtgatgcacaccagaaagagacacatggagctgttccaggagctgaaccagaagttccagaccctggacagattcagagacatccccaacaccagcagcatggagaaccccgcccccaacaagaacccctgggacaccttcaagaaccccagcgagtacccccactacaccaccatcaacgtgctggacaccgaggccaaggacgccctggagctgagacccgccgagtgggagaagtgcctgaacctgcccctggacgtgcaggagggcgacttccagaccgaggtgtag

SEQ ID NO: 74516 - DNA, 1461 bp, synthetic construct
  misc_feature 1..1461: note = Description of Artificial Sequence: Synthetic coding sequence
  source 1..1461: mol_type = other DNA
atggtgatcggcatcctggtgttcaacaagctggtgagcagagacggcatcctggacaagaagctgaagcacagagccggccagatgagcgagccccacagcggcctgaccctgaagtgcgccaagtgcggcgtggtgagcaccaccgccctgagcgccaccaccgccagcaacgccatggccagcctgtggagcagctgcgtggtgctgcccctgctggccctgacctggatgagcgccgtgctggccatgaccgacaagagaagcatcctgttccagatcctgttcgccgtgttcgacagcctgcagggcttcgtgatcgtgatggtgcactgcatcctgagaagagaggtgcaggacgccttcagatgcagactgagaaactgccaggaccccatcaacgccgacagcagcagcagcttccccaacggccacgcccagatcatgaccgacttcgagaaggacgtggacatcgcctgcagaagcgtgctgcacaaggacatcggcccctgcagagccgccaccatcaccggcaccctgagcagaatcagcctgaacgacgacgaggaggagaagggcaccaaccccgagggcctgagctacagcaccctgcccggcaacgtgatcagcaaggtgatcatccagcagcccaccggcctgcacatgcccatgagcatgaacgagctgagcaacccctgcctgaagaaggagaacagcgagctgagaagaaccgtgtacctgtgcaccgacgacaacctgagaggcgccgacatggacatcgtgcacccccaggagagaatgatggagagcgactacatcgtgatgcccagaagcagcgtgaacaaccagcccagcatgaaggaggagagcaagatgaacatcggcatggagaccctgccccacgagagactgctgcactacaaggtgaaccccgagttcaacatgaacccccccgtgatggaccagttcaacatgaacctggagcagcacctggccccccaggagcacatgcagaacctgcccttcgagcccagaaccgccgtgaagaacttcatggccagcgagctggacgacaacgccggcctgagcagaagcgagaccggcagcaccatcagcatgagcagcctggagagaagaaagagcagatacagcgacctggacttcgagaaggtgatgcacaccagaaagagacacatggagctgttccaggagctgaaccagaagttccagaccctggacagattcagagacatccccaacaccagcagcatggagaaccccgcccccaacaagaacccctgggacaccttcaagaaccccagcgagtacccccactacaccaccatcaacgtgctggacaccgaggccaaggacgccctggagctgagacccgccgagtgggagaagtgcctgaacctgcccctggacgtgcaggagggcgacttccagaccgaggtgtag

SEQ ID NO: 74517 - DNA, 978 bp, synthetic construct
  misc_feature 1..978: note = Description of Artificial Sequence: Synthetic coding sequence
  source 1..978: mol_type = other DNA
atgaaggccaaggacctgatcgtgacccccgccaccatcctgaaggagaagcccgaccccaacaacctggtgttcggcaccgtgttcaccgaccacatgctgaccgtggagtggagcagcgagttcggctgggagaagccccacatcaagcccctgcagaacctgagcctgcaccccggcagcagcgccctgcactacgccgtggaggtgttcgacaaggaggagctgctggagtgcatccagcagctggtgaagctggaccaggagtgggtgccctacagcaccagcgccagcctgtacatcagacccaccttcatcggcaccgagcccagcctgggcgtgaagaagcccaccaaggccctgctgttcgtgctgctgagccccgtgggcccctacttcagcagcggcaccttcaaccccgtgagcctgtgggccaaccccaagtacgtgagagcctggaagggcggcaccggcgactgcaagatgggcggcaactacggcagcagcctgttcgcccagtgcgaggccgtggacaacggctgccagcaggtgctgtggctgtacggcgaggaccaccagatcaccgaggtgggcaccatgaacctgttcctgtactggatcaacgaggacggcgaggaggagctggccaccccccccctggacggcatcatcctgcccggcgtgaccagaagatgcatcctggacctggcccaccagtggggcgagttcaaggtgagcgagagatacctgaccatggacgacctgaccaccgccctggagggcaacagagtgagagagatgttcggcagcggcaccgcctgcgtggtgtgccccgtgagcgacatcctgtacaagggcgagaccatccacatccccaccatggagaacggccccaagctggccagcagaatcctgagcaagctgaccgacatccagtacggcagagaggagagcgactggaccatcgtgctgagctag

SEQ ID NO: 74518 - DNA, 1158 bp, synthetic construct
  misc_feature 1..1158: note = Description of Artificial Sequence: Synthetic coding sequence
  source 1..1158: mol_type = other DNA
atggactgcagcaacggctgcagcgccgagtgcaccggcgagggcggcagcaaggaggtggtgggcaccttcaaggccaaggacctgatcgtgacccccgccaccatcctgaaggagaagcccgaccccaacaacctggtgttcggcaccgtgttcaccgaccacatgctgaccgtggagtggagcagcgagttcggctgggagaagccccacatcaagcccctgcagaacctgagcctgcaccccggcagcagcgccctgcactacgccgtggagctgttcgagggcctgaaggccttcagaggcgtggacaacaagatcagactgttccagcccaacctgaacatggacagaatgtacagaagcgccgtgagagccaccctgcccgtgttcgacaaggaggagctgctggagtgcatccagcagctggtgaagctggaccaggagtgggtgccctacagcaccagcgccagcctgtacatcagacccaccttcatcggcaccgagcccagcctgggcgtgaagaagcccaccaaggccctgctgttcgtgctgctgagccccgtgggcccctacttcagcagcggcaccttcaaccccgtgagcctgtgggccaaccccaagtacgtgagagcctggaagggcggcaccggcgactgcaagatgggcggcaactacggcagcagcctgttcgcccagtgcgaggccgtggacaacggctgccagcaggtgctgtggctgtacggcgaggaccaccagatcaccgaggtgggcaccatgaacctgttcctgtactggatcaacgaggacggcgaggaggagctggccaccccccccctggacggcatcatcctgcccggcgtgaccagaagatgcatcctggacctggcccaccagtggggcgagttcaaggtgagcgagagatacctgaccatggacgacctgaccaccgccctggagggcaacagagtgagagagatgttcggcagcggcaccgcctgcgtggtgtgccccgtgagcgacatcctgtacaagggcgagaccatccacatccccaccatggagaacggccccaagctggccagcagaatcctgagcaagctgaccgacatccagtacggcagagaggagagcgactggaccatcgtgctgagctag

SEQ ID NO: 74519 - DNA, 1197 bp, synthetic construct
  misc_feature 1..1197: note = Description of Artificial Sequence: Synthetic coding sequence
  source 1..1197: mol_type = other DNA
atggccagccccctgagaagcgccgccgccctggccagacaggactgcagcaacggctgcagcgccgagtgcaccggcgagggcggcagcaaggaggtggtgggcaccttcaaggccaaggacctgatcgtgacccccgccaccatcctgaaggagaagcccgaccccaacaacctggtgttcggcaccgtgttcaccgaccacatgctgaccgtggagtggagcagcgagttcggctgggagaagccccacatcaagcccctgcagaacctgagcctgcaccccggcagcagcgccctgcactacgccgtggagctgttcgagggcctgaaggccttcagaggcgtggacaacaagatcagactgttccagcccaacctgaacatggacagaatgtacagaagcgccgtgagagccaccctgcccgtgttcgacaaggaggagctgctggagtgcatccagcagctggtgaagctggaccaggagtgggtgccctacagcaccagcgccagcctgtacatcagacccaccttcatcggcaccgagcccagcctgggcgtgaagaagcccaccaaggccctgctgttcgtgctgctgagccccgtgggcccctacttcagcagcggcaccttcaaccccgtgagcctgtgggccaaccccaagtacgtgagagcctggaagggcggcaccggcgactgcaagatgggcggcaactacggcagcagcctgttcgcccagtgcgaggccgtggacaacggctgccagcaggtgctgtggctgtacggcgaggaccaccagatcaccgaggtgggcaccatgaacctgttcctgtactggatcaacgaggacggcgaggaggagctggccaccccccccctggacggcatcatcctgcccggcgtgaccagaagatgcatcctggacctggcccaccagtggggcgagttcaaggtgagcgagagatacctgaccatggacgacctgaccaccgccctggagggcaacagagtgagagagatgttcggcagcggcaccgcctgcgtggtgtgccccgtgagcgacatcctgtacaagggcgagaccatccacatccccaccatggagaacggccccaagctggccagcagaatcctgagcaagctgaccgacatccagtacggcagagaggagagcgactggaccatcgtgctgagctag

SEQ ID NO: 74520 - DNA, 1050 bp, synthetic construct
  misc_feature 1..1050: note = Description of Artificial Sequence: Synthetic coding sequence
  source 1..1050: mol_type = other DNA
atgaaggactgcagcaacggctgcagcgccgagtgcaccggcgagggcggcagcaaggaggtggtgggcaccttcaaggccaaggacctgatcgtgacccccgccaccatcctgaaggagaagcccgaccccaacaacctggtgttcggcaccgtgttcaccgaccacatgctgaccgtggagtggagcagcgagttcggctgggagaagccccacatcaagcccctgcagaacctgagcctgcaccccggcagcagcgccctgcactacgccgtggaggtgttcgacaaggaggagctgctggagtgcatccagcagctggtgaagctggaccaggagtgggtgccctacagcaccagcgccagcctgtacatcagacccaccttcatcggcaccgagcccagcctgggcgtgaagaagcccaccaaggccctgctgttcgtgctgctgagccccgtgggcccctacttcagcagcggcaccttcaaccccgtgagcctgtgggccaaccccaagtacgtgagagcctggaagggcggcaccggcgactgcaagatgggcggcaactacggcagcagcctgttcgcccagtgcgaggccgtggacaacggctgccagcaggtgctgtggctgtacggcgaggaccaccagatcaccgaggtgggcaccatgaacctgttcctgtactggatcaacgaggacggcgaggaggagctggccaccccccccctggacggcatcatcctgcccggcgtgaccagaagatgcatcctggacctggcccaccagtggggcgagttcaaggtgagcgagagatacctgaccatggacgacctgaccaccgccctggagggcaacagagtgagagagatgttcggcagcggcaccgcctgcgtggtgtgccccgtgagcgacatcctgtacaagggcgagaccatccacatccccaccatggagaacggccccaagctggccagcagaatcctgagcaagctgaccgacatccagtacggcagagaggagagcgactggaccatcgtgctgagctag

SEQ ID NO: 74521 - DNA, 1161 bp, synthetic construct
  misc_feature 1..1161: note = Description of Artificial Sequence: Synthetic coding sequence
  source 1..1161: mol_type = other DNA
atgaaggactgcagcaacggctgcagcgccgagtgcaccggcgagggcggcagcaaggaggtggtgggcaccttcaaggccaaggacctgatcgtgacccccgccaccatcctgaaggagaagcccgaccccaacaacctggtgttcggcaccgtgttcaccgaccacatgctgaccgtggagtggagcagcgagttcggctgggagaagccccacatcaagcccctgcagaacctgagcctgcaccccggcagcagcgccctgcactacgccgtggagctgttcgagggcctgaaggccttcagaggcgtggacaacaagatcagactgttccagcccaacctgaacatggacagaatgtacagaagcgccgtgagagccaccctgcccgtgttcgacaaggaggagctgctggagtgcatccagcagctggtgaagctggaccaggagtgggtgccctacagcaccagcgccagcctgtacatcagacccaccttcatcggcaccgagcccagcctgggcgtgaagaagcccaccaaggccctgctgttcgtgctgctgagccccgtgggcccctacttcagcagcggcaccttcaaccccgtgagcctgtgggccaaccccaagtacgtgagagcctggaagggcggcaccggcgactgcaagatgggcggcaactacggcagcagcctgttcgcccagtgcgaggccgtggacaacggctgccagcaggtgctgtggctgtacggcgaggaccaccagatcaccgaggtgggcaccatgaacctgttcctgtactggatcaacgaggacggcgaggaggagctggccaccccccccctggacggcatcatcctgcccggcgtgaccagaagatgcatcctggacctggcccaccagtggggcgagttcaaggtgagcgagagatacctgaccatggacgacctgaccaccgccctggagggcaacagagtgagagagatgttcggcagcggcaccgcctgcgtggtgtgccccgtgagcgacatcctgtacaagggcgagaccatccacatccccaccatggagaacggccccaagctggccagcagaatcctgagcaagctgaccgacatccagtacggcagagaggagagcgactggaccatcgtgctgagctag

SEQ ID NO: 74522 - DNA, 1179 bp, synthetic construct
  misc_feature 1..1179: note = Description of Artificial Sequence: Synthetic coding sequence
  source 1..1179: mol_type = other DNA
atggccgccgccgccctgggccagatctgggccagaaagctgctgagcgtgccctggctgctgtgcggccccagaagatacgccagcagcagcttcaaggccgccgacctgcagctggagatgacccagaagccccacaagaagcccggccccggcgagcccctggtgttcggcaagaccttcaccgaccacatgctgatggtggagtggaacgacaagggctggggccagcccagaatccagcccttccagaacctgaccctgcaccccgccagcagcagcctgcactacagcctgcagctgttcgagggcatgaaggccttcaagggcaaggaccagcaggtgagactgttcagaccctggctgaacatggacagaatgctgagaagcgccatgagactgtgcctgcccagcttcgacaagctggagctgctggagtgcatcagaagactgatcgaggtggacaaggactgggtgcccgacgccgccggcaccagcctgtacgtgagacccgtgctgatcggcaacgagcccagcctgggcgtgagccagcccaccagagccctgctgttcgtgatcctgtgccccgtgggcgcctacttccccggcggcagcgtgacccccgtgagcctgctggccgaccccgccttcatcagagcctgggtgggcggcgtgggcaactacaagctgggcggcaactacggccccaccgtgctggtgcagcaggaggccctgaagagaggctgcgagcaggtgctgtggctgtacggccccgaccaccagctgaccgaggtgggcaccatgaacatcttcgtgtactggacccacgaggacggcgtgctggagctggtgaccccccccctgaacggcgtgatcctgcccggcgtggtgagacagagcctgctggacatggcccagacctggggcgagttcagagtggtggagagaaccatcaccatgaagcagctgctgagagccctggaggagggcagagtgagagaggtgttcggcagcggcaccgcctgccaggtgtgccccgtgcacagaatcctgtacaaggacagaaacctgcacatccccaccatggagaacggccccgagctgatcctgagattccagaaggagctgaaggagatccagtacggcatcagagcccacgagtggatgttccccgtgtag

SEQ ID NO: 74523 - DNA, 1059 bp, synthetic construct
  misc_feature 1..1059: note = Description of Artificial Sequence: Synthetic coding sequence
  source 1..1059: mol_type = other DNA
atgacccagaagccccacaagaagcccggccccggcgagcccctggtgttcggcaagaccttcaccgaccacatgctgatggtggagtggaacgacaagggctggggccagcccagaatccagcccttccagaacctgaccctgcaccccgccagcagcagcctgcactacagcctgcagctgttcgagggcatgaaggccttcaagggcaaggaccagcaggtgagactgttcagaccctggctgaacatggacagaatgctgagaagcgccatgagactgtgcctgcccagcttcgacaagctggagctgctggagtgcatcagaagactgatcgaggtggacaaggactgggtgcccgacgccgccggcaccagcctgtacgtgagacccgtgctgatcggcaacgagcccagcctgggcgtgagccagcccaccagagccctgctgttcgtgatcctgtgccccgtgggcgcctacttccccggcggcagcgtgacccccgtgagcctgctggccgaccccgccttcatcagagcctgggtgggcggcgtgggcaactacaagctgggcggcaactacggccccaccgtgctggtgcagcaggaggccctgaagagaggctgcgagcaggtgctgtggctgtacggccccgaccaccagctgaccgaggtgggcaccatgaacatcttcgtgtactggacccacgaggacggcgtgctggagctggtgaccccccccctgaacggcgtgatcctgcccggcgtggtgagacagagcctgctggacatggcccagacctggggcgagttcagagtggtggagagaaccatcaccatgaagcagctgctgagagccctggaggagggcagagtgagagaggtgttcggcagcggcaccgcctgccaggtgtgccccgtgcacagaatcctgtacaaggacagaaacctgcacatccccaccatggagaacggccccgagctgatcctgagattccagaaggagctgaaggagatccagtacggcatcagagcccacgagtggatgttccccgtgtag

SEQ ID NO: 74524 - DNA, 903 bp, synthetic construct
  misc_feature 1..903: note = Description of Artificial Sequence: Synthetic coding sequence
  source 1..903: mol_type = other DNA
atggccgccgccgccctgggccagctgttcgagggcatgaaggccttcaagggcaaggaccagcaggtgagactgttcagaccctggctgaacatggacagaatgctgagaagcgccatgagactgtgcctgcccagcttcgacaagctggagctgctggagtgcatcagaagactgatcgaggtggacaaggactgggtgcccgacgccgccggcaccagcctgtacgtgagacccgtgctgatcggcaacgagcccagcctgggcgtgagccagcccaccagagccctgctgttcgtgatcctgtgccccgtgggcgcctacttccccggcggcagcgtgacccccgtgagcctgctggccgaccccgccttcatcagagcctgggtgggcggcgtgggcaactacaagctgggcggcaactacggccccaccgtgctggtgcagcaggaggccctgaagagaggctgcgagcaggtgctgtggctgtacggccccgaccaccagctgaccgaggtgggcaccatgaacatcttcgtgtactggacccacgaggacggcgtgctggagctggtgaccccccccctgaacggcgtgatcctgcccggcgtggtgagacagagcctgctggacatggcccagacctggggcgagttcagagtggtggagagaaccatcaccatgaagcagctgctgagagccctggaggagggcagagtgagagaggtgttcggcagcggcaccgcctgccaggtgtgccccgtgcacagaatcctgtacaaggacagaaacctgcacatccccaccatggagaacggccccgagctgatcctgagattccagaaggagctgaaggagatccagtacggcatcagagcccacgagtggatgttccccgtgtag

SEQ ID NO: 74525 - DNA, 1338 bp, synthetic construct
  misc_feature 1..1338: note = Description of Artificial Sequence: Synthetic coding sequence
  source 1..1338: mol_type = other DNA
atggccgtggccatcgccgccgccagagtgtggagactgaacagaggcctgagccaggccgccctgctgctgctgagacagcccggcgccagaggcctggccagaagccacccccccagacagcagcagcagttcagcagcctggacgacaagccccagttccccggcgccagcgccgagttcatcgacaagctggagttcatccagcccaacgtgatcagcggcatccccatctacagagtgatggacagacagggccagatcatcaaccccagcgaggacccccacctgcccaaggagaaggtgctgaagctgtacaagagcatgaccctgctgaacaccatggacagaatcctgtacgagagccagagacagggcagaatcagcttctacatgaccaactacggcgaggagggcacccacgtgggcagcgccgccgccctggacaacaccgacctggtgttcggccagtacagagaggccggcgtgctgatgtacagagactaccccctggagctgttcatggcccagtgctacggcaacatcagcgacctgggcaagggcagacagatgcccgtgcactacggctgcaaggagagacacttcgtgaccatcagcagccccctggccacccagatcccccaggccgtgggcgccgcctacgccgccaagagagccaacgccaacagagtggtgatctgctacttcggcgagggcgccgccagcgagggcgacgcccacgccggcttcaacttcgccgccaccctggagtgccccatcatcttcttctgcagaaacaacggctacgccatcagcacccccaccagcgagcagtacagaggcgacggcatcgccgccagaggccccggctacggcatcatgagcatcagagtggacggcaacgacgtgttcgccgtgtacaacgccaccaaggaggccagaagaagagccgtggccgagaaccagcccttcctgatcgaggccatgacctacagaatcggccaccacagcaccagcgacgacagcagcgcctacagaagcgtggacgaggtgaactactgggacaagcaggaccaccccatcagcagactgagacactacctgctgagccagggctggtgggacgaggagcaggagaaggcctggagaaagcagagcagaagaaaggtgatggaggccttcgagcaggccgagagaaagcccaagcccaaccccaacctgctgttcagcgacgtgtaccaggagatgcccgcccagctgagaaagcagcaggagagcctggccagacacctgcagacctacggcgagcactaccccctggaccacttcgacaagtag

SEQ ID NO: 74526 - DNA, 1212 bp, synthetic construct
  misc_feature 1..1212: note = Description of Artificial Sequence: Synthetic coding sequence
  source 1..1212: mol_type = other DNA
atggccgtggccatcgccgccgccagagtgtggagactgaacagaggcctgagccaggccgccctgctgctgctgagacagcccggcgccagaggcctggccagaagccacccccccagacagcagcagcagttcagcagcctggacgacaagccccagttccccggcgccagcgccgagttcatcgacaagctggagttcatccagcccaacgtgatcagcggcatccccatctacagagtgatggacagacagggccagatcatcaaccccagcgaggacccccacctgcccaaggagaaggtgctgaagctgtacaagagcatgaccctgctgaacaccatggacagaatcctgtacgagagccagagacagggcagaatcagcttctacatgaccaactacggcgaggagggcacccacgtgggcagcgccgccgccctggacaacaccgacctggtgttcggccagtacagagaggccggcgtgctgatgtacagagactaccccctggagctgttcatggcccagtgctacggcaacatcagcgacctgggcaagggcagacagatgcccgtgcactacggctgcaaggagagacacttcgtgaccatcagcagccccctggccacccagatcccccaggccgtgggcgccgcctacgccgccaagagagccaacgccaacagagtggtgatctgctacttcggcgagggcgccgccagcgagggcgacgcccacgccggcttcaacttcgccgccaccctggagtgccccatcatcttcttctgcagaaacaacggctacgccatcagcacccccaccagcgagcagtacagaggcgacggcatcgccgccagaggccccggctacggcatcatgagcatcagagtggacggcaacgacgtgttcgccgtgtacaccgccaccggcggccccaaggccagagccagcgtgggccccagcagccccagcaccaccggcacctgcggcatcatgatgcccctgcacgccatgggcctgtggcaccccgtgagccaccagcaggagctgagcgccgcccccaagcccaagggcaccaccaagcccatcctggagagctacctgaagagccacctgctgggccacagcagataccagctgtacatccaccaggacgccgtgagaagagagaagccccagagcaacctgaacagagagagcctgatctag

SEQ ID NO: 74527 - DNA, 1179 bp, synthetic construct
  misc_feature 1..1179: note = Description of Artificial Sequence: Synthetic coding sequence
  source 1..1179: mol_type = other DNA
atggccgtggtggccgccgccgccggctggctgctgagactgagagccgccggcgccgagggccactggagaagactgcccggcgccggcctggccagaggcttcctgcaccccgccgccaccgtggaggacgccgcccagagaagacaggtggcccacttcaccttccagcccgaccccgagcccagagagtacggccagacccagaagatgaacctgttccagagcgtgaccagcgccctggacaacagcctggccaaggaccccaccgccgtgatcttcggcgaggacgtggccttcggcggcgtgttcagatgcaccgtgggcctgagagacaagtacggcaaggacagagtgttcaacacccccctgtgcgagcagggcatcgtgggcttcggcatcggcatcgccgtgaccggcgccaccgccatcgccgagatccagttcgccgactacatcttccccgccttcgaccagatcgtgaacgaggccgccaagtacagatacagaagcggcgacctgttcaactgcggcagcctgaccatcagaagcccctggggctgcgtgggccacggcgccctgtaccacagccagagccccgaggccttcttcgcccactgccccggcatcaaggtggtgatccccagaagccccttccaggccaagggcctgctgctgagctgcatcgaggacaagaacccctgcatcttcttcgagcccaagatcctgtacagagccgccgccgaggaggtgcccatcgagccctacaacatccccctgagccaggccgaggtgatccaggagggcagcgacgtgaccctggtggcctggggcacccaggtgcacgtgatcagagaggtggccagcatggccaaggagaagctgggcgtgagctgcgaggtgatcgacctgagaaccatcatcccctgggacgtggacaccatctgcaagagcgtgatcaagaccggcagactgctgatcagccacgaggcccccctgaccggcggcttcgccagcgagatcagcagcaccgtgcaggaggagtgcttcctgaacctggaggcccccatcagcagagtgtgcggctacgacacccccttcccccacatcttcgagcccttctacatccccgacaagtggaagtgctacgacgccctgagaaagatgatcaactactag

SEQ ID NO: 74528 - DNA, 1179 bp, synthetic construct; identical to SEQ ID NO: 74527
  misc_feature 1..1179: note = Description of Artificial Sequence: Synthetic coding sequence
  source 1..1179: mol_type = other DNA

SEQ ID NO: 74529 - DNA, 657 bp, synthetic construct
  misc_feature 1..657: note = Description of Artificial Sequence: Synthetic coding sequence
  source 1..657: mol_type = other DNA
atggccgtggtggccgccgccgccggctggctgctgagactgagagccgccggcgccgagggccactggagaagactgcccggcgccggcctggccagaggcttcctgcaccccgccgccaccgtggaggacgccgcccagagaagacaggtggcccacttcaccttccagcccgaccccgagcccagagagtacggccagacccagaagatgaacctgttccagagcgtgaccagcgccctggacaacagcctggccaaggaccccaccgccgtgatcttcggcgaggacgtggccttcggcggcgtgttcagatgcaccgtgggcctgagagacaagtacggcaaggacagagtgttcaacacccccctgtgcgagcagggcatcgtgggcttcggcatcggcatcgccgtgaccggcgccaccgccatcgccgagatccagttcgccgactacatcttccccgccttcgaccagatcgtgaacgaggccgccaagtacagatacagaagcggcgacctgttcaactgcggcagcctgaccatcagaagcccctggggctgcgtgggccacggcgccctgtaccacagccagagccccgaggccttcttcgcccactgccccggcatcaagatcaaggtgatcagcctgagctag

SEQ ID NO: 74530 - DNA, 969 bp, synthetic construct
  misc_feature 1..969: note = Description of Artificial Sequence: Synthetic coding sequence
  source 1..969: mol_type = other DNA
atgaacctgttccagagcgtgaccagcgccctggacaacagcctggccaaggaccccaccgccgtgatcttcggcgaggacgtggccttcggcggcgtgttcagatgcaccgtgggcctgagagacaagtacggcaaggacagagtgttcaacacccccctgtgcgagcagggcatcgtgggcttcggcatcggcatcgccgtgaccggcgccaccgccatcgccgagatccagttcgccgactacatcttccccgccttcgaccagatcgtgaacgaggccgccaagtacagatacagaagcggcgacctgttcaactgcggcagcctgaccatcagaagcccctggggctgcgtgggccacggcgccctgtaccacagccagagccccgaggccttcttcgcccactgccccggcatcaaggtggtgatccccagaagccccttccaggccaagggcctgctgctgagctgcatcgaggacaagaacccctgcatcttcttcgagcccaagatcctgtacagagccgccgccgaggaggtgcccatcgagccctacaacatccccctgagccaggccgaggtgatccaggagggcagcgacgtgaccctggtggcctggggcacccaggtgcacgtgatcagagaggtggccagcatggccaaggagaagctgggcgtgagctgcgaggtgatcgacctgagaaccatcatcccctgggacgtggacaccatctgcaagagcgtgatcaagaccggcagactgctgatcagccacgaggcccccctgaccggcggcttcgccagcgagatcagcagcaccgtgcaggaggagtgcttcctgaacctggaggcccccatcagcagagtgtgcggctacgacacccccttcccccacatcttcgagcccttctacatccccgacaagtggaagtgctacgacgccctgagaaagatgatcaactactag

SEQ ID NO: 74531 - DNA, 657 bp, synthetic construct; identical to SEQ ID NO: 74529
  misc_feature 1..657: note = Description of Artificial Sequence: Synthetic coding sequence
  source 1..657: mol_type = other DNA

SEQ ID NO: 74532 - DNA, 1779 bp, synthetic construct
  misc_feature 1..1779: note = Description of Artificial Sequence: Synthetic coding sequence
  source 1..1779: mol_type = other DNA
atgagcgtgagcctggtggtgatcagactggagctggccgagcacagccccgtgcccgccggcttcggcttcagcgccgccgccggcgagatgagcgacgaggagatcaagaagaccaccctggccagcgccgtggcctgcctggagggcaagagccccggcgagaaggtggccatcatccaccagcacctgggcagaagagagatgaccgacgtgatcatcgagaccatgaagagcaaccccgacgagctgaagaccaccgtggaggagagaaagagcagcgaggccagccccaccgcccagagaagcaaggaccacagcaaggagtgcatcaacgccgcccccgacagccccagcaagcagctgcccgaccagatcagcttcttcagcggcaaccccagcgtggagatcgtgcacggcatcatgcacctgtacaagaccaacaagatgaccagcctgaaggaggacgtgagaagaagcgccatgctgtgcatcctgaccgtgcccgccgccatgaccagccacgacctgatgaagttcgtggcccccttcaacgaggtgatcgagcagatgaagatcatcagagacagcacccccaaccagtacatggtgctgatcaagttcagagcccaggccgacgccgacagcttctacatgacctgcaacggcagacagttcaacagcatcgaggacgacgtgtgccagctggtgtacgtggagagagccgaggtgctgaagagcgaggacggcgccagcctgcccgtgatggacctgaccgagctgcccaagtgcaccgtgtgcctggagagaatggacgagagcgtgaacggcatcctgaccaccctgtgcaaccacagcttccacagccagtgcctgcagagatgggacgacaccacctgccccgtgtgcagatactgccagacccccgagcccgtggaggagaacaagtgcttcgagtgcggcgtgcaggagaacctgtggatctgcctgatctgcggccacatcggctgcggcagatacgtgagcagacacgcctacaagcacttcgaggagacccagcacacctacgccatgcagctgaccaaccacagagtgtgggactacgccggcgacaactacgtgcacagactggtggccagcaagaccgacggcaagatcgtgcagtacgagtgcgagggcgacacctgccaggaggagaagatcgacgccctgcagctggagtacagctacctgctgaccagccagctggagagccagagaatctactgggagaacaagatcgtgagaatcgagaaggacaccgccgaggagatcaacaacatgaagaccaagttcaaggagaccatcgagaagtgcgacaacctggagcacaagctgaacgacctgctgaaggagaagcagagcgtggagagaaagtgcacccagctgaacaccaaggtggccaagctgaccaacgagctgaaggaggagcaggagatgaacaagtgcctgagagccaaccaggtgctgctgcagaacaagctgaaggaggaggagagagtgctgaaggagacctgcgaccagaaggacctgcagatcaccgagatccaggagcagctgagagacgtgatgttctacctggagacccagcagaagatcaaccacctgcccgccgagaccagacaggagatccaggagggccagatcaacatcgccatggccagcgccagcagccccgccagcagcggcggcagcggcaagctgcccagcagaaagggcagaagcaagagaggcaagtag

SEQ ID NO: 74533 - DNA, 1242 bp, synthetic construct
  misc_feature 1..1242: note = Description of Artificial Sequence: Synthetic coding sequence
  source 1..1242: mol_type = other DNA
atgcacctgtacaagaccaacaagatgaccagcctgaaggaggacgtgagaagaagcgccatgctgtgcatcctgaccgtgcccgccgccatgaccagccacgacctgatgaagttcgtggcccccttcaacgaggtgatcgagcagatgaagatcatcagagacagcacccccaaccagtacatggtgctgatcaagttcagagcccagggcgccagcctgcccgtgatggacctgaccgagctgcccaagtgcaccgtgtgcctggagagaatggacgagagcgtgaacggcatcctgaccaccctgtgcaaccacagcttccacagccagtgcctgcagagatgggacgacaccacctgccccgtgtgcagatactgccagacccccgagcccgtggaggagaacaagtgcttcgagtgcggcgtgcaggagaacctgtggatctgcctgatctgcggccacatcggctgcggcagatacgtgagcagacacgcctacaagcacttcgaggagacccagcacacctacgccatgcagctgaccaaccacagagtgtgggactacgccggcgacaactacgtgcacagactggtggccagcaagaccgacggcaagatcgtgcagtacgagtgcgagggcgacacctgccaggaggagaagatcgacgccctgcagctggagtacagctacctgctgaccagccagctggagagccagagaatctactgggagaacaagatcgtgagaatcgagaaggacaccgccgaggagatcaacaacatgaagaccaagttcaaggagaccatcgagaagtgcgacaacctggagcacaagctgaacgacctgctgaaggagaagcagagcgtggagagaaagtgcacccagctgaacaccaaggtggccaagctgaccaacgagctgaaggaggagcaggagatgaacaagtgcctgagagccaaccaggtgctgctgcagaacaagctgaaggaggaggagagagtgctgaaggagacctgcgaccagaaggacctgcagatcaccgagatccaggagcagctgagagacgtgatgttctacctggagacccagcagaagatcaaccacctgcccgccgagaccagacaggagatccaggagggccagatcaacatcgccatggccagcgccagcagccccgccagcagcggcggcagcggcaagctgcccagcagaaagggcagaagcaagagaggcaagtag

SEQ ID NO: 74534 - DNA, 2136 bp, synthetic construct
  misc_feature 1..2136: note = Description of Artificial Sequence: Synthetic coding sequence
  source 1..2136: mol_type = other DNA
atgaacaagggctggctggagctggagagcgaccccggcctgttcaccctgctggtggaggacttcggcgtgaagggcgtgcaggtggaggagatctacgacctgcagagcaagtgccagggccccgtgtacggcttcatcttcctgttcaagtggatcgaggagagaagaagcagaagaaaggtgagcaccctggtggacgacaccagcgtgatcgacgacgacatcgtgaacaacatgttcttcgcccaccagctgatccccaacagctgcgccacccacgccctgctgagcgtgctgctgaactgcagcagcgtggacctgggccccaccctgagcagaatgaaggacttcaccaagggcttcagccccgagagcaagggctacgccatcggcaacgcccccgagctggccaaggcccacaacagccacgccagacccgagcccagacacctgcccgagaagcagaacggcctgagcgccgtgagaaccatggaggccttccacttcgtgagctacgtgcccatcaccggcagactgttcgagctggacggcctgaaggtgtaccccatcgaccacggcccctggggcgaggacgaggagtggaccgacaaggccagaagagtgatcatggagagaatcggcctggccaccgccggcatcaagtacgaggccagactgcacgtgctgaaggtgaacagacagaccgtgctggaggccctgcagcagctgatcagagtgacccagcccgagctgatccagacccacaagagccaggagagccagctgcccgaggagagcaagagcgccagcaacaagagccccctggtgctggaggccaacagagcccccgccgccagcgagggcaaccacaccgacggcgccgaggaggccgccggcagctgcgcccaggcccccagccacagcccccccaacaagcccaagctggtggtgaagccccccggcagcagcctgaacggcgtgcaccccaaccccacccccatcgtgcagagactgcccgccttcctggacaaccacaactacgccaagagccccatgcaggaggaggaggacctggccgccggcgtgggcagaagcagagtgcccgtgagacccccccagcagtacagcgacgacgaggacgactacgaggacgacgaggaggacgacgtgcagaacaccaacagcgccctgagatacaagggcaagggcaccggcaagcccggcgccctgagcggcagcgccgacggccagctgagcgtgctgcagcccaacaccatcaacgtgctggccgagaagctgaaggagagccagaaggacctgagcatccccctgagcatcaagaccagcagcggcgccggcagccccgccgtggccgtgcccacccacagccagcccagccccacccccagcaacgagagcaccgacaccgccagcgagatcggcagcgccttcaacagccccctgagaagccccatcagaagcgccaaccccaccagacccagcagccccgtgaccagccacatcagcaaggtgctgttcggcgaggacgacagcctgctgagagtggactgcatcagatacaacagagccgtgagagacctgggccccgtgatcagcaccggcctgctgcacctggccgaggacggcgtgctgagccccctggccctgaccgagggcggcaagggcagcagccccagcatcagacccatccagggcagccagggcagcagcagccccgtggagaaggaggtggtggaggccaccgacagcagagagaagaccggcatggtgagacccggcgagcccctgagcggcgagaagtacagccccaaggagctgctggccctgctgaagtgcgtggaggccgagatcgccaactacgaggcctgcctgaaggaggaggtggagaagagaaagaagttcaagatcgacgaccagagaagaacccacaactacgacgagttcatctgcaccttcatcagcatgctggcccaggagggcatgctggccaacctggtggagcagaacatcagcgtgagaagaagacagggcgtgagcatcggcagactgcacaagcagagaaagcccgacagaagaaagagaagcagaccctacaaggccaagagacagtag

SEQ ID NO: 74535 - DNA, 2190 bp, synthetic construct
  misc_feature 1..2190: note = Description of Artificial Sequence: Synthetic coding sequence
  source 1..2190: mol_type = other DNA
atgaacaagggctggctggagctggagagcgaccccggcctgttcaccctgctggtggaggacttcggcgtgaagggcgtgcaggtggaggagatctacgacctgcagagcaagtgccagggccccgtgtacggcttcatcttcctgttcaagtggatcgaggagagaagaagcagaagaaaggtgagcaccctggtggacgacaccagcgtgatcgacgacgacatcgtgaacaacatgttcttcgcccaccagctgatccccaacagctgcgccacccacgccctgctgagcgtgctgctgaactgcagcagcgtggacctgggccccaccctgagcagaatgaaggacttcaccaagggcttcagccccgagagcaagggctacgccatcggcaacgcccccgagctggccaaggcccacaacagccacgccagacccgagcccagacacctgcccgagaagcagaacggcctgagcgccgtgagaaccatggaggccttccacttcgtgagctacgtgcccatcaccggcagactgttcgagctggacggcctgaaggtgtaccccatcgaccacggcccctggggcgaggacgaggagtggaccgacaaggccagaagagtgatcatggagagaatcggcctggccaccgccggcgagccctaccacgacatcagattcaacctgatggccgtggtgcccgacagaagaatcaagtacgaggccagactgcacgtgctgaaggtgaacagacagaccgtgctggaggccctgcagcagctgatcagagtgacccagcccgagctgatccagacccacaagagccaggagagccagctgcccgaggagagcaagagcgccagcaacaagagccccctggtgctggaggccaacagagcccccgccgccagcgagggcaaccacaccgacggcgccgaggaggccgccggcagctgcgcccaggcccccagccacagcccccccaacaagcccaagctggtggtgaagccccccggcagcagcctgaacggcgtgcaccccaaccccacccccatcgtgcagagactgcccgccttcctggacaaccacaactacgccaagagccccatgcaggaggaggaggacctggccgccggcgtgggcagaagcagagtgcccgtgagacccccccagcagtacagcgacgacgaggacgactacgaggacgacgaggaggacgacgtgcagaacaccaacagcgccctgagatacaagggcaagggcaccggcaagcccggcgccctgagcggcagcgccgacggccagctgagcgtgctgcagcccaacaccatcaacgtgctggccgagaagctgaaggagagccagaaggacctgagcatccccctgagcatcaagaccagcagcggcgccggcagccccgccgtggccgtgcccacccacagccagcccagccccacccccagcaacgagagcaccgacaccgccagcgagatcggcagcgccttcaacagccccctgagaagccccatcagaagcgccaaccccaccagacccagcagccccgtgaccagccacatcagcaaggtgctgttcggcgaggacgacagcctgctgagagtggactgcatcagatacaacagagccgtgagagacctgggccccgtgatcagcaccggcctgctgcacctggccgaggacggcgtgctgagccccctggccctgaccgagggcggcaagggcagcagccccagcatcagacccatccagggcagccagggcagcagcagccccgtggagaaggaggtggtggaggccaccgacagcagagagaagaccggcatggtgagacccggcgagcccctgagcggcgagaagtacagccccaaggagctgctggccctgctgaagtgcgtggaggccgagatcgccaactacgaggcctgcctgaaggaggaggtggagaagagaaagaagttcaagatcgacgaccagagaagaacccacaactacgacgagttcatctgcaccttcatcagcatgctggcccaggagggcatgctggccaacctggtggagcagaacatcagcgtgagaagaagacagggcgtgagcatcggcagactgcacaagcagagaaagcccgacagaagaaagagaagcagaccctacaaggccaagagacagtag

SEQ ID NO: 74536 - DNA, 879 bp, synthetic construct
  misc_feature 1..879: note = Description of Artificial Sequence: Synthetic coding sequence
  source 1..879: mol_type = other DNA
atggccgtgcaggtggtgcaggccgtgcaggccgtgcacctggagagcgacgccttcctggtgtgcctgaaccacgccctgagcaccgagaaggaggaggtgatgggcctgtgcatcggcgagctgaacgacgacaccagcagaagcgacagcaagttcgcctacaccggcaccgagatgagaaccgtggccgagaaggtggacgccgtgagaatcgtgcacatccacagcgtgatcatcctgagaagaagcgacaagagaaaggacagagtggagatcagccccgagcagctgagcgccgccagcaccgaggccgagagactggccgagctgaccggcagacccatgagagtggtgggctggtaccacagccacccccacatcaccgtgtggcccagccacgtggacgtgagaacccaggccatgtaccagatgatggaccagggcttcgtgggcctgatcttcagctgcttcatcgaggacaagaacaccaagaccggcagagtgctgtacacctgcttccagagcatccaggcccagaagagcagcgagtacgagagaatcgagatccccatccacatcgtgccccacgtgaccatcggcaaggtgtgcctggagagcgccgtggagctgcccaagatcctgtgccaggaggagcaggacgcctacagaagaatccacagcctgacccacctggacagcgtgaccaagatccacaacggcagcgtgttcaccaagaacctgtgcagccagatgagcgccgtgagcggccccctgctgcagtggctggaggacagactggagcagaaccagcagcacctgcaggagctgcagcaggagaaggaggagctgatgcaggagctgagcagcctggagtag

SEQ ID NO: 74537 - DNA, 876 bp, synthetic construct
  misc_feature 1..876: note = Description of Artificial Sequence: Synthetic coding sequence
  source 1..876: mol_type = other DNA
atggccgtgcaggtggtgcaggccgtgcaggccgtgcacctggagagcgacgccttcctggtgtgcctgaaccacgccctgagcaccgagaaggaggaggtgatgggcctgtgcatcggcgagctgaacgacgacaccagaagcgacagcaagttcgcctacaccggcaccgagatgagaaccgtggccgagaaggtggacgccgtgagaatcgtgcacatccacagcgtgatcatcctgagaagaagcgacaagagaaaggacagagtggagatcagccccgagcagctgagcgccgccagcaccgaggccgagagactggccgagctgaccggcagacccatgagagtggtgggctggtaccacagccacccccacatcaccgtgtggcccagccacgtggacgtgagaacccaggccatgtaccagatgatggaccagggcttcgtgggcctgatcttcagctgcttcatcgaggacaagaacaccaagaccggcagagtgctgtacacctgcttccagagcatccaggcccagaagagcagcgagtacgagagaatcgagatccccatccacatcgtgccccacgtgaccatcggcaaggtgtgcctggagagcgccgtggagctgcccaagatcctgtgccaggaggagcaggacgcctacagaagaatccacagcctgacccacctggacagcgtgaccaagatccacaacggcagcgtgttcaccaagaacctgtgcagccagatgagcgccgtgagcggccccctgctgcagtggctggaggacagactggagcagaaccagcagcacctgcaggagctgcagcaggagaaggaggagctgatgcaggagctgagcagcctggagtag

SEQ ID NO: 74538 - DNA, 951 bp, synthetic construct
  misc_feature 1..951: note = Description of Artificial Sequence: Synthetic coding sequence
  source 1..951: mol_type = other DNA
atggccgtgcaggtggtgcaggccgtgcaggccgtgcacctggagagcgacgccttcctggtgtgcctgaaccacgccctgagcaccgagaaggaggaggtgatgggcctgtgcatcggcgagctgaacgacgacaccagaagcgacagcaagttcgcctacaccggcaccgagatgagaaccgtggccgagaaggtggacgccgtgagaatcgtgcacatccacagcgtgatcatcctgagaagaagcgacaagagaaaggacagagtggagatcagccccgagcagctgagcgccgccagcaccgaggccgagagactggccgagctgaccggcagacccatgagagtggtgggctggtaccacagccacccccacatcaccgtgtggcccagccacgtggacgtgagaacccaggccatgtaccagatgatggaccagggcttcgtgggcctgatcttcagctgcttcatcgaggacaagaacaccaagaccggcagagtgctgtacacctgcttccagagcatccaggcccagaagagcagcgagagcctgcacggccccagagacttctggagcagcagccagcacatcagcatcgagggccagaaggaggaggagagatacgagagaatcgagatccccatccacatcgtgccccacgtgaccatcggcaaggtgtgcctggagagcgccgtggagctgcccaagatcctgtgccaggaggagcaggacgcctacagaagaatccacagcctgacccacctggacagcgtgaccaagatccacaacggcagcgtgttcaccaagaacctgtgcagccagatgagcgccgtgagcggccccctgctgcagtggctggaggacagactggagcagaaccagcagcacctgcaggagctgcagcaggagaaggaggagctgatgcaggagctgagcagcctggagtag

SEQ ID NO: 74539 - DNA, 954 bp, synthetic construct
  misc_feature 1..954: note = Description of Artificial Sequence: Synthetic coding sequence
  source 1..954: mol_type = other DNA
atggccgtgcaggtggtgcaggccgtgcaggccgtgcacctggagagcgacgccttcctggtgtgcctgaaccacgccctgagcaccgagaaggaggaggtgatgggcctgtgcatcggcgaggtgagcagccccagcagaagcgacagcaagttcgcctacaccggcaccgagatgagaaccgtggccgagaaggtggacgccgtgagaatcgtgcacatccacagcgtgatcatcctgagaagaagcgacaagagaaaggacagagtggagatcagccccgagcagctgagcgccgccagcaccgagacccacagactggccgagctgaccggcagacccatgagagtggtgggctggtaccacagccacccccacatcaccgtgtggcccagccacgtggacgtgagaacccaggccatgtaccagatgatggaccagggcttcgtgggcctgatcttcagctgcttcatcgaggacaagaacaccaagaccggcagagtgctgtacacctgcttccagagcatccaggcccagaagagcagcgagagcctgcacggccccagagacttctggagcagcagccagcacatcagcatcgagggccagaaggaggaggagagatacgagagaatcgagatccccatccacatcgtgccccacgtgaccatcggcaaggtgtgcctggagagcgccgtggagctgcccaagatcctgtgccaggaggagcaggacgcctacagaagaatccacagcctgacccacctggacagcgtgaccaagatccacaacggcagcgaggtgttcaccaagaacctgtgcagccagatgagcgccgtgagcggccccctgctgcagtggctggaggacagactggagcagaaccagcagcacctgcaggagctgcagcaggagaaggaggagctgatgcaggagctgagcagcctggagtag

SEQ ID NO: 74540 - DNA, 747 bp, synthetic construct
  misc_feature 1..747: note = Description of Artificial Sequence: Synthetic coding sequence
  source 1..747: mol_type = other DNA
atggccgtgcaggtggtgcaggccgtgcaggccgtgcacctggagagcgacgccttcctggtgtgcctgaaccacgccctgagcaccgagaaggaggaggtgatgggcctgtgcatcggcgaggtgagcagccccagcagaagcgacagcaagttcgcctacaccggcaccgagatgagaaccgtggccgagaaggtggacgccgtgagaatcgtgcacatccacagcgtgatcatcctgagaagaagcgacaagagaaaggacagagtggagatcagccccgagcagctgagcgccgccagcaccgagacccacagactggccgagctgaccggcagacccatgagagtggtgggctggtaccacagccacccccacatcaccgtgtggcccagccacgtggacgtgagaacccaggccatgtaccagatgatggaccagggcttcgtgggcctgatcttcagctgcttcatcgaggacaagaacaccaagaccggcagagtgctgtacacctgcttccagagcatccaggcccagaagagcagcgacctgacccacctggacagcgtgaccaagatccacaacggcagcgaggtgttcaccaagaacctgtgcagccagatgagcgccgtgagcggccccctgctgcagtggctggaggacagactggagcagaaccagcagcacctgcaggagctgcagcaggagaaggaggagctgatgcaggagctgagcagcctggagtag
